United States Patent Application Publication US 2011/0014706 A2 - sequence listing, part 49

SEQ ID NO: 151712 - DNA, 1102 bp, Arabidopsis thaliana landsberg
agtgtgttaccaatttttgttacatctcttgcttttacattttcttgaattagccatggtggcacattcactcgttcctctctcaccggctgctcacgccgccagactctcctctccatcgccgctgtcactgccgtattctcctcccgtcgtccttgcagttccaccaattaatcgcaggtgatcaaatagataactgttggaaaaaattaatcaaagtctaagaatgttgttatgcttgtttatatatataattatatatatatcaaaaccaatttatgaatagagtgaattacaatctttttgtactagattagatttcttaagtgtttgtgtcaatgattaaaaatccaatccgcactgatattttccaaaagcacattgttcatcaacccaaaaggccaaaacactcttctcaaatcaaaaccggctaaatggaccgggctggtttaattcaaatcggtgttaaatctatgttatatttgtaaaattgtttaaatatgtttaccatttggcaaacgtacatatttcttaagtttttactgattaatattttataatattggttattttaaaaacaactattttttttccaaattcgatcagaccggttggaccggatcaacctcacatccactttgactccggtttttgcttttagtaccgtgatcgttgtaagattcctaaacaaaatcataaatggaagaatctctatgcaggacaattttggtggggctaggcggtgcgctatggagttggaacactctggccgctaaggaggaggcaatggcggcagcaagacggccgcctccaccaccacctaaggagaagaaagatccgaccgtgaccggagttcaggccaaggtattggcgagtaagaagcgtaaagaagaaatgaaggcttccattgctaaacttagagagaaaggcaaacctgttgttgaagcaaaaccatcctcttcttcttcagaatagcatccgagcaacaatttaaaccctttccattaattcatctgtctaccaaattcatccctatgatgttaattcactactatatttcggtttattcttatgctgattttgtggtagtaaattcaaaagc

SEQ ID NO: 151713 - DNA, 911 bp, Arabidopsis thaliana landsberg
ggatttagaccaacaagactataaagctcagtcaaaaaaatgtacgacacgaaaactgtccacttctaccgaaaatgcaaatgatcatttcaggtaaaccaggtctcatagattagacccagggacaacctactaagactgaacttatttatatagtaaaaaacaacaagagaagtagagaatgagatctcttgaacacagattcaatctgaaaacatatgattattagcttaactaattaataacgttacatttgaaatactcattaaatttcacctgtccaataaccactttcgtttgctaataatggagccttctttttttttcttttttttactatagagataattttgtacacggtaaaatagaaagaagaaacaaacgacgaaggattaatttcatgaattattcgatagtacttaaactgacgattagtgattggttgttagcaatgagtgattaccaaagaacaacaacgatttggtcctatatatatatatatattcgactctaaattcacccaattatgcaaaatatctattcaatgtttagactaattgaaattggtagaaaagtcacttacatagttgcagagagtttgagggagatggtgaagactacaagaaaacacgtcttttgcgagggaagaaaccgtagctaatccctcgcaaatagacaatcgcgagggaattgcgacgaaccacagttcctcgcaatacgcgtgtcgcaaagtcaaattggtagcatttctctcgcaaattttgcgacgaactaacttactcgcgaagcactcacaatttgcgaaggacaaattcggtagcaaagtagctgcaaatttatggtctcgctcattcttcgcaaattttgcgatggagttgcgaggctccgttcgttccatcgcaaatccttag

SEQ ID NO: 151714 - DNA, 2528 bp, Arabidopsis thaliana landsberg; identical to SEQ ID NO: 20575

SEQ ID NO: 151715 - DNA, 707 bp, Arabidopsis thaliana landsberg
gttgtttctttttgttcgtaggtggcgtgggaatagtgaatatgatcggcaaaatccaacggcatgagtacatgggtttcgagaacctttgcaagtacggtggctgacgttgtacttagcatgtagcttgttaagtgttaaacttataaagcttcattcttgatggcaagacttatggtcttttgattgtgtcttgtgtcattttttaaatttgaaaatcgaattgtataattactacttacttagtagtagtggtactaatttttttcttttcttttttggctgaattatggttggaaatctaatctatgtcaatataagtgattgatcaatttgttagcaactttgttcgtagatggcgtgggaaaacaactttgttcaatatagacgctttcatatgatttgcaagtaaaacaaaaaaaacgtgggtaacggaataataattaaaactataatcatatattaacccgtgatagttgggccgggtattggatccaaaaaccggcccaataaacttcccaatccagatggagacgaacctggaaaacgcggaggtggcgaaaggggactctctctactggcgggtaaacgaaactcgagagaaatggacgacgagaggattcgagagcgagagagacttcagatcgagcaaaatcgtgagcttgatttcgaggaattacaagtcgaagaagtcgaggaccttcccg

SEQ ID NO: 151716 - DNA, 1975 bp, Arabidopsis thaliana landsberg
ttggatcaggggaaacaagcttctgtagatagtttgaagacattaatgaaggaggaggaagttaaaagaaagcttgcaagactcaataatatgaatcagcgtcattcacaatttggtgggacattcacccgggttaccatggtattgtttctcgcaatgatgcttaaaattttaggtttatgtaaatagttatgtaacttgaatgagatttttgataggatggcactaaagctgtactaaagggaataccttctactacggaaagcacaatgcttaagcctcagcaaggtcgtggagccaccgaaaagattgtctgggaacatggaccaatgtctgtgacaaatgacaaagttttgaagttgctgcatgatttcatcaatcagtttatgtcaggcggatataatggtagatgacacaatataacaacctcttttgtttatacttggttttaagtatcctgatgctgatgctgatgccagcgtaccatatctcttagttctgatgcagtcattatgtgaagatattgaaaaggagcatccctccattcaaaatagcgacattgttactttcttccaagttgctcagtccatcacctcttttcagtttcacaagtcttcggcttctagtgtgagtaattgagctactttggttttgtctctcattggtctaagttgctatgcatttatttttccttcatttcgacaaggctgaatctcggtaattttatgattgtctggcttttttttcagccagcaatagaaacagaggaaacctctgaactcactaccaaccagaaggctggagtaaacttttccaagagtgacatttgtgcgccgattgcagcaacaattaacgacagaatgtttttgcttgtcatttcaaaatggcgctgtgcatttgatggtctgaaagaaactaaagattttaagtttctatctgcagcaagctctcttgtgaaaaccatggtatgcaatatgcatgctttaatctcttactggctagttccctaagactgttcttctgccgcctatttgctttttaaatggtttttgtagctcatctttttctttagacatatgcaagtatcattggtttatgagatggagaaatggagaaatgatagtcatttccttctgcattttatccagaaactagtatactcatggtgttcattgttcacgtggtttttccaatgcagctttgcttactagatctggtgatcaaattgctacctgaagactctaaggaagcttttactgtccgcatcttgctgtataagttgttttatgaccagactgatcaagggatgtgtcagttcatcctgaatctggtgagaagttttgacacgcacaagcaacctaagaggttggcctctgcttctgtttcttataattccagaattttgctgtcatgtagtatcttgcaatatgtgatacatataatttgtgtaaacctgtatatgcttgttagacttgttaaatgttcagttgaaaagctcattttaatgtttttctagtatgattgtacttgacagttacctaacttcgtaaattaacttgcttgtggttgctttgttttttgccagtgagcttggagatctggtggaaagcatccatataattgtaggccttatggaaaaccttcaagggcgtggaactttgagggtatgtaactggttagatatgaaactccgattggatgatatacaaagcttagtaacatgtgtaaagtgttactaatgcaatatttcaaccaaatgtctgtttcatgccacaggtttcaaaaaaatcaaggaaagcaagaaagaaaaaacccaagggaaataaggaggccacagtgcataaactgtctgaaaatcatccaagtacttcaaacgaagctagcacagcaaaaagcataccgatggttatcccacagttcaacagaggatggccaatggaaatcctcaaataaccagaggcatgaacatagagac

SEQ ID NO: 151717 - DNA, 1162 bp, Arabidopsis thaliana landsberg
gaaggtttgacttccatgtgcaactggctgctcctgctacctcggaacgtggggccatactgaagcatgagatacagaaacgccttttagactgttcagaagacattttacttaacttagctgctaaatgtgaaggatatgatgcatatgacctggtatttaaatttttctatatgcttttaaatttgccgttgtgctaagaccagaaaagacatttgacagaaatgttgacagactttggaagctgatactatctgtgattttcatgttataaattttattgttcaagcttgctatttcgttttaacttgattatcattctgtccgcagatctacagtgtgctctctttgaattctcttttttttttttttttccaggaaatattggttgatagagctgttcatgctgccattggccggcatctacctttagaatcaaatatatccaaatataatttggtcaaagaagactttactcgagctatgcatgattttgtgcctgttgccatgcgtgacatcacaaaatctgcctctgaaggtggtcgtttggggtgggaagatgtgggaggtgtgactgatattaaaaatgctatcaaagaggtatatgactatgcttactgccatatctgattttgttgccctcattaaaatctaaattagtgtggggtaggaaatcttgccaataaatgttatccttttataattgcaaccaggaagcatctgtttcctgcctctttgtctgttggcttttacttactgaagttaggtcgtgttcagtgggaaacaatatttctgtaagacctgagttgatataagttgaaatatcttggaatgaatctcacggaaataattccactgggctatataagagctactagttatgctaacaactacagtttgaaccagttcttatttagagatataattctagatatgcaactttattgctctttgccatgtccagatgattgagctgccatcaaaatttccaaaaatctttgcaaaatctcctctgcgtttgagatcgaatgttctcttgtatggcccaccggttgtgggaagaccacattgttggtgcagctgctgccgcgtgttcctacggtttatatcggtgaaggggcctgagctgttaaacaaatacattggtgcatctgaacaagcg

SEQ ID NO: 151718 - DNA, 145 bp, Arabidopsis thaliana landsberg
cgaattatataaacttaataacataaacaattatccttccttaatcctattttgtttttacttgattcttcattctcagaaatcttgaccatgaaggacgatcgtcgtcttcctcacaaacgcgacgcctttcattcttgaaacc

SEQ ID NO: 151719 - DNA, 258 bp, Arabidopsis thaliana landsberg
tcctatccggtagattcttagattgcgactataaagaagaagatggctgtatatgaacaaaccggaaccgagcagccgaagaaaaggaaatctagggctcgagcaggtggtttaacggtggctgataggctaaagaagtggaaagagtacaacgagattgttgaagcttcggctgttaaagaaggagagaaaccgaaacgcaaagttcctgcgaaagggtcgaaaaaaggttgtatgagggtaaagaagaccagatag

SEQ ID NO: 151720 - DNA, 423 bp, Arabidopsis thaliana landsberg
gaaacacatctgatggaatatcatctgtgaccatcaacacgaatgattgtctaccagacgcagcagcacctacttcttcctctggaaaccaatccgggtggcgctacgtgccaaccatcacagaggaaatgaaactaacttcagatgtgatgggaagccgtctgggaaaaccgccatcttccatggaaagctcacctcctttcatatggtcaggtttaagttccacaaagatccaaatccagccattatccacaaccgaaataccgctgcagatatcagttttctctccaggtatctacgatctgtcttcatatgaacttaactgggagctctctgagcatgaaagtgcaacatcatcagggacatgccaaggttatccttattaccttactgttcttcagtctgagtgagcttttatagttc

SEQ ID NO: 151721 - DNA, 2085 bp, Arabidopsis thaliana landsberg
tttgcgtatcagaatttggggctgatattgactactttttgttcatgtgagacatgctcaggggattcacaatgtggatggggagaagaactataaggcttacatgtctcatgactactttgatgctgagttgacccagcttggctggaaacaggtctatagagaaaaataacttcacttgcatctctttatccaaaaaaaattaatatagattctcttggtgacaggtagatagtttgcgtaagcatgttcattccagtggacttcacaagaagatcgaactggtcatttcgtctccactgatgaggtactctagacatctgtgattgaaatcttagtataactggttcttagtctaattggtcttcttggttaggaaaactgatttttttattggttaccagtgtaatatttaacttcttatattgtgtgacagattataggttaccagtgtaatagattgtgtgagaccgatcacattgatgcatgcactccactttgataaacctttgacagtgttgatttttgtggatttgctttgctcgtagaaccttgcaaactgctgttggtgtttttggtggagagggctacacggatatgagtgatgtactacctctaatggtagcaaatgcaggaaatagcagccgtgcagctatatcgagtttaaactgcccaccagttattacagaggagtcctgcagagagcatttggtatgccttttcagtgtaatacatatagcctagagacaaactaaaactggacagaattgcgtttatctatcttcacaattatcacaaaacttaaagtgaccatgaaacaaacacaagctttgcagtatttttcactcctactcgcaatgctgtcctatccaaaagcttagatctagtcacgaaataattatgcttagctgcgacaagttttcacttttgtattccatttttgtggacacagggagtgcatccatgtgatcagaggagaagtatcagcgactatcagtttcttttccctgcagttgacttttcactggcaagtaatattgagagtcttagatgtgcctggcattgattattacttgtaatcttctggttgcccagttgactattaacagcatacagttacgccaaacaacttatatgtgcttcaaaggactcctcacatttaaatttgcgttcagatagaaagcgaggaagacaagttatggaaggctgatgttagagaaacgattgaagaacttgcagctagaggaaaaaagttcctgaactggtattttctcttttatatctaaactctagaaattagttctttttaatagattgtgcagaacttgaaacttagagaaacatcctcttagcttcctcgatattgttagcttgataagtagaagttggcatcaaataggatcaacctctgattgaagaagacccttttaatgttccatgtagaaattaagtaatctccattagtcttgttgatttatcgaaaatgttgatggaacagaactttgtatgatggctggttttggatttgtaggctatggacacggaaagaaaaagagatagctattgtgacacacagtggtttcttgtttcacacattgaatgcactacaaaacgagtgtcatccagatgttaagaaggaaatttgcggccagtaagcttccacactcttagttatgaatttttaatctattaggttcataattttcatttgatttgcagctttgctaattgtgagctacgttcaatggtcatcgtcgatagaaggtatgaagtttcttcatttcatttttctttccatgagctttgacgatgtagtaaccatgtatagtctaatgcttttcattcatgtattcacagtatgttgggatcggacagttcggtgactgattatccaggaaagattccaaaggggattgatcttccaagtgatgctgttgtagatgataacaacatcaaagttgagtgattctttatgatggacactgcattgtcttcaacttttctatttatctatacacaaacaccttctttgctgtatgcaactctcttattagtattactattgactatcgagttaaagatctt

SEQ ID NO: 151722 - DNA, 1636 bp, Arabidopsis thaliana landsberg
gtaaaagagaaacgagcagaactagaaaaattaaaagctacttttgtaaggagagcttcggagttcttgagaaactactttgctagtttggtagatttcatggtcagcgacaaaagctacttttctcaggtactaattttataaaattctattccaatatgaagtctagtgattataattctgaatatttatcaccgcatcttttaaacagagagggcagctgaagaggcctgaccatgctgatttgcggtacaaatgcagaacatatgctcgtcttttgcaacatttaaaggtaaaaccgagaaatgactaggtgacatgctaaatgctcaatgcagtacattgattccttgtcttctttcttgttgcagggtcttgataagaattgtttgggaccattgagaaaagcatactgcagctccctgaacttgctccttcgtcgagaggtgaggaaagatatatgtttctttatcaatttgaccgctgactaactgggactcttaattgactaaaaggctgctataacctactgaatgttaatgtgtggataatcagcaaacattttattgtcttccttagctttaaattttcagttaccaaagctttgtttcttcaaaatatacaggctcgtgaattcgcgaatgagcttcgtgcaagcacaaaagtatcacgaaatcctactgtctggctagaaggatctacaggttctagtcagaatgcaaacactgacacctctgcagtgtcagatgcttatgccaagatgctaacaatattcatcccgcttcttgtagatgaggtaattgtcaaccgaatgattttttgtttggcctttagatgcaactgatatatgtacaaaatcctcatgtttcttttttgcttcataatacagagttccttttttgcgcacttcatgtgctttgaggtacctgctcttgctcctcctggaggtgctggcaatgataagaaaagccagtccaacaatgacgatggtaatgataatgatgatttggggatcatggacattgatgaagctgacaagaaacctggtaaacttaaactgcttgccatcagtaaagcattcgctacatattataaggtctaatggttctgaaagcaaaacaatattccaatttttgcaggtaaaaactctccagacctgacggcattgaatgaatctcttcaagatttacttgatggtattcaggtaagatgtcccccaaaataaggtttctatgtgaaaacctagaggtagcgttcatttgtcttactaaataagacttttgtgttcttgtcatcgcaggaggatttctatgctgttgttgactgggcatataaaatagaccccctacggtctatatcaatgcatggtataaccgaacgttatctatctggtcagaaagctgatgctgcaggatttgttcgccttttgcttggagatctggagtcgagagtttctatgcaattcagccatgtagtccgtctactcaaagattgtttagtttttggttcctggcataccattcctactaatcaattcaagttgactttaactgcagttcgtggatgaagcttgtcaccaaattgaaaaaaacgaacgttatgtaagacagatgggtgtcttggcatatatttcaag

SEQ ID NO: 151723 - DNA, 634 bp, Arabidopsis thaliana landsberg
ctgcaagcattggccgaattgtcagcttcaatgcttccagcaaatttgatggagtcaggtgagttttgtgtggttttgcttgtaacttcaatatacctgaaacttatgttttttttcttctagatattctcattatatagattgggttaattctgcagtgttcactgttcgcattagggcctttacctgtctgtatttgttaaatttaactaaattgcattgggtccagaattatctgctcagttgaaggaagaaagaacagaatacgacatggacgagaaatctagcacaccagaagctacttccacaagcagtcatggggaaaaagcaaatgtagagccagatgatagtctccttcatgcaatttcttctgttgagaatgctaacaagagaaagtcaaaaccttcaaggctggtatccactgattgtgatgatgttcccacagggaagctacaaccacaaactagtggcagtttaagaaaacgtaaaccaaaggttagcaagatagttctcttaatctgtgctctttcttctaggcatcttttagctgtaaatgttaattgtgctctattttcaggtactaggggatgaagctccagcagagtttagtcagaacaaatccataaacaagaag

SEQ ID NO: 151724 - DNA, 2070 bp, Arabidopsis thaliana landsberg
gtttgtggtgcatatttgactgcttccatgtatgtggagtattggtgtgaggagaaatttggcaatctaagccttggagatcctgatttttcttatcatgataaggtactaaacaaggaatgcatgttatcgttcctctggtttccatcttttaaccaactaactcattatgcttattgattaatgagtagtaactttatcgtcatctatgaaactttcattggatgcacttttacaaaattataaactcaggtctccatgtaaaaaaggggattggtaataagattttatttgcttggtttcatgcagcagagaaaatggttttgtttgtgccgatttctaatctttccttttctttgttgttaacagttaccggatcatgttgagatacttgtgtctgcaataacaagaataaacgagcctgacagcttatatggggttatacattcaaataaggttcgttctgatactaaaattctttcctacagagtacatattcgatatctcatccacacacttggatcttgcctattggaaatggttgctagtctgtattctcctgaacttggtaacattaacctttttgttatctactctaggaatgttttgagacatctcccgtttcatttgattgccaaaatatattttcgacactgattagtaaaaaatgaagtagctaaatcatattgcagtatttgtttttaatttttttactggtttcttatatgtgaataatactttctgtttctgttacatggatgcaatctaaaagttgtctgctcaaataatcacattcgagcatgagggaaactggactagggcactcgagtattatgacttgcaagcacgttcacagaaaatggtggtgccaagtagcctttctgaaaatctagaggtggaacaatttcagccaacaactagtgcacggcattcggtttttggtgaaggggaggtccagagacaaccgttcaaaggactcattaggtcgttgcagcagacaggctgtatgcatgtcctggatttgtattgccgaggcttaacttcccgagaaggatgctttcagtatgatcccgagttcatcgaattgcaggtatgcatcctgatttctccttttttccaatacatggaagtctcatgtctaaataaggttgttggtaaaacataaatagtccatgggataaagaaacgatatgatgactcaaggatcttgaaggagtagcttagcaccaatatttaccagattagtagtttgtttcgttgcaatattggcccaaattctgttttaacaaataactcatcgaacaagactcagctgtggtacgtaagttgtgttgcttaggtgataattcagttgcaaattaacttcttgcttgcagtatgaggctgcatggcgagcaggaaaatgggatttttcattactttatccgcaaacacattgccaacctctgcaacatgcaaagaacaataattatcatgaaagtttgcactggtaacacatttctactcttatgtaccgatgctgctatacttagccattagatatctttccctgtctatatctcacgattgcaccaaatatgacatcttctcaacactgaatttgccggtggtcttaagacttttacttaaaagtaatatgttacagaggaattttagaatagagtagttgaagtctccatactttcctggtatctggcattgcttcttgggccaagtcttagtattaattttcagttatgattatttaagctttgaacagtcatcaatattacacatgagagtcactaacttccgtcttaggcatgtctttttcgatgatttaacatgtttaatttcccaaccgcttgagagcatcgcatgaaggggattacgatgggttttatggaaacctgaaggatactaagaaggtaatgcatgatttcagtttattatcttagaattggaaggttgcaaccttcagtgtggtaaagaatatttgctttctctccttttcaggagcttgtgttgtccatttcccgtgcaagcgaagaaagcactgaatttatatactcaacagtagtgaaacttcag

SEQ ID NO: 151725 - DNA, 142 bp, Arabidopsis thaliana landsberg
atcgttagattcacctgaagaatcctctatagaggctgaatcggaagcaatggtttacagagaaccgacacagtaccaaaatttgctggcgtctcttggttcatctaacaaggttgttgctgatatgaacaaaagaaggtat

SEQ ID NO: 151726 - DNA, 269 bp, Arabidopsis thaliana landsberg
cctggcctctctttctctcacaatctaatcttcttcgtcttcaaactcaatctagggttctcttctcctctctgtaggtaggattttgaacactcaaatctctcatcgaatttttcttgctcaacgtatcatcgcacaattcgtctctcgtttccgccacgtggataatcgaaatctcataatcccaaaggtaaaacaatcaattctgggattggacatttggatcctaggaatcgtcaattgaaacaatcccgatggcgttatctatg

SEQ ID NO: 151727 - DNA, 302 bp, Arabidopsis thaliana landsberg
gaaagtgctgataatgtcagcccggattctgtttcaccttctaaagatgatttgctggaggaagcttgtaagaagtacgatgaggcaacccgtctctgcccgacgctgtatgatgtatgtattaataggattctatatctgttagttttgtttctggtttatgtaactgcaaatgcaatataatcgctttcagttcataataaatggcttcaacttttatgtatgacgtatgataggcttactacaactgggagagtgcaatctctgatagagcaaagatacgtggtcgcgcaaagcgagct

SEQ ID NO: 151728 - DNA, 1816 bp, Arabidopsis thaliana landsberg
acatctcttccagtctctcactctttgtccctctctctttctctattactctgtctcctctgttccggcgatgttccaacacgcgccttcttccatttccctcatcatcatcttcctcttcaccattctatcacccgtttcacctgaaccggtcacagtccagccattccgggtcaaatcatccccacccgcaaccatacccgctttcccggagcaatccgatttctccggctgcccactcgatttaccagaagacctcttccacggcatcaagtcagcttgcagcggcaaaaagctccacaaaggaaaatgttgccccgtactaggcgcgtggctctactctgcttactcaaccactgctctaagccgttcgatttccgccgccgcaagaaactcatcctcctcctccgccgcggtaacgactcctgaagaagatatgcctttgcttcccgatgactcggagacttgcgttgacggattagggaaatctctgaggcagagagggattgagctcactagaccgaacgagacttgcgacgtcgtttactgctactgtggaatcagattgcatccgttgagctgttccgaggcttttagagtgaatgatgaagggagactcgttggagacgagagagttgatagattagagactgattgtttgagtggaagccacaacaatgctgatggattctcacctcttcttggttgcaacaagtgcttgaacagtctctataaggtaaagtcactaacgttgctgctatatttagaagctgccactgtgaagttcaaatggaattaggttggctaaattggtaaaatgtgtgtgcaaatctagtaacttttagataatctatagataccctgaagcgttgttggtgtttagcttctggattttgtttgattgactgattaagacaattttttggatgagtaatgaggaattgatggactagttatagtagttaactatgtaaggtttagtccaaagtttagaagcccttttttaatgatatttatttggtgtttaaggattagggttttactatatgagtgagtgaagatttggaattatgtagtttaggattctttctgatctatccatcatatggcgaatgatagtaatttgggaaaagttttgttctttagctttttgttctctttctatctgacagtctgacacacatatacgcgctaacagaatccgtgatctccacgcgacgttttgtcttccatcatatgatttcattcttctgcatcttaatcaccaacccaccatagccaaaagcttagcaactagttgccacctttctactttctacaatcctcaatcattactttagtcagcagcaacaaaccctaatcaaaacaaacacttctgcttcattttgcagctaaatccgaagaaaacttcagggacaagaaacccatcaaaggaagaccgaaacagaacagcaaagatgcacaacaaagactgtgtcctcatgggtctcacttggcttctcgctaagaaccgtactgcttatttccccactgtcacttctgtcctccgagccgtcatgctgaaccacgatggcgtgccacgttcatgtgctctcggcagcgacggcatgcctttagccgtcgattcttccgaattctccaacggctcgccaacttcacttcagtatccgcaccacttggtccacttcttactttacagcgttatcacattagtcctaataaggtcgtggtgacgtggcacaccatggttggatttgattgtgacgtggagcacgtggcattacgtggttggttgagagaagtgaaattcagatag

SEQ ID NO: 151729 - DNA, 1048 bp, Arabidopsis thaliana landsberg
  unsure (1)..(1048): unsure at all n locations
tacacataatttacttctttctttataactaccatattctcaatcacaacactcgccactgtttcgaatagatggcttctatttcaaccccttttccgatttctctccacccaaaaaccgcacgatcacagccgaagaaattgcgagttgggacccgtccgatcaaagcttccgggtcagaaactcctgatctaaccgtagcgacacgaaccggatccaaagatctcccgatccgaaacataccgggaaactacggtttaccaatcgtaggaccaatcaaagaccgttggnnnnnnnnnnnnnnnnnnnnnnntgaagagttcttcaaatcacgaatccgtaaatacaactccacggtgtacagagtcaacatgccaccgggagcttttatcgccgagaatccacaagtcgtggctttactcgacggtaaaagcttcccggttttattcgatgtcgataaagtcgaaaagaaagatctcttcaccggtacttacatgccgtcaacggaactcaccggaggctaccgtatcctctcgtacctcgatccatcggagccgaaacacgaaaagctcaaaaatctccttttcttcctcctcaagtcatctcgaaaccggatcttccctgagtttcaagctacttactccgagcttttcgattctttggagaaagagctttcccttaaagggaaagcggatttcggcggttccagcgacggaaccgcctttaatttcttggctcgagctttctacgggacgaatcccgcagatacaaagctcaaagccgacgcaccgggtttgatcactaaatgggttttattcaatctccatccattactctctattggtttaccgagagttatagaagaacctctcatccatacatttagtctaccaccggcgttagtcaaatctgattaccagagactctacgagtttttcttagaatccgccggtgatattctcgttgaagccgataaattgggtatctcacgagaagaagctactcacaatcttctcttcgccacgtgcttcaacacgtgggtggataa

SEQ ID NO: 151730 - DNA, 406 bp, Arabidopsis thaliana landsberg
tgggggatgatcttatgcacatcgattgcagctttgttgacagttacgcataatgagttttgggaaggagtatctcctgtggagtttggtgatttaccagctttgcaagatgctgttactgttgttggttatccaattggtggtgatacaatctctgtcacaagtggtgttgtttcccggatggagatattgtcgtatgtgcatggatcaaccgagcttttgggattgcaggttcgacaacacatttgacatgatatttttccttatctgactaggaagttaagggcacttataaaaatgttttctgtttttgtcttttcagattgatgcagctattaattctgggaattctggtggtccagcatcttaatgataaaggaaaatgtgttggtattgcaattcagta

SEQ ID NO: 151731 - DNA, 340 bp, Arabidopsis thaliana landsberg
ctcgatctcgttctctactatcggtagcttctctagcgacaacaacgtcttgtttctatctccgactccgtctctatcgcttcttcagttgcagactcagttatgtgatatgttgaagaaagaatctgttgagattggtgaagagtatcgtgttgattcttgggttccgttttgtccggtggctcttgatgttcctaagtcacgtatggctgaggctttctctgtgttgagagatttgaagcttccggtgaatggttatggtatggagattggtcttgttgagttttctcctgttcgtgaagtcttctcatttcctcttggtaacactttggagtcttga

SEQ ID NO: 151732 - DNA, 1557 bp, Arabidopsis thaliana landsberg
aacaagttatcagtctttttccttgtttttacgactatgtcctctccaacgtccgcgagcctaaggtgtgtaactcttcctctactttgatttatagagattttacttgtggttcggtgtcttacttgattttgttttagattttgaggcaacttctggaagagacttccaaaatgcgaggtagccaaatgcaggtaacagtttcactggattcatcttgttgatgagctctgggttatgctaattgtttggaatttgaggtgaaaatgaagaatgcacaatactattgattttggctgtaggtgtcgcctgatcaagcgcagttgcttgcaatgcttgtacagatgcttgcagcagaaagatgtattgaagttggagtttacacggtgtttaatctttttttccttttgagtttcctgagtattgttatatatgtcggcttcgattcgtttgacaatgataacgagctcgtgtttttgacagggatattcatcactggctgtggcgttggttctaccagaatcagggcgtcttgttgcctgtgataaagatgctaacgctcttgaagttgctaagaggtactacgagcttgccggagtgtctcacaaggtgagactgaagtcttagccatgcttgtaaaatagtttctcaatattgttgatctcattacaaacaactggttgattctttgatttgtttactctacttaggtcactgtgaagcatggtcttgcagcagaatctttgatgtctatgattcagaacggtgaagagtccaggtaaatacacagtaagcctctttcatataattgctgaaatgattcgacccatttcaagctttacttatttgcagctatgattttgcatttcttgatgctgataaggcgatgtatcaggagtacttcgaatcgctacttcgactcgtaagaccaagatcatagttatgctagtcttcttgccataagggtcaagtttagctttagctgttatatctactgttgcaggtcagggttggtggagtcattgtgattgataatgttctttggcatggatgggttgcggattctacggtatgtatcttacgaacaatcatgctctaaaaagcttatcgaatgaccataatttcatatcgataaattcaacaggtgaatgatgagaggaccatcagcctaagaaatttcaacaaaaaattaatggatgatcaacgtgtaagcattagtatggtgagttttttggattctatcactccctcttcctaaacacaaaaagctcttccaagctcataattgattttttccgcctttcttttgctcataaggtatcaatcggcgatggtatgaccatatgccgcaagaggtaatcatccgtaaaaaccactcagctcgcagtgaacctgttccaagatagaagaagtcttcaaacataaaaggattgatgaagccaagatatccagtctcacaaacactaaagactcatcaacttttcccttttcagtcaaaaataagttgaataattgataaaccaatgtgtgggcctattgggctttgatatgtactgt

SEQ ID NO: 151733 - DNA, 652 bp, Arabidopsis thaliana landsberg
ctctgtgacagaaaaaaactagtgctgtgaaaccaaaaaaaggttccaagaagaagggtacatcactagttacttttagtgaggattgggctgctactcggattcagactgcttttaaagcctataaggttctttgagtttttgttttccaaattcatttgcatgattttacattttttacattggaagtttaaagggatcttgtgttgtggacaggctagaaaaagcttacggcgtctaaaaggaattgcaagagcaaagttatcaactgagaaacaatctgtgaagaaccaagctgtggtcacattgaggtatcttcactcatggagtaaaatacagtcagagataaaggctcgccgagtttgcatggtaaccgaatggcgactgaagaataaaagattagagcatcagcaaaagcttgaggcaaagcttcatgatgttgaggtaagatttttgtgaaagactgaaacatgtttttactttctaaaactgttacttgagatgtttaaagctcatgctgagtttgatataattgcaggttgaatggaatggtgggtcagagacaaaagatgaaatcttggagaggatacttcaaagggaagaagcgacgattaagcgagaaagagccttggcatatgctttctctcatcag

SEQ ID NO: 151734 - DNA, 743 bp, Arabidopsis thaliana landsberg
atgtcggaatcagataagaacgaagcagaggcgaaacccgtggaggagccaccgcagaatcaactagacggtcaagatgttgtgctagagtcagaagatacaataagctgggcttcggcgccgcgatcaccgttaccggaagttatcatttcaagatctgtatccggttcaataccagaaaccaaaaacggaccacaaccactacggagaagcgtatcggaaactgcaagctacacatcagagatctccgacgtatcaacgatcgaacgatccacgtttgatttggttgagaaaatgcattacgtcttcgtccgcgtggtaaaagctcggtctttaccaacctcagggagtccagtcacaaagatctcactctccggcacaatgatccaatcaaaacccgccagaaaaacctcttgcttcgagtgggatcaaaccttcgccttcctccgcgactcaccggatttatcttcctctccaattctggagatatccgtgtgggattcatcgacgggaatcgaaaccagccaattccttggtggaatttgcttcgatgtgtcagagattccgctccgagacccgccggatagtccattggcgccgcaatggtaccgtctcgaaggaggtggagctcacaacagtgatctaatgcttgccacgtggacaggaactcaagcagacgaatcattccccgacgcgtggaaaactgatacggccggaaacgtaaccgctcgagctaaggttac

SEQ ID NO: 151735 - DNA, 1516 bp, Arabidopsis thaliana landsberg
gtataacaggagttgcagtcttctacccaagttttatatgagtcccaaggtgaacagaaagttggtggtcttttgaagctcctatacaagattctggttccgtatctgcctcaagtaatgacggtaggaaagtgtcaagacaagatattgaacttgtaagaacactttgccaccttcctatctttatagactttcttgtaagtttccaatcatctgataaaaaaacatattctaaatgactgatgcaggtccaaaatttgatagaaagatgtctccagttgtacatgagcagagatgaggtcgtaaagacactcttgacccgtgcaaggattgaccctggttttacaacattaggtacaatcacttttgtttatttccatatcaaagtaacattgtgttagtaacttaccctttatgaaaatgttcttttgaattttagtatggcaaaaactggaagaagaaaacgcagagtttttcagggcatattacatcagactgaaactgaagaagcaaatagctgtattcaatcatttgcttgagcatcagtatcacctcacgaagtataatgtacattcaaaagttcctctggtcccaatgcagaacggtattcatcctatggcatctggtaagtctgactccttatatcacttgttggtgtagatggttcaatgatttgtttgtggtttcactattattataacactaaattgtttgcagcgcagtgaacaacatgcccatgggatacccagtactacaacatcctcagatgcatgctcaaggtcatccccatcttgatcctatgagctgtggaatgtcaagctgccatgtggttaatggagtccctgcacctgctaatttccaaccaatgaggatcaactcagggaatgagtaagaactaacttggattgagttttgtttttgcatttttggtgctttagacttaagaactaattcctactgttgtttccggtgcttggtgtagtatggtaatagatacaaccatggctgaaccaactccaatgattccaccagatagtggtatgtcggatatgccagtaagtccagcttctgtggcgtcaagcggacactttccatttgctgcttcagacatgtcagggatgggaatggacacgtcagctcttgactctgctttcacatctgatgtcggaacttcagtagggttacaacttggatcagatggaggagctggaaattctagagaccctctcaggccatttgatcagataccttggaactttagtctctctgacctcactgcagatttgtcaaatcttggaggtaagctctttttatcaaatgccattgcgagtttagctcgaaaaactttataacatacgttggtagatgctccatgtacaggtgtactccatagaatgttgcatatcaatgatcttttactttacagatttaggggctttaggaaactatcccggttctccttttctgccatctgattcagagattttacttgactctcccgaacaagaggccatag

SEQ ID NO: 151736 - DNA, 273 bp, Arabidopsis thaliana landsberg
gaattggaagtcgaaccagacgaaacgaatctatctaaggctcttgactctggccttgacgttccctacgactgcaatctcggtgtttgtatgacttgtccagcgaaactcgtgaccggaacggtggatcaaagtggtgggatgctaagtgatgatgtggttgaacgtggctacacgcttctatgtgcttcgtatccaacttctgattgtcacattaagatgatccctgaggaagaactcttgtctctccagctcgccactgccaacgactaa

SEQ ID NO: 151737 - DNA, 2694 bp, Arabidopsis thaliana landsberg
atggcgattcaaactcagcttccttgcgacggagacggtgtatgtatgcggtgccaggtgaatcctccgtcagaagagactctcacgtgtggcacgtgcgtcactccatggcacgtgtcgtgtctccttcctgaatcactcgcttcttccactggagactgggagtgtcccgattgctccggcgttgttgttccctccgccgctccgggtaccggaatctccggacctgaatcttccggttcagttctcgttgctgcgatccgtgcgattcaggctgatgtgactttgaccgaagctgagaaagccaaaaagaggcagagactgatgagtggtggtggtgacgatggtgtcgatgatgaagaaaagaagaagttagaaatcttttgttctatttgcattcaattgccagagagacctgtcacggttcgttttcactcgctaatttatgcttgtgacttgtgttaatatcttgttagatcttgtgatcaatacacataagccctactaaatcgctaatttatgcttgtgacttgtgttaatgacgtgttagatcttgtgattattgttaataatagtagtagaatcgcgaatttatgcttgtgatctgtgttaatgtcttgttgaatcttgtgatcaatacatataaaccctactagaatggctaatttatgtgtttgttgttgataaggatgattaatatttgaagtagcacactaatgcttatttgcaaccagtcttatgcttgtgatgagtgttaatgccttgttgaatcttgtgattagtacacataagtgtagtagaatcgctagtttatttgtatacttgataatgttgattagcagactaatggatgtattgtacttgtgtgttttgtagacaccgtgtgggcacaatttctgtttgaaatgtttcgagaaatgggcagtaggtcaagggaagctaacttgtatgatatgccgaagcaaaattccgagacatgtggcgaaaaatcctcgcatcaacttagctctagtttctgctattcgtttagcaaatgttaccaaatgttctggtgaggcaactgcggccaaggttcatcatattatccgcaaccaagaccgtcctgacaaagcatttactaccgagcgggcagtaaaaactgggaaagctaatgctgctagcggtaagttttttgtgacaatacctcgtgatcattttggtcccataccagctgcgaatgatgtcactagaaaccaaggtgttttggttggagaatcttgggaggacaggcaagagtgtaggcagtggggagttcatttcccgcatgttgctggcattgccgggcaagcagcggttggagctcagtctgtggccctctctggaggttatgacgatgatgaggatcatggtgaatggtttctctacacaggaaggtttgattttttacattatatttgtcacctgtttcccttcttattgaagtagcctttttccaatttatcttaatatgtgtgaatgtgtgttgcagtggtggaagggatctcagtggaaacaaaagagttaacaagatacagtcttctgaccaggcgtttaaaaacatgaatgaagctctaagacttagttgcaaaatgggctatcctgtccgagttgtaaggttagcatttctttgtgcaaagttcctatatctttctcactttctgcagactctcttcaactttatgtgaataagaatagattatctttattcatcgatatactctgagtagatagttatcatgactcttcaatcttcaggtcttggaaggagaagcgttctccatatgcccctgcggaaggactactaaggtatgatggggtctaccggatagagaaatgctggtccaaagttggagtacaggtttgaatatatagctaacattcctattttgcttcttttcacagttcttttttgttcctgacgtacactcttctggtttccatagggttcttttaaggtctgtcgttacctgttcgttagatgtgacaatgagccagctccatggaccaggtttggtctacttcttaaaatcgtgtgccttttctccatatatagttaccatttaagttaatgatgtgatatattgcagtgatgagcatggagatcgtccaagacctatccctaatattccagagcttaatatggccaccgacctgtttgagagaaaagaaactccatcatgggcttttgatgtaagttccaagacatctcagttttaacagttgtttatctggacccactgataatataggcctacttgaccaggaaggtgagggttgttggaaatggatgaagccgccacctgcaagtaaaaagtcagtgaatgttttggctcctgaggagaggaaaaatttgaggaaagccataaaggcggcacactcgaataccatgagggcaagactcctgaaaggtcagtgtgtccaaattctctacctctgctgttagaacgtttattgtttttttccctttttgccgaatcagttctagtacattatgtatatatttctagactgcctgagaacttttggaatcaggaagtcaatgtttccaaattggttctgctaactataaatatgaaccacatatatccagctctttctttatatagctttattcccgaatccatctaaactgtcattggtattgtgttgatgcagaatttaagtgccagatctgtc

SEQ ID NO: 151738 - DNA, 1977 bp, Arabidopsis thaliana landsberg
  unsure (1)..(1977): unsure at all n locations
atgagaaccatgttcctagcatttgagttaaagttcaatatatactcttctaaagagttgggtttaggagaagcaaagacgacttttttaaggggatgtaatgagagtataacctcgtatgttttagttctcatagatatgtaactatctcaaaccaaacaagagtagaggagagtgtgcgaagtagagaaaggatgtcgacgtgcaaagagggaggaccccacaaaaacacaaagaaaatccacgtaagcaaaaataatagcaataagagatatcgacccatcacttcccaaatcacaagtctcaagtggtctctctctctctctctctcaataaataaatctcaaaaaaatctcatctttcagagagaagcaagacaccaaaaacttagtctgacatcaaaacccaaaatccaagaagaaagaaagagagagtcttcacgctcacactggctttggctttggctctggcgttgtaaacaatgctcctccctctcttcttcttctttctccatctccatctccatctctcttcttcttcttcaatctccttccctgattttcaaatcatcgacgttttacaacctcctctcaccgtcactgcaactcttcccgatttcaacaacacccatttctccgatgaatccagttctaagtacactctccgtcttctccaccgcgacagattcccttcagtcacttaccgtaaccaccaccaccgtctccatgctcgtatgcgcagagacacagacagagtctccgccattctccgccgcatttctgggaaagttataccttcttccgattctagatacgaggttaacgattttgggtccgatattgtttccggtatggatcaaggaagtggtgagtatttcgtcagaatcggcgtcggaagtcctccgagagatcagtacatggtcattgattccggtagcgatatggtttgggttcaatgtcagccttgtaagctctgttacaaacaatccgacccggtttttgacccggctaaatccgggtcttacactggagtctcttgtggctcttccgtctgtgaccggattgaaaactccggttgtcactccggtgggtgccgttacgaggtcatgtacggagacgggtcttacacgaagggaacgttagctctcgaaacgctgacgtttgctaagacggtggttagaaacgttgcgatgggatgtggtcaccggaatagaggaatgtttattggagctgccggtttattgggtatcggaggcggttcaatgtcgtttgtgggtcaattaagcggtcaaaccggtggtgcgttcggttattgtttagtgagtcgtggcactgactcgaccggttcattggtattcgggcgggaagcgttgcccgttggtgcctcgtgggtcccgttggtccggaacccgcggnnnnnnnnnnnnnnnnnnnnnnnnnnnnnnngccttggagtaggaggcgtccggattccgttaccggatggtgtttttgacctgactgaaaccggtgacggtggtgtggttatggataccggaacagccgtcacaagacttcccacggcggcttacgtcgcttttcgagatggattcaagtcgcagacagcgaatttgccgcgggcttccggtgtatcgatattcgacacgtgttatgatctgtcagggtttgtttcggtacgagtcccgaccgtgtcgttctatttcacggaaggtccggttttgacattaccggcgaggaattttctgatgccggtggatgattcgggaacgtattgttttgcgtttgcggcgtctccgacgggtttgtcaataatagggaacatacaacaagaagggattcaagtatctttcgacggagccaatggctttgttggttttggccccaacgtttgctagcggttaagatagagaaattacgatttttgtttgctagtaagtaaaaagcttttgtctcaaaactatatatgtatttgtctctt

SEQ ID NO: 151739 - DNA, 206 bp, Arabidopsis thaliana landsberg
  unsure (1)..(206): unsure at all n locations
atggcccaaaagatcgaagcaattggtgggaagggagggaaacggtgggatgacggtgcgaaccatgataatgtagcaaaggtttacatacgaggtgatcatgaaggcattcagtacatcaaattccactatgtcaaggatggacaatcgtttaatggaacngtaaatggtgttacagcagacggtttcacacagacggtatgttt

SEQ ID NO: 151740 - DNA, 1237 bp, Arabidopsis thaliana landsberg
atggggttcaagaggaagaaagatgatggtgatggtgaggaaatggaatctgatgttcgtggaaagtctactttcagtgggggtgagaagaggaatgtgatacttccttcgatgattaagaacaaagataagagatcaaaagtgtatgcgaagcagaagcatgagaagaaattggagaagcagaagaagattagagctcgtgatgctgctgagaaacgagctttagagcttggagaagaggtaacgatctggagaagcttttttagggattttttatgaatttgagatattaagttggtgtgtgttattcgtttgtagcctccacaaaagatgattccgaagacgattgagaatacaagagaatctgatgaaactgtttgcagacctgacgatgaagaagtatgtttagatttaaagtttgattcatctcaatttttgaattcaattcattgtcgtgttgctaatttagtgtaattgagtttgtagttgtttgcggatattgatgctgatgagtttaatccagttctgagacgtgagattgcacctaaggtcttgctcacaacatgtcgtttcaattccactgtaagtctttttttttggtaccattgtttcataagagattctacagatttgtttgtggttttctgattcaagtaatgttgttggattgcagagaggacctgctttaatatctgagttgctttcggtgataccaaactctcattatcaaaagagaggaacctatgatttgaagaaggtgttgttataagtttcatagcttccttgtttctctataaagttagtctttttgcaactatataaccttgttagatatggttctgcagattgtagaatacgcaacgaagaaagattttacatctcttattgttgttcatacaaatcgtagagaacctggttagttttcactgagtttcaagttttgtgctctctactgtatatgctttgtttcaagcttttgctatttcatatgtagatgcgcttcttatcatcggtttgccaaatggtcctactgctcatttcaaattgtcaaatcttgttctaaggaaggatattaaggtatgtaagctaaccattactcttctctacatcgagtgtagattagtgatcactgaattggatgttaaatgtaactgcagaatcacggaaatcctacaagccatcaaccagaactggttttgaataactttacaacgcgtttagggaatcgtgttgggag

SEQ ID NO: 151741 - DNA, 1845 bp, Arabidopsis thaliana landsberg
gaccaaaaacttcagggcctgtatgttatccagaagggacgcgtaaaaatatctttcggtacagaggtgttggagagtcaaaatgtttcaagccttacaactggaatcactaacgagtatgacaatcttgaaatcggaacagaagtctccatagaaaagcatgaaggaagttactttggtgaatgggctcttcttggcgaactcaaagattccttaagtgtggttgcagttggcgaagtggtttgtgtggttttaacaaaagaaaatttcgagtcagcggtcggccctctgaccaatatttcagatgacggtcccaagtatggcattcttcatgcttgtatttgtttatttttgtggttatcgttgactgattccatataatgtttttttttcaggacaagacattcttcattcgagctgtcaaaggaatctgcaaaagttaccgataccacagctcttgctaaagccactcttgcagacctggtaagcaatcttactctacatcaatcttaaaacggtgctcctcaacttacactattttggtttatccaggaatggacaacatgcttgagtacaacagactgtagtgagattgggctcgtgcatttgaaagataaagaaaatttgctcagcttgaaaagattttcaaagcaaaaggtgaaaaagttaggtaaagaggcacaagtattgaaagagcggaatctgatgaagaacgtaataaagccctcagcttttgttcccgaaatcttgtgtacttgtgtcgatcaaacatttgcggcaatcttactgaacactactcttgcctgtcctatctcttctctgcttcactctccgcttgacgagtcatctgtccgtttcattaccggctcacttgtgtctgccatagaagacatacacaaggtcaaaactttttctttaacatttctggttattactaagatttcgtggtctgaaactctgttcttttcttgccgttttggaatttctagaacgagattctcttcagaggttcatcccccgagttactgatgttggatcaatccggatatctacaggtctgtgtttttccgttacatggctctttgggtttttgtataatccattacttccatcagatcgtaattttaatctcttgattgtagattgtagacttcagattcgccaagaaattgtccggggaacgaacatttacaatctgtggaaatgcagattatttagccccagaaattgttcaaggcaaaggccatggttatgcagctgactggtattgatttccctctatttctcttatgttttcttggcttaatatttgaagattcttaccttttttgtttttttgggctgattcaaaaaggtgggctcttggagttttgatctactatatgctagaaggagaaatgccattcgggtcatggagagagagcgagctcgacacgtttcagaagattgcaaaaggccaactaactttccctcgagttctaagctcagaagctgaagatctcatcacaaaggtctcatctttaagttccaatttcacatctattaaaagtagaaatctcctgtttctcattgtcttacccgcatcttcaaaactcttgtgtagatgctcgaagttgatgaaaacctgcggtttggtagccaacgaggtccagaatcaatcaagaaacatccctggttcaatggtcttaaatgggaagctattagtaaccgccaattacaagttcctcaagagataatctcgcgaattcatcaccatctggagaatgataacgttctccctctagaaacttctaaatcgcttgacacaacagaagatcaagatgctcaaaactggcttgaagaatg

SEQ ID NO: 151742 - DNA, 380 bp, Arabidopsis thaliana landsberg
cccaaggtttcatcgtgctcgtatgggtctcaatgttccgagcaatattgatgtttcatagcaaaactcacatctttgaagagaaaaggtggacgaggatctcagttcaggggatctccatccatcttcacttttgtagtgtaaatcatttcctgaggaaagctagctaatacttcttacctggtatctgttcctttcagccaatggaaatatatgttgatgatgaagccaagttgactcttcatggacttgtccaggtacgtttaactggtttgaggtcttcgtattcaatgtaaatatatgttgttgtttgatacttaagtgaccttttttctgttctactgtaacagcactacatcaaactgagcgagatggagaag

SEQ ID NO: 151743 - DNA, 874 bp, Arabidopsis thaliana landsberg
  unsure (1)..(874): unsure at all n locations
gtgaattttgtaattggaatagcttacagtttagagcagatctattagcgcttggattggctgtcaccaatctattgaccggtttagtctggttatcgattcgacctaagaccattacaccagtaagatttctaatccaagtttatgaatcgaaactttggatgatttggcaatgcaaatgtgattcttggttttgtttgatatcaggtaaatcctgaaggtgtggaatgcaaagttttagaatctgatcttcctgcatcgatggtttccgaattgttatggtaatgctcttctttgtatctcttattagaatgtttcttatggaaagataagtagaaatagaatctaacttttgtctattctcttagggcatgggaatctcttaaggtagcaacatgttgtaagtctctggttgttgtctacaatggaatttgccttattcaaattgggatggtagctgaatcttcagaagataagaaaggagtcacagtaaacactgataagctgatgcaaggatcggtttacagaggagttatgaaatccaaagcacgtaagtagtacggatttttgtttatgttttttgtgtgaaattataaatttatctaagaaaagaacaatgattgtttgtcagagagttacttggccaatctttctctttatcctgngagatcagagctgccatttctacctgcaaatacacaggtttgttgagagtttgagtgttagtcttttgagtgagggaatgatgaaaccgtgtgatgaatacttgtttttttttttctctactaggcgggtgatttggcagccgcttgtagataaaggaatcgcagtcattggtggaaatacgattagaggcttgacgtcttcagaccag

SEQ ID NO: 151744 - DNA, 794 bp, Arabidopsis thaliana landsberg
ggagtctcactacttgtggattactattattacaagagatggacatcatcagttttgaatctcttgatatacaatgtgttagggggtggagagagccatctctatgggactgaaggagcgttattttatataagaaatggatttaacaacttcaacttctgtttcattttggcaatgttgtttgtcgcaatatatcctgttatcagaaggaagtatgaccgtgccctgctggttgtgatttccccgatgtatatttggctggcgttcatgtcacttcagccccacaaagaagaaaggtgattttctaagatctttcatcttgtaattttttgagcattcgtatggtggcttctatatcgttgaggaaaccagttttatgatacttttacaaaatcacggtatgcaacaaacaatgtttttgattgtcaattaattgactgcaggttcctttatcctatataccctcttatttgtgtctctgcttctgctgttattgagaacatccctgagctgttccgggaaaagtatagctcacgtgaaagtcttctggtgacagtaagttccaacttacaatatctcagtctctgatttatacctttccgcaaattgaaaagaagtagattgtacgattctcacatatctgtttaatacgcagataaccaaatacatgcgacctgtgattcttggttgtatcttatgtgcttcacattctcgcacatttgctcttattaatggctattccgctcccttggaggtctacaaactactggagcatcatgatgatgcaggaccag

SEQ ID NO: 151745 - DNA, 1814 bp, Arabidopsis thaliana landsberg
caacactacaaaaaagaaacacatactctctctcaattcatatttcctcacttttgatcagtgtgatcacgtagatcgagtgccttgaaagagaagaaagaaacaaaaaaaagaaagagaaatgggataccttttcgaagaaaccttaagctctaaccctaaaaccccaattgttgttgatgatgataacgagttgggtttgatggccgtgagacttgccaatgctgccgcctttccaatggttcttaaggcttccctcgagctcggtgtctttgacactctctacgccgaagcctctcgcaccgactcgttcctttcaccatctgagatagcgagtaagctaccaactacacctcgtaaccctgaggctccggttttattggaccgtatgcttcgtctactcgctagctattctgtggtcaagtgtggtaaggtctcagaaggaaagggtgatagggtctacagagccgagccaatttgcaggtttttcttgaaggataacattcaagatattggatcccttgcttctcaagtcattgtcaatttcgatagcgtcttcctcaatacttggtaattttcattattcatggatgtcttataatttatcaagaagtggctttatattcaatgaatcttacctatcgatacataaatttcagggcacaattgaaagacgtggttctagaaggaggagatgcatttggccgcgcacatggtggtatgaagctctttgactatatgggtacagatgagagattcagcaaactatttaaccagaccggttttaccattgcggtggtgaagaaggctcttgaagtttaccaaggcttcaaagatgtggatgtgttggttgatgtgggaggtggagttggtaacactcttggtgttgtaacatctaagtatcccaatattaagggtatcaattttgatctaacttgcgccttggcacaagcaccctcttatcccggtgtggaacatgttgctggagatatgtttgtggatattccaaccggagatgctatgatcttgaaagtaagctcaacaacttattatttatatgttttggaagtgtatacatgttactagtactttatacttatgtgtttaaatatgtttttacagcgtatacttcatgattggaccgacgaagactgtgtgaagattcttaagaattgttggaaatgactgccacaaaacggtaaagtggttgttatagaattagtcactcctgatgaggcagagaatggtgacatcaacgcaaacattgcctttgacatggacatgttaatgttcacacaatgttccggaggaaaagagagatcaagagctgagtttgaagctttggctgcagcttctggcttctcccattgccagtttgtttgccaagcttatcactgctggattattgagttctgtaaataatatgtctaaaattataattaaaactaaatcctcataattgttaatttcatctgtatttcagttctttgtttgaaatggtcatgcctctctttgtctttcgagtagtatgaaataaaaataatttttttttgtttatgaatagtacccttttattttatggtgtgttggtaaaatagtcattttttcaaacttaattaagaaaatagtcattttactattcataattattaagattattttaaaagtagcaacgatcgatatgatgatataactatttttgctaaatcaaaggttgtgaccgagaaacaaaaaggaacgttgtgactttcctggaacaaacctataaaccaattcaaacaagactaacggccgaaaaggcactggctgcctga

SEQ ID NO: 151746 - DNA, 330 bp, Arabidopsis thaliana landsberg
ctcgaggatcttcaagaacgcttgccctgacgcctatagctacgcttatgacgacgaaacgagcaccttcacttgtaccggagctaactacgaaatcactttctgcccttaaaaatcgaagcttcgaggtagatatacagtctggtttaattatctctcacgtttcttttgcttattatgtacggaaagataaataaggaaagctgatgactatgaatcatcgtcttccacttttaagcttttttagtgagtattagtcagttgttacactcagctgatttgtttacaaagaaataaaacaaaatgattgatctacggatacttatctat

SEQ ID NO: 151747 - DNA, 1215 bp, Arabidopsis thaliana landsberg
gtgctggaattttgaataactttgcagaggtagccttcaatttaggatcggagttcgtaaataaggtgatttagcgaagatgatggtcgaagatcttggtgtggaagcgaaggaagcggctgtgcgagaagtggcgaagctcttacccttacctgaacttttgcagtctatttcttcaatcaaggccgattacatcgctcgtcaacaggtttgacatcttgcttttgaattgcaattggaactgaattggcttttgaagtatcatttgcactgagtattagtgattcctgagcaatgctagatttgagttgttaggttttgatatgctattgttatcttttattttcgattttctggaaatttttaatgacctgactagtgatgcttgctgtttcaatcaggcaaatgatgcacagctcagtactatggttgctgagcaggtacagctttaatctggccttctttgtactttaatgtatttcgacttttttgttgttcttaagtaatagctgttgacaaacttcaggttgaacaagctcaagctgggttagagtcactttcatcatctgagaaaaccatttatgaactgcgggataatttcatttctatcgacaagtatgtttttgcttgactagagattcttgaagctgagttaccaacttttgcatttctttccctctaacttctcttcttgtgccacaggctttgtcaggaatgtcaaactttgattgacaatcatgaccaaataaagctgctgagtaacgccaggaataatctaaacaaaactctaaaggtagatatgccgatgagcactgattgtattgcttacagtatttggttcagtgttgtccttctaacttattcttgaacgcaaatatatatagctctgcatggtcgtctcagatgtttaaatgctttccaagtttttgtcaacttatttttacctcattctcttttttcaaggatgtagaaggtatgatgtcaatttctgttgaagctgctgcggctagggattctttgagtgatgataaagaaatcgttaacacttatgaggtagcatgagttcctcttcccatggattccaggcatttctgactgcatcactttgaaaaaaagaacgtttggtgtaagacataatattctgtttttcttccatagagattaacagcacttgatggtaaacgaagatttgcattagcagctgctggagaggag

SEQ ID NO: 151748 - DNA, 500 bp, Arabidopsis thaliana landsberg
attgccagttaaaagcagattactggttcgagtcagatgcagaggtgagcctcacagatttatggagcaacttcaacagctgagaaacaaagttgtttgaaacctcaaattcccaattactaggatgaggatgaattttctgttacattttactaccccttttgagcctgaaatcctaatagatttttttccttataaaaataaaagatgcaatattttaaggtcattcaagggatgtggcaattatgtgaaaaaacttgtactctaattagatatataattatacttaatggccttttgcatgtcaatgcatacatctgtttttgtaacatgtgtttataatgaactttgaaattaatctttttgacactttgggtccataggttacaatttgcatgttcaaacagaaacaaagcatcatttacgaaccacctgatttggacaatatcaaacgttacttctgtcagaatcatgtcaaaaaacgaatggttccaaattga

SEQ ID NO: 151749 - DNA, 871 bp, Arabidopsis thaliana landsberg
ctttttccaaacaaaaaaagttactcagagggcacgatttgagcagaatacgcggtgaggacaccgacgacgattctacttcttgtcggagctatcctcttctccggcgccggctatgtcagatccgacgcctacgaccaccgttacaaggaaggagacaccgttcctctctacgccaacaaggttggcccatttcacaatccaaggtaaacggaaacatctattctagatctgagctccatacctgaggttgtttcccattcttaagcctgaggatgataaattgatcgtttattgttgaatctgttgctattgaattgagtaacgacattgataactgagtacactgcaaaatgcgtaatgttaaaaccaaagagtgaaagaagaaactacatttggaatgtttttcgtttatgtgatggatctgtcttagatttgaatactattatatgactgattttggttttgttcaatgatgattgcagtgagacgtatcgatattttgatcttcccttctgtatcccaggtatgcttatatctttactagcttaatcacacgatttgtgtttaagccgcaactgatttgtgtgacatctcctgattcgatcatcccattattgaatatggtttatagagggtgtgaaagagaagaaggaagctcttggcgaggttctaaacggggatcggctagttagcgctccatacaagctcaacttcagagatgaaaaagagtctgaggtatactgcaacaagaagttgagtaaagaagaggtcaaacagttcagaaaagctgttgagaaggactactacttccagatgtactatgatgatctacctatctggggattcattgcaaacgcttgacaaggat

SEQ ID NO: 151750 - DNA, 2256 bp, Arabidopsis thaliana landsberg
tcgatttctcttcttcagttgtttcccatcgtggaaatccttctagctttggggtcttttaaaataatccccttaaatgcgtttttcttctcttccaaattcccgcaaataatcagccgccgataagataatcatggggaggagtaagatttctcttcttcaatttttattctttaattgattcaatttgcaactggatttgtttgttttagggttttaattgattactaatttactatgaaatctcttatataaccaatttctgttttcgttaacgcttttataaatttggatgctttgattaacttttgctggaattgtttttttttttgcagaatctcagcgtaagaacgcgacaatgtttgatagtgatgatgatacaagtagtgtaagctcttcctccaccatgccatctgagagattgttgaatcctggtatggatgaagttactgttctcaaggatgctttgttagatcaatcccttgatgctctctatgagaaaaggtttgtgtttctttgttttctttttgatgtgcttttgcttgattttgatgcaatactgatatttttggatttgaaggagctcaactagagagcaagctttggccaccattgttgacgcatttaacagcgacttgcagtatgagtttgttgaaaagaagtaaatatctgacactctttcctattttagttttatcaatccacgagtcttgtgtagtttaatcaatcatacatcatacagaatttaaccatgtttcttcttaatgagtgcaggtttgccactttattgcaccagtgtttacactgcaccaagaaagggtctactaaggagacttcattagcaactcatgtcattggtgagtctcttagtaatttacaattcatgcatttttttttgtcaagtcatattaacagttaatcgtggtggtttacagggttgctagcgttaactgttggactcggggatcatgcacaagaggttttggaagaatctgtcactcctctgtctcaagcccttaaatctggtcgtgaaatcttgaaaataacttcggtatggatgatttgataatcgatcagtttgtcattactttacaggtttcttaataaggttcatcttcgattcatggttgttgatattctgccttttcattgtagatacttgagtgtttagcagtcataaccttcgttggcgggaatgatccagagcaaaccgagaaatctatgcagattatctggcaaatgatccacccccaactagggtctaatgtatgcatcttacttttttctcattttacaagccttttcaatctgatttattaagaaagtaggctcacatgaaggttggcgttttttttgtaggttgtggcaactaaaccttcacctgctgtaataagtgctgttgtatcttcctgggcttttctgctcacaacagttgatcggtggactctaggtcctaaaatttttcaagagtaagtggggcatcatgcttttcttcgatctaattttacttattcatagactgattgaatattaatgtcattgcaggactgtaacttatctctctacattgttggaaaaggatgaccgatctgtacgtatagctgctggtgaagcgcttgcagtgatatatgagttgggaactctagagaagttcgctgccgaagtcaaagggtctgctaatggatcagtgaaagaaggaggtgtctctcaggaagcattgatgcacatgcatggcttgaaagctaaagtcactaaacaagttagagagctctctgtagaggcaggtggtaaaggttctgctaagaaagatctcaacacccaacgaaatttgttcaaagatcttgttgaatttcttgaggtatatcttcttcaccttttctcctgttgaggtttaagttagactattctgataggattttatatatgatgtgttttaatgatgattaggatggatatgctcctgaaacctcaacaaaagtcggaggggactatttacagacgtcaacgtggtatcagatgatacagttgaattatttgaagcatttcctagggggtggctttattaagcatatgcaggtctgttttcttatttaccctttcttttcaagtgtcgaactctcttaagttttctttgttataaagctgacgctgtactgttttatacaatttggttatcaggagaatgaattccttcatgatgtatttagtttcactccaaagaagattggtggaggaaagttgtctaatgaccaaaag

SEQ ID NO: 151751 - DNA, 1000 bp, Arabidopsis thaliana landsberg
gtcgctgatataacccattcactacaacaacctgcaggcaagaaggtatgatccttttaaaaagtaactttttattttattttgaagccagcaataaccaaatagtttgaacacgaacaatacattcttatgtagttggatggtggtggtgttgcaagtggaggccttcgcgagttaataccatgcattgcaagaacagctgtagcagttggcgtcgatggaattttcatggaggtagtatataccttgtttgataccacatcgttttagaaattttatcaagctcattggattattggtcacatagttctggattcgttgttccaacttgattatgatcaggttcatgatgatcctctaagtgctccagttgatggtccaactcaatgggtgagttttatgtcctactcaatgtttacgaaagtatccatctcgttcttgcaatggtctgaatattcttgtgtttttccattgtcaaagcctttgcgccatctagaagaactcctggaagagctcattgcgattgcggtaagccttttaaatccatgaattattactctttggttcacatttttgtttcagggatctgtctccttgaacaccattaacaatggcaagatcttgactcttttattccgcagagggttacaaaagggaagcagcggcttcaaatcgaccttacaccctaccgtgattaaaatcaaaggctcagtgatcgcgaggttggtgacccaaacgggcatatatgatacgactttctcatcatttaaataatccccacaaaaaaactgttattaatcttctcactttcagtagagactagttgcaaaaagtgtgaacgttttaaagaagcaccatgttaatgcgtcatctgtcatcactgttcttgtttacaagaagttaacagatcagagattgcttctgaagaactgaaatagttgggcttctcttatattggtccggcaattttcttattcatttgtctgaaacttttaggtct

SEQ ID NO: 151752 - DNA, 503 bp, Arabidopsis thaliana landsberg
atggaggtaagaagccttacttacgaccatcaccatcaagagcaacaaacgaagacaccaccaccaccaccgtcattaccacaacctcaatcgccggaagaggatttaacggcggatcatgcacaaccaccaccaacaacacctcatctctagacggagtccccaaaggattccgattcagatccactcaacagcagcaacaacaacaagatcctagtcctagccgtcgcggcggtgatgtactgttacagtggggacaacgaaaacgatcgagagcctctagagctgagatccgatccaccaccaccatcacaaccaccgccgatgattcttcgtcttcttcaggtcaaggtaagatacaatcaaacaaaccgcaaagaagatcgatgaatccttctatgccacctccaccaccagctccgccgattttctcgggccggagtacaaaccctagaaacggtttcgttatcggcaaggaatctttcttcccttccaggtttagc

SEQ ID NO: 151753 - DNA, 2857 bp, Arabidopsis thaliana landsberg
gttagtagacgccgggccagttcttcatctataaacagcttgaaggatgaagccaagaatagcggtgaatctgtttctgccttgatgaatgaggaatactataaggaagctgagattgcttccatcacagacgacgacatttcctcccactcctccttgacagtctcatcttcaactttagagtctaatggtggtttttctgtgcgaaccgaagaggtaagagatggcaatatctccatattcttctgataagttatgaaaatgaaatgtttctcaatgctttgatgtcttatttgcaggaagaacatgagcgaataaacaagaatcccagagggaatggccacgagagatcaaaatcagtgtcagagagcagacaaagagaaattgctgaccagattccgtcacgttcctcgtcagtagatctatcttctgtgtttcatctcccggagggcatttctgattctgcgcccaacacttctttgtctgggctggagcactgtgctaatgtgtttataactgataccaatgagagctcgaagctgtcaagtaacggtcagcacaataatggagaggccaagtctatgcctttacaaattgacaatctttcggaaaatgcttcgcctcgagcctctgtgaatagtcaagatttgaccagtgatcaggaaccagagagtatagttgagaaatcaagaaaggtgaagtctgttcgatcatcctcggatattaaccggagcaatagccggttgagtttattcagtgaaagaaaagaggctaaggtgtatccaaattctacacacgacacaactttggagagcaaaatcacgaacttggaaagtagagtaaagaagcttgagggtgagttatgcgaggctgcagccattgaagcagctctctactccgtggttgcagagcatggaagttcatcaagtaaagtccatgcgcctgctagacgtcttttgaggctgtatcttcatgcttgtagagaaacccatctctcaagaagagccaatgcagctgaaagtgctgtctccgggttagttcttgttgccaaagcgtgtggaaacgatgtccccaggtatggtaatatctttctttgcataattactattctgagtgaactttctcagagttaaattttgtccgtgaattgcagattgacattttggttgtcaaacactatcgttctgaggacaatcattagtgatactagtgcagaagaggaactgcctgtttctgctggtcctggaccaagaaaacagaaggctgaaagagaaaccgagaaacgatcgtccttgaagtggaaagattcccctttgagcaaaaaggacattaagagttttggtgcctgggatgaccctgtaactttcataacagcgcttgagaaggtcgaagcttggatcttctcacgcgtcgtagaatcaatttggtggcaggtaatgttgctctgttctccctgtttcatcttttcattctctgaaccaattataattcacatgctctttttctttggttgcagactttgacaccacgtatgcagtcttcggcagcatcaactagagagtttgataaaggaaatggctctgcatcaaagaaaacttttggtaggactccgagtagtacgaaccaagaactaggtgacttctcattagagctttggaaaaaggctttcagggaggcacacgaacgtttatgccctctgcgaggtagtgggcatgaatgtggctgcttgcccatacctgcgcgtctggtaaacatttctccttttgagtttgtcacttttggaccttactcttgatttcacaaacgaatgtccacgatttgtaacgcagattatggaacagtgtgtggctcggctagatgttgctatgttcaatgctatccttcgtgattctgatgacaatttcccaacagaccctgtatctgatcccattgcagacttgagagtcttgccaattccttctacaacatcaagttttggttctggtgcccagctgaaaaactcggtcagtgtactcaactcaatagcttggcaatgcttattatactgtggtctctgtaaagctcatgcatttctaatttcaaacagataggaaactggtcaaggtggctcactgatctgttcggcattgatgacgaagatgatgacagcagcgatgagaatagctatgttgaaaaatcgttcaagacattcaatcttctcaaggcgttaagcgatctaatgatgcttccaaaagatatgctcctcaacagttctgtgagaaaagaggtgcaaatgcaacataaaactcacaacacttttttttatatagtcttctttcttttacttgatataatatatttcttctcattgtgaaggtttgcccgatgtttggtgccccgttgattaagagagtgttgaataattttgtcccagatgagttttgccctgacccagttcctgatgctgtactgaaatctcttgaatccgaggtgagaccatttttataatgatggatctaaggctaagcagctaattttgctaacggaaacgtgatggcccttgtaggaagaagctgagaagagtatcatcacaagctatccatgcactgcaccttctccagtgtactgtccaccttcacggacttcaatctccaccatcattggaaactttggacagcctcaagcgccgcagttaagcagaatcaggtcttcaattacaagaaaagcgtacacaagcgatgacgagcttgatgagctgagttcaccgttggctgttgttgttcttcaacaagcaggttctaagaagatcaataatggtgatgcagatgagacaatcaggtatcaacttctcagggagtgttggatgaacggcgaatga

SEQ ID NO: 151754 - DNA, 1285 bp, Arabidopsis thaliana landsberg
aaatctggtcagcgaatcgcgtatacgctcgcgctcgagttccagatggtcttatgctttgctgccacttgtgtctgcctcgtggggatgctagccgctggcgatttcaaggtaaaacatgctttgtttattttcaagaatagggtttgagaatcaataattgggatctttgactttcttgatccaaaagcaagataaagatttcatttttaagccttttaaaccaagagggtacctctggattgtttatggaaccctaaaaggaagatgtttgaattttgtttgggaagaaagagtatgctttttctaatcaagaattgggatctttgaatttcttgataggataatgtttcatttggcaggtgatagcaggagaagcaagagattttaagcttggagagtctttgtactatgtggtgattgtgttcacggccataatctggcaagcattttttgtgggagctattgggttgatcttctgtgcatcgtctctggtctctggaattatggtcagtgctctgcttccggtgacggtgatcttggccgtcatttgcttccaggagaagtttcaggcggggaaaggtgtcgctttggctctctccctctggggatcagtctcttatttctatggacaggttaaatccgaggagaagactaaggctcaggatacacaactgtctcagcttccagttactgattatgtagcttaaaagcacataacatgttacaatttatttttgttaatgatgtctgtaaaatctatgagctgtgaggtgctcattgaatcaaagacttgatctgaaatcttttaagcaaatgtccatccattatatggaacaatgtcattgtttatttcatttgacgaactggtccagtattacacttcacacgttttatctttaatacagaggttactgaaatgtaaaagaaactaatactagaaagccattgacgatggacagctacgagatgtcgagatctcagttccttgtactgtttttcaaccattctaaatacttgtcgctcccaccagtgatgggcaacgcaattacttctggcacactaaaggtaacaagtaaaccatatttattaacttagcttgtgtgattgctaaagaaaaggcaagacactcgcattactcatgtttttatatgcagaatacgtcatagaacaatgcttactcgtattcgtgatttgcattgacatgctcggttagaggttctagaagggattgccttgttttgattatcaggagctcctctgaatcactctgaacctgaagcca

SEQ ID NO: 151755 - DNA, 4026 bp, Arabidopsis thaliana landsberg
  unsure (1)..(4026): unsure at all n locations
atggcagctgtaagtcagcagttttttttttaaatccaggagaaagtttataacattcttatttccctgtttcatgactaatttctttttgacagaatgaagaatttacgggaaatctgaaacgtcaactcgcgaagctctttgatgtttctctaaaattaacggttcctgatgaacctagtgttgagcccttggtggctgcctccgctcttggaaaatttggagattaccaatggtgctccccctctcacttggttcagtgaaattatagttctaattaagttgttttctctttgtcaaattatattcttacatcatattgttgtctgcagtaacaacgcaatgggactatggtccataattaaaggaaagggtactcagttcaagggtcctccagctgttggacaggttcgtttgtttggtctttataatttcattgcttttggtatgttctttaacttttattctgatccttttttcacataggcccttgttaagagtctccctacttctgagatggtagaatcatgctctgtagctggacctggctttattaatgttgtactatcagctaagtggatggctaaggtgctcctgttgtaattgtgtagtccttttctagtgctcatgtaaataaaatgtgtgtttagcataattgttttttaatctatttgcagagtattgaaaatatgctcatcgatggagttgacacatgggcacctactctttcggttaagagagctgtagttgatttttcctctcccaacattgcaaaagaaatgcatgttggtcatctaagatcaactatcattggtgacactctagctcgcatgctcgagtactcacatgttgaagttctacgcagaaaccatgttggtgactggggaacacaggtagctacttttctgctcttcaaatggttttttgaccttggttctttttttgtaattgttgtgttccaatatttatcagcgaaataaaagctgcttttattctgcagtttggcatgctaattgagtacctctttgagaaatttcctgatacagatagtgtgaccgagacagcaattggagatcttcaggtcagctgccttctataatatgccctctcaagctttacagttttattatgtagcaatattggcataatatgcttgcatgtgaagaaccagagcaatatagtttctaaccttagatgtcgtttgataggtgttttacaaggcatcaaaacataaatttgatttggccgaggcctttaaggaaaaagcacaacaggctgtggtccgtcaacaggtaaataatcactagtgtgttattctgttttgcagtgtctcaatttgcagctgcctttggttgcaagatctaaattactcacaagtcttaatatattcctttctatggcgcagggtggtgatcctgtttaccgtaaggcttgggctaagatctgtgacatcagccgaactgagtttgccaaggtttaccaacgccttcgagttgagcttgaagaaaaggtaaagtaatagctggacctgtacaacattatttgagatataatggaaaaagagatacatggatgggtaatgaaaaatgcattgatttaattcatgacagggagaaagcttttacaaccctcatattgctaaagtaattgaggaattgaatagcaaggggttggttgaagaaagtgaaggtgctcgtgtgattttccttgaaggcttcgacatcccactcatggttgtaaagagtgatggtggttttaactatgcctcaacagatctgactgctctttggtgggttatctttacgttagttatttcatgaaatccggattttagtagtgatcttttgaaaatagatctcacatgttatgactttccgtgtctgtacttactgaagtttgatctgaacttgcatattgttcaatggattgtctgctggtgctaaattttgcctggcccaggtaccggctcaatgaagagaaagctgagtggatcatatatgtgaccgatgttggccagcagcagcactttaatatgttcttcaaagtaggtttgatgaatattttattgtttttgacgtcttgtgaaatattttctattgattgaaactgtcagtcgtaactgtggttatcatgttactgtgaattaggctgccagaaaagcaggttggcttccagacaatgataaaacttaccctagagttaaccatgttggttttggtctcgtccttggggaagatggcaagcgatttagaactcgggcaacagatgtagtccgcctagttgatttgctagatgaggccaagactcgcagtaaacttgcccttattgagcgcggtatctaactttgtcttaaaactctctacgttttgaaatgttgaaccatcacttgttgagttattatttggtctattaatccttacatgttttttctctgtttaggtaaggacaaagaatggacaccggaagaactggaccaaacagctgaggcagttggatatggtgcggtcaagtaagtatcatctctattctactgctgataatagtgaattctattcagtatcttccggttttcggtgacgttttataattaaggctgctcaattatgatgaatgatttgccagatgttttgacagttggtttatattcatggctacaagctaatgtgcggttttgtttaatattctttcaaggtatgctgacctgaagaacaacagattaacaaattatactttcagctttgatcaaatgcttaatgacaaggtactgaaatttgccacctagtttacaaatttgcattttgcagtcacctacacaaccttattgatcatatgtcatgagcagggaaatacagccgtttaccttctttatgcccatgctcggatctgttcaatcatcagaaagtctggcaaagacatagatgagctgaaaaaggtactttagctgcatgaacatgaatcgctgaantttattctttgttcctcttggctgcccctgaaactttcccattgtctctatcaaggaaatgcgacgttataaactatttagtttgaattgaaagcttaacaattttcagaagtgtttaaacttttaagttaatgccagtgtctatagtgagcatttaattttttggagtctcaagattcattttgtatacaccctgggcctttttgtcctttttagtttcttggttgtgctatctttcacattttcataagatatggatcgtcgaacacctacgaagtctgttattagttcctaccatacgcagtacaataaagagtaattcttatgtttcaacatcttattcattgcagacaggaaaattagcattggatcatgcagatgaacgagcactggggcttcacttgcttcgatttgctgaggtaacacatgctctctttagatacttctttcatatttggcttctttttctcggcaacaagatgaacttgcaactcatgtgtgaacaatttgcagacggtggaggaagcttgtaccaacttattaccgagtgttctgtgcgagtacctctacaatttatctgaacactttaccagattctactccaattgtcaggtgtgcaattcacaagactctacatttctcatttgatattgtgatattagactgcatagctgcataatcaaccactataatgttgatctcacttaaaacatgatcttttacaggtcaatggttcacccgaggagacaagccgtctcctactttgtgaagcaacggccatagtcatgcggaaatgcttccaccttcttggaatcactccggtttacaagatttgatcacatcacaagtaaacgacccaaaggaaaatgtttttaattcgttttgacaatttttctgcacaattagtgtaaaaggcgttatttggccctaaattctctctgttctcatttagcttggggcaaacttgtatacaaatgaatacaatgttaaactgaacccagaaggttgttttgtcatgtcattgaactgatttgggtgaatcatgaaatggtttaaaggtt

SEQ ID NO: 151756 - DNA, 583 bp, Arabidopsis thaliana landsberg
gccaaagcatgggagaaataggactatgaggctattcgtaaaacttgaaaaggtttggtttgtttttcttaaatgtcactgcgatggaagtttttgcttttgttatatattatagatcccactgattgttccattcaatcaacatccttagggtttcaatggtgccgatctgcgtaacatatgcactgaagctggaatgttcgcaatcagagcagagcgtgactatgtaatacatgaagacttcatgaaggtagaaacaaaaataaatactccgcatgtttacatatttttttgtacccaaacttttctgcttatcaaattgtctgttgtacaggctgtgagaaagctgagcgaggccaagaagcttgagtcgagctctcactataacgcggattttgggaaagagtaagaaaagaataagctcagagaagaagagagggcctaaagggcagtgaaaaactctgttattcactttgaaaaaacaagctgatgattctgtttcagtttctcaatgttttgtttaaaggttaaaataaacgcagaaattcttgttttagtaatgacaactattttgggtttatcc

SEQ ID NO: 151757 - DNA, 311 bp, Arabidopsis thaliana landsberg
  unsure (1)..(311): unsure at all n locations
ttcaggtcttgggagaggcctatcaagtgctaagtgattcaggacaacgccaagcttatgatgcatgtggcaagtcaggaatctcaacgttagtctctttttcttgtggactctagnnnnnnnnnnnnnnnnnnnnnnnnnnnnnngggtctcagtgctgacttgtttttgttcatcctgtcagtgatgcaatcatcgatcctgctgcaatatttgcaatgctatttggcagcgaactttttgaagggtacataggccagcttgctatggcatctatggcttcacttgatatcttcacggaaggggatcag

SEQ ID NO: 151758 - DNA, 688 bp, Arabidopsis thaliana landsberg
tctctgctattactttagctctctcgtattgataatttcaggacacagatgtctactgtttagccattatgaagatagaagacattagcatcattggacgtaagtatcagttttggaaaactcaaccaaaaaatgttgtctcactacacttcaaatgcaagatttttatcggaattcttccttgttacaatttgcagagaacttcatgactggctatcgcgttgtctttgatcgtgagaaactgattctggggtggaaagaatctgattgtgagttccttatcaagaacactacgatcctaatcttctttctaatctgactttatattcatggctaaaggttacaccggtgagacatcggctcggacgcttccatcgaaccgttcctcctcctcggctagaccgccagcttcttcgtttgacccagaggcgacaaacataccatctccaagaccaaacacgtcgacgacttctgctgcttattctctctctatctcactttcattgttcttcttctcaattttggccatcctttaattattacacgtatatatttagccatcaatttgtattctttagaagataattgggttaaatcaccaaaaacatattacactacagttgtattatttttttctatgttgtatatgataattattttttaacaattatatactagttatttggtg

SEQ ID NO: 151759 - DNA, 2836 bp, Arabidopsis thaliana landsberg
  unsure (1)..(2836): unsure at all n locations
tgtaagatacagagaatcaaagttaattttgggattggatacagaaagagatctcaaacgttggggcctaaaagagagaggagaaaagtcctgtaatgactagttgtatcagaatgaacagcattgtacaaagtcttcttgtatctcttacggtattctgtgatgatgaactgcatatccacctctgctctcgtcaccacgattcttatcaacgccgtgtcatctgttcctaatcctttcattgatttcctcaatgcctgcgctttcagttttcgttttgtaaactcgaaaccctacattgttgtctaagaaaggttaggttacgttacctttgcgaaatagaaacaagagttttcagcacattgtaaaattgttagaaggacatgctcgaagttcccgcgagtctcatctcttatggcctatcaagattggagaaagagaagatcaagattttggaaattttctgattcttgagtaacaagtttctggatcttgattatatacctttccaagttctttgccgtacatggaacggtaagtagatcttacagcgaccaaatgagtcctgcttcggtcagtgaatatctnnnnnnnnnnnnnnnnnnnnnnnnnatgcttccttgcaaccgcgctcttgagagtcctagcatcgttctctacactcgcattatcgatctctggtccttcatatcgcgtagtgttcaaatacgcgagcaaaacctgttacatattacaatttctattactatttgaaccaaaagcatggatcaaatagagaaaacatactcttttgtgattgccagacccttcccattctatgtcctcttcaagtttcacaccgaaagtgtttgagtagacctgtttgatctgacgaagctgagagccagatcgtgtgcatataatctcagcaatcgctttatgatcagtcacggctcctcttaaggagcgtttcagtattgaagcgtctcgctccactgcttcaggcatccacaaaagaacggctttctgaaatcaaaaacgttttcaaaatgttgtctgctaaaatcatgaataaaagtttttttgtaaggctaagatttatttaccttgagatgaccatgaagctcagagtggagacgttttcggaggtcatccgagaatttggtttcgtattcttgttcgatgagagctcgttgtgttgcattgcgatgagctaagatgttgatgatcaccgaagtatcgcagcctcttcctgcaaattgcgaaaatataaactaaaatgtaacaaaacaagttgttataaactacataagaagcgaatgcgtacgtacctttgaaggccttaaagagttggtcagcatcgactcgaggagaaggtaccgtcattggtattttcattgttgccattttttctttcttcctctaaagattccgaagaagatattgtaaaactctatacctttcttctttcttttttttgttgtattctcttgattttgttttttcttttgttttgttggtgtggtgtgatttgtggcgattgggttttgggttgaaatatgcaaaggaaatggacattagaccttgattttaggagttgaatcctctgtttcattcgtgtaacgatggatgctttgatgcataaaatttaacggataacattttttaggatccgatagatatctctatgtttcatgattatcatcaacataaagacttttataagagttgtgtagagtctgtagcctagtaaaagggggttttcgacttaatttcgaaacaatgggccaaaactacaaattataaaaagatctcctaaggtttattactttccccaaatggatgttgtcactttcggaatcataatcggaattatcattctcttcttctgcatcgtctgcttcatcactattgaaggcactcgcttcaaccgtcgctcttcttagctcactcagagatgtcgttctcgctgagaaagctactggttccgattctggttttggtactgtttctggatctgtgcgttgaatccggattctctcagtcaacgccggcgcgtgacgatcacgtgcatcatcacggtggtgggtgtagtcattctcatgaccacgaccacgaccacgatcatgatcatcatgtgaagaagacgacggcgaaggtggagatgaagttgccggaggagcttgctgaagaggaggatatgagattatgtgggtttgggccttgtcttcatgatcacgatcacgaatcaagttccactcttacggggtttggtaaatttggttcctttagctacattcttcattgggttttacaaatcattacttgatgaataaaatctcttcttcttgttggtttttgtagctctgtggcttaatgcattgggatgctctcttttagttagcttttctctctctcatctgccttgttttgcttcccattatgtttggtaagcaattttttgtatacctatgaaaaccaaaaagcattgcttttaattgtcctggagaaaatgctctctttcgtttattcatgtgctataatgtgttcatgagagtaactgtttcaagtcttatgttgcaactaacagttcaagggaagccatcaaaatggttcgttgattctttggctctctttggggtaagtcattagactgactacagtagctttttctttggcggtggtggttctgaatgcaagaaaaatattttagcaatatctatacactgtgtttcgtcgcaactttatcacttggatgagttggaaatgttaataatatatgatctgttgattcagttaatttgtttaccaggcaggagctatgttgggagatgcttttcttcaccaactgccccat

SEQ ID NO: 151760 - DNA, 499 bp, Arabidopsis thaliana landsberg; identical to SEQ ID NO: 51191

SEQ ID NO: 151761 - DNA, 2617 bp, Arabidopsis thaliana landsberg
atgaagattgaaggagatgaagaagatgagaggaggtgcagatttggggatgaattctttttttttttttcggtccaaaattttcttttttttctttggatggattgatcaactttagcaaaatttctggcaaatatttggtagatttttattttattttcattgctttaatttatgaataaatctatattttgaaaaaataaaaagcttgtagacttctcgaatgtttatggtcttaatattgctgcttgcttcgttttgctcgcatgaatttaaatttgttaatatactaatttaatacgttcgtacgtatacaatgggacttgtatgttgttccagtaaggcgcacgtgtataagggcttaatgtaaaatccacatcctttgtcttgtacaaatcttattataaagaggattatagtgtaaaatctcgattgtttaggcatgtgaatacaatatgaaccctcttcggtttggattacaccgataaattcgaatcttagatcgaaacaaatcggttcgagttttccggttcaatttaaaccggaattgcccattgctaaatttctgtccaacgccaacggtaacgaaattgcacaagtgtcgcagctacagagcacacaaaagaaggagagaaagatgacgtcaccgagccatgcctctgatcgcggcggcggcgacggtgactcagtcgagaatcagtcccctgagctcaggaaagatccggtaactaaccgctgggtcatattctctcccgccagagccaagagaccgactgatttcaaatccaaatctccccagaaccctaatcccaaaccttcctcatgcccattttgcatcggtcgtgagcaagagtgtgccccggagttatttcgtgtgccagatcatgacccgaattggaaactccgggtcatcgagaatctgtacccggctcttagtaggaatctcgagacccaatcgacccaacctgagacgggaacaagtcggacaatagtcggattcggattccacgacgtagtgatcgaatcccctgttcattcgattcagctctccgatatcgatccggtgggtatcggcgatgtcttgatcgcttataagaagaggatcaatcagattgcgcaacatgattccatcaattacatccaggtaagcattatccatagatcccaatgtagtagctctattagtgtgcatttatacattgtttagccgtcaatacttgtgttatgtgtggatattttgtgttgcttgcatagttacattcatctgctacgtttgttttcgtatgttgaaggttttcaagaaccaaggtgcgtcggctggagcatcaatgagtcactcccacagtcaaatgatggctctaccagttgttcctccaacggtttcttcacgccttgatggtactaaagattatttcgaggagactgggaaatgttgtctctgtgaagctaaatcaaaacattttgtgatcgatgagtcgtctcattttgtttctgttgttccttttgctgctacgtatccctttgagatttggattattccgaaagatcattcttcccacttccatcatctcgatgacgttaaggttaccttttactgatctactatgttccatttatggtttggttagatgatcacctgactcactttgttttgatgattatcaggctgttgaccttggaggacttctgaaacacatgcttcagaagatagcaaagcaacttaacgatccaccgtataactatatgatccatacttctccactcaaggttacagaatcacaattaccttatacgcactggttcttacagattgtacctcagctttctggggtaggtgggtttgagattggcacaggttgttacataaaccctgttttcccagaggatgtagcaaaggttatgcgggaagttagccttacttgaacccggttttttagtctcaacctaaagttcagctggaagtgattagtgttgagttattggccttatgtgcaagtctctaaaaaacactattcaattgtctttttctcctctgttgaagaggaagatgtttcagcttgattcaaataacactgatgtaaacaatgcatgtactgtagttctttgtaaaacaagctcatatcagggcattaagaagattctttgatcaatcagcttttaaattcagcatcaaaccaattaacccgaaccaaaccactaattcgaaccaaaccagacgatgcttgacggcgtcgtttaaaatgtttttaaagggcaattttaagagcttctttctcaaaaactcgaagcagcgagtgaaaaaaacacagagagcttcctcacttgcttatagcttagggtttacgttcaaggcgtagatcttcgtcggaaacaatgggaatctctacgcagtctcatggaattcaatcgatgcttaaagaaggttacagacatctcgctggtcttgatgaggccgtcatcaaaaacactgaagcttgcaaggagctttccaccattacccgcacttctcttggccccaatggtttgcctctcgtcgtcggattcgaaatctatcgtttctgtaatgttagaatctgtttatgattattgttctgatttaggaatgaataaagactga

SEQ ID NO: 151762 - DNA, 162 bp, Arabidopsis thaliana landsberg
taaagatcactctgcgaaagaccacagtttaatgatatctctctctctctttaggtggttgaatgtggttctaggatggatcatgaagatgttcccaggaggaccgtcgaaaagaaggacaagcaagcttctctaatgcatggatggcacgctcagtcgtga

SEQ ID NO: 151763 - DNA, 1456 bp, Arabidopsis thaliana landsberg
caattataataaaagaaaattatgaacggcgaaggaaaggtggtttgcgtcaccggagcttccggatacatagcttcttggattgttaagcttttgctcctccgtggctacaccgtcaatgccaccgttcgagatccaagtttgaattccttcttctctctttcttttttcctcctgatttctccttagtaatatcgaagacaattcctctttgtcactcacttgaataatcaaagttatctagatgctttttagagatacaagtgacaattcagagaaaattaagaatattagctaagcaaatccaactatccaagagaaagtattttgtaggtacttggtacgattaagagttggttctatggccaaaaaagtatgtttttggtttcattctctaaaaggaaggatacattaacaaacgaaaattcaaatgaactcacatgtagtggatatagatggggtgaaactttggtcgatgtttaaagccaaaaactaaataagcatttatggttatctttggaaatgcactttgacatatatgtgtgttttcttccagaagatcgaaagaaaacagatcaccttctagcacttgacggcgcaaaagaaagactcaaattattcaaagcagatcttctagatgaaggttcttttgagctcgcaattgatggatgcgagactgtcttccacactgcttcaccggttgcaatcactgtcaagactgatcctcaggttcctcaatgatataaatttgttcggaacaacacaatcggtagtaatttactatgaaaatccacatctaaatataatagtttttgtactctggaatttgcaggttgagctgatcaatccagccgtcaatggtactattaacgtcctaagaacttgcactaaagtgtcttctgtcaagagggtcatcttaacatcgtccatggccgcagttcttgcgcctgagaccaagttgggaccaaacgatgtagtagacgaaagcttcttcactaatccaagttttgctgaggagagaaaggtctttgaattgtgttttgacatatcaatgagttcatgataactcacattttttctcacccattttattttttcctttccagcaatggtatgtactttctaagactttggccgaagatgcagcatggcgatttgccaaggacaatgagatcgacttgatcgtactgaatccgggacttgtgactggaccaatcttgcagccaactcttaatttctcggtagctgtgattgtggaacttatgaaaggcaagaatccttttaatactacacatcataggttcgtggacgtgagagatgttgctctagctcatgtaaaggcactcgagactccttcagccaatggcagatatatcattgatggtccggttgtgacaataaaagacattgaaaacgttttgcgcgaattctttcctgatttgtgtattgctgatag

SEQ ID NO: 151764 - DNA, 816 bp, Arabidopsis thaliana landsberg
tttccagggtcggggctaggacttcttctctctggtgcacgtatcgtaactgatggaatgctacaagcagcttctgaatggtaataatgattgcgttttgttctcttcaaattttaaaaatgagcttatgacaatgctgacgattaacatattcaaacatacacagccttgcgtcctacatgaccgatgaagaagtccaaaaaggcatcctttacccttcaatcaacaagtaattcctctaaatccctctcattcttatccgttgattatattttagtatattaaaactgttatctgaagcaattggtttctgaaaaaattgcagcatccgacacataacagctgaagtcggggcagctgttctacgagctgcggtgactgatgacattgcagaaggacatggtgatgttggtcccaaagatctcagccacatgtctaaggtatgaatcaagtaactgagagatatatttgtatcagaacatgtataaggtaatttagaaaatggaatctaattgcttcttttaatgccaccaacaggaggatacagtgaattacattacacgcaacatgtggttcccagtttacagccctctcgttcacgagaaatagacaacaactctatataactcttctcaggtttcatagaaagccaaaagacaaaaaatcttcgcttcatcttttatttgtgatcaacattctttttttcttcaaaatgtgatatgttttaagaaacccaatgccaaaaagagggcttaagaacaaaaaaaaggttagttctaggtcaacctgtacttgtcctttttttgttgggccttt

SEQ ID NO: 151765 - DNA, 459 bp, Arabidopsis thaliana landsberg
attccgacaaatccagctggtcttattgagtatagggcacatcccttttggatgcaaaagtattgtccttcacatgagcgtgatggaactcctcggtgttgcagttgtgagcgaatggaggtcagttgttcgatatagcatttctgttaataggaaaataaatttaagaatctgattcgaaaaccagatgttgttctgtttttggctcatggtttcagccaaaagatacaaaatatctcattcttgatgatggtcgaaaactgtgtcttgaatgtctcgactcagccattatggacactcatgaatgccaaccattgtaccttgagatacgtgaattttacgaaggcttacatatgaaagtggaacagcaaattcctatgcttttggtggagagatcagctctaaacgaagctatggaaggagagaaacacgtaaaacctctatatcttattgatacta

SEQ ID NO: 151766 - DNA, 740 bp, Arabidopsis thaliana landsberg
tcatctgcagtggtctcgtcaaatatgttcctcttgatctccttcaggttagcttcattgttcctatctatagttccaatcctgagaactgggatcggtttgtgtgataagcgtacggaactttccccattagattttgaccattggctcaattttccgagactttggttctgtgcagggtgcatcagtggtggtgctggctaatctgaagccgaggaatatgagaggggttaagtcatgtggtatgcttttagctgcatctgacgcagctcatgaaaatgttgagcttcttgttccaccagaaggctctgttcctggagatagagtttggtttggtaacgaagaagatctcgagcagcttcctgaacctgcacctcctaataaggtcatttagcctgcaaagcactaatcatttcagtactgcaagacttaagtcatggcatattcaagttctgtgttttctttgttgtttcaggttcaaaagaagaagatgtgggaattggtgcaaccacttttgaagacagatgcgtctggtgtttcaatgcttaaggagcatttgatgcggacatcttctggtcttgttacttccaagtctttaagaaatgccaacatttcttgatttctgttaaaagctattttgtgatgttgttttgacacaagagagaaagaacaaaccgctaaggcgatttttttcattgcaatcaaactgatgtttttgttgattcatcaaaataaggtta

SEQ ID NO: 151767 - DNA, 3722 bp, Arabidopsis thaliana landsberg
atgaaagtagccgttgaaagtaccggtggtctcgttgttctgtctgaaagttttggccattctgtatttaaagattcctttaagaggatgtttgaagatggcgagcactctcttggtctctgcttcaagtatgtttctgctctgcttctgtgtcaacactttgctattatatcttctgttgagttggtgttgcaagataaataatattttggcaattaagaccctttcttgtggagcattatgcataatactgcttgtatgctatgataatatatattttgcattccttagtgcaaactaactccgaacctttcattttcagtggcacgcttgagataaattgttcaaaagacatcaaaattcaaggggttatcgggccttgctcatcattagaaaaggttttacctggagtgcttagaatccattttatttcaagatgtatttttaatgcttggtgaatgaataaagctatctgctattaattgattttaatttattttcatttgatgccttgcagaaaggtcccaatgttgctgacacagtcattggagaggggaataccagtgcttggaaattgtgtggcctcgacaagagtacctgcttgactgtattctttgatctatcttcaaccgggtcaactgctcctggagctttaaatcagcagttgtatttgcagtttatcacaaggtattcttgcagcttttgtttgtctctaattttccttcatttgttaaactttttatctgtctgcattaagctattactttatatctagaagcattggatttactgttgttgactcgattgcagataccaaaactctgaaggtaaaagtttggcccgggttacaactttaaccagacagtgggtagatactgctgtgagcacagaggtagtcttgttttctgccaaacttaccattttatacaaatgttatacgcaattgggtttatatgtaatctactagctcttttaccgtagcactgtttattatgttttggtagcgttgctatgttaggattataatctataactctgctagcaagtattattatttgccaagtgaaaatgcggttaacgatagtaaccttttttttttttttgttaacgatagtattgttaagcatggtatcattttttgttctcattttggtcaaccaaaaattaatttccatttctcactggtgtaatttagtaaaagctatttactgtgaatagaaagcaaaaaaagctttggtttttgggatttcaacgggacttacatctttctttcttggaaaaatttgtttgttaggataaacatggatcccttggatgccgttactgtataacatactatgattcctaatgctttattttatatgattcctaatccttagcctcccatgagtgttttgcggcaaattcatatcatgtgaatctcagaatcatgatgttggttgcatgattttgagatattatccacatgttaatgctagtaccagcttgatagccaatttcttttacattttactattgtcatggaatcaataataaccgtggtcagggttatgtgccattcatgtaaatgtgttatggtgttcaaatagttttctggcaagcaaacattttcttaccatggttgctgtatacattctcagaatcttgtgcaaggctttgaccaagaaactgctgcagtggttatggcaagattaacttccttaaaaatggaaacagaggtaccttacatcatcttttctttgcttacaatatgtgagttaatttgaccgtgacttaaattttttgtgctgttggggtaagggttaagctcatattgcttttgatgaattaaaatatgggttcttttctcctggccatatttatttacctagggttcaggatctttggccaaatgttcatctatatgtccaaaggaagtaaaactttacttttcccacaactaattgaggtggattacagttgtccctgtagcatcttgtttgaggaactattgtggctgtatgagatgtagctttcatctctttataccaataatttgtagtctgtgtgaggctcatagtgaaactctaagtaacagttgctatatactcatgtcttgtactttgtttagtgatgtctactttatttttgtcatatactcacgtatgcagtgtattatgtataacctcaggagggatttgatgcaactcggtggctagatcggactctcattcgtctgtgttcaaaatttggtgaatatagaaaggatgatccaacctcgtttacgctgaaaccatatcttacattgttccctcaattcatgtttaacctgaggcggtcacagtttgttcaggtagactaccgtttttagatttcatcaatatctgcctttatgtaattggcctacatagttgaatcatgttttctttcgcggtgttggaatggtggcaggtctttaacaatagtcctgatgaaaccgcatacttccgcatgttgctaaaccgggaaaacatttcaaatgcaattgtcatgatccaaccttctctgacgtcatattcattcaattcaggacctcaggcagctttgctggatgtggcttccattgcagctgacaagattcttctattagatgcatattttagtgttgttgtcttccatggaatgactatatcgcaatggcgaaacatgggttatcatcatcagcctgaacatgaggtaatgcacgctttgaaccagtaattgactgtttatttgtaaaagcatttttttaccatcattttacactttcgtagctataaaatatatgtccttttgagttgggttgttaacatgacatcggtttagggtagaaatccaaattgagacatctagttttgaaacaatactcttcagagctggttccatttatatgcaagtgaaataatgtgggttgtagcaactcgcaaggtcaataatctctaccatggggtctcattttgtgacatctttataccatcattaattctatgatatcctaaatctcggatgtctcgtgtcaggcctttgctcagttattgcaagctccgcaagaggattcccagatgttagtccgggagcgtttcccagtcccgagattagttgtgtgtgatcaacatggatcacaggttagcattcacatatgtttttagtttatctgtgtgggatttgatctgatggttttcatcaccatttcctttataactttacatcctttgatactgcaggcaaggtttttattggctaagctgaatccatcagcgacttacaacaatgcaaacgagatgtcagctgggtcagacataatcttcactgacgatgtgagcctgcaagtctttattgaacatcttcagaaactggccgtgcaatcctgagcaaagtagtcacagtcccagtttgttttttgcttaaattatccatatcttcctgattacccgcatgcccgtttgtactattttagagctctttgttattttggtctcacataaaatacatcatagttggaagtcttttatttgcattggtgatttgtctggagtacagagatttactatttgcttcttctttctttttttttttgggatgaaatctcttgcatgattgatcgatgatatggtttgggcctctgcctctagcacttttcgtccttggccaccttccctgcttctgatacaataagatgcgctactgcgtttaattcaaacaaaatctcttccaacaacagcttt

SEQ ID NO: 151768 - DNA, 274 bp, Arabidopsis thaliana landsberg
ggtttcgactctcaatcgaagctttttccccttgtcttatggcgttgaagccattgaacaacatctggattcgtcgtcaacaatgtccttgtggtgattggaaatgctacatcagactcgaagaagacgaatcaacaataacaaaaagcgaaatggaatcaacaccaacaccaacatcacaatacgatactgtgtttaccccatacgtaggtcaaatcttcaccacagaagaagaagaatttgagtattacagtacattcgctagaaagagtgg

SEQ ID NO: 151769 - DNA, 972 bp, Arabidopsis thaliana landsberg
atggactcatcagagatcgaagtagtgcctctagattccaactctcaccaaagccctaccgaatcaccaaccatcaccgacgtcttctccgcctccgcttacggcgatgtccaccaacttaaacatttcgtcgaacataatggctcttccgtctcacttcccgacgataatggcttctacgctcttcaatgggcggcactcaacaattccctccacgttgctcaatatatcatccaggtaccaatttctcgataatactgtgatagttctccggtgtagtgattgatttggatttgaactatctgcagcatggtggtgatgttaattcagctgataatatacaacagacaccattgcattgggcagctgttaaaggctccattgatgttgctgaccttttacttcaacatggagctcgtattgaagctgttgatgtcaatggcttcagggtaatatcttctttctgttgtaatttttgtgtttttgtttgctaaaggtgtgtgaaatggatcaggagttataagttttgcatcaggcttgttgctgctgtgatcataggcttcagattcttgtaagattttgtcgatcttacgacatgttttgttgtgcaggcagttcatgttgcttctcaatatggacaaacagcattcgtgaatcatattattgtggactatgcagctgactataacgcactagatattgaaggaaggagtccgctacactggtatggatactagagatattaatgaatgcttagagtgtgtattctttagttgtacatagtatctctgttacttatcatttgacaatatgtggagaactactgtgaactctatatttttcttgtttgtatgactcagggctgcttacaatggattcacagaaacagtccggttacttctctttcgggacgcatgtccaaatagacaagataacacaggcaaatcagaaactcttaaaactttcttttaa

SEQ ID NO: 151770 - DNA, 2049 bp, Arabidopsis thaliana landsberg
atgatgtacgaagacatgaagagtagagtcgaacatgtggtcgagagcggaaaagttgagactgcgtttatcgcatgcgatcaatttagttgtgtgttcgatctgtggacagataaattcactcgtcatgaccatcctaccattattatggtatgtaactattttgtaatgcatggtaaaagtttcgtcacaaattaatgtttctaaaaactcgtttttatctattaatttgtggtgaaggtgctacaacataacgaaacagagatgatgccaaaccttatatatgtttcaagagaaaagagtaaagtttcaccacattatttcaaagccggtgctcttaatactttggtatcaactaatccatatctcggttaaactgtcatttctatatttgtaatatttcgttaaccacaacatgtattttctttgtagttacgtgtatctgccgtgatgacaaactcaccaatcattctaacactagattgtgacatgtactcaaacaatcctacaacaccacttcatgctctgtgctatttgtcagaccctaaaatcaattttgatttaggatttgtgcaatttcctcaaaaatttcaaggagtaaacaaaaatgatatttatgcatccgagctcaaacgcccatttgacatcaacacggttgggtttgatggacttatgggaccagttcatatgggaactgggtgtttcttcaatcgacgggcgttttatgggcctccgactactttgattttgcctgagatagaaacatttgggccaaatcggattgccgataagcccattaaagcccaagatattttggcgttggcacacgatgtagcaggatgtaactacgagtgcaacaccaattggggatccaaggtaagattaaaatgaactttagctttattttatgtatgttgattttttggttatgtttacagattttgtttcttttacatcaactagtcttctcaaaatccatatttataaacatattaacaaaattcttgtgtaattaacataaacacaaaacacacataaaaatgaaaaaaatgaaaaaaaagtatgtttgcattcacatgtaaaacaatcgactctccaatcttgatttctgtgacattgttttgttattacttactagccatttgtcaaactttacagataggtttcagatatgggtcattagtagaagactacttcacaggatttatgctccattgtgaaggatggagatcaattttttgcagcccgacaaaagctgcattttatggagactccccaaaatgcctaacggatgtaataggccaacaaatccgatggtccgttggacttcttgaagtagctttttcaagatacaatccacttacctatggaatcaagccattgagcctattaatgagcttaggttattgccactatgcattttggccattttggtgtattcctctcgttgtctatggaattttaccccaagttgccctcatacatggagttagcgcctaccccaaggcatcggatccatggctctggctctacattatcttgtttctcggtgggtacgcgcaagatttaacaaactttttattggaaggaggaacttatcggaaatggtggaacgatcaaagaatgtggatggtgagaggactctcttctttcttctttggttttacagagttcactctcaaaaccctaaacctctccactcaaggattcaatgtcacgagtaaatccaacgacgataatgaacaaatgaagcggtatgagcaagagatcttcgattttgggccctcttcgtccatgttcttgcccattactacggtcgccatcatgaatctgctagcttttatgcgtggcctatatggtattttcacttggggagaaggacccgtccttgaactgatgctagcgagtttcgcggtggtgaattgcttaccgatctatgaagccatggtgttgaggatcgatgacggaaaattaccaaaaaggatttgtttcttagctgggctcctcagttttgttcttaccgggtcaggctacttcttcctcaagtaa

SEQ ID NO: 151771 - DNA, 445 bp, Arabidopsis thaliana landsberg
gcttcattgcgaagaaaccaagaagtcatgcaccggtggtgagaacaacacgcgcctccttggatgagaatcaatccccaacttccggaggagaacggtggcttctcaaaccagttggtcagaggctatttttttgtttctctaggtttaatatcaatgagcttctttaatctttttgagtcttgaaagtctttttgcctgaaaacttataggcgatggagacacaagacacattggttacaaagtggcaatgcctgctccttttgagatctcctctgtaagaaactatacattccactagattgattgattttgatgagtttttagtttttgctaagatcacaaaaatgggtattgagcagggccaagttaccatcggacggctaccggaaaaggctgacgtcgtgattcctgttgccaccggtatttctctgttcttgtggtt

SEQ ID NO: 151772 - DNA, 970 bp, Arabidopsis thaliana landsberg
tgccatacatcatgttgagggtttcttgtccttctgcaggacatcgaccttcgatatgctgttccactcgggttttatcgtgctgctctgaactttggtatagctgggggaatcacatttccatggggaagcggatacaagagcagagcttcttgtgtacctgagaggttcttcttaggtggaaacatatcgcctgtgtgttctttgggaggaccatctgcattatggggattcaagactaggggattgggtcctaacgaaccaaggagggaagtacaggacgatgagagtggtgacacatatgaacgggattttgtgggaggagatgttgcggttactgcatttgcagacctttcttttgatttcccattgaaatggttcagagacagaggaatccacggacatgtgtttgcatgtgccgggaatatggcggaattatcagagaacaagtataggaacttcacagctccaaagttgttggagacattcagaagctcagttggtgcaggaatcgtggtaccaactagtctatttcgcatggaggttagttagttctcttgtttctcttttcttatcaaggatcataaaaaaattgcaatccttttaacagatattgattgttcttcttttgttatgtgatctcttatgccagctcaactactgccacatactgaagaaacaagaacacgatcgagcaaaatctggatttttcatgacattttcaacatcatcttaatgctacttttgatgatatcttaattttggctttgcactcacagtgtcatggcggagtcttttgttttgtttccaggagctttcattgtttaggttgttgtttggaattgaaaactgtgcaaattttagagagagagattacctgatgtgcggattgttcttgggaaggagatagatcaagaaataaaaattaactaaagttgatttgttttgaattaaattttaaattagtaat

SEQ ID NO: 151773 - DNA, 2033 bp, Arabidopsis thaliana landsberg
tgatgaaaccaaatgaacccctatgattgggagatatggataacagagaatccacaaaagtgtatccttcacaaaaccaaaacgcactctccattttcttcagacaactctttctcctttcttctctcttctctgtctcatcacaaaccagaaatgggaggagtgtccttcctctccactgttccttccttcaccaacacaaccaatcatcaacatctcactacactctcttcttcttctcatcgctctgtgagtttcaaccattgttacattctttacttctaacccattttacatttcttctgctaacaattcttcttctgatcaggctgttatacgatgttccaagattgaacctcaagtttccggtgaaagtttagctttccaccgccgtgatgttctcaaattcgccggcactgcagtcggaatggtaccttaacacttgactcgatcaaaaattacatacacattggtacaaatgagataatgtaatgtatagtctgtggctacatcttcttgaagttgttctctctatgtcacatttgatgagttcttggcagtgatgatctctcttgttaggaattaataggcaacggtttcattaacaatgtgggtgatgcaaaagctgctgacttgaatcaacgtagacaacgatccgagtttcaatgtgagtatctgaaacaagaacacaagtatggtactattaggttgttattggcactaaaggtttcattttcattatgcagcaaagatcaagattttgctttcgaccaccattaaggctaaaccggagattgtaccttccttactcaaactagctctcaatgatgctatgacttatgataaggtcaggcttcatacaatgctcttgtccatctcttttgtgattgcataatctttaccctttaatgatactggctttctgtctaggctacgaaatccgggggagccaacggatccattcggttcaggtatgtgatctaaagaacattataagagtaatctttacatgatgtctcatgtagttttttctttttgtgaagctctgagctaagtagagcagagaatgagggactttctgatgggttgagtttgatagaggaagtgaagaaggagattgactctatctctaagggaggtcctatttcatatgcagatatcattcaattagcaggtgatgttatagtatataccaaaacttgttcatgaagagtagcattattgtatttgtggataactgaaatctttcttgggttggtttctgtaggacaatcagcggtcaagtttacgtatttagcatcggctatccgcaaatgtggtgggaatgaagagaaggggaacttactatacacagcatatggttcagctggtcaggtaaacaatgctatcgtatgcgttttgagtcgcggcgttttgttcaaatcgatactgaaccgttgtgaatctgttagtggggattgtttgatagaaattttggaaggagtgatacaacagaggctgatccagaaggcagagtcccacagtgggggaaagcaactgtgcaagagatgaaagataagttcattgccgttggattgggtcctcgtcaggtacatgattttcggtttaaacagagaattatctactaggatcactcgaagtaactaacctgtatgaggaatttgtagctagctgtaatgtctgcattcttgggtcctgatcaagctgcaacagaacagctcttagctactgaccctcaagttgctccatgggttcagaagtatcaaagaagccgtgaaaccgtatctcagactgattacgaggttcgttttcactcgatttgccttaatcatatattcatctacctcaaactcaagctcatgttttggtttatgaatatgtttgtaggttgatctcataactgcattcacaaagctaagttgcttaagacagcaaatcaacttcgaggcatatacatatcccgtcgaacggatcaatctgaagcaactcaagctataagctatgtacactatatgtataacatgagaagaaac

SEQ ID NO: 151774 - DNA, 577 bp, Arabidopsis thaliana landsberg
gcttcaaagagataagatggcctctcttctctctcccgccacccccaccgccacctccgccgcatttcattcctgctccaccgccggattctccactcccactcacatttcatcccagaacagcagcctgtccctcctcagccgccggggttgtatgatgagatgcagtttttctccgcaggacattcctgttgattccctctctcatctccctcctttccttgactttcagaactccctcgccacattttcggatacccagaaatgggggttctttgtctccgccggaatcgtctggttttacctcacggcgaggcctggtgttctcatcggcgccattgacgcctaccttctcgctcccctccagcttggcctcgacactctgattggaaggaggttgaagaggtccgatttcttggtcactgagaaactcggcgaaggctctttcggcgtcgtctatgccggcgtcctactccccaagaattctactcttgttgatgacgttagggttagcaaagcaagagctaaagcgatggactttaccggcgaattcaagcagagagtcatcctcaagaag

SEQ ID NO: 151775 - DNA, 238 bp, Arabidopsis thaliana landsberg
gaatgcatttggtcaatcctttggtacgatatgtgtatcaggacttctcatatgcattgttcgtgtggtccgggcaattgtggacaatgcaagagaagagaacacacaaggaatagtgaacatggttctcccgtgctgtgcaaacgccttacttggtgcccttgactatctcaacaagttcaccatcaactttgctgcaataacaggggaagcgtattgcacctctgcgaaaatgact

SEQ ID NO: 151776 - DNA, 1989 bp, Arabidopsis thaliana landsberg
aaatcgaagacactgtgacactctagcaccttcagttccgtacaacaatggctctccaagctgcctattctcttcttccttctaccatttcaatccaaaaagaggtatgttttcaccattagtaatgatttccatcttgttatgatttgttttcgataaaatgaagaatttacctcaatgcaatggtgattttgcagggcaaattcaatgcttctctaaaggagacgacttttactggttcttcattttcaaaccatcttagagctgaaaagatatccaccctgttgaccatcaaggtaaagtcaatcaccctatacgatgtgaaattctcaaaaaaagatatcgaaaacgtcctgaggtttatactctgtttcgttgcaggaacagagaagacagaaaccgcgattttccaccggtattcgtgcacagacagttacagccacgccgccggcaaacgaagcatcgccggagcaaaagaagactgagagaaaaggcactgcagtgatcactggagcttcgtctggtttaggtttagctacggccaaagctttagcagacacagggaaatggcatgtgatcatggcttgcaggaactttctcaaggccgagaaggcagcgagatctgttggaatgtccaaggaagattacacagtgatgcatcttgatcttgcttcgcttgaaagcgtgaagcaattcgttgaaaatttccggagaacagaacaaccactcgatgttcttgtctgcaatgccgcggtttaccaaccaactgctaaagagccttcttttacagctgaaggctttgagataagcgttggaaccaaccatctcggtcactttcttctctcaagattgcttcttgatgacctgaaaaaatctgattatccatcaaaacgtatgatcatcgtaggatctataacaggtaaataacacagacaacttgtccatttccaccaagatagttcctagtatcaaacaatgaatgttcttttctatgttcttgcaggaaacacaaatactttggctgggaatgtaccgccaaaggcaaaccttggagacctaagaggcttagcgtcaggattgaatgggcaaaacagttcaatgatagatggaggagagtttgatggagcaaaggcttacaaagacagcaaagtatgcaatatgctgacaatgcaggagcttcacagacgttaccacgaggaaacaggagtcacgtttgcttctctttaccctggttgcatcgctacaacagggttgttcagagaacacataccgctgtttcggcttctttttccgccttttcaaaagtatatcaccaaaggttacgtatctgaagaggaagctggcaaaagactagcacaggtcagtttgcattgcaaatcctttctaatatatgtataacagattattgattgatactgaggatgtggttttgttttaggttgtgagtgaccctagtcttgggaagtcaggagtgtattggagttggaacaataactcgtcttcgtttgagaatcagctttctaaagaagcaagtgatgcggagaaggcaaagaaactgtgggaggttagcgagaagcttgttggtttggcatgaactcaagatttttgatatgcaaattcatatagattactatgttttgtgacatgtacaataagtatgatcaatcagactaatcattcgaatgcatttcaatagagttaatcatcgaattcgaatctgaagacactcacaattagactgatgattcgtagattgctccatagttgagatggggacatgaatcgttactgttgttgagacacgaccaacgaactgcatcgtaatcccgagtaaaatttaaccgataagagtcttcggtcttagagaatctaacatctttcttctctcttcgagaattacccgatgatcggaattacaaaacggttaacaccggcgagaattggtgggatatcatgtcgtggatcttttctagtgtgccttttctctaa

SEQ ID NO: 151777 - DNA, 356 bp, Arabidopsis thaliana landsberg
ataatattgttgttgttttcttctgcgacagcttcgaagtcgtctcttggatttttacaagtcaaaagctgagtaagacgttaaccacgagtcttctcgccggcgaccgtcgtcaacggcggaaattttgttagttatgtcccgcatttccaccacctgcactactccttcacgcgtgagagctgcgaattcgcactactcagtgatctctaaacctagagcacaagacgataacggtctcaccggaggtaaaccgaaatcgtcaggttacgatgtgaaaaatgatccagcgaaacggcgatcgattctgctgaaaagagcgaaatccggagaggaggagatggggttttggctcc

SEQ ID NO: 151778 - DNA, 418 bp, Arabidopsis thaliana landsberg
ctaccgagccttctatgccgtaccacgtcaggttagctaaacgtgatacgagattacaagaatactggctattgaatgtgtaattagtttataaatctgctataaaccggtacaaattccttgagtcaagacacaaaacataccccaacagacaagcaaaggagaagacgaagatgaagaagaagaagatgaataccaagaagaagaagaagaagaagaagaagaagaagaagacagagagagagaggaaagagcttttgcattcgtacctgggacataaatgattaaaccagacagcttcagagagaaaaatccttttaaagaaacattgttccacttcagacctgcaaaaattttaattactcaagcagatcaaagcataattttgtgttatatttccttcataatcaatgttatt

SEQ ID NO: 151779 - DNA, 388 bp, Arabidopsis thaliana landsberg
tgaccagttggtgggctggccgccggtagcgacagcgaggaaaacagtgaggcggaaatacgtgaaagtggcgttggatggtgcggcctatctcagaaaggttgatcttgggatgtacgattgctatggacagcttttcaccgctctagaaaacatgtttcaggggataataacaatatgtaagtgatcgagataagtaggaaaaaataaagattttgatgtgtttggatggactgacgaagtgaaggatattatggtaaatttacttacacttggggttttggatggtggtaggtagagtgacggagttggagaggaagggagagtttgttgctacttacgaggataaggacggtgacttgatgttagtcggagatgtgccgtggat

SEQ ID NO: 151780 - DNA, 758 bp, Arabidopsis thaliana landsberg
ggaaaattaggcgcgcgtcatctccctcgcgacacatatatcataagacagagagcagggaacgaatctcaagacgttacgtattagcttatagccattagttttgtctcttcttcttcttctcgttggtcggcttcttcgtcttactaattccatgattcttcttcttccttctgcttcactttctcgatgatcctctgcaccagccgcgatcatgacgttgaatcctcctccgtcgcagcaaacgtctcactcgccgcgtcggattcccaatcgccgcgttctcatcgtcggaaattattgccacgacgttttaatccaaaacggatccgtcgtagctgaaactctcggcggcgccgcctctttcatatctaatgtcttagattcttcctctgtctcctgcgacttggtctccaaagtaggacacgacttcagatacgaggtcacccactctccgatcgtggctccggagaaggaaacaacagttttcgaggcgtatttcgatctgggaatcgatgggatcggtcatgctgatcgggtgttgaaaagagtctctgcatgtgatccgattcttccttcggatatacctgattcgagatttgatttcggaatggccgttggagtcggcggcgagattttaccggagacgcttgagaaaatggtggagatctgtgacgttgttgctgtggatattcaagctttgattagggtttttgatcctgttgacggagctgtgaagcttgttgatttgaaagaaa

SEQ ID NO: 151781 - DNA, 3204 bp, Arabidopsis thaliana landsberg
atggcaaaaaaaaaaaaaagaggccaaaattctcacttttttcttcgaccgatttctttctcctatttcgtctatatcggcaccgatccaaaaacacatacgatgctgatgaagacgaagaatacagagagacgtatagagagagagacaaaggctgagccttttgggtttctcttagagagaagatctttagtgtgtgtccctacaatgtctgtcaagaataatagcttctcgtcggctgagattcccgatgtgcagaccaaccacgcgaccgatttaaccccgaagctacacaggatctacaagagaaggatgagacgaaagaagagaaagaaggagatgaggaagtgaaacacgacgaagcggaggaagaccaagaagtagtgaacccaacgacgccgaggaagatgatgatggtgacgatgcagaggaggacgaggaagaagaagtagaagcagaggaagatgaagaagcagaggaagaggaagaagaagaagaggaagaagaagaagaagaagaaggtaaaggatgtgtttttgtttcttctactctcgtgtaaacgtgagagtgttttgtgtttgttcatgtgatcgatttggttctctctctttgtttctgtttcagattctaaagaaagaagtccatcttctatatctggagaccaatcagagtaatgatttttctcatttctctgtctttctcttctccagatgtgtttagcttgtgatgggttctctactccaatatttctttacttctgttgttctagtcaattaaatgttaaaattgctctgcttgatttagtaatctgttgatgcatcttcttagcacttgcatgttgtaattcctctcgtattactgctcaaaacctctacgctcttgtggctaaacaatgtaaagtctttaccttgaataatagcggccattactggaagttgtgtcctaagaatgattcatcttctatttaacttgacctttagaatgtcagctttatttttgtcttgagatagattctttactgtagaataaagaagctggatggatctttcttgtttaattgtgtctgcatttttttcatgcaggtttatggaaattgatctaggggaaatccgtaaagacgtgcagtgtccaatatgcctttgttctcaattttgtcctgaatatttctcgttgggaacagaacttttgctaaagctcgaaagccgttactttcttcagtcggcatgaaattcttgcgtcttttcatatcgtattcttgtagataagtcggcatgatttggttcacactctatttttaagctacattactacatctggctgaaacgagtttcttgttgtcctgttttcaggtattataaagaaaacaaggactgtgatggaatgtctccacaggttctgccgggaatgtattgataagtcaatgagattggggtacggtttcaaattgtttgggtcttactcttattatctatgttgttttcgtttcttcttgcttctcagttctgtgccactttcaagttaaatatttcatcattctcttgggagccataagtgttggcttttctaaagcttttttttgagtttatattaactgaagtttctattgcaggaataacgaatgtcctgcttgcaggaagcattgtgcaagccggcgttctctaagagacgatccgaaatttgatgctcttattgctgctttatttacaaatattgatagttatgaggaagaggtaaagcatcaacatagttttcctgcttgtttgttttggagagattgttgctgttaaaacgctttgttttttttggttcaggaactggcttttcacgaagatgaaatggctcgtaataagcaggtcggataccatggagaatgttgttattcacttttttgactattgcttaaaatatacttaatcaccttcttatggcttttgtgtagattcaagcatctatagctcagatatcgcaacgacaatctgaggctcttgtgaaaagacgatctcttggtaaagaggcagcagtcttaatgagatcaccgcgtattgctagtggctccagaaggagacggaacagcagaaacatggaacaacaaaacgcatcagaagctcatgaagatgatgataatgatgataataacaacagaggaagagacaaagattcgtcttcagatgagcgtggtacagaagtccggcagaagaaacgtagaaaacggtctacaagtcgttcaacacaacacccttcttcttcaggtgcaaacaaaaacaatggtaactgtgcagataacgacacagaagtgtatagagacaccaaaggcatatctcccgggcttgtgtggaatcccgagatactggcttggggaagaggcgggacaaggagtaacacaaggcatgggaataatacttctggaggtagtagtaagagtgtaaggaatgcccgtgtgaacaaacttgttgaatatctacgcagcagcgtagatggatctagtgttgaggtaccaaagaaaaaaaacgatgattctcttcgtcttgatgacctgtatttttgattgcagttagtttggatttcgattaaacttaatctatcttgcagttggatattcatgtcaagcttgtctcgctggatacaaaatgtataccagacttaccacagccatatctctgttgccgacccactttgcttgtaaaacagctccgtgaagtgagcactctctctcccttacagttatcatcagacttgtcacagtagaaagtggttttttgttatatatattgatgcgaaagtacttcaatatgattcaataacaaaaatgatttcagtatcacatacgctaatatatttgtcaactttcaatgttgtacagttcgttgcacttcagatacatttgaagactgaagaggttgaattgttagtaacaagaagaagagtaggagaagatgcggcaatagagaatcttcctgcagtgactccagcttcagcagcagcatctaaagatgagatgctgagtttggaagacaatgaaacattgtcaaggctcaaaatcgatttcatttcaagccatgaacaacatttggtagcgtcaataataataatttttatctaaatatcttacagtctaatctaagtatgattcaactttgtgagactttttccttatttggtttgtgccttcagatcatagcttaccggaagaagcaaactgagtga

SEQ ID NO: 151782 - DNA, 1517 bp, Arabidopsis thaliana landsberg
atgctccggtcccaaggtagagagaagttgcgattgatttcggtgaaagaattaagaatcgatcggacttggagaagagaagagaagatggttggcgcgaatctgaaagcggagacgatggctctaatggacaagagaacagccatggagacggagatgaactctattgtcgaacgtctctgcaatcccggtggtcctggtctctccggcaatctcatcgactcggaggtactgtatctgcgtcctcactcttctctaatcttaaccgaaaattctgcttaattttctcctttgattcgtttgcttatggcagggatttcctcgggaagatattgacattcccatggtgagaactgagcgccgtcgtcttgctggtgatttctcttttcttgtgctgaattagtccatagttagggtgagactacaactccaaggttagttaaacttaggaaacatagcagaatcatactgattatatgtagtttaggtttttgtcttggctagttggcttgaggtttattcatagttttgtgagctggaaatgagattgaaaggaatcaagcttgatgtgtagcttctacagtgaaccagttgttaagtttttccctacttcttccgttttgagttggtttatttatctgaaatagtttctacacccacacagagttaaggagtgagcacggggagataacggaaaagataaatgtgaacattcaaattcttcattcagtgaggcctacatctagagcttcatccacaaaagattcaggtatgactgtacaggaagaagctccaaatttcagcttggaatctttgattggcttaatcatcttttctgattctggtcctttttcttaaggctatgattaatagaagtttattttatactttgaaaccatatgcacgacgtgggtggatacaaagcttatgaatagataatgatgcaggtccagaagaaacaagcttgtcaggtgctgcagtaaattctttatctgcctccatgcagacatctggcttcagtgttacttccggtcccatggatgtggatgtggttactagtattccctttgcaatggttgatgagataaacgagtcatctccagcagcagagggtggattacagcttggagatcaggttttgaaatttggcaacgtggagggtggtgacaacctgttgcaaaggcttgccgctgaagctcagtctaaccagggacaagccgtttctgttcaagttatgaggcaaggtgcaaaagtcgtcttatctgtcacaccaaggatatggcaaggcagaggtctattggggtacatactgatactgctaatatacttcaatagttgatctttttacaaaagagaaggaaacaaacatttctccttgtcaactgatgaattgttaactctttcccatatgatattcttccattgcaggtgccatttccgtttggtatgagcagcagatacttccttggattatcatctgggggtctggatatggtgaaagcttctgtgaaagctag

SEQ ID NO: 151783 - DNA, 594 bp, Arabidopsis thaliana landsberg
attttctgtttgagattagcttctctagtaaccttctttgcaattcatgatgccaattgctaagtatgtaactatgtctggtatgtgagctgggatcatatgatacctgactatcgactcaaagagaattatgtttagtcaatcaagggcttagttctgaggctacagtgtgtgtggtcgatgtgctgttatggtggaattggatactaaaatatgtctaagagtgggactgcaatatgaccttcttagtttattcgatgttttgcttgcagaagaggaggtcatggacgtttctgctagaaagtcacaaaaagctgggcgcgaaaagttgaggagggaaaaactaaatgagcattttgttgaactgggaaatgtactcggtatagactcaatggttatgtggatttttctaaacagcagatgatctcactttgatcctcacatagctcttctgtttgcagatccagagagacccaagaatgacaaagccacgattctgactgatactgttcagttgttgaaagagctcacatctgaagtcaacaaactgaaatctgagtacaccgcattgacagatgagtcccgcgaggtacg

SEQ ID NO: 151784 - DNA, 1231 bp, Arabidopsis thaliana landsberg
actgttgcagcttttccggttgttcctcacggtgttgttcagctcggttcctctctgcctgtaagttcaagttacattgttatgtgaagtgagattcttgttcttgatttatactgtgaattgttttttgtgtgttcagattatggagaacttggggtttgtgaatgacgtgaagggtcttatcctgcagctcggatgtgttccgggggctctcttatctgaaaactacagaacatatgaacctgctgctgattttattggagtgccagtgtctcggataataccttctcaaggacataagatcctccaatcttcggctttcgtagctgaaactagcaaacaacatttcaactccactggatcatcagatcatcaaatggttgaagaatctccctgtaatcttgtggatgaacatgaaggaggatggcaaagcacaacaggattttctaacagctggagaagttgcagtaccttcaaatccagatgcgtggctgaatcaaaacttctcttgtatgtctaatgtgaatgcagcagagcagcagcaaatcccatgtgaagacatcagttcgaaacgctcgcttggaagcgacgacttgtttgatatgttgggtttggatgataacaacaaaggttgtgacaacagttggggagaaactcagataagaacagaagtactcactagagagttatccgactttcggatcattcaagaaatggaccctgagttcggttcttcggggtatgaactttcaggaacagatcatctgttagatgccgtggtctcgggtgcttgctcctccacaaagcagatctcagacgaaacttccgagtcctgcaaaaccaccttgactaaagttagtaattcttcggttaccacgccgtctcacagtagccctcaaggtagccagttatttgagaagaaacatgggcaaccattggggccatcatcggtctacgggtctcagataagttcttgggttgaacaagcgcacagcttgaagcgtgagggcagtccaaggatggtgaacaagaatgaaactgcaaaaccggctaataaccgtaaaaggcttaaaccaggagagaacccaagaccaaggcctaaagatcgccaaatgatccaagatcgtgtcaaagagctgcgtgaaataataccaaacggtgcaaaagtaagtgaaaaacttatctgttcttggcaaattaaacaatccctaagaaaggttattactaacaa

SEQ ID NO: 151785 - DNA, 2109 bp, Arabidopsis thaliana landsberg
atggcggccgcgaaactcgtggcgttgttacttcttctcgccttggttttcaatttcaccacttgtatctttgccgacgctggaatcgacggcggcgatgaaccgaaacttagatccgacggcggtgatatcgaattggatcagcttaatgctaaaatccgtgccctaggttacactcagaactttacagttacttcaattttacttctatgtcaatcgtgaaaatttgctatggcttgtgtgaatttctcaaattaatttttgttttcttcttttttggttggtgaagaatctcagattgatgataaaaccaaggaacttaaaggcagagaagagttagtaacagagaaggagaaacttcttcaagagagacaagagaaagttgcttctttggagactgaggtttcttcactaagggtatgcatgcatcttttagtgtctcactgaaattgcttccatgttcagatatagattgcctttatatatcaatctttgtttccagaaaaaaggttcatcagattctgtggaactgttgagtaaagctcaagcacgagctactgaattagagaagcaggtgagttcattatttgagaacccatcttttatatgcacgtaagtttctaaattctacattatacttgtgaattcaggttgaggtacttaagaactttctggagcagaaaaacaaggagaaagaattgatagaagctcggactagtgaaaccgagaagaagctaaacgaattgaactcgagagtggagaaagtatgttcattatacatctcttggttcattttctcttgacacacattattattcatttcaaatcatttaaatagaaagtagaaagtatgttcattatgcaaattttcacaatttattcctgcagcttcacaagacaaatgaagagcagaagaacaaaatacgaaaaaaagagcgtgctcttaaaatttctgaggtatgacgacgctcttggattaagtttagttcccccttaactttcggtttctgcaatcactctcgactcttatcaaaataaaattataggaagaaatgttgcggacaaagcatgaagccaccacaaaggctaaggaactgatgaaggttcatggggcgtggcttcccccttggtttgctgtacactggagtagttttcaggtgagattaatagattttatcttttacgactttcttgcatcatagattttctcaattaacttggacacttcctggactcagactgttgctgggacacactgggacgcccacggcaaaccagttatggagaaagttactcaaaaggtattgttaaatccaaattgtatgttgattacatgactctgagagcaaacttatgcctaactaagtttgatcatcttttaggtgacgttagcaaaaaatcaagctgaaaaatgggctaaaccgcacatggctaatgttaaaactgtaagtaacttacaggcaatgtgtgttattactcaggaggctcttatggttatgcttacgaaattctatttccagaaatatattccagccataaaagagactgttaaaacgcatgttgagccacacgttcaaacactatctaccaaagcgaaagaggcttaccatgcttccaagagtgcggttacaccacatattgtcaagtttcaagaacatgtagatccctattaccaggtgaagtatatttttttctatctagatattaatctttcagctccatcgatgatgacaatatgcgcttaattcgttttgtttatgctctccaggaggctaaaaagtttagcaagccgtacgttgatcaagtggccacagccacaaaaccacatgttgataaggtgagagctaccatgaagccttacacaacgaagactgtccactattacaaagagttcctggaatctgcctcaacttatcaccaccaggttagaatcggaggcactgtgtataatttataggcattatagttatgagtatttctagaggaatgtgttgtcttttaatctgataactctgtatatatgtgaagcttcaagccaatgtcgaaagtaaactgaagagccatgagctgttggaaccttttgccaccaaagagaacatttggtttgca

SEQ ID NO: 151786 - DNA, 589 bp, Arabidopsis thaliana landsberg
aacatactaagagagttattagatcttgaaaaacatggcttccaaggctttgattctgttgggtctcttcgcaattcttctggtggtctccgaagtttctgccgcaaggcagtcgggtatgttaaattgttttatacatttcagtctagctaatcgaatttgaactaattaacgtacaatttgataagtttatccaactctttggtccttccattttttactttagttaaagttagaacacacttcacctaacctaagtgatgtggaatccttgtagttttgtgtaaatatgtttcgaaagtatattttttaaaactatagttcgactttatgtacttatttataattgcaaaaaacattttaaggtcgaaaacaaagttgaagtcaggaagaagaattcacatttgaacgtgattaaaatgtctttgaaataacatgtggttatgggcaggcatggtgaagccagagagtgaggaaactgtgcaacctgaaggttatcacggaggacatggtggtcacggagggggaggccactacggaggaggaggccacgggcatggaggacacaagtaggaagggcaaggggctt

SEQ ID NO: 151787 - DNA, 420 bp, Arabidopsis thaliana landsberg
gacatgttcttatattaaatggttggctattaggcctgttacggatccggatatccgggatttttgaggtatccggatccgtatccgtaacaggcggatccgtcatttcagtctccggatccgtatccgccaaccccggatattcgggatcctgaagtccgtgaaaaagtacgagtatccgcggatatccggatctgatccggttttttttatcatcttctctcctcccgaacacaagtaaccgaacttcaccgccaagattcttcccagaaaaaacagctccaaatctgcaacgaaagaatgaatccaacgccaaggggaagaagaagagatagaggcagcggttgtttcggtggaggttgaggatgaggatgatttggtggaggaggatgacgatttggtgccatggtggtagagatg

SEQ ID NO: 151788 - DNA, 1315 bp, Arabidopsis thaliana landsberg
  unsure (1)..(1315): unsure at all n locations
atgggtatgtttctcactattatctctctctcagatgttgtttctgtattgttcattagattctagaagttcatgaaggatgaaatatgatttttgattacaggtgcgtacaaatacgtgtcggagctatggaggaagaagcagtcggatgtgatgaggtttcttcagagggttaggtgttgggagtatcgccagcagccttccattgttcgtcttgttcgtcccactcgtcccgacaaggctcgtcgtctcggctacaaggccaagcaggtctttttcttcttctcttcattttggttatcaatttaataggtttaggtaatgttgttgaatcaagccttatcgattgattgctggttaagcggtgtcttgatgcgtagtcatttatgtctgcgctttatgatagaatacttcctgaacccagctacatagattcattcttctgactgaacagctctttatcttttgtggactctgttcctgtctaagattgatacattttttttaagccctggatcaaaaaaattgtacttttgtttgatgagttattcactctctgtgttgctgacttctctttattctctgtattaggggtttgttgtgtaccgtgtccgtgtgagacgtggtggacgcaagaggccagtgcctaagggtattgtgtatggtaagccaacaaaccagggagtgacacaactcaagttccaacgtancaagcggtctgttgctgaagagcgtgctggcaggaaattgggtggtctcagagttgtcaactcttactggctcaatgaggtacatttactaccttctttcagtactctttcgtttaggtgattattctggttagatattttaacttgtcaatttttctttaataggattcgacctacaagtactacgagatcatcttggttgacccagcacacaatgctgtgcgtaatgacccgagaatcaactggatctgcaacccagttcacaagcaccgtgagctcagaggacttacctcagagggaaagaagaacagaggtctccgcggaaagggtcacaacaaccacaagaaccgtccatctcgcagggctacatggaagaaaaacaactctctcagccttcgtcgttaccgttgattgccttttgcttttattattactgttatcatcttctaggttccatgttgttgcacttttatctctctcaggatgacttgtttttgcaaattttggagactatacaattgtgctttgaacctaaattttatatttgctttgcttttttgttgatctcagtctggttttggaatatatcgaggcccgtttgcaat

SEQ ID NO: 151789 - DNA, 1958 bp, Arabidopsis thaliana landsberg
aagatcggaagagaattgcgaggattgcatgaaatgggaagaatttctcttttggactcattttcaaactctccatttgactcaggtcctccttcctggtttccacactcgcctcctatgtctctatcactttctctaagaaccttcttcttcatgcatctttatcagcaattcatgttactctttcaatttcttcatgtattcactttcctttgttttccaccggcttttaatttggagatttacactcaaatgtatcaaaggggtttaagcaatttttgtttttttctctcaaaatcagttctttgcggatttaagagtcctaagattgccaattctaacataaaaattaccactttttgcaatttattacaggtcatacctcgaaagttttcaacacactgcaaaaggaagctgcctcagattgtgactctcaaaagtccaagtggcgttacatataatgtgggagtagaggaagatgatgaaaagacaatggcttttcgttttgggtgggacaagtttgtgaaagatcattcgctagaggagaatgatctattggtcttcaagttccatggagtgtctgagtttgaagtgcttgttttcgatggacagactttatgtgagaaacctacttcttatttcgtcaggaaatgtgggcatgcagagaagaccaaaggtattattgattttaatgcaacctcttcgaggtctcctaagagacactttaaccctgatgatgttgaaactacaccaaaccagcaacttgttatatctcctccagttgataatgagctagaagacctcattgacattgatcttgattttgatattgataaaatactaaatccgcttcttgtagcatctcacaccggttatgagcaagaagaacatattaactctgacattgatacagcatctgcccagcttcctgttatatctccaactagtacagtacgagtcagtgaagggaagtatccccttagcggttttaagaagatgcgaagagaattaagtaatgacaatctcgatcaaaaagctggtatgaaaatcttcttacttagtgattacacagtgcacttgtttcttggtattcatctgataagccctgtctgtactctgtagactctgttttgcatgcaactgttgggattaaagtttcaggttttgagaatgttgctaacagcttggagtaactgattccttagtcttggatattatatgattctggatattaggtgtggagattatagaattgtctcatctttctcattcagtagagaaagtttcttgttccgaaactttattaacttcttactacccataggctttgatccatttgtcttcaaagtttataactttatataatggagtgagtccatatatttatcagtttctatctcatttatcatgcatctaaaatactaatataccttatcaactgtcgtaagacgtggagatgatttcagctggaagcaataagaaagccttatctctggccaagagagccatttcgccggatggtttcttggtgttcatgaaacgctctcatgtggtatcaaagtgttttctggtaagacttttgcatcgctttgtgtatagtccttgaagcttcgattattggaaaaaatagaagaggtcacatttttcttttgatacagacaatcccatacaaatggtgcgtgaagaacatgcttatcacacgtcaagaagtggtgatgcaggtggatcaaacgaaatgggagatgaagtttaacattttcggagctcgtggtagtggtgggatttcaaccgggtggaagaaatttgtacaagacaacaacttgcgcgaaggtgatgtctgtgtgtttgagccagccaattctgaaacaaaaccgcttcatctcaatgtctatatattccgtggtgaagaaacggaaagaaccaacaatgttgacccggtttacacaataagtgaataa

SEQ ID NO: 151790 - DNA, 2494 bp, Arabidopsis thaliana landsberg
atcagcagattacacagcttgttactgagcagcagagacttgaagcagactggacgctctgcaaattacaggtggagcaacttaagcaagagatagctaacgctaataagcagaaacatgctatacataaagccattgaatataaggtgccttttttcttacaattcaatttttttggagtgacatttaaaattaattatatcgttcccccatgttgtaaatactaaattgtttcatctgtttgcaggagaaattactaggtgatattagaacacgaattgaccaggttagatccagcatgtctatgaaagaagctgaaatgggaacggaacttgtggatcacctaactccagaagaaagggagcaattgtcgaaattaaacccagaaatcaaggatcttaaggaaaaaaaatttgcataccaggccgatcgcattgaggttcgcagtaatgaaaaagaaaagtttatatgtttgaattaatttctgatttgtttgcatttctttcgattgaagaagtctcatttatgtgcttttattttttttgattatgtctgattcatgtgctttcttttgtttttaaagtctgatttgtgcttttcattaacctcagagggagacaagaaaagcagagttggaggctaatattgctaccaacttaaagaggagaataactgagttacaggctactatagcttccatcgacgatgatagtttgcctagttcagctggctcaaaagaacaggaacttgatgatgctgtatagtcggtcaatgaggctgcaaaagagctcaaaagtgggtcccaaacgttctgaactactttgcttggcattgcttgatcttggtcttttactacttactatccagacgagtacactcaaggccattttgtgtgttttaggtgtctgtgacagcattgatgagaagacaaagcaaatcaagataattaaagatgagaaagcagagttaaaggtagtataatatatcataaagtaagagacgtgcgtttttctctatctaacaaaagtttcttgttctctcagacattggaagatgattgtaaagggacactacaagatttagataaaaagttggaggaactgtttagccttcgcaacacgctccttgctaagcaagatgagtatactaagaagattaggggattgggtccattgtcatctgacgcttttgacacgtatgtttgcttcttctctttcttattggttatgcatccagaaagttcagcactcagtctagttagaacttttatagttatactgtcccaattttcatttatcttgtccagttagttcttagtcatcattggtggacaattgttgtatcatgagatttttatcctaggagttctataatatatacaagctattgaacattataggtataaacgaaaaaatatcaaggagctgcagaagatgctacaccggtgcagtgaacagctgcaacaattcagccatgtaaacaagaaagcgctggatcaatatgtgaatttcacagaacagcgagaagaacttcaaaatcggcaagcagagcttgatgcaggagatgaggtaaataataggaggtttcatacactttgccaaattctatgtagaaagtagagcttgactgactcatgatcgtttccgcagaaaattaaagagctgataacagttctggatcagcggaaagacgaatctatagaacgtactttcaaaggggttgcacatcacttcagggatgtattctctgagcttgtgcaagatggatatggtaaccttatcattatgaagaaaaaggcatgtttctgcatccttttcctcaatgaaactttttcctcttttaacatttgtttactttaagtcatcgtgagttttttcattatcaaatggttaactaaatttgagagtactattgaatgagatcaattgtgttctaataaaccacgagtagatgttttctagtgagccttgagtgtagaagtatatccttggtataactatttgttggtcatcttacttggtatttcactgttgtctgatgcgtttcgttttctctttgactttcgcataaacctttcctttgactccaccaaggattacttaagaccaccaatatctgcactgttgtctttctggatgattcttgcctctgtgtaaaacttgtgtgatctctttattaatcagttgggtggacataaaacattttggtttcacatattcaggatcttgatcatgatgatgaagatgatgatgatgatgatggaggtcgtgaagctgttacagagggaagggttgagaaatacattggtgtaaaagtgaaggtaggaagaaaagacttgtggacactacatataaagaaaccatgtatatcattatcctttgtctagctttcaggctgatactagttcgtacttgttttgtaggtctcgttcaatggtaaaggggaaacacaattaatgaaacaattgtctggaggcgaaaagagtgttaacgca

SEQ ID NO: 151791 - DNA, 3442 bp, Arabidopsis thaliana landsberg
tcttacttttgttccttcatagcctctgtttctcacttttatcacatggccattatctcatacatacatctaaggaatgttatgtgttcgatactgtgtctcagtttcgtgaaagtgtctttttgtcatgttatctttatctttgtgtcactggatatttcagggcttagtaagcgcaccacttctgaaaggtccttatggaaccgaatatcctctcggaacatgggtggtggtccgagaaccttccctggaggactaaacaagtggcagtggaaacgtatgcacgagaagaaagctagagagaaagagaacaagctcttggatcaagagaaacagctttacgaagctcgaattaggaccgagatccgagctaaaatgtggggaaatccagattctggtgagaaaacggcgaaatcgaagcagagtcatggaccaatgagcccgaaagaacatatcaaaaccttggctgatcggtttatgaaagctggagcagaggatttttggaacgagaacgatggtccggtgaagaaatcagatcaagggtcgagatcaggttcggattcgattgattcaacttctaattcgcctattgatgtgaggagattagtttctgcgacatgtgattctatgggtaaaaatcgtgttttcggtagtagtaggagaggtttttcgagtatgagtagatttaagagaaatgagagttcttgtgatgaaggagatgactttgatgctaaaaagctagatactttgagtcctttttctcctaaatttgctggtaccaaagagaaagtgaagagctcgacgagtgttgttggagttataaggaacaaaggtttgtttggaagaaggaagtttaggaagaacgatagttcaactgaagaggattcagatgaagaaggcaatgagggaaagatgataggttggatggatttgaggaaaacaggaagcagtgcgtcgttaggaaaccacgatatcaagctgacgaaaagagtgaatcgtaatgtcacagacgaagagctttatcctcctttggatattaatagagttagagaagatctcagtaaaaaacaatctgtggataatgtaagggaggagaagcaagagcctcatgactcgatttacagtgcaaaaaggtattttaaactcgctgtgtaaaggattttgatttgtcaagtttgaatcttgatgagctctgttaatggttgcagatttgatgagtcttgtatatctcctttgacgcttaaggcgctttctgcgtctggcattgttaagatgactagagtgcaggatgccactctctctgagtgcctagacggtctgtgttcttctagttcttttggctcaaatggtttgcatttgacaacgtattatcctatatgtaacgcaggtaaagatgcattagtcaaagccaaaaccgggacgggaaagagcatggcgtttttggtattttacaatcctttctcctgagattatgccttagcttttgttgtttcttaagataacgttgtaagactgaaaaaacagcttcctgcaattgaaacagttctgaaagctatgaacagcggtaagggcgttcacaaagttgctccgatttttgttcttatcctctgtcctacaagagaacttgcaagccagatcgctgcagagggcaaggctctgctcaaaaaccatgacgggatcggtgttcagactctaattggtggtacgcgcttcaaacttgatcaacaacgcctagaatctgagccatgccaggtttgaccaaccgtgattccctgttttacaggaattgtttatattttctagttgttgtggtgaatcttcttttgtttccgtaccttgttgcagatactaatagcaactccgggaagactcttggatcatatagagaataagtctggcttaacatcgcgtttgatggcccttaaattgtttatagttgacgaggctgatatattgctagacttaggattcaggagagatgttgaaaagatcatagattgtttgcctcgtcagagacaatctcttctcttttccgcaaccattccaaacgaggtacccttgctatatagctaacttcatatattcttacctttatcacaaaatccaatgcggacacaaacgtctaaaatgtagtttaaattcaggtccgtcgagtctcacaacttgttttaaaaagggatcactcttatatcgacacaatcgggctcggttgtgtagaaactcatgataaggtaaactcttaagctcttgtttttgtctcaaaagcttgttacttgaatctggttattgagtttcttgctttggctttaggtgaagcaatctcgtattgttgctccacacgaatctcatttccacttagtacctcatcttctaaaagagcacatcaacaacatgcctgattataaggtaaaacaaatcctcttaaacgattgcttttttatttctgaccttggtaattctcgtaactatccaatttcattctcgcagataatagtcttttgctcaaccggtatggtaacatcactgatgtacactctgctccgggaaatgaaattgaacgttagggagattcatgctagaaagcctcagctccatagaacacgtgtatcagacgagtttaaggaatcaaatagacttattcttgtcacatctgatgtatctgctcgtggaatgaactatccagatgttactttggttattcaggtaaagcacaaagcgaacattttcatgccaaaaacaaccttttatggatatttaacggattagactttgttttacgtttttggtaggtcggtataccgagtgacagagaatagtatatacatcggttaggtagaactggaagagaaggaaaaggaggaaaaggattgcttttgattgcgccatgggagagatattttcttgatgagcttaaagatttacctcttgaaccaattccagctccagatcttgattcaagagttaaacatcaggtttgttcgccttcactgtcaatacccataagtggagttttattgccaagtgacattgaggacaattgatttttgactaggttatcagtcaatggctaagattgatacaagtatcaaagaagcagcgtaccatgcatggctcggttattacaactcggttcgagaaaccggtagagacaaaaccacgttggccgagttagctaatcggttttgccattctatcggtttagagaaacctcctactttgtttcgaagaaccgcagttaagatgggtcttaaaggtatttctggtattccaatccgaaaataaaccgacccgtgttggtacttagatgtattgtcgtagagagaaatgtatgaacacatttatggtcaacatcatgtttaaataattttgttatttatttatgaatatatgattaactttttaattacaggaatttttgtttgtctaagtcatgtgtttatat

SEQ ID NO: 151792 - DNA, 298 bp, Arabidopsis thaliana landsberg
gacgcagttcttttctaaagcaccggagaggaggagaagcaacgatggagaatgattgcacggtgaatattgtctctctggagaaggatcgcgatgtttcggaggcgtcggctgaatctcagagcgagtcgactctttcgaactcgctcgattccggtcttacggctgagacctctcgttctgatactgattccaaactggtatcatatcaaatcttcctctcgcaatttgtttatttcccatgtctcgtttgatagtttttttttggttcgatatgtaggagattcgtcgaatatga

SEQ ID NO: 151793 - DNA, 819 bp, Arabidopsis thaliana landsberg
tctcttttcagatcttttcttcttgtgatctgtgtctttgtaatcccatctctctcatctgattctgatcctttacaagacttctgcgtcggcgatctcaaagcttctccttccatcaatggcttcccttgcaaatcatccgtctccgcttctgacttcttcttctccggcttaggtggtcctttaaacacctcgacccctaacggcgtagccgtttcccccgccaatgtcctaacttttccgggtctaaacactttaggactctcgatgaacaacgttgaattcgctccaggcggtgtaaatcctcctcactcgcatccgcgtgcaaccgaagcaggagttgtgatcgaaggctcggtttttgtcgggttcttgactactaacaacactctgttctcgaaggttttgaatgccggagagatgtttgttgtccctagaggattggttcatttccaatggaatgttggtaaagtgaaagcgcgtttgataacctctttcaacagtcagcttccaggatcggctgttctgcctagtactctgtttggctcaaaccctaccattccaaatgctgttttgaccaaaacgtttaggactgatgatgttactgtgaacaaactcaagtccaagtttgctgtttgaatcttttgatattatattatcatgttttctcaaatgatctttcttaattcgcttcgatttcatagcatagcaataagttatgtgtaacgattggtatgaaacaaaagaaaaaacattaataagattcatttctttctcttgggggatttatggtgattctcttagactaaaagtctaaaa

SEQ ID NO: 151794 - DNA, 452 bp, Arabidopsis thaliana landsberg
  unsure (1)..(452): unsure at all n locations
gtccttcaccactacttcgatcctccaattcctgaattcgtatacttgactcacctgactattcagagtgacaaagaactagggtgggatgcgattccagagctgcttagtaaatgtccacatttggaaaccctcgtcttggaggtaagaaaccaagctgcttagtgaatcgattttatggttaaaagcaaaacatatgcgttactgtatgtctttatgtttcaggggcttttcacctagccacagatgtgtgtggtgatgtgtgtcctgcaggaggaacatggagcaggcaatctcttgcctagtaaaatctcctgttactcacctagagatatacgaaggagttgttgggaaaaagagaggagaagttactgaggatgcagcccgatttggtgagcaagtacggtggtttttgatgagaatgctacatntccannncaagtgaaatatat

SEQ ID NO: 151795 - DNA, 454 bp, Arabidopsis thaliana landsberg
ggagattggaggagcagaagggttctgatattctagtggaagctatttccaagttcatggggctcaatgttcagatggttatccttgtgagtacactaagcagtgaacttgtgatcataacgtctttaggatcacaaagttattgattcttgtctgatgtttttcacaggggactggtaagaagaagatggaggctcagattcttgaactagaagagaagttcccagggaaggcggttggagtggcgaaattcaacgtgccattggctcatatgatcactgctggagctgacttcatcattgtcccaagcaggtttgagccgtgtggtctcattcagctgcacgcaatgagatatggaaccgtccctattgtggcatctactggtggacttgtggacactgtgaaagatggctacacaggtttccacattggaagattcaacgtcaaggtaact

SEQ ID NO: 151796 - DNA, 621 bp, Arabidopsis thaliana landsberg
tgggaattactcaaggagcaggcagcttcgtggaccactgtatagaggtttcatccacttcccaaatcctttctttatagaccctgtcatccgctatatactactgtgtgctgcttatatatatatatatatgtgcttattcttttgctctctgatgtatggtttgttttcatagatgcaagctgattggaggcaagctttggtcctagagaagaccatcgaaggcaaaatcacaaagggtaagccactcgtcaaacttaaacacttgattgatggatggttctagggattcaacacttgaattgatggatgtttctagggatagataatgtttgtaacaaatcctaattgacttacagagtcactgaatggtatttgtttattctcagatggtgttatagggatagggatcccggctacagcctttggagctgtgggtctcatagccggtggtatcgtagcagcgatgtctcgcaagaaatgaaaaccacaaccatgacttcttctctgtgtatacaatggcagtttactttttttcacatttttttcttcttctttgagtgtgttctccactgcttacttcacaatctatgatatagaaaagtcgaagctatttgtttc

SEQ ID NO: 151797 - DNA, 2080 bp, Arabidopsis thaliana landsberg
ggtccgttttcattatggtcatcctgacatatttgacagaatctttcacataacaaggggcggtgtgagcaaggcttcgaaagtaataaatttgagtgaggatattttcggaggtaatggcatgttaattctctaaatgtcaacaattcagcgttagagaattgatagttcgttccaagcagctgttgatttgtttgtcaatgtatataggcttcaattcaactctccgtggaggatatgttacacatcacgagtatatccaagttggaaagggacgggacgtggggttgaacccaatctctatttttgaagcaaaagtagcaaatggaaacggggagcaaacgctaagccgtgatgtttaccgtttggggcatcggtttgacttttacaggatgctctcattctattttacgaccattggattctattttagtagcatggtatgctcaaaactttatatctcaagtttgcttttattttagttgatcttatgtatacacatggttaaagattatgacttgtgcttttttcagctcaccgttcttactgtatatgcattcctgtatggacggatgtacatggttatgagcggattggagaaagagattttgagactcgcaagcccgaatcagcttgaggctcttgagcaggctctggctacacagtcaatatttcagcttggtttcttgatggtgttaccgatggtaatggagattggcttggaacacggttttcgctctgctattgtcgattttttcataatgcagctgcagctagcctcggtattctttacattccagcttgggacaaagtcacattattacgggagaacaattttacatggtggttccaaatatagaccgacgggccgtgggtttgttgttttccatgccaagtttgcggagaactacaggttgtattcgagaagtcactttgtgaagggcattgaacttatgattcttctactggtatatcagatctttggtcaatcatataggggtgtggttacttatattctgatcactgtttcgatatggttcatggtggtgacatggctctttgctcctttccttttcaatccgtctggttttgagtggcaaaagattgttgatgactggacagactggaacaaatggatttataaccgaggaggaattggtgtccctcctgagaagagttgggaatcttggtgggagaaagagttagaacatcttagacattcaggggttcgtggtatcacccttgagatctttttggccttgcgcttcttcatctttcaatatggacttgtgtatcatctcagtaccttcaaaggaaaaaatcagagcttttgggtaagctaaccttataactacttccctgtgaatggtgaaactcttgattattgaacgataatgactctgttttcaggtttatggagcgtcatggtttgtgatcttattcattctactgattgtgaaggtatgaatctttaagcacattcacatttcaatttcttgccaaatcttaacattgtgttgctttcttctatgtaacgatcattgcagggtttgggcgttggaaggcgaacattcagcccgaatttgcagcttctattcacaatcataaaggggcttgtgttcctcacatttgtggcaatcctcataacttttctcgcactttctctgatcacaatcaaagacttattcatctgcatgcttgccttcatgccaactggatggggaatgcttctcgtaagtctttctcctccatcaaactcctgtatttgtatctaagataccagttttgtctggtttttgtgacagttgctttgttttgtcctccacgtcagattgcacaagcgtgtaagcctctgatccaacagctagggatatggtcatcagttaggacgctagctcgaggctacgagatcgtgatgggcttgcttctgttcacaccagttgcgtttttggcctggtttccttttgtgtctgagttccagacaagaatgctctttaaccaagcctttagtagaggtctacaaatctctcgtattcttggtggtcaaagaaaagaccggtcttcaaaaaacaaggagtga

SEQ ID NO: 151798 - DNA, 2196 bp, Arabidopsis thaliana landsberg
ctaatctatcgaagaaggagcgtcgtgtacaggctaaggtaaaacatttttggattttgaatctatatgtctgatgaattatactttagtttctgattcttcatgtgctttgatttgggtttgcaggagctaacagaagctaggaagaagaagagaaagcctcattacaatcttgagcaagtatgctgctttgtgaattgaaattttctggctttagtttttttcgtcttctagttattgtaacatagggataactcttatcaggagcttgtatctctatgggagaagatgagacgccgtaatatcggcaaggaggatcgatcaaagttagtttatacaataaattgtcaatctttgatttaaaaaggttatatattgtatttgtttgattaaacttggttttgaaactatttgttaggctgatttctgaagctataaggaagatgaaggggaaggttccagagattgcagtctcacatgtttcatctcgtgtacttcaggtatgtttttgcatctttgagttttgttaataaggctgtcaaatttctaacaagatatgtaattgggttgttattttcttcttgttacgtagacttgtgtgaagttttgctcacaagctgagaaagatgttctcttcacggaactccagccacagattcttaaccttgcttctaacaaatatgctgttcactttatacagaagatgttggatggaggtatgctctaacttcaacttgtatatacagttagctttatacaaactgctaatttgagtttatatttgtgtagcatctaagcagcagctggcagcttgtatatccagcctcaggggacatgttgctcctcttctccgtcatgtgttcggatctcttggtatgtggactactgatgtaacatagtgatgtttcaacatatatagcattttttgtttcttttgaagctcactttctctttgttttttttataatcttcctcaagttgtggagcatgcataccatctgggaagtgcagcacaaaaacaagaactccttgcagaattgtattctactgagcttcagttattcaagggcttgaccacatctaacgaaaaaacgtaaaccttcatttatcttcctgtcttactcttaaagtataggaaatagagcagccaggtctcttgtatctttttttttttgatacttgagaactaggaatcccttatcttagctttcattgttgttatttgcgatggtgattacaaactcgatatcactcttcactgtcatgagttgaacatatattaagagttacagaatgtgattcagggtggtggacatcattgctaagctgggactgcaaaaaggcgctgttaaccgacacatgactgccattatccaaccgatacttgagaagggaattgtcgaccacactatcacacacaaattgctgattgaatacctgacaatagctgataaggtatatatatgtataatttatgtgagggtttgggattacaaatttgttttgcattacattcttcttgttttatgctaaatggattttttttttttttttttttgtagacttctgctgcagatgtgcttcagctactgacaggctcccttcttttgcgtatggttcatacccgtgatggttctaggcttgccatgctttctatcaaacatggaagcgctaaggtccacattcttgaactttttaagtaggtatcctttttcttttactcgttaactgataatacaagggattacccctcagaattatggtgggtttcatttgtatatctcataagctttcatttgctaagtttttctttcctttctaatggttgtatatgtaaatcgtgatttgaatgtaaatagcaaaacattcttgtaagacctttagagcaaaggactgattgtagagatttcaatagaaaacttataagttgaacttctgctctttctaaatcgtattcttttgcaggagagaaagaagattatcaaagcaatgaaagagcatgttaaaaagatggcttttgatcagtttggaagtatggtaaggaggcatttaattatttccttttgaatttacaacttatagtacttcactaccggtttgtatccgtctttcagatgttaacccttgtctaccatgtgttctcaggtgcttgcatgtattttttcaatagttgatgacacaaagctcgtgaccaag

SEQ ID NO: 151799 - DNA, 361 bp, Arabidopsis thaliana landsberg
tcacatttcaccacaacgaccaccactcctacactaacacttatatcaccaacacattgtgttctactatacataaaattcagttcctaagtatttttgttttgttttgtgagatcgatggagagttacttgaggaaatggtgtttagtttctgtgtgggttttgcttttaggtttagggtttaaggtaaaagcagagcctcaagttccatgttacttcatctttggtgattctttggttgacaatggaaacaacaatcgtcttagatctattgcaagagccgattatttcccttacggcatcgatttcggcggccccaccggccgtttttccaacggcagaaccaccgtcgacgttctca

SEQ ID NO: 151800 - DNA, 140 bp, Arabidopsis thaliana landsberg
tcaattccaaaacactgcgccgggaagacatggacaccgagatggagacagaacaaatataccaggtcgatgtcggaaatctcttggctttcaatcctaatcaccgcttctcatctgctccttcttcaaggttcgtcctt

SEQ ID NO: 151801 - DNA, 364 bp, Arabidopsis thaliana landsberg
agtcatgcgtttgctcagtgttttctgccttcatatcgggtgaatgttttgcagggacaattgatgcagataacaatgatgacaactccagacatgaacaaggagcttcactacctgaacaaggaagacaaactgctgcgctggctcttagttaaacaccgtgacatcaagattggacagtcggaaaaggaagatagtctgactgtgcctaacagactcactagtgggagcttatatgatggatcctcctcggacgaagatgacaacaacattttagggttatcacgatgaggaaatcgatttctttgaaatgtttactcagacaatttcttcatgggagtccccttcaatggttatgaatgtt

SEQ ID NO: 151802 - DNA, 1271 bp, Arabidopsis thaliana landsberg
  unsure (1)..(1271): unsure at all n locations
aagcattgcatcaaatatccatgatgctgtgacaagaactgaaagaatcgttgcttctttgtctggagtgtggacaggaccaagcgtcacacgaacccacaggtaaatgatttaacaatcaaatctgaaattttactttctcacacatgaaggtttctcatggttcattgtagcgaagcattgtagttgcatcttgtgatgttgcatattgtttacctttacaatttacagtccatctgcatgaaaagttaaaagcttattttccaagtgcacgaaagcaagtaaagtaaagctgtcgaatcgggactaagatgtttaaattacataattttatcttgcaaaatctgggcaattctttcaaaattaggagtattggtcaggctatggtctttatgtttctttttttggaatctcattcgtcttagaccaatcaatttcattgtttatcttcatttggttcacatgatatctgcatctcatatttggacgttatgttgaacctttgccttgatacatactaaaatattttatttgactttgcagtcgtccgctgcaacctcttgtggattgtactctgacacttcgaagaattctcgagaaaaggcttgcctcaggactggacgatgcggaaaccactggtctcgcccgcagactaaagagaatactagtcgagctccatgaacatgaccacgccagggaaattgtcagaacattcaatcttaaggaggcagtttgaccaaaagtttattgatgggaaactggaaagtcaacacagaaatctttagcctcaggttatcaggctcacctttcggactgtaccagcaaaggctcatcgatttcaacatcgaggattacaagattttccctaggattttacatttcaagatgtattaggctagcaccaaaaccttccggaatccattttcagacacagaagagttttagtactttggcttattgtaagtgtaacctcttgtgcttgtagaaaaccttataataaatataagctaaagtatctcgagtctttttttttccctttatatctgtatgagtttagatttagctaagacaatataatttctatgaatataagccccaacttgtattgctgtgctgcactatagatgcagttaatttgtattacgagctgtgtcatggttttttgcaaaagacaatttctgttggaatcagacgtcttctgctgtaaacaacacaacttgngatcntagtcaagaaacagagaagaaaccccctttgaaagaatctactgt

SEQ ID NO: 151803 - DNA, 852 bp, Arabidopsis thaliana landsberg
atatctccctatctctatcctctctcatcactctctctctctctcaatatggaaaaactcatggttccgacatggagacccgacccggtttaccgtccaccggagacaccactcgagccgatggagttcttagctcgttcatggagcgtctctgctctcgaagtctccaaggctctaacaccacccaaccctcagattctcctctccaaaaccgaggaagaagaagaagaagaacccatctcctccgtcgtagacggcgacggcgacacggaagacaccggacttgtcaccggaaacccattctccttcgcttgttcagaaacttctcaaatggtcatggatcgtatcttgtctcactctgtaagtcttttcttcagataaaaacagagcatttccggacaaaacaaagcattcttttttttttactttcgatgttgacaaattttattttgtttctttcatcagaatttcccaaatatggtcaatcaaagttttaatttttagcaaattatgttcatgaatctctctttattaagtgtgattaatgaagagaaaattttcacgcgcaataattataactattaatcaagaaaaaaagttacgatttttagctacacactcgctttctgggtccctaaaaacataataacaagtttatggatttgtcatcatctcttcttcttgattctacttttgtctcatcttctttaataattttgtttgcagcaagaagtatcaccaagaacatctggtcggctatctcacagtagtggtccacttaacggttctttgaccgacagtcctcctgtgtctcctcccgaatccgacgacattaaggttccaatttcttga

SEQ ID NO: 151804 - DNA, 488 bp, Arabidopsis thaliana landsberg
  unsure (1)..(488): unsure at all n locations
ttaaaaagaagaaaaccctagatttctccgtctctctaatttcctttctctctcaagcttctcagaaagtctgacactttcgagaatctaatctccaaatttcttgtctttttggagaaggaatcgaattatgtacaaggaacgtagtggaggaggtggtggtgggtcatcgagatcagagatcctcggtggagctattgatcggaaacgaatcaacgatgcactcaataagaaactagagaaatcttcaacttccaccaccacatctagggttttctcttctaaagacaaagatcccttttccttcacatctactaaaactcagcttcctgatggtttgttcctctctttttcacatctgtgagtctttntgttggttaattgctttctttctgatgattntttttttttggtgttgcagtggaatcggaaactgatagtgaagggtctgatgtgagtggatcngagggtgatgatacgtcgggatc

SEQ ID NO: 151805 - DNA, 171 bp, Arabidopsis thaliana landsberg
atcatcttgtcacaagagagacatatccagaggctaaacgaccttgtacgaagtcttcaaatgcagttacagcgatgcaaaggagagaacgagacacgatacgccactgaaacctcccataataacaaacagtttattgagctcgagaggaaacacatcgtggaagactag

SEQ ID NO: 151806 - DNA, 286 bp, Arabidopsis thaliana landsberg
tctctctctctctcgaagttcatcaatggctcttcatccacaccttcaagactccaagaatttcaggtaaacaatctcttctattgttatcatgtactctttctgtgataggaaagccctaatttttctttaagtttccaagaatcaaaaccctaatttctcgaacttgctctgtttccagagacttttgcggaatcgacggccagatttcgccggaattaggatttaaccgctcagagaatctccatgatcaatctcagcatcctccatatattcctccatgtaa

SEQ ID NO: 151807 - DNA, 1850 bp, Arabidopsis thaliana landsberg
  unsure (1)..(1850): unsure at all n locations
tctgggctgagatatatgctaagaattactacaagtcgcttgatcatcgaagtttctacttcaaacagcaggattcaaagaagctgagcatgaaaggtttgtccgtaacctattacacacattattctattatatcaagcaagtgactttatgtactatattttttctgtagcattgttggcagagataaaagagattactgaaaagaagcgagaggatgattcacttcttgcatttgcagccggaaatagactatccatttccccagatttggagtttgattatccggatcatgaccttcatgaagatctttaccagctgatcaaatattcgtgtgcagaaatgtgctctaccgaacagttagataaggtaatgaagatttggacaactttcgtggaacaaatatttggtgttccttctcgcccnnnnnnnnnnnnnnnnnnngaagacgttgtcaagtccatgaaccagaatgtaaagagcggtagttcaagtgctggcgagagtgagggaagtcctcacaattatgctagtgttgccgactctagacgctcaaagtcatctcgaaaagctaatgaacatagtcagttggggcaaactagtaattcggagagggatggcgccgctggtaggacatcagatgccttatgtgagactgctcagcatgagaaaatgctgaagaatgtagttacgtctgatgaaaagcctgaaagcaagcaagctgtttctattgagcgtgcacacgattcaactgctctcgctgtggatggattattagatcaaagtaatggaggaagcagtatagtacacatgaccggtaacacctcaaaatcttgcttagaagttagttctcttggaatttttcattttctttgtacagttaatgaatagtttcctctttacttggtcaggacattgcaataataatctgaagcctgtgacctgtggaacagagttggagttgaaaatgaatgatggtaatgggccaaaattagaggtatagtttcagtgaagcacgttttagtcccatcatcttatattttgatctgatactttctatatagatgactcatttcaaatgaaggaccgaattttgttgatatggaacaatatctcccattgtttgcacttggtgcttaggtccttcatatggaacttagatagttttaaaatttgaagttacacacccttagttctgtgttaaccaagaggtggtactgataaactttgtctcacaggttggtaacaagaagttattgacaaatgggatcgcggtagaaataacaagtgaccaagagatggcaggaacatccaaagttgaaagagaagaaggtgaactttctccaaatggagactttgaggaagataattttgcagtttatgcaaaaactgattttgagaccttcagcaaagcgaatgatagtactggaaataacattagcggagatagaagtagagaaggggaaccatcttgtctggagacaagggctgagaatgacgctgaaggtgacgaaaacgccgcaagatcatcagaggacagcagaaatgaatatgagaacggtgatgtttctggaacagaatctggtggtggtgaagatccggaggatgatttggataacaataacaaaggagaaagcgaaggtgaggctgaatgtatggctgatgcacatgatgctgaagaaaatgggtctgccttacccgtttcagcacgattcttgctgcatgtaaagcccttagtaaagtatgttccttcagctatagctttgcatgacaaggacaaagactctctgaagaactcccaagttttctatggaaatgattcgttttacgtgcttttcaggctgcaccgg

SEQ ID NO: 151808 - DNA, 747 bp, Arabidopsis thaliana landsberg
gctaacccggtagttggtaaagaccaggctccagatctagctgtttatgttccgtctaattcagttattgttcccgagattcctaatcaaacatcttctacacaaaatcctcttccaaaaagtgtgtcagcagaggtcaagcctgtggcttcaggtatgcctgatttatcagtttcttaaccatgcgctccaagtcttgttaaactgtgaaggattggtttatataactcggttttcttcaacggtgcagccaaaacgagcaagccagcttgtaaggtgaagagcgtcgctgaaaattcagctccatcagcttacaagaacccggagaaatttgtgcaggagattttggacaaaacttcggctctattattgtccgaggtagtaaactcaatcccgaaactaaagtcgatttcgtaacatttatagatcaactctgaaccggttttatatacaggctaagggacagtgcgtggaggctttggcagaaacactaagaaaacgacttacctcagagttgacccacctctctgtgagtacatttcgatatacatggttcgcatcgggtaagactaagccgtttgtactaatcttggttctatgtaaattgattgcagattatgtacaagaactcagcgtacgcagaaggtttttatgctggtacacgccaccagccgaagcgattgtaagaggtttggtttacatgttgaaccggagatatttgggagagaaacattaccggttcagcaa

SEQ ID NO: 151809 - DNA, 1038 bp, Arabidopsis thaliana landsberg
ttcagaatgatgtgagcgacatactcgacctcacatttagtatggacgcagatgaggaaaaacacattctttacgagaagactgaggtgtgtgctgattgatgttctttcttttgttgtgctttatcccaaattgcctagtatattgaattgatcattttatctttgatgaaaaggtgacggactatgaacttaaacctggaggacgaaacatacgggtaacagaagaaacaaaacatgaatatgttgaccttgtggccgaccacatacttaccagtgctattcgccctcaaatcaacgctttcctagaaggcttaaatgagttgatacctcgtgagcttgtatcaattttcaatgataaagagcttgagctcctaatcagcgggttgcctgagattgattgtaagttggcattctatttttcaatatttttgcatctatttgcttattcatttaaagttataataacaatcttgttatctgttttcttttgttttttagttgatgatctaaaagcaaataccgagtataccagctacacggtagggtcccctgttattcgttggttctgggaggttgtcaaagctttcagcaaagaagatatggctagatttcttcaatttgtcactggaacatcaaaggtaaaaccaatatttgcagcttctgtccaagtcgcttgagcttcattttctgatatgtactagtttttcttctggttgttttacaagcggtgtttctgtattcaggttcccttggaaggcttcaaggcactgcaaggtatttctggccctcaaagattacaaatccacaaagcatatggttctccggaccgtctgccatcagctcattcatgtgttagccattattacaaagtctttttttttttcagttaaacgtggtcgtaattttcattggttctgttgcagttttatccaactagacctccctgagtatcaatctaaggaacaagttcaggaacgcctgcttcttgcaattcacgaagccaatgaaggttttgggtttgcttgaacaaagctta

SEQ ID NO: 151810 - DNA, 1703 bp, Arabidopsis thaliana landsberg
atggcacctgagatcaataccaaactcaccgtaccggtccactcagcaaccggcggagaaaagagggcgtacgtgactttccttgctggaactggagactacgtgaaaggggtggtgggtcttgctaaggggctaaggaaagctaagagcaagtacccactcgtggtggcggttttgccggatgtaccggaggatcaccggaaacagttggtggatcaaggctgtgttgttaaggagatagagccggtttatccaccggagaatcaaaccgagtttgctatggcttactatgtcatcaactactctaagcttcgtatctgggaggtacaaatataaatatgtactgtttgttaagttttttatttataagaatataaaatctagcaaagtaaattctatatatgaccaaaatattattatgtacttcattgtttgttccaaaagaagttgatatttataaaaaaaaaaacttatagtgattatttttatatctctaatttcttatatataataaaattatatatggatgcagttcgtggagtacaacaagatgagatacttggacggtgacatacaagtgttcgacaacatagatcacgtgtatgatctgccagacggccaattctatgcagttatggactgtttttgcgagaagacatggagtcactcgccacagtacaagatcggttactggcaacagtgtccggacaaggtgacatggccaaaggccaagcttggtcttaagccgcctttgtacttcaacgccggtatgttcgtttacgagcctaacctctccacttatcataacctcttggagaaggtcaaaattgtgcctcccactctttttgctgaacaggtaaatagataaaattattaagttatagaaacccacaaaaagttattaattatggatattgcaacttaaaaattataatcatttgaatatgttataggattttttgaatatgtacttcaaggacatatacaagccaataccaccagtgtataacttggtcttggcaatgctttggaggcatccagagaatatagagcttgaccaagtcaaagttgttcactactgtgctgctggtgctaaaccttggaggtaagattattactagttcaaataattttcaatcaagtttatatattgacgtccaatcaagtttatttatttctgtaggccaaaattttaatatattcaatttgatgtatcagaaaataatatctttgcatataactaacaataagttgaaagtaccaccaagtcgtagaactaaatgttgcaaattttattgggatatctaaaaatttcacattagaaatatgttctaacaaagttttatctaccgaaaatagttaaaattcacaaacatacctctcatgagctttactttaggagtaataattatactatatgagctattttaatattaatttgtttatagaaaagttgcggatttgaattttctaaaaggtgtttgttgtattatatcagattcactggagaagaagagaacatggacagagaagacattaagatgctggtcaagaaatggggggacatttacactgacgagtctcttgattacaagaatgttgtcattggggacagccacaagaagcaacagacacttaagcagattatcgaagctttgtctgaagccggtgcgcttcagtatgtcaaagccccatctgcagct

SEQ ID NO: 151811 - DNA, 756 bp, Arabidopsis thaliana landsberg
atgcagagcaaagtggtgagaaaactctcaaacaccggtctccgctattgggtaatagagtttctcagaagacaggaaaagggtaaaaagtacaccgcattggtcttgagatttgtcaaagaccggatcgcatcccttttgttggttgaggtaagtgtttaattccacatgaatcttttctcataataagcggtttagatcatgttcaatcacttgtaaaatgtttccaggtgggttttcaagcaacggcgtgggtgtcagaaggaaaacaagtgggagatgaaatcgaagttcgagtagaagaagctcatccccgcgacgatcttattctcttcaaagaggttatctagagctttaaaaacacacagttcaggaaaattcattaaagtcggtttctctaaacatggagatgcctgaaactgatagaaagcttgtgtttacaaaagaggtaactaatttccactaatgttttaactaagcctgatatatatcaatgaattgaatacaatattttgctcttttggtgttaaagaaacttgctgatggacgcagccattggtggcttgagctatgatctgctataaaagttgaacacatggtaatatggtacgcacttaatagggttcatacaattttacatcatcttgttattctaagtatttatggaaacttgcgtttgttctgtagagcaaaggatgaaaaaggaatgtatatatatactatttcaatgttgaattttattgatctaaagtcttg

SEQ ID NO: 151812 - DNA, 737 bp, Arabidopsis thaliana landsberg
tttagtgtcagtcttcactcactcactcaacatcgtttcaaatttcagagcaaaagtctctaaacccaaagcctctccacttaattgcctattcttcaaaaggcgagtttcctttaccaagcttgcaaagttatctaaactccaaacaatatctaaaacgcgtgtactcatttctcttattctttcttcttaagccatgactaaagatgaagactttaagctcctaaagatccaggtagttttaagactttctccactttttttttatctttttgcaatagtctctcattgtgttaatggttatgactattgcaaaacacagacgttttcactcagagtcaacattcactgcgagggctgtaacaagaaagtcaagaaacttcttcagaggatcgaaggtttctaaatttcacacatgcaatacatttctgctttactcattttggattctcgatagatacattgtcatgttttgaccaaaacaggagtttgccacgtgaagatagaagcagaacatcaaaaggtgactgtttcagggtcagttgactcagccacactcatcaacaagcttgttaaagccgggaaacacgccgagctttggtctcctaacccaaaccaaaaccagcctcaaaagcccaagactaacgacgtcatcaagaacgttaatcaaaagggtcagaagcaggggtctgccaaaagtggtattgaagcctgtaaacccaagaacggccctaaag

SEQ ID NO: 151813 - DNA, 1037 bp, Arabidopsis thaliana landsberg
agattacaggagagcatgaggagattggttttcatcatgatccttctcgtctgcattccgcaccatgctccagtacacaaagacgttcaggttcaggatccgcactgactcagactgagaatgagttcattaaccctactggggtccgagagttggatcttcttctttagctcggccatatgagctgccttctcctcctcctatcccgatgcagccatatgtctttcaacaatacatcgtcgacaacttcaagagcgtctggaacgccatagctacactctctcgatacggttgtgttgcttccactcgtcgccgtcgtcgctctcccgcacccacctccggctcagagcatgaggactagccatcctccctatcttgctttgttttctgattttgtttttgctttatttcagactatttgttatttgtattggaacttgttgcacttattttcctatgctttgttggaactattgatgtgtgttttagtgatttaacagtctaactcgaggatccatgtgaaaacacaaaccaaagctctacaacgatgaactgaattcgcaaagcgatgcaaaaatgacctgagtgtcgatcgacaccaacctataatcgatcgacaccactctcaggtggcaactcacgtttctctaacttttaacttttgattatttttctttcgattcctcttgcttaatgactctggggacaatgttatctaagtctgggggagtcagttactaacttcatcttttcttttcttatgagtcagttgtgtcattctaacttagatagtcgttttattgagttaaaacttttgtctgaaattatgatctatctctcgagtttattgcatggatggtttaagtactgcagattcaaatcaatccgactaatggaaaatccagaaagccaatcaacaaacttaaggacatccattcccaacataatccacagaggctggagctaatctcattactcttccttttacctcatcaaaacggttagtgttcataggacttgactccttgttcatacct

SEQ ID NO: 151814 - DNA, 462 bp, Arabidopsis thaliana landsberg
tcccgatacagaggcttaatgaagctgtaaatggtttcactgatgaaggatggtcagtgataggagatagcatggatgatgtcacaatcactgtaaactcttgtccagacaagctaatgggtctaaatcttacatttgccaatggctttgctcctgtaagcaatgttgttttatgcgcaaaagcatcaatgcttttacaggtcagtgcaccattttttttatagatcaactgatgattgtttcaacactttttcaccttcttttaatgggattttgcacctacagaatgttcctccggcgatcctgcttcggtttctgagggagcataggtcagaatgggctgacaacaacattgatgcgtatctagcagcagcagttaaagtagggccttgtagtgcccgagttggaggatttggagggcaggttatacttccacttgctcatactattgagcatgaagag

SEQ ID NO: 151815 - DNA, 1974 bp, Arabidopsis thaliana landsberg
acattcagagcacagagagattcaggaattgtactggaccaaatatcgttgttgatctcttaaatgattccagctccgattctgatttgttagatgctggttttgcggttgttgctgctgcagcaactggtaatgaagttgtgaaacagttattcatggaactgaaaatcgatgaacttattctgcaagtgttgaatagagagagtaaaactaccattagagctttgtacgatgctatttgtgctcttttgactccagatgacttccgtgttgttgcttaccaagtaagtatggttacattcgtttggtatatgccacttttgactgcgtgaatgaaattaagggaaaacagcttatatagcacttagcaaacatttataatcgttgttttttgtgcttattcatggacatgctttgagaattcaaatccactagacttttgcttccatgtgtttcaggtttatggttatgcacgaacttttgccaaattagggattgcgacagccctcactgaagcattacaggcagggattggctctgatagtttggtgtcagcaagtactgcgttaaaagcaattgctgtcaatgtaagtctcctagttgaaatctctgtgtgataacatttatctggttaggttcttgcaagttcttcatctggttttgctgtaaacaggatgaaatatgtaaatctattgctgaatccggtggaatagatacacttcttcggtgtattgatgatagcggtgagcaaggcaacaaaactgctgctaagacatgttgttccctgttgtctaaggtaagtagcttctaatatgccctgcaggctgcctctgttgtcttcattgcctttggttattcaaaatccttctttaaaactcaggctttcaagtattttccgcaccatattaaggagtagcttatgttcatgtgcttctaataaatgcatgttctcaaattttaagcttttccaaagcctattactgatttagattagcattgtaaccacgcataataaatgtttatctaaaatgtgtattttgatctctagttggcaggaagtgactctaacaagagtaccatagttgagaagcaaggtctggacaagctaatcacactcgcactacgattctctgatgatcctctagtcatacaagaggtaagtatataaaccaaacgaaaaccctcttatgacactatgtcccatgcgcaattttaaatcttcctgtctagagaagatacttgtgactacaggtcacgtctttggcagttttccactagatagaacgtaatgtcgtgtgaagaatgtttcttgtagcactagggtctgagtgcataatccttgtggttgatccaagatatacttgattggttcaggtgatgttgataatctctataatctgtctgagatcaccagaccacgcagccaaggctatagaagctggagctggtgatctagcggtccaagcaatgaaaaggttcccagtagctgctcaaatgcagagaaacgcttgcaacatgatacggaacattgctgtcagaagtgcagagaacaggtttttgctctgtttccaattcttgtcatccaacaatatgcacatatcgcaaactcttttataatatcaagttctgtctgcatgcacactacagaactattctgcttgctaatggaatcgagaagctgataagaactgctaaagccaacaatgagacatgcagagccgctgcaactgatgcactgagagaccttggccttgataactacaataactaaggtcaatctttctccattggttggtactcgcaacaaccggaatgaatccagtttcttttttcaaaaatttcataaacagtttgcattgagttctctcttttgggtagaaagcattccgatctagtcttttttgcaacgattgcttttgttcgaatgcttgaacatgtagtaaaattgaaaggaattgattgaaaatatcggtg

SEQ ID NO: 151816 - DNA, 883 bp, Arabidopsis thaliana landsberg
gttgatcagaattgatccatatcgtttggattttattgtgatttttttaatagtccaatatgaaactccagtatgcaattgatctaactggccaacttagagttcttgttcagtgtcaattgacccaattgcttaagaaacaaagatttgagatcacttgtgttacattgcccttgctttgacattttgctattgatctaactcactctgctgtttcaatattgcagaaactgagaatgaaagaatagttcgagaattctcccacttgctggatgcatccgaagcttattccatagctgtgagatactttactctctactatattaatttctatgtgagccgagttttgtggcaaaatatttaacaatctcagtgtgtttacatagttattcacgaattagagattaacgaaccatgatctgatttcttaatagagtggactaaaaccaaagggaaatggaaatgatatctcaactttggctgaaaggttatacttttcacttatctctatagttttatactctctttgataatcaatagctggtatatccatatgttgatgctagtatttactttaatgccaggtttatgggactcaaagctgctttagttacggacagttctactctgacttctttcggaaaactgattggcttagatgtattacagcttagtgaaatatgccaagagagtgattcctttccttctgatgccacatcatctaaactactaaagctgcttggatttgaaggaggaaagtgcttggatgtgaacctatatgacttggtttttgttcatttcggggttgatgaatataataacgggaacaacatgggaattctcgactctttgattggcagtattatgggaatggctcaaccag

SEQ ID NO: 151817 - DNA, 616 bp, Arabidopsis thaliana landsberg
tgatttcgatagtgaacatgggacttttcgtgtgggcagcgagtaagtatgtttacaagagtgatgatgacaccaggagtttagtagaggatgtgttcaaatgaaggccaagccttagacacatctcctattagtatctaattatagcaatgagagatgtgtatatatggttttcaagaaaatttgaagttgtgctattctaattaacatgatgaataaaacttgaagttggaagtaccaagttttactcaagttcaatggttatgttctacctgttgaacctattgatttcctttggtcacatatacttgaacattggcgaattcacatggtgttggtcttaaattcaaccaacgatatagatctgttaagcaagttaactttgaaagtataagtaccaagtggaatagtattttcccttaggacaagggatcattaagtaccatagtatgaagcaaccgtgacattggaccaaacccaaaacatcacatcgtcatctcctataaggattctatctttgaccctagataagccgtccaacaacaaaagctctagtcaatggtcttcaaattacaattctttctgtggccaattatatcgatactttggtgattaa

SEQ ID NO: 151818 - DNA, 811 bp, Arabidopsis thaliana landsberg
  unsure (1)..(811): unsure at all n locations
ttgcctgactacgtcgtaggtgatgatagaaaggtctttcaagcgattttgcatatgcttggggttctaatgaatcgaaagatcaaagggaatgtgactttctgggtttttccggaaagcgggaactcagacgtatcagagaggaaagatattcaagaagcggtttggcgacattgctattcgaaagaatacatggaagttagattcggnnnnnnnnnnnnnnnnnnnnnnnnnnnnagtagtagtagtagtagtggtagtaacctggaggaggaggaagagaatccgagtctcaacgcttgccaaaacattgtaaaggttggtcatttgtgttttgtatgtaaatgtgctaatgacttggtttaacacttttatcttgttttgtgacagtatatgcaagggaatattcgggttgttgaggacggtctaggtttggtgaaaagcgtctcagttgttttccggtttcaactccggcgatcgatgatgtcgagaggcggtggatattctggagaaacgtttagaacctcaactcctccgtctactagccactgatcattgacgtcaggaagggggggaggggaatgtagtgcaaaagaaagatttaaggggtggaatctgagaatttgtaaaaacagtaggggctttaatgagattaacagagagagtactaaaacgttgtcgttcggttgtaaaaacctgaaagttaactaggttttaacctatcgtgtaggcaaaaggtatgatgcagacttgttgtaacttgctggtgataacagaattcaaagtaaaaaaatgtgtcggaggatgttcc

SEQ ID NO: 151819 - DNA, 482 bp, Arabidopsis thaliana landsberg
gccactcccgaaggatttctccggcttatacaaatcctactgccgtcaaaatcgattcaaagcgaaccagagattgaatggaagatgcagctgctccgaattcaggatccgaatttaatccaggagcaagacgcggcaaatctatcgatgaatgccaagacatgattcgtaggagtttccgaagtatatatacagactaagcatctagatttcaatcttcgttcttatttctcagtttctgaatcttaatccatttgttgtttgattagctcactctgtaatttgagatattcatggaaaaagttttaattatttcgtgtaatctagggtttagggttttggaatcacttgagggtttaaggagtttaggatgttaaatcacttgtttgatttgctttggttatattggtctgactttgaatgttgtttgattagacccaatagtgaagtttctatggagcaaatgagaaatcaggtgtgag

SEQ ID NO: 151820 - DNA, 566 bp, Arabidopsis thaliana landsberg
gtcataaataatcaattactgtctttaattccttctgtgcagactgatgagatactaagactgaataatatctacaagcggttattggcaaatgctgcggtgaaattgtatgaaggtgaagcaagagtagttggtcccaacgaagtgcaggtgagacaaatagatggcacaaaaataagttataccgcaaagcacatattgattgccactggcagtcgggcgcaaaagcctaatattcctggacatgtaagtttctgtgttcatgttattttttttatctactatagtgtgatgtgcttggtatttatgaaatcattatcttcagagtaagtccggaaagattttaatagaaataacagacacatctgtatgtttgcaatatgatttctctaaattagtctgtgagaaaaactattaactgctatttatggaaagtccactgagttatacataaactgtcttttataggagctggctattacatctgatgaagctttgagctcggaagaatttcccaagcgtgctatagtgctaagaggagggtaatgtcttcctcaatgttttcc

SEQ ID NO: 151821 - DNA, 1655 bp, Arabidopsis thaliana landsberg
tgccgaatttccttactgcttcgatctcaataccacctactttttactttgttctatcgcttacgagaagcccgatctcatcgacttctatggtaccaaattcttcaaataatacaaaattgtatacaataattgtgttttgttatctatacaaatattttagttaacttagtgtatgtataaaaaatgtttatgcgtgaaaaaaaaaacctaaaacaccacatacaatattgaaggagacaatgtatatggattgtgcgagacaagtgacgtggcaaaatcgatggacatggcatttgctcctgcgatcgaatcggggattccatgggtggctattttggggaatcacgaccaagaatccgacatgactagagaaacaatgatgaaatacatcatgaaactcccaaactcgttgtctcaagtaaaccctcccgatgcttggctataccaaatcgacggttttggtaattacaatctacaaatcgagggtccttttggctcccctctcttcttcaaatccattctcaatctctatctactagacggtggatcttacacgaagcttgatggttttggttacaaatatgattgggtcaaaacctctcaacagaattggtatgaacacacttctaaatggcttgagatggaacacaagaggtggccatttccacagaatagtacggcaccaggattggtttacctccacattccgatgccggaatttgcattgttcaacaaatcgacggagatgactggagtaagacaagaatctacttgttctccacctatcaactctggtttctttaccaaacttgtcgaaagaggtgaagtcattggtgttttcagtggtcacgaccacgtcaacgacttctgtgccgaactccatgggatcaacctttgttacgcaggcggagccgggtaaattgtaccacacgctacttttctcataaaagccttacttgtaacacacgcttcttttaattgttttaggtatcatgggtacggacaggttggttgggcaaggagagtaagagtagttgaggctcagcttgagaagactatgtatggacgttggggagctgttgatacaatcaaaacttggaaacggctcgatgataagaatcattctttgattgatactcaacttctctggaccaagaacacaagtaagtaatatcagatttgaattaacttgaatatttggagtggagctgtgtgttctgatctaaacttttgttttattgcagctcttgagccaaattttgggtttagttgctctactataccacaacactgatcattaagcagagttgttgtacaatgatatgatattttcattttctttatttatgctttactatctattattttgtttagaataagaattaaggaagacaatgtcagcttataattgcctgctttgtttagaataagaaggaagacaatgtcagcttataattgtctgctttgttacgttcgttttatttttctcaatagagtatcattttatctataaacatgagtcaatactcaatgggtacgctttggtaaagttaataatctcgggaaatgtttatagaagagtttataatgtaggattttctgagtgggaaatattggaagactggaatcgcagaggtcaaagtcaaacttga

SEQ ID NO: 151822 - DNA, 1044 bp, Arabidopsis thaliana landsberg
ttttttaatcagggacttctggaatctatgggagctaatggatcgacgggacctgaagctgttgcatatgcagagaagaatgctgctctattaacggctagagctggtgcaagagatccatcggcaataccatctatatgtcgcatttctgctgcccttcaatatcctgcaggtaagatttttttcttcgtttttttttcaaaaatccaaggacgtatagttcatctctctggacaaaaattatttgcattgaaccatccaagtttcaaggagctttttaatgaaactattgctcactgcttcatgaatgacaatctttctcaatgcagtgcaaaatcataaaacaaacattttaaaaataaaaaaaagttcctagcattgttagttcatctacctattacgtcgattgaggaatgctataataaccaaaaggtttaatgatggccactagttgcatatcattaccacgctttggatctgctgttgttttcaaccataaaaagtggaacaccttttatataaaatacttagaaatcttcatagatcaaaattcttagtggcttcttagtaggacttgcttatcatctatattctgctgcttgaataggtcttgagggttcagatgcaagtttggcctcagtgttagagtctcttgagttctgcttaagagttcgtggttctgaagcatgtgttttagaagacttagcaaaggcaatcgatttggtccatattcggcaggatctagttgaaagtggccattctctgttagatcatgctttccgtgcccagcaaaaatatgaaaggtaaagcgtgttcctcagtgctctggtctacacaggccacaattatcttatttattgccccacactatcttatgtaaacttccactatactgtgtatcttgtatgcagaacaactaactactgcctagatctagcttctgaacaagagaatacaatatcggaccagtggttacctgaacttaggactgcagttcagaatgcgcaagcttcctcggaacactgcaaatacgttaggggtttg

SEQ ID NO: 151823 - DNA, 843 bp, Arabidopsis thaliana landsberg
atgattaaattagaaaattcgggaatcgaagatgaagaagttagtgaatcgccgaaattggttttaaattcgcgtttcagacggaaactttcgagagattaagcagagaaggttatagatcgttgagtgatgattccggtgtggagagcgagagcagttttttgtcttctgattcttctccggtgatttttatggcggcggcgaggaaatacgagacaccgtcggcgaaaaatctcacctttgtcctcgaaaacccaaaggcggcgacttttagggttgaagattgtttcaaggagaagcaagagaaaacagaggatttaggttactctgtttttcacggcgaggataaagtaaaaacagaggatttaggttactctgtttcctccggtgaggagagagtaaaaacagaggattactctgtttcatccgttaagaagaaaaaaatcagatttttaacagaggaagattttttggagtcggactctgattttgttgattcaagtcagacattcacaagcaacgacgaagatgggtttttatcagattcagatttcgcagaaacatcactgaagaaaggacaaaaccgtaaaagcgacaattctggttctggttctgattcagaggaagaagaagaagaagatacaaatgggtttgagagtttatgggagcatcaagatttgatagaacaacttaagatggagatgaagaaagttaaagcaattggtgggcttacgacaattcttgaagaagaagaagaagatgatgattgtcctaagatcatggaagatttaaaaccatggaggattgaagaagagaagaaatttaaacatgttgatacgattg

SEQ ID NO: 151824 - DNA, 470 bp, Arabidopsis thaliana landsberg
gaatgcaaatagaacaaaagatttctaacttcttcttttcttcatcatcgacaccatcgtcaccaccaccactcatcagtctctgcctctttttggctttctcagcttcggtcaaagtcacatcagcctgaatcgcacggatcgcagcaacgagaactgaaccggaagattcaggtgcggagattccggtacccggtgcggcggagggaacgacgacgccggagcaatcgggacactcccactctccagtggaagaagcgagtgattcggggaggagacacgacacgtgccatggagtgacgcacgtgccacaagtgagagtctcttctgacggaggtgtcacctggcaccgcatacatacaccgtctccgtcgcaaggaagctgagtttcaatcgccattgttgaaacgagtgagagagagagagagagtggtgttatcgagagatgagaagaggaaggggaaaaatga

SEQ ID NO: 151825 - DNA, 1053 bp, Arabidopsis thaliana landsberg
aacagaaccaaccaaccaacaagaagaatccaaagacatgaaacttctctttattgttctcatctcttttctttccctcctccaagcatcaaaaggattcgatttcgacgaaaaagaattagaaaccgaagagaacgtatggaagctctatgagaggtggagaggccaccactctgtatccagagcttctcatgaggcaataaagcggttcaacgtttttagacacaatgtccttcatgttcacaggactaacaagaagaacaagccttacaaactcaagatcaatagattcgccgacataacgcaccacgagtttagaagctcctacgctggctctaatgttaagcatcaccgaatgcttcgtggaccgaagcgcggatctggtggtttcatgtttgagaatgtgaccagagttccgagttctgttgattggcgagagaaaggagctgtcactgaagtcaagaatcaacaagattgtggtaagagactcttttcttgataattctttatatgctctgtttttttgctctgtttctgagtggatttaggctatctcggaaatattcaaagtacatagattataagatttggtttgatctttgatcaaacatatttcttgaaaatcctacacttaatatttattaaatcactatttttaaactaaaatctctaggaagttgctgggcgttttcaacggttgcagcagtggaagggataaacaagatcagaacaaacaaactggtttcattgtctgaacaagagctagttgattgtgacactgaagagaatcaaggttgtgcaggaggtctcatggaacctgcgtttgaatttataaagaacaatggtggcctcaaaaccgaagagacttatccttacgattccagtgacgttcagttctgtagagctacgagtattggtggagaaactgtaaccatcgatggacacgaacacgtccctgagaatgatgaggaagatcttctcaaagctgttgctcaccagcctgtctctgtagctattgatgctgggagctcagatttccagcttgactctgag

SEQ ID NO: 151826 - DNA, 1024 bp, Arabidopsis thaliana landsberg
tgattatgaccaacataccattgccattatttgcgcagatccttgagatggacacttacagataccacggtcactctatgtctgacccaggaagcacttaccgtactcgtgatgaaatctctggcgtgagacaggttagttctttgttcatttgtaagactactgctccaaccatatgcaatttgaaactttttaatctgtaaagttttcatcggtgttacctttaggtgcgtgatccaattgaaagggtgcgaaagttgctcttaactcatgacatagctaccgaaaaagagcttaaggtaccctgttcaccaccttcccattccagacaaaaagcttgaaaaaaattatacatacaaccatcaaacttgactatggaaatgacaaaattcttttgacattaaaggacatggagaaagagataaggaaagaagtagatgacgccgtagctcaggccaaggtaataatcttaattgtttctatctttgtccttgttatttatcaaaacacaaactaattccttgctgtttaacttgtttcaggagagcccgataccagatgcatctgagctattcacaaacatgtacgtgaaagactgcggagttgaggtactatcacatcccactctttcacatctatttatttcttttgtaaccctgtggcgttggtagttgttggcatatgaatctagagatttacgcattttcctccattgaaatttgcagtcgtttggagcagacagaaaagaactcaaagtaacacttccaatagaatcttgcttcccaaggagatgattggttcaataaatcagaaggcaaggctacacaaatctttttaacttgctaccaaaaatatttctggttttttttttttgtattttcatttcaagtgtaaagccattgcttcaccagtttgccaactttgtttcccacacttcaatttgacaccaagcaaaagaagcttcggatatcactctgtgagataaagttagagaaataagcagagagagtagttaaaaaacaaa

SEQ ID NO: 151827 - DNA, 1565 bp, Arabidopsis thaliana landsberg
  unsure (1)..(1565): unsure at all n locations
tatgattgctgatgctacatcaacattgcacaaggctggtgtttcagcaacagattattctttttaaatacatttggttccaggtttgtccttatattccagaaaacttgcatgttgcacttgaaatgttcttatgttggcgtagaaatgaagaagttagggcatataatagtaaatggattttgctttacnnnnnnnnnnnnnnnnnnnnngccacatatcgctgcaggaccacgagagtgaactaaaggcaatctatactggctctactttcctagaaagttcagctgctagtgataacgtgggactagtattggggtctacaagcttctatgctgagcagggtggtcaggtaatccattttatttgatatgtattttagtttgctaattgtttttcatttctgatcatatgactggtggcatgaaattgcagtcttcagtatgttcatcttggatttgtatatatatacaaatgtagacatggcagtaacaccatgaacacaatcatatcagaactgcattgtttgaatttatgtatcggctggcaaataccatgatatagttattgttggttttgcatactaatttctgaagttgtcgttgacagtcacataaatatttttagatttcatatccatgaacaaggttaagcttttgattcacttccaatcatctatatgtatataaactctgtgcctctaacatttgttctctggcaatagatttttgacactggacttatagaaggctcgtttgggacattcaatgtatgcaatgtacaaatatttgggggctttgttcttcacattggttatctctctaaagaaactggagaggtatctgtgggtgataaagtgatttgcaaggtaactctctgcatcaaacagtgtttgtctcattcaccatatttggtactatccaatttgtttccaccttcgttttcatgcgtataggttgactatgagaggcgtaaactcatcgctcctaatcatacttgcacacatatgttgaattatgccctgaaggtatcccttttctataatttaagtaacctaaactgtgattttctaattttttctattggatctgaaaatattcatgtcccatgaattcaggaagtgctcggggatcatattgatcagaagggatcaattgttcttcctgaaaaactgcgatttgatttttctcatggtacatttttgaataaagtcatttttattttgatgtggatggtcatcttaattgtctgatgggttccataatttcgagtaggcaagccggttgctcctgaagatttgagaaggatggaatccatagtgaataatcagatcaaggatgaattaaatgtgttttccaaggaagctgtgctttctgaagccaagcgcatcataggtctaagcgcagtgtttggacaagtaagctgtccatcagttctggagctaagcctatcaagtgtggtttctaagtagtgataaagcgttctatcttactctgtttaggtctaccccgatcccgtcagaatgttgtagtttagcactaaggttatcgattgcttgtgtaatc

SEQ ID NO: 151828 - DNA, 4509 bp, Arabidopsis thaliana landsberg
  unsure (1)..(4509): unsure at all n locations
cttttgatgcccttggtggtgataaggatgacgaggaagtggatggagatgaggaacaagtttcacctatcactttctctggtaagaaaacgaggtcctccaaatcttctaagaagaccactaataaagttgctttgcctgacgaggaagaagggacaatgggagacgaagagagcctcgaaatcacgttttccggtaaaaagaagggcagcattgttttggcctcannnnnnnnnnnnnnnnnnnnnnacgaaactagtcaagctaaaactcctgatactaagagtgtggaggttatagaaactggaaagatcaagaaaaagaagaagaataagaataaggttgcaaggacattagaggaagaggatgatttggacaaacttcttgcagaacttggagaaacccctgctgctgaaagacctgcttcatcgacacccgaagtagagaaagttcaagctcagcctgggccagttgcacctgtagagaatgctggtgagaaggagggtgaaaaagagactgttgagactgctgcagcgaagaaaaagaaaaagaagaaggagaaagacaaggaaaaaaaagcagctgctgcagcaacctcttctgtagaggctaaggaggaaaaacaagaagaatcagttactgagccactacagccgaagaagaaggatgcaaagggtaaagcagcagagaagaaaattcctaaacatgttagagagatgcaagaggctcttgcacggcggcaagaagcagaagagagaaaaaagaaggaagaagaagaaaaattaaggaaggaggaagaggagcgccgcaggcaggaagagcttgaggctcaggctgaggaggctaagcgtaagagaaaggaaaaggaaaaggagaaactgttgaggaagaagctagagggcaagcttctaacagcaaagcaaaagactgaagctcaaaagagggaggcgtttaagaaccagctgctggctgctggtagaggtcttcctgttgcagatgatgttggtgatgctacttcctcaaagcgtcccatttatgccaacaagaaaaaaccatctcgccagaaaggcaatgacacttctgtccaggtggaagatgaggtagagccacaagaaaaccatgcagctactttaggtgaagtgggttcagaagacactgaaaaggttgatttactagagtcagcaaacacaggcgagaaatcaggtcctgctgatgtagctcaggagaatggggttgaggaagatgatgaatgggatgcaaaaagctgggataatgttgatcttaaaattgacgataaagaggaagaagctcagcctgtggttaagaaagaattaaaggcacatgattcaggttagtacgaaatgtagttaattcttctccctagtgttttatccaatgtctgtttttaatctaatttattgaactgttacagaccatgaaactgaaaagccaacagctaaaccagcaggtatgagcaagctagaaacagctgcggtgaaagctatttctgaagtagaagatgctgctacacagacaaaacgtgctaagaagggtaaatgcttagctccaaatgaatttatagaagaaggtggagaaaaactccgttctatcatttgctgtatcatgggtcatgtcgatagtggtaaaacaaagctgttggattgtatcagaggaacaaatgtacaggaaggtgaggctggaggtataactcagcagattggtgcaacatatttccctgccaaaaacatccgagagaggaccagggaactgaaagccgatgcaaaacttaaggtgcctggtctattggttatcgatacacctggccatgagtccttcactaatctgcggtcaagaggttcaagtttgtgtgaccttgccattttggtggttgacataacgcatggtttacagccgcaaaccatagagtctctaaatcttttgaggatgaggaatacagagttcattattgcattgaataaggtaagactgcttgttattctgctacgatgggatttttttctctgttgcaaaaacttatatggaaaataaaatcttcactttccaggtggataggctatatggatggaaaacatgcaagaatgctcctatcgtgaaggcaatgaagcagcaaaataaagatgttacgaatgaattcaacataaggctgactgatgtaagttatacgtctagagtttcttatgtatggtttgagctatcactttgtgtacatatttttcaaattatgttgttctatggtattccagattataacccaattcaaggagcaaggactcaacactgagatttattacaagaataaagaaatgggagaaactttcagtattgttcctactagtgctaaaaggtatgattcatgccgtatgaatctctatttactgtttgtaatatacagcgtaacagacaagttattcatcctaaacgtaattgggtaacgttggttcttgatattacagtggagaaggggtcccagatctcttgctgtggttggttcaatgggctcagaaaacaatggttgagaaacttacatatgttgacgaagtgcaggtctctttcctttctctttaggtaacacttgtttctgcaatacttcagcatgcggattctgatcttttcttgaaattgttgaacagtgtactgtacttgaggtcaaagttattgaaggccatgggacaacgattgatgttgtgttggtaaacggtgaactccatgaaggtgatcaaatcgtcgtttgtgggctacaggcaagtaaaaaaactaatgatccaaacaagtaacgcactgggtatacatagaacttagaaaagtgagcttattcttcctcatatttcagggacctattgtcacaacgattagagcattactgactcctcatccaatgaaggagttaagggtgaaggtacttttagatctccacttcatgtctcttgttactgttttttcctcgagtaacatacattatgcaaattgttgccgatgtcaatttttttaacacacatcaaaaagtgttgttttgatgttgcagggtacttatctgcatcacaaagaaataaaggctgcacaaggcatcaaaattactgcccaggtgaaatggactaactctactataatctttgtcactagcagctggtattaaatatactgacgtttagatgatatcctaaatattttgggttgtgtttaaaagggccttgaacacgcaattgctggtacttccctgcatgtggttggacctgatgatgacatcgaggcaatgaaggagtcggctatggaagatatggaatcggttttgagcaggattgacaaaagtggtgaaggagtttatgtacaaacgtctacattagggtcattagaagcattgcttgaattcttgaagaccccagctgtaaatatacctgtcagtggtattgggatagggcctgtgcataagaaggatataatgaaggctggagtgatgctcgagaagaaaaaggaatatgctacaattttggcttttgatgtgaaagtgactacagaggctcgtgaacttgcagacgaaatgggagtaaaaatcttctgcgctgatatcatctatcagttattcaatcagtttcaggtttacattgagaatatcaaagaggagaaaaagaaggaatcagccggtgaggcagtcttcccatgtgtccttcagattttacctaactgtgtgttcaataagagagacccaataatcctggagtcgatgtcatcgagggtatacttaaggtatctatgcttttaatttcctacattctctgtaactctcacccatgatgacacaagtgctagggttcacactttcttatctgtcttgtttgttttcagattggaacccccatttgcgtccctggcagagagttcatcgatattggccgaattgcctcgattgagaataaccacaagcctgttgactatgcaaagaagggcaacaaggtggcaataaaggtaataattggatcattctgttttaacaaggttgcaaatcttttgcttacagagaagaaaagagttatgtttgctgcggtttcagtttcacgcctcgtaatcgatggtttctttggtatacagattgttggttcgaatgctgaagaacagaagatgtttggaaggcactttgacatggaagatgagctagtgagtcacatatcgaggagatctatcgacatactaaaatctaactaccgggtaagtggagaaaatgagcttgtttccccttttaaatcatcattttgataggaaaactgatgtagatcaaaaacccaaactaatttgcaggatgaattatcgttggaagaatggaagctagtagtgaaactgaagaacatcttcaagatacagtaggagattcatatgtctactttggagcttgaaacactctcacatgccttgttatgccgtgtctgcgtcgatgcagaacaaatagattcgtcttcctgcttctagcggagaagccttcacagaagatttgaaaga

SEQ ID NO: 151829 - DNA, 1037 bp, Arabidopsis thaliana landsberg
ggttcttagttatgggaggaagagaaaagtgattctagaagcaccactcttggataaagattgtgttttgggcaacattttagctgctcatttcctttcttcatctgatccttccagagctaattcctatgttgaagctgcggcatctaatcttgtcagtcttattatatccactgtatttgtagttcagatcctactttggttttgaggggctttcctgagtttagtttgtttggcttcaggaacaatctacaccttatgagaaagcggtttacgaggctgttacttacctaatctccgaggatagggatgacgacttggcttttgaaatgcacaccaaggttggttatcactttcattgttagtttatctgaaatgttattctagaatctagttttatatttttgtatctggcacccaaaaaatggttatggttcagaatgtaaagttctgtgcctttttgagtcacttgtttttgaattttaagtgtggtttgcagctacttcaaggattcccaaaggcttgggtttctataaaagagcgcagcttttaagtttctacatgggtcaacctgatcccttcttgggtcttgttcagcaggtacttaagttcttattgatagtgatggtcactgaatggttcacctgtctaagactataaaagttgcttaatattgtaggttctacctgcgaatcaagaagaaagttatattcatggtttacttgcgttcccattgttagaacttggtcgaatggaagaagctgcggcagcttccagaaaaggctatgagataaacaaagaagacgcttgggcacatcactgtgtgagttacttaacattgagcatttgcatcctctattctcagtttccatgtaataattatcactcagtagtttttactaatgatgttttctatctatcttacttatttgttgcagttgtgtcatgttcttcaacatgaatgtcggtttaaagaagcagtggagttcatggaagcactcgcaggaacttggccctcttgctcatccttcatgtaa

SEQ ID NO: 151830 - DNA, 415 bp, Arabidopsis thaliana landsberg
atgttaataccagatattctggagagctacgagggatcaccgttcctattggctgatgctgaaaatttcttggatttagcgaaagggtagaacatcaaggtgagcacttgaagctttgttgaccttcttttatttctctagttcaatagatttcatggagtgtttggctcatctcagctataatgggaaaaacttaaagctgaatcattcaggaactagagacaccagtaagtcttgcagaaaaataaaagagtgaatggtaaccacaagtgctttctcttgcaggagaccacgaaagattgaggaccatatcatcaggcttcagttacgaaaacttccgaagcaattaggtttattacacatggaacttcgtagtcatgcttttacgtcagcaacatacttcaggatgaatccc

SEQ ID NO: 151831 - DNA, 974 bp, Arabidopsis thaliana landsberg
gaaactagtagtggtgaaggagaaggagaatgggagatctctacgctttggacttcgatggagttctctgtgatagttgtggagaaagctctctatctgctgttaaggtcaatttcactcttttaactttacctttcgcatttgagatacttctgtgtttctctgattctgattttgaaattttggagttttgtgatatttcttgcccagttttgcttgaacatcttttgattgttctgtatttataggcagccaaagtgagatggcctgatttgttcgaaggagttgattccgctttagaggaatggatcgtcgatcaaatgcatattgtatattactgttttttctcagcttagaaagtattgttggttactgaaatagcttagattgagattatttctagctctgaatttgaagaatttgaagattcaagagctggtgtttgtaggtgagacctgtggttgaaactggctatgaaaatcttctacttgtgcggctgttattggagaccaagataccgtctattcgaaaatcttcagtgagtgtgaatgctcatcagaatcttcttcactatacttagttctggttaagtgatccttttttgtattgtagatgatgaattgcactttgtttgttaaggttgcagaggggttgacggttgatgggatactggagagctgggcaaagtttaagcccgtgatcatggaagcttgggatgaagatagagatgctttggtagatttgtttggaaaagttagagatgattggattaacaaggacttgacaacttggattggtgccaataggtatgccttcaacatcaaatcttactaaccaactctaagtttcagagacccatcttataaaaaataaggattgatatagtcttctactatatttgcagattctacccaggagtttcagatgcactgaaatttgccagctcaaagatttatatcgttaccacgaaacag

SEQ ID NO: 151832 - DNA, 488 bp, Arabidopsis thaliana landsberg
atgaatggtgtgtgggcgttcgaaatagatattgaatacactggtggtgcgggacttgaagttgaaactcgggttgatgctcgagaggaagatttgcagaaaggcatagctgagggaaagttgcagccaaattctgctggggatgttccaccagatctccttgaaggtcttgcagattttgaaaagcaattaaatgttcccggaggaactgttgatgcacaagatgtgaaaagtggtggaactgataaagctggttagtacggtatttgctgattggttttatgtaatcatctaatccattttcttgtggttttgcataatgcttagaagcattagactaaggatgagaaattatatttattttcatctgtgcagatgaatcgaagggtccaaaaggtacaaaaacaggttcgagcaatggatccaagtggaagtctatgctgaagaacatcgttgaacaagtttcccaggttgatcttcgtttttct

SEQ ID NO: 151833 - DNA, 1453 bp, Arabidopsis thaliana landsberg
atgatcgcagcttcctacggtgaccactggcgtaacctccgccgcatcggctccgtcgagatattctccaatcaccgtctcaatagctttttgtctattcgtaaagacgagatccgacgacttgtgtttcgtctttctcggaacttttcacaagtaagcgagctttaaaacttagttaattagctcttaatcacgaatttggatttaattaatactctgttttattctaactatactctgttttgtggactctctgttctgtcattgtaggagtttgtgaaagtggatatgaaatcaatgttatctgacttaacattcaacaacattttaagaatggtggccggaaaacgttactacggagacggtgttgaggatgatccggaggctaaacgtgtccggcagcttatagcggatgtggtggcttgtgctggtgctggaaacgctgttgattacttaccggttttgcggttggtttcagattacgagacacgggttaagaagttggcgggtaggctcgacgagttcttgcaaggattggttgatgagaaacgagaagctaaggagaaaggaaacactatgatcgatcacttgcttactctgcaagaatcccaaccggattacttcacggatcgtatcattaaaggaaacatgctcgtaagtaccctttttcgatcaattctttagatcactccttgtcatattttggtatgaaacatgctagtttagtgacgtgtatgtgtgcaattttcaggctttgatactagcagggaccgacacatcagcggttacgttagaatgggcattgtcgaacgtgttgaaccatccggatgtattgaacaaggcgagagatgaaatcgatagaaagataggtttagacaggcttatggatgaatcagatatctcaaacctgccttatctccaaaacgttgtgtctgaaacgttgcgcctttatcctgcggctcccatgcttcttcctcacgttgcctcggaagattgtaaagttgcaggatacgatatgccgcgtggcacgatactattgaccaatgtgtgggctatacacagagatcctcagctatgggatgatccaatgagcttcaagccagagaggtttgagaaagaaggagaagctcagaagctaatgccgtttgggttaggaagaagggcgtgtcctggttctggactggctcatcggcttataaacctgactcttggatcattgattcagtgtttggaatgggagaagattggagaagaagtggatatgagtgaaggcaaaggtgttacaatgcctaaagccaagcctttggaagccatgtgcagagcacgtccctctgttgttaaaatcttcaacgagtccgtttgacgtttagacttttggtaatggctatgtatacattagataactagttatgtttgtatgttttctttttttttggtgaaaataggcacgctg

SEQ ID NO: 151834 - DNA, 1691 bp, Arabidopsis thaliana landsberg
catcaccatcttgctcatgagacagcatatcaagacccgtgtaggtcagcatatttaagtggtttctcctttcgagatttgtttcagttacaactctatcctcttgacttccagtttgacaaacagggtagaaggctgtattccacctctcgtggagttgcttgaattttctgattcaaaggtccagagagcagcagcaggggcattgagaacccttgcatttaaaaatgatgataacaagaatcaggtaaatattgctatcttacagcttctacttagatttagccggagcatgataattattttctttgcagatagttgaatgcaatgctcttcccacacttattctaatgctaggatcagaggatgctgctatacattatgaagcggttaggaatctttttataatcaactgttttgctacttatttatctatgtgggattgacgttgaaataaccagttgagtcatgctttttaaggttggagttataggcaatctagtacactcgtctccacacattaaaaaagaggttcttactgccggggcgttgcaacctgtcattggtcttcttaggtatgtggaccctcaccattttgatatacatggttgatggttcagcatagagttgttatgactttggctagagctgaaatcttaccagcttctctattgttgaggtttttatttcgctgttaaccccaagttcattcttttgatttcttgaatttttcttttacagctcctgttgccctgagagtcaaagagaggcggctttattacttgggcagtttgcctcaactgattctgattgtaaggtacaatttcatcccaggttttttatcctcagctctttttccattcccgaaagccttatatctttttttgtttggttatacgaagtgataagttgtttgtttctgttgatttgtagaacataccttcccatttctcactaattctaccattttccctgatttatataggtttgttttgttcattcttcacttcatgctcaaattataactttgcaggtgcacattgtgcaaaggggtgctgtccgtcctttaattgagatgcttcagtccccggatgtccagttgaaggaaatgtcggcctttgcactgggtagattggcacaggttcttcttttaaaacttttggtagttcggttatgaaagtgtacgcattcccatttgagtgttgtgaaatagtaacttcacgctttagatgttacctcttcttacttccagatcaaacatttgataccacaactgttattaatttgtagcttttgtttcttagtgttttcaaataattcctagtgatcctggataatttgctgttgccttgattgtcaactgttttcttattggttacttcaagattggtttgattttaaatttatagatgctaaaaaagctggcttccatggttgtggaagatgggtattcttattgtgtttctaaatctgttttcattagggggaacttttaagtagtgagttatattaaataataaaaccgatgtgtcttttgatttctagcatactctttcttgcaggatgcccacaatcaagctggtattgcccatagtggtggtttaggacctttattgaagcttctcgattcaagaaatggatcattgcaacacaatgctgcatttgctctttatggccttgccgataatgag

SEQ ID NO: 151835 - DNA, 2303 bp, Arabidopsis thaliana landsberg
caagactcccaactcttttctggaggaacaccaattccccctcggttatatatccatttattccaatctgtccaatcatctacgatcttttgccactcgaaaccagagggattgaacaggaaaggagcaaagagccaagtcaccaccatgaaccatatcgaaacagtgatcagaatatatgtaacaactcctctataggcatggccaaatatctgatacactagcaggagtatcatcagctcaatacccttcacaaaatgactgcgcgagtagaatctgtagttttcagcaaatttggcatggaacaccacaaaaccacgcccagtgcctctgtattctgcgccgccatgaaacaatgttcgaccatagtaatgagtttttgtccccagttggaacgtgaaaaacacggaagcgagttgtaactgcatcagtacaaaatcaattagggcgttatggaatcccctctcaagacctatctccatcatcataggtaaggccatcaagaaaccaatctgcacaaatgattgagaagcaagtgcagcttgaagaggcatgttggatcgaaaagctttctggttgctcaatccttcttcaagaccactaagaacgagatacagccgtccatatagaaatacatagaccgtaagcacggttaactgtaagaaagacacagataatgtttcagactgagataaacttcccatgtatcatactgatcgtgagataagataaagaaaaaggaatatgacctaccatagtactgaagtagaacccaattgtagtgaaataacaagaaagcatgcggaagaaatcaaatcggtgccccagcctatataggtcacggcttagagtttgctccccatttccgttagcgatctttgcctcaaacattgaaatctggttgagtcctacatctctccctttaccaacttgtatgtattcatgatgagtcacattgccttcacgaagagtagagttgaaacctgaaaatagcgaaggtatgagagaacgaaacaaaaacgtatggaaacagatcataatatgtgtcaccggagaaaaggcgatgaagcaagtaccagcaaatatgtcttcacttagattgatgactttagaagctttgcagataccacctctggtaaggtgaaacagacgatcaaaaatatctggatgtccgtaatggaatcgtactctggagcagcaacagaaagagcacatcaattttgacaactacaataccctgacaagatttcagaacagggaagaaacttacttgaagggactagctagcactctgtgcccaatcgttacaaaactgttctcttgatttgacataaaccatgcacgagaagacacacttcacaagaaaccacaaacataggagatcagtatgcacacagaaactaaaaatctagaagacagaaataggatcattctgttagtaccttccagtgaaaatatgctctctaagaccaagaatcgtaggacatcttacgcctccatgcttttcaagaaactcttgcagcaagttcctcattttgaaagcttcctccatgtagttgtcctaaggtcaaatatttagaggttaagagtctcctgcggtgattattctttgaacaattttaagcatattatatgtgattcattagcgacacatgttagacaaaagaaaactacgcatcgcacctgattcatgtctatcgtctgcaacccttctccacgggtaaatatgatagcatggttctgattttccggctttccctctcctagtatagctggtcccggaagcttaatccgataaatgagctgacagaaaataaatataactcagtctctcttgaacagcagcatctatatcctctgacctcactgcataggattaaactcatcctcgtattttgggaaaaaaaggagcaccaaaatgttaagtattttacttagttttctcaacttatacctgatctagtgtttgaacagattcagaagaatccattggtttggtctgtggagcagcttttacaagcgctgagtaataaattttctcctctgtccccttataactttctttatgtgtttgctctacctcatcgatataggcgacacgaatagacggatacctgccatgaggaaatagcaagcttaactaatgaggctaagaactaaataacaaaccaactggaaagataaaggatgaaagaatgaagatattacgtcgtcataagtctcaatatgtctttagcacgttggtcgccagatctcttatgaatactgtattgttgacaagaaaccacaaaggtgaacttcat

SEQ ID NO: 151836 - DNA, 1323 bp, Arabidopsis thaliana landsberg
cccttcaggcgttgcactcggtaatgagacatattcaaatagtgtgggtcaattgcaggctagggaagtgcccattcccaacttcccggtttctgcccacccggtatcagcttatgtctttggatgagcgacttcttctggaactacagagcattggtgtgtttcctgagacaatggtaggttttgcatccagtcatttaatctttaaagaacttgagctgaataaaaaaaaacttgttactctagcttggtcactgatttccagtttttatttttatcacagcctgatctggctgaagaaactatgagcactgatgttatggagttgaaggaaggcatttatcaggaggtaaacgcaaaacaaatatttcatgctttacgaggaagactttttgtcagatcgtcattaaactttcgtctttgacgcatagtaacctttctcatattccatttctgaccaatactagatcctaaacaagaagaaaaagctggagaagcttatcattaccatccagaaggggaaagatgttgagaaaaggttagctttggcttttttagattcatatcttccaagttacacctttattttcgctaagatttgaggtttacctgcaggaaaattgagcatcttgctatggaccaacttgtggaaacagcccacaagaaaagaatggtaataaacgaaaattaatttggatgaatgattgtggaatgagaaatggggttcttaattatatgatattgctctgaaaacaggcatgccgtggaagtaaagcagctaaagtcaacaaggttacaagacaagtggcgctggcgttcattaggcggacagttgctaggtgtcgtaagttcgaagaaactgggtttagctgtttttctgatcccgcacttcaagatatcttgcttagttctcccagcaacgatgcaaaatcatcagaaaatggcggctctggaacagccagtaacacgctcaatgaaccttctaatcatcaggctgaggccaagggttcaggtacccaaaatctgaactttagatgttgattctataattgatttttctatagtttcttcttctatggtgtatgacaacatcgataagattatttcagattaatgcgagagcacatccttgataaaatagtttgacagtggttatactttaaatctttttgacggaaaatttgatgagttatttgggttttgtaggtgcagtgtctagtacaaagaggagagaagcattgatagatgatgttatcggatgcgcttcctccaaagtcacaacgagcaaaggcagtgccgtacttagtggaggaggggctcaag

SEQ ID NO: 151837 - DNA, 438 bp, Arabidopsis thaliana landsberg
aagctcaaaaactccatcttctttccccggggaactcacagaccctagatgaattgttaatcatcaatcatcgatttcaagatttagtctcgaaaggttttattttttttgtgcttgcgtcttaaatggagaatcgtaaaggaggaaactttagcgtacctagctccgaagctttgaccacgacgcttcgtaatgcgatccaagctttgggtcgtggtttcgatgttacatctgatgttcggcttctttattgcaaaggagctcctgggtcaagacttgttcgtatagaagaaggacaaaacagagatcttgagttgtctcatgggtttcttcttcctaatgtccctgctgatattgactgttcaccctgcaacagtggcacacaaagaatctctgtttgcagcttccatgaggtgaccccctaattttctacttctg

SEQ ID NO: 151838 - DNA, 983 bp, Arabidopsis thaliana landsberg
  unsure (1)..(983): unsure at all n locations
atacccgataatctcttctatgtttggtagagatatcttctcaaagtcttatctttccttaccgtgttctgtgttttttgatgatttaggtgaagaagaagaagcagagacaaaaacgattatgaagtacgttttggtgacaggaggagtggtgagtggtcttggcaaaggtgtcactgctagtagcattggacttctccttcaagcatgtggtcttcgtgtcacttccattaaaattggtgagattcttgtctatctggattgcatgcaacactctgtattattggtcacccgccaaaaaaagtcaccttttattgtgtaacggcttgtattgtgaagccaatttaagtgaatttcgtagctatgagatccttttttcacatttacattccttgtatgtagatccttatcttaacactgatgctggaacaatgtctccgtttgagcatggagaagtatttgtattggatgatggtggagaggtatgtcatattgtgatttttgatgtattttctaatcatctcaggtattgttcctcaaacttgatgcattgtgacccctttcaggtggatttggaccttggaaactatgaacgatttttagacagtacattgacccgtgacaacaatataactactggaaagatataccaggtatttgtactacctcctcaatagttatctcttgttagagccannnnnnnnnnnnnnnnnnnnnnnnnnnnnnnnnnnnttattgacaaggaaaggaagggggactacctcggaagaactgtacaggttcatacattacttgtgctcttacttaacttcctctggttctaatttgattcagtgtttgaacaaagtttttaactttatttaaggttgttcctcatattactgatgctattcaagaatggattgagcgtgcagctaggattccagtggatggacagtcaggtccagctgatgtttgtgtcatagaacttggaggaactatag

SEQ ID NO: 151839 - DNA, 301 bp, Arabidopsis thaliana landsberg
atgaggacactctggaatcactttagtaccatttccaatatcaaaatttctccgagaatgagaagaatttctgcagcaaatttgatctcaaatcgaaatctttcaaccatttcttctactgaagatcccgagctcagagattttgtgggatttttagaatctctcaaaaactatgagaaatcaggtgtaccaaaaggagctggaactgattctgatgatggattcgatctgggtcgaatgaaacgtctcatgcttcgcctccgtaatcctcattacaaatacaaggttcgtgctttttgct

SEQ ID NO: 151840 - DNA, 1871 bp, Arabidopsis thaliana landsberg; identical to SEQ ID NO: 27294
  unsure (1)..(1871): unsure at all n locations

SEQ ID NO: 151841 - DNA, 1052 bp, Arabidopsis thaliana landsberg
cgagaaaaagaaagagaaagagagaataaataaatggaagatgtacggaggattgtggtggtcgtagaagataaacaagcggcgaggacggcgttacaatgggcacttcacaacctcctccgtcaaggtgacgtcatagtactcctccacgtgtactctcctccaccgcgtaagaagaaatccacggcggcgcgtctcctccgccgtcacggatacaatcttgctctctctttccgtgaaatctgcgactctttcttcaacgtgagtggaaatgaatcttgatcggaaagattactagattttattgatggttaggtttgtttttcctttgtgatcgtaattttgacagacgaatactgagatcattgtgagagaaggagatgatgatggaagaatgattgctcaagttgtcaaagagattggtgcttcgatgcttctcgttggtctccatcagaacagctttctttacaggtaggaactattttgatcgatacggggtcattattaaagattttgaaccctacatagacgaatgagtaatgtttgtgactttgtgtgtctttgtgatgtgtagatgggcaataagtgggatcgatgtagcgagaaatttcaattgcaaagtgatggctataaagcagccttcaccggaactttcgcctccggtgaaggttaagggacacaagacctctaaggcgacggcgacagcgacttcagattgtttaactaattttgacttttcacaaattgaaatttatggattacagtaagattcctaacctcttttgttatcaagtctatttttaattaaaactacgtgatttggtgaaatagttttttttttttagtttgatattttggatagaaacatttcatagtgctgattaaaaaaaatgaaactttgattgaaacagggttcctgagattccgacaccaactaaagtgccatacagattatgtccgagtcctcatgccatactatggagaacaaggccccggaggagatccaaagaccaatacggtgtcggttcatagtctacgatatttgcttttga

SEQ ID NO: 151842 - DNA, 1409 bp, Arabidopsis thaliana landsberg
gttaggttgttgttatattcttttgcaggatctgactgacatgggttgcaccacctcagagacagttggcttaaagtaacaatcccttattggattgaaattgtcagaaaccacaacccttcttttgctcaactccaatcactttgccacccaattttatctcattcattttgcaaaaaagatcaaagagagagagagagagagagagagagaaagaaaaaaaggaaaaaaccttcctccgttacaacctcacaattgcaacaaagtttcatataaaagaggacagaaatttcgcaggttcctccgttgtctgaggtaaaggtttccttctttaactaattcctcagatgacctcttgatttgttggaaaaaaaattaaaaaatctgtttcatacaggatcttggagaaggaaggaaacaacaacaaccaaaaaaaaaccaaaaaaaaaaaagataaaacaaaaaaaatgtctttcacaggaactctcgacaaatgcaatgtttgtgataagacagtctatgtggtggacatgttgtccattgaaggaatgccttaccacaagtcttgcttcaggtgtacccattgcaaaggaacccttcaggtgcactcattactcattttcttgttagatcttctatgatcatattatatcaacaatttatctatgtgttgatggcagatgagcaactattcctccatggacggagttttgtactgcaagactcattttgagcaactcttcaaggaatctggcaattacagcaaaaactttcaaccaggttcgtattataaaatctctgacatcgaatctctctatctttcaaatcatcatgatcataacaagtctctttcttttctcaggaaaaactgagaagccagagctggtaggttcatcattacatgtccttgtatatgattagcgtgtcaatatttcattttctttcttttatgatcgactaataggatctgtgtactgatttaaacattacagactaggactcccagcaagatatcttccatcttctgtggaacacaagacaagtgtgccgcttgcgaaaaaactgtttaccctcttgagcaagtatcaatggcagcagaaagtcaccacaagacatgcttcaggtgcacacacagtggttgtcctttgactcactcttcttacgcttctcttaatggcgtcctctactgtaaagtccacttcaatcagctctttctcgagaaaggcagttacaatcacgtccatcaagccgctgctaaccaccgtcgatccgcctcttctggtggcgcttctcctccttctgatgatcacaaacctgacgacaccgcctcaattcccgaagcaaaagaagatgacgctgcccctgaagctgcaggagaagaggagcctgagccggtcgttgagtcttga

SEQ ID NO: 151843 - DNA, 2736 bp, Arabidopsis thaliana landsberg
  unsure (1)..(2736): unsure at all n locations
atgtcagacgcaagagataatgatgaccgtgtggatttcgaggagggtagctacagtgtgatggaggatgaagtggaggaggaacaagtagaagagtatgaagaggaggaagaagaagatgatgatgatgatgtcgttggcaatcagaatgccgaagaacgtgaggtggaggattatggtgatacaaaaggtggggatatggaagatgttcaggaggaaatagctgaagatgacgacaaccatattgatattgagacagcagatgatgatgagaaaccagcatctcctattgatgaagaagatagggaaaagtactcccatcttctttcacttcctcctcatggttctgaagtttttattggtgggctcccaagggatgttggagaagaggacctgagggctgtatgtgaagagatatccaaaatctttgaggttggagcggcttttatctttgtgtttcatgatatactctttgttggttctgtatttacgactgattttaattccttttctattaggtgagactgatgaaagatagggactctggtgatagcaaaggctatgcttttgtagctttcaaaaccaaagacgttgcacaaaaggccattgaggagttgcacagtaaagagtttaaggcaagctcaactgctaactgtagcttaagtttatcggtcattgctagtttgcattttacttataacaattttgtttaacctatacctaatttttgtacagggaaaaaccataaggtgctctctttccgaaacgaagaataggttgttcattggtaacataccaaagaactggactgaggatgagtttagaaaagtcctataggatgttggtactggagtggcgaacatcgagctcataaaagttagatgacttaatcaaattgattggcgtgcttgatcttacttaattgccttactaattatcttcttgttacttgtaggacccaacaaataccactcgtaaccgtggttttgcatttgttttgtactataacaatgcatgtgctgattattcaagacagaaaatgatagattctaattttaagcttgagggtaacgctccaactgtgacttgggcagacccaaaaagctctcctgagcattctgctgctgctgctcaggtattatttaaatagagggtttagtcaatctgcacaaaaacctctctcctggcaaagttggcacttttttgacaatctcttttgcgctatatactcaggtgaaagccctttatgtcaagaatattccagagaatacctcaacagagcagctaaaggaactctttcagaggcatggagaagtgaccaaaatcgttacacctcctggaaagggtggaaaacgtgattttgggtttgtccactatgctgaaagatctagtgcattgaaggctgtcaaagataccgagagatatgaagtcaatggtaagtttttttagtcatctagaaaacagctattgagtatgatgaacattatgctatcaatttgtctctaatggcgtatgttttttcgtctcaagagatgttattgagtaacacattccacaaacttgcaaactacaggtcaaccactagaagttgtgcttgctaaaccccaggctgaaaggaagcatgacccttcttcttattcttacggggctgcacctactcctgccccctttgtgcatcccacgtttggtggttttgctgcggctccttacggtgctatgggtgccggtttgggtattgccggtagttttagtcaggtatatatgtttctaagaaagagctgtttgtcatccttgactagtcttatcagccattgttttgtgtaacgtttggttttaattttgcattgagcagccaatgatctatggtagaggagcaatgccaacagggatgcaaatggttccaatgcttcttcccgatggccgagttggctatgttctgtaagtcgatggttcttgtaaacaaatttgttgatccttctctattgattcatatttactttcgcttaataaataaccaatatggattgctgtgcagnnnnnnnnnnnnnnnnnntggcagcagcaccaccacaacgaccaagaagaaatgaccggaataacggctcaagcggagggtcaggcagagataacagtcatgaacatgatggtaaccgaggaggccgaaggtaccgaccctactagtaaccatagagaaaaataagcaagtagaaaaagaaaaggagaagtgtattgggatttgtttgtagtttgtttttggagaactttaaaaagctctctctcatgtgttataaaatatgaaatcgaaaccttatggtttctggtttgatatggagactgctggggggataggattgagtgattcgatctttaaattatgagactttttagttttttctcttctgaataatactctttatcaattatccatcagatttggtgtttttgctttccctagcccttgtgcaacgttgtttacttatacaacaagtaatcactgggtctcatcacataacattacagtctgaagatgtcaaacgaacttagactttcaacaagaagcaaagaaatgaatcaaatcaattgcaataatacaacaacaatgtgcaatgagaattctttttgagtagagagttatctacattggagtgcagttgaaggctgtttcgaatatgatttgattgattttgtttcaactttcaatcaagggtcgatgtcagaacaagttggaaattcaag

SEQ ID NO: 151844 - DNA, 2014 bp, Arabidopsis thaliana landsberg
gtacaagttggaaattctcctgtatataagactgagaggaaactcggtaaaggaggctttggtcaagtttttgttggtagaagggtgagtggtggcagcgataggattggggccgatgcaattgaggtatattgtaaagaagcatacttgagatttttgagggatacagacgaaagaagtctaatcgttaacaaattaattatttttcttaccaggtggccctgaaatttgagcatcgaaatagcaaaggatgcaattttggtccaccttacgagtggcaagtgtacaagtaagtcttgcatgcattctatgtaaattttcctgccaaatttctctgatcaacttatttgtcatctcatctgtttctttttcttcttgttgtaaagtaccctcaatggttgctatggagttcctgcggtacatcataagggtcgtcaaggagatttttacattcttgtatgtaatttacaatgagctttgttaaatatactttcgatattgattgtgttatcatgtacaagtaatgctataatatatacttcaggtcatggacatgcttggtccgagtctctgggatgtttggaattcttcggggcaatcgtaagcactcttctcctctcaccacacttccttctgattgcaagattcttgatttgattcatgttcgtgtcatgtggcaggatgtctccaaacatggtagcctgcattgcagttgagtccatatctattcttgagaaacttcatatgaaagggttagttactatattttttcgtaacttctttgcaaatagtttcattcatttcgctttaactaattacaatgtattatctttcactgtactgattgtcatgctatgttccatccccatatcaaactaggtttgtccacggagatgtgaagccggaaaactttttactcggtcaaccaggaacagcagatgagaaaaaactctaccttatcgatcttggtctgggtgagtgtattcttatgaagaactttattctctctgatgctgcaatattttatgagatatgtaacttggtacttctctttgatgttggcattaatgttcacataatcttctgttgtttcagcatctaaatggaaagattcacactcaggccagcatgttgaatatgatcaaagacctgatgtgttcaggtatattcattagtttatctttctttttctttatattattcatatttgtttacatgtttattatgtttcaaatgcaggggaacgataaggtatgcaagtgttcatgcacacctaggtcgaactggaagtaggagagatgatctggagtcgctggcttatactttaatttttcttttgaagggaagattgccatggcaaggatatcaggtctgttttttatttctcttgacaaccttacaattatgtctgattcatattcttcattaattgcaatcagttttatgtatatattgttacttttttttgcagggtgacaacaagagctttcttgtttgcaagaaaaagatgtcaacttctcctgaattgatgtgctgtttttgtccacccccgtttaagctcttcctcgaggcagttacaaacatgaagtttgacgaagagcccaactatgcaaagcttatttcgatttttgattctcttattgaacaatgtgcactatctagaccaattaaaattgatggtgctcttaaggttgctggcttttttctcgttcttatgcttaattattcgacttgttataaataattctgaaaatgctgattttgggtctgttggtttataggttgggcaaaaacgaggaagaatgcttcttaatttggatgaggatgaacagccaaagaagaaaatcagaattggcagtcctgcttgtcagtggatctcagtctataatgctcgtcgtcccatgaaacagaggtaaaagttgcatattcacttaaaagtttcgaaaaccttcgtgaatcaaatttctcaccccggtttaatgccatttttatttgtgtagatatcactacaacg

SEQ ID NO: 151845 - DNA, 744 bp, Arabidopsis thaliana landsberg
  unsure (1)..(744): unsure at all n locations
caggatctactgtctcatcttctaaagagccttgtaagccaagctggtgaacatatagggaggaatttagttgggcttctacagggtgaaggaggactccaggcttctcaaaatattggaaacttatccgctttgctctcactcgagcaagcccctcgacaggatataaaacatcnnnnnnnnnnnnnnnnnnnttggcaagaagtgtatgccaatagtgctcaagagagagttgccccggataggtccgagaaacaagtcaaagtgaatgattttgatttgaatgacatctacatagactcagatgataccacagatatagagagatcatcacctcctccgacaaatccagctactagttctcttgattatcatcaagactcgcatcagtctagtccacctcaaactagtaggaggaattcagattcagcttctgaccaatcaccttcaagttccagtggagatgcacaggtacaaatctcaactttcatccattcattttttgttgcttataagtaattgtaacggttcttgttatgttttggttgcatatacagagccgtactgatcggattgtgttcaaactctttgggaaagagccgaatgattttccagttgccttacgaggacaggtatataaattcgacagttagttggcatcactttgtgatttggaaagtgatattgatgtgttctaatattcgaattttcagattcttaactggttagcgcatactaaaactg

SEQ ID NO: 151846 - DNA, 382 bp, Arabidopsis thaliana landsberg
gtgttggtagaagcaggagctttttctaagtgtttcggtgaaagcagtggaattcaaaggttacaatggaggtggaagcatgagtttctcgggtcaaagctgggatcctagttccgagattgaagttccttcagaccaaagacccgtaagtaaatctcttttgtttttctttcctgattctagagtaatgatgagatttttggtttgggtttataggtgaatgagtattcgtctctaaaggaaggaatgttgtattcatggggagaattgggtccaagcgaattctttattcgtctaggtggtctttggttggtcactttcactgttcttggagttcctgttgcagctgctagctttaatccttccagagtgagattttttt

SEQ ID NO: 151847 - DNA, 868 bp, Arabidopsis thaliana landsberg
ctaatttgtgttggttttggtttctgtcagtgttatagaataaagatctgtttggagtggatccattcaagtaattgaagaactcaacgcaaaaaatggcttcaatatcgcattcatcactagctttaggaggagcttcttctgcttctgcttcagattacttgcgtagttcgagcaatggtgttaatggggtaccattgaaaaccttaggaagagcagtgtttactaccatcaggaggaaggacttggcggtgacatctcggctcaagaaagggaagaaatttgagcatccatggcctgcaaatcctgacccgaatgtgaaaggaggagtcttgtcttacctggccgagttcaaaccattgggggatactcaaaagcctgtcactttggatttcgagaagccactagtcgaattggagaagaagattgttgatgtacgaatgtgaatacttatcatctgtttgcatcttagtttgatttcccctagcagttgtatggtgtgaagtttctcataacattggttcttgtgatgcaggtgaggaagatggcgaatgaaacggggttggatttcactgagcagattatcactttggagaacaagtatagacaggtaaaaatgctagtataggttggttttcaatttatatagttgagggagacccaccattcaaatttgatgttaatgtatagctacaattttgtttgggaaagacttcttactgacccccgccattttaatgtcaggcactgaaagatctttacacgcatcttactccgatacaacgtgtgaacattgcgcgccatcccaaccgacctactttccttgatcatatacataacataactgacaaggtttggtctctcagta

SEQ ID NO: 151848 - DNA, 4388 bp, Arabidopsis thaliana landsberg
ccgtacattccgttatcgccacgaacctagccactacactatcatcgaattaccggaatgtttctcgccgtagaactatctccacctctgtgaattgttcggtggagattacggaggctgatcggtcggtgaaactgaagaacgggaacgattcactggagatatgcagagttctcaacgggatgtggcaaacgagcggaggatgggggaagattgatcgaaacgacgccgttgattcaatgcttcgttacgccgatgctggtctctctactttcgatatggctgatcactgtaagtagctaacaagtgaaattgaatattcagaattgacttgaaattgaaaggttttgtgtggagattagtaatagaactgtgcttagttttgatcttgatgaccttcaatgtgtggagctatgttttggtcacagaagaattgaattgtgtggagattagtgaaatagagttgtgcttagtttgttttctatgatgttcagatggtcctgctgaagatctttacggtatttttatcaatagagttcgtcgagagcgtccaccggagtacttggagaagattaaagggtaagcaaatttagtccaattgattagaatttgtataagatatggtagggtggcttaatggttaggctatatttaatgatgtagtttgacaaaatgggtgcctcctccaataaagatgacaagtagctatgttcgtcagaacatcgatatatcgaggaagagaatggatgtggctgctcttgatatgcttcagtttcactggtgtgtgttactctcgtcgcttaattgctagtcgttgacgtttcctatcttcttgctaaagtaaacctgttatgtgggaataggtgggattatgcgaatgacggctatcttgatgcactgaaacatctcacagacttgaaggaagaaggtaagcgagaggggctatatctttctcctttgttgtgattgtctatttgtttatctattgggctgctttaagtgtagtattgaaatgctttcagggaaaatcaagactgttgctttgactaattttgatacagagagacttcagaaaatcttagagaatggaatccctgtcgttagcaatcaggtgaatgtcagcccgatgtccgaacattatatatggcctttattcggactcttttttttttttgtaaatctctaactctctgtgcaaactctttccaggtgcaacactccatcgtagacatgcgtcctcaacagagaatggctcagctttgcgagcttacaggggtcaaacttataacgtaattatactttatgaaattcttttttgatttctctctttaaaactgatttaacaacacatcgttggtctttgtgtgtagatatgggacagttatgggtggtctcttgtcagagaagtttcttgataccaatctaacaatcccttttgctggccctcgcttgaatactccatctctccaaaaatacaaaagggtaagagtccaatggccgttcttgttttatgagtttaggatggctgatgcatgatcatcctactttgtactgttttaagatttttgagagttacattacagatggttgatgcatggggagggtggaatctatttcaaggtttacttcgaacaatgaagaccatatccacaaaacatggagtctctataccaacagtggctgtgagatatgtactagatcaggtatttgttcttcctcacattactctttactcttaaggccaatctggtttttgatttgtcggaaaaatgaaaatatcatctcagcaaggagttggtggatcaatgattggagtgagactcgggttagcggaacacatacaagacgcaaatgctatattctcattggtattggatgaagaagatgttaatagcatacaagaggttaccaagaaaggtaaagatcttctccaagtgattggtgactgcggagacgaataccgacgtatatgatgtggtagctatgtactctatactgtatacaatatcatcaactcatgtaattacacttttatgtgtagaggaatcatttttacatttataagacttctctggctttatttcttttgcttctatgcatgtttggagagacaatactaatataaaccacaaagctacatgtaagctatagagtatacatgtttaaggtaagtaaacatagttttatcataaaaaaaacttagcaattctttgattcaaaggaaaacttggcaaataccacttcttattgaaatactagtttactaattattcagaggacatgaccaagataactatgaaaacaaaatttatgaaaagaaaggtttgaacgggcacctagctcccagcacatcttcttttggaggtttcaccaccagactacttcacagctggatttgagtcaaacttggaacatactcaaacaaatttggcatagatgatgtgaatccagaatacacctgttcaactttattatcctctccaacaatgtatacctcttgtttgaggggaatactgatagaccaacaagtttcctcgatgtcgagataatcttacacggcctatgtaaagcaggagcggatccatgttgatgattatgtggacaagagcactataacttatacatatttgattttatacagaagaaagtataatataaagtggaacattggtttaaaatacacgcaatattacaattttagtgtgattctaggcttttttcatcagatcaagattttataattcaacacaaaactcatgattctataattttcaatttatgcttttaatcacgagtatattaatattggcaccaaatttctatattttctcttctcgtgtaggtctcgcatgtacgtacgccaagaaagaactcacgagaatggagctgcctacttcatttttttttccttacgtaaaacttaacgtgcaccattctctcaacatgcaaacattgtatttaatatcactcccacatgttaaatacaagctttagttagttatttacgtactcttgctctcattatgtaagtatagtttatggactaaaaaactttcgaatagaaatgggtggatttactggatttggtgttttgatcaatcagaacattcaacagcctcgtaaggtcagtttttcatttccatcaatcaaaggacccggggaagtctataaaaatgagatcatgactaggctagtttgttgttgtaggccgcggccaagtccaagatacatgagaatgttaaatctggttcagtttcagagaaagatactaatattcaggaaccttggtattgggatcctgatgtggacccaaagttgaaggccgagtacaagaaaaaccattcgcatgttagatctatgccattgtatgctatcgatcctagatattatgacttagctgaggtgaataggcaagcaagactttggtctggtccaaataacaagcatccatggtatgatgctcctgctacggtgaaggtaataatagtagatcagcaaaaaaaaatctagctaatactagaggaattttgctagaattaagaaaacaaatatatgcttaagtaattaacacttggttatatatatatcttttatgtttgaaggtgaaaacaaaaaagggtctttgcaatttgaacatagaattcacattgggatggcctcctcaattagtctctgagatgcttactaatccaagaaacataaatttcttcagattattcgatagggactttcgccaacgtttggtttgtttttttctttatatagttgtatgatttaaattaagcataattatgatcgataattgaaagtgtaatctttttaatttctacaaagacaacaaatcaacaaaggttttgaagaaggacggaccgcggcagatcacgagagtgaaaaaaactttgagatataagctccttgggcgctctatagctatcccgatacatctaatcatcgatgaaaaccataaaaacctaacggtaagaagcttcaccaaacctttcacatgaaccaattgttaaattttgtgttttggaggaagtgaatattttggttgatctattgcttaggcaaaatataagaaagagaaaatgatgtacatgaaagtgtttgagggtagatggaaagtggagctactatacgcagatcaggaacgcttatgcaagtctaggtcgcggattaatgaagaagagtacaaaaaatgtagtgacggaaaaggaaggattggatcaaaggtgacaatggagcagatctttcagccttgttctcttcttaatgtgccaccgatttcttggttcatccgtgagatcaccatcaaaaaaataaagaatttgctcgaagatcttagacaatttgttatcgacatgcacaaaaattcagacccggaatga

SEQ ID NO: 151849 - DNA, 733 bp, Arabidopsis thaliana landsberg; identical to SEQ ID NO: 32896

SEQ ID NO: 151850 - DNA, 858 bp, Arabidopsis thaliana landsberg
tctcttcgaccaaaattctcagcaagaacgaagaaagacgaaatattcgcaggtaaaaatcacactttctacttgtgtaaatcaaaaccatttttcattcaatttgtttacgaaatatgagtaatcctcgtttaccttatgaatttgagttactggatcgcagtatttttgctatgaaacattcaaaattttcaatagaattagagcgcaaagattcgagattttgtcaactctagttctgtgtaggccttaagttatgtttacatcatcatcatgatcatcatcaagtgatagtcttcttacaggtcaaagcttggtgttgagttctcttctatctttctcatggagacgagctctaacttgtcttccatggttcgtcttaacattggtaaatttcgtccttttatatattttcttgcaatcccattactcatcacttagttaaacgtttaaattcctgtgaaaaatcaatccttttttatccacaatgtttaactttgaaccaattattgattaactaaaactggtagctagaatcgtgtgagaaaggatgtgcttggtcatcttttcctagttatgtttctgaatcctgtgattgagatggtgaatgctctagttcagcaaatgtttctcactttgaggcttaggtttcgttgacctctctggtttcagttgtaaacttcaatctttgttgggctgatcataattaactgtgatagctaatgttgttttcatgcaggtggaaagaaattttgtacgaccattgatactttgactattcgtgagccagactcaatgctcgcagcgatgtttagtggtcgacatgcaatgtgccaggaatccaaaaaggtaattgtt

SEQ ID NO: 151851 - DNA, 628 bp, Arabidopsis thaliana landsberg
gtgaaaaatccccggcgggatttaccgctcggtattgggatttcgctcctgctttgttgtttgctgtacatgatggtgtctgttgttattgttggtttagtgccgtattatgctatggaccctgacactccaatatcatccgcattttctagtcatggaattcaatgggctgcgtaagtccgttaatcggttaagatgcaaactattcattggcaggacttgttttgagtttgatttgtttttcccctgccattctgtcttatagatatttgataaatttaggtgctgtcatggctctctgttctgctttaatgggctccattctccctcaggtaaactagaaacataattcaagtgtttagatctgtaaaattaaggatttaacaatgagaattttgaagaacatatacacgctatgtggatttcttttgtaccaacttattcaccaaagagcttattcgtttttcagccgcggattctgatggcaatggctagggatggtctcttgccttcatatttctcatatgtgaatcaacgcacgcaggttccaattaatggcaccataaccactggtgtttgtgcagcaatcttagctttctttatggatgtttcgcaactggcgggaatg

SEQ ID NO: 151852 - DNA, 696 bp, Arabidopsis thaliana landsberg
gttccactttacaggattttagtgggagagtgcctggattgaaggtggatgtagtggacacaacgggtgctggtgatgcatttgttgcggggatactatcgcaactagccaatgatctctccttgcttcaggtaacctttcatttgtcattttagactcgatgtaggcatgtagcagtttatagctatggtgagtttggtgagaaagcagttagtgagggctacgtttataaggctttcttggcagatcgtagtatagcagtttcgtagctttgttcttatcagatgctctcatgctcatgacaacaaaaacaaatagctgaaaaaactgagttgtttgactcaggacgaagaacgactgagagaggctcttatgtttgcgaatgcatgcggggcattaaccgttaaagtgagaggcgcaatcccggcccttccaaccaaagaagctgtacatgaggctctactcaaagccgtcgtttaacattcaataacaccaccaatatgagaaacagtttgtacctagcagatttttgtaagtctgcattttgttgttgtaaaattgttgtataatgtacttaccaatgtttgtattctagtagctgtagagctttaagcctttgaaaatattgtcgggccaagaactagaattcatcttttgatctttgtaactctcagtttgactttatgagagatcttg

SEQ ID NO: 151853 - DNA, 850 bp, Arabidopsis thaliana landsberg
atgcagccggatatagcagcaccgggagtgagcatattagcggctacaaccactaatacaactttcaacgaccgagggttcattttcttgtcagggacatcaatggcgactcctactatttcaggaattgttgcacttctcaaagctctgcatcctgattggtctcctgctgccattagatcagctattgtcactacaggtgcttatcttcttcattcaatatagattagacaaatcaagaacatactgatcttgataatcgtttttactctgtgtagcttggagaacagatccatttggagagcagatatttgcagaagggtcacctaggaagccagctgatccattcgactatggtggaggccttgtgaatccagagaaagctacaaaaccaggtcttgtatatgacttgggactcgaagactatgttctctacatgtgttctgttggttacaacgagacttcaatctctcaacttgtcggtaaaggaactgtctgttcgtatcccaaaccatctgttcttgatttcaacttgccttctatcacaatcccaaatctcaaagaagaagtcactctcaccagaactcttactaacgttggacaacttgagtcggtctataaagttgtgatcgagccaccgataggcattcaagtgactgtgacaccagagacgcttgtgtttaactctacaaccaaaagggtctcttttaaagtaaatgtttcgaccacacacaaaatcaacacaggttacttctttggaagcttgacttggagtgactctctacataatgtcaccattcccctctctgtgagaactcaacttttgcagaactactacgatgaaaactga

SEQ ID NO: 151854 - DNA, 623 bp, Arabidopsis thaliana landsberg
tcagagagatgtttgaagaagtgagtctttttttgtccttctctattagtccttcttcacctcttgcttgagtggtgtgaaaaaaagaagatggaaatgggtcgtcgagatttgatgagacgtggaacaaccaatcgattttccaataaacaacaatctggtaaaaattcaatctttttagtttcagaaaccaacaaaatataaaaatctttctttttttgtcgtcgttagctctgtttttttttgtctcacttttgttttgtattcaactcatggatttaggatctgggttttctacaaaatctaagaaaggaatgctgaaaaaacttggttttgctgatgagaaactgaaacaagagatgagctacgatactcttccttctccagatttagaaaacgaggtttctaagaagaaatctaagcttccaaaaaaggtaacttcttcatcaatacgacacctaaattactctctacaatcccttaaatttctcacctttctcctttatctctaagtctttttcacattaaatttctctcctttttttctctctctctctcaacttagaatttgaaagacactaatggtgtggatcatgcctctgtaccacggaagcttcgttcag

SEQ ID NO: 151855 - DNA, 1195 bp, Arabidopsis thaliana landsberg
gtttttttttatattattcaaattccgcctccaaaatcctctctttctgcgatttctatcacttcacgcgcattgagagcgagagagagagagacccaagcaagagctcaaattagggttatttttccgatttgagagatccattaacaatggcgtggtcgtcggaaacgccgtcgtattgcggttggaatgagcgacatgtgaagaacacgaaagaaaagatggaggttcattattatctcgagaggaaagatggaattgcagatctagctgttattgggaggttgaagaattctaaacgcatgtcttttagatacgctttgaagaagaatcgctctgtcttgaaaaagcttaattctaaagatgatgttgcgctttggctcgattctattgtttctggtaatttttcttaatctatctttcgaattcttctctacccttttctaaattttgaattttagatctgggttcgtatcaatttctgaaatttctgaaagaatctgttttttttttctcaacatgatttgaagaatttgataatttgattttatgggtgtttagtatcatcatgtgcgtttatctaaataaattggaaatattgtttctttgtgttagagatcttaactggttccgttgcaccttttgcagctaaacctattaatgacttaattttgctgcagacagatccggtttccaccttttggtactgagcatgtctgcacgaattgatatacttcaagttttgattgattttctgattagagatcaatgtttattgatgtgtattgctgatcttttgttattggttttgcttcaatttttaggtgagatacctcatgtagcagatgtaccagctactgttatgactgaaaaagatgctggagggttcaatatgagcacttttatggtactgctttaaactaaatctaagtgctattttttttgttttgatttggaatatagaggtgtttcttgttagataatgaaaaatattaatcggtttctgttttggttcttttcagaataggaaatttcaggagcctattcagcagatcaaaacgttctcttggatgggtttttcttggacttgcaggatacggcgtaagcattatcagtcttatctccggaatggtgtcagaatatctgtgagtttattcttatgttttaattgaagtaagctggtgtgatttgctat

SEQ ID NO: 151856 - DNA, 2525 bp, Arabidopsis thaliana landsberg
atggggcatggacatcctgtcgcacaacagccctcacgtcctgcaagtcgtaatacctttgatgaaaatgttgactctaataataatctgtctccgtctgcatcacaaggcattggtgcaccatctccatacagctatgcagctgttctaggctcttctttgtctagaaatggaactccagatccacaggccattgctagggtgcctagtccctgtcttactcccattgggagtggaagaatgagttcaaatgataagaggaacacaagtaaccagagcccattcaatggtgttacctctggtctcaacgagtcttctgatcttgtgaatgctttatctggcttgaacctgtcatgcagtgttgggttagatgatcggggtcaggctgagcaagatgtcgaaaaggtcaggaactatatgtttggactgcaaggtgggcataacgaagtcaatcaacatgagttcccaaacaaatctgatcaagcccataaggcaactggctcgttgaggaattcacaattgagagggccacacggatctgcctataatggtggagttggattagctaatccttaccagcaacttgatagcccaaattattgtctcaacaattacgcattaaatccagctgtagcctctatgatggctaaccaacttgggaacaataactttgctccaatgtatgataatgtatccgctttgggattttctggaatggactctagacatcatggacgaggctttgtatcttctggtcaaaacctctctgaatcacgtaatcttggcagattcagtaatcgaatgatgggaggaggtgctggtctccagtcacatatggtagacccaatgtataatcagtatgctgattcacttgatcttctcaatgatccttccatggataggaactttatgggtggttcatcatacatggatatgcttgaactccagagggcttatcttggagctcagaaatcacagaatggtgtcccttacaaatccgggagccctaacagccatagctattatgggagtccaacatttgggtctaatatgtcatatcctggcagcccattggctcatcatggtatgccaaactctcttatgtcaccttatagccctatgagacgggatgaagttaaatatgcgatttccttctgcaacaagaaactattcgggagggttaatgggttcttggcacatggatgctagttttgatgaaggctttggatcttcaatgcttgaagagttcaaaagtaacaaaacaagaggatttgaactttctgaaatagctggccatgttgtggacttcaggtatttccttgaaagtcttttacattttctcttgtttacaatttttcccaagctaacgcgtacttggggattttcatggcatgaccgaccagttcggatcaatatggaagccgctttattcagcagaaactcgagacagcaacaattgatgagaaaaacatggtctatgaggagatcatgccacaagctcttgtcctgatgactgacgtttttggaaactatgtgattcagaaggtaatttatttagtcttcctctttggttttattttgaagttaagccatagtaagatgagtgattcctgaattttgcttatcttcctacagttctttgagcatggactcccgccacagaggagagaattggcagagaaactctttgcccatgttttgcctcttagcttacagatgtatggttgtcgtgtcatccagaaggtaaagtctagttcccacctgttttactgttctctccattctcaagaacagttaagagtttcattatttttcatatgtttacctttttaggcaattgaggtggttgatctagaccagaaaatccaaatggtcaaagaacttgatggacatgtgatgcgatgtgtacgtgatcagaatgggaaccatgtggttcaaaagtgtattgaatgtgtgcctgaagaaaacattgagtttattatttcaactttctttggccatgtggtgaccctctccactcacccatacgggtgccgtgttattcaggttcttgctactggtgattaagaaatatgacaccttttttgatcttatgcttctatgtaaaactgtttttcatctcctgttgcagagagtattggaacactgccatgaccctgatacacagagtaaggttatggaagaaatcctgtccactgttagtatgctggcccaagatcagtatggaaactatgttgttcaggtttgtaaaaagatatgagttttactccttctggtgattttttatactttgctcaaaactgatacatgttttgtggacagcatgtgctggagcatggaaagcctgatgagcgcactgtgataatcaaagaattggcggggaagattgttcagatgagccagcagaagttcgcatcaaacgttgctgagaaatgtttgacttttggaggtcctgaagaacgagaattgcttgtgaatgagatgctgggaacaactgatgaaaacgagccttttcaggtctgtca

SEQ ID NO: 151857 - DNA, 304 bp, Arabidopsis thaliana landsberg
atttttataagatatcttcacatacacaaaaacatttagtgtacagtgcacaagtgatcgaatatttgattctttttcataatcagagatctgatctaaatggagtatgaccgtacgttgaacttgattccatacggactacaaggagtaagagaggaggaagaaatcgaagaagacgatgaagagagcatgaacgtgtcgtcagtaccagaaaacgaaacgtcggagtgttcttcggcttcggggacgtatccttcaatcccttcttggactaaacacccagagagccgatggagtttctatg

SEQ ID NO: 151858 - DNA, 2087 bp, Arabidopsis thaliana landsberg
aggatcggctggttcatgagcttaaagacagagtctcttcctttaaaggacttcaccatgaagctgactcgagtttgaagaatgttgtcaatgaaaatgtaagaattctcctcagttttgttaaatttggtttgacttggatcatcaaagtgtgtcttttactcaattggttgaatttttggatttttggattgaagatgaaactgactcaagaacgagattcactgacaatcgctgcgaagagactcggtcgtgattatgcaaaggttctttcttttcaaatgttatggtattgatttttgttgaaatttaatcatttgatttcaagctcaagctctagtgttttgcttgtagttggaagcattcaagagacaattgatgcagtcattgaatgatgataatccatctgtatgttactcaacactatacttcttttgacatccttttatatatgaaacaaaacaaaatcagatgttacatactctcctcttgtttttacagcaaactgagactgctgatgtcagaatggttcctcgaggcaaaggtattgtaacatcatctcaagtattctgagcttattggtcttcattgtctttcctttttctttatgtgttagtctcttcaagagttgcttgttctgatgttatttactctgtatgcattgtagatgagaattcaaatggatcctactcaaacaatgaaggtattgattgctgagttatccaataatttagtttgtagcaacaaaagaacatacgttagtccagaagacttgttgatgttttcaatataatgaagaacaaaaaaaaacattttcaatgtgtaatggttcatgaaacaggtttaagtgaagcgaggcaaagacagtctatgactccgcagttctctcccgcgtttacaccaagcggaacaccaaagatcttatctactgctgcttctccgagaagctactctgctgcttcatcgccaaagctattctctggagctgcatctccaacatcttcacattatgatatacgtatgtggtcttcaactagccagcaatcttcagtagcaaactctcctccacgctcgcattctgtttcaggttcacaactttaaagcattctaatatgttgtctaaatttatatcatgtgatttgtggctttgttcttatcctctcacttgatcttatacagctcggcatccgcggattgatgggaaagagttctttagacaagccaggtatatataagttctaaagttcctagagccagcaactagtatatgagaatgagtgatagatagataaggaattgttttgaattttcaggagccgtttgtcttacaacagctcagtgcattcctggctaacatcaaggaacttaacgcccggaagcagggccgcgaggtaataacctcataagccataacatagtccttaaccaactcttttagtctgaaatttgtataatgtttgaatcctaaaatggtcttatctaatctttatcgccaggaaacattacagaaagcagaggaaatatttggaaaggaaaacaatgatctttacatatcctttaagggacttctcacaagtgggcgttgaaacaaaaactcaccaacttctaagctttcttttcatgaccaattagtcatgactgatttcaaatttgtaaaacctctttaaccatagaagagaatcagggaattttgttcttgcaagtcccagttcttttgctaagactaagagtttatatctttattagatattaacccgcggtataccgcggacctatatttttattaaataaaaaataattgaatattttttaggatgatttaataaatttatgctattgtttgatttaaatgtataattcaccgctagacgaaattttataactcaaattttaaagttttaagttgtatttgtttattttgttaaatgtttaatattgtataattgtattttgattgttgtttatcggatttcacccgtagtacaccatcccatattaatatcgattcaaactcgtcaattctaggatttcactcgtggtaatatttaattgtataattatattttgattgtcattctaggatttaa

SEQ ID NO: 151859 - DNA, 1041 bp, Arabidopsis thaliana landsberg
gagtctcaacattgttggattttttgcttgattatgaaggctgatggaactttgaacgaagcagctattcctaatgtgacaagggccttacaggtaatactttgctttgtaatctctccttgaactagcaaatctgtgtggagcttgacgagaatctttgtgaatgcatctggttcttggattatataacccttttggttacttgtttcaattcaatttaatctttgtagttgtgttaaacttggaatttgggtgttcactttactctttccacgctctaaatcttccttagtacctatagcttacaaaaacagtgaatataaaggttccaattgatacttgttttgttctttcaggatattgatggagtttccaatttaaaggttcaggtttctgaaggtgttgccgtcgttgaggtatgttttacatccaacattgcctttacatgtctcttcacacccctacacagtacacatatatgtttagaggatataaatagataaggacagatgttgaatatgttattagagatataatggctggcacacccttagaaggactggactggtcaaatatgtcattttgttgtacattttggtggttaaccaggggattagtctttggggccgtataacaaaagcctcgagcctgaccttgaatagttaaggcctttatatgaacggttctgttactgctcgtagcaacatctctatgtttgattgtacaattgaatctggcttatgttgtgatcaatgtatgtgaagcttttgaagcaaacaacggttcaagcaacaggagtggcgtcaaacttggtggagactatacaaggagctggatttaagttacagactttgaatctgagttttgaagatgacgatgaggctcttgtctagtgaaatcatccttttcctccattttgtgattaaagaaactcataatgttcaattctagggataatttctttcatttgttcctctaaagaaaacaaatgtggtaactttttttagaaagtgggaattaatgttttctttgttgaaataa

SEQ ID NO: 151860 - DNA, 245 bp, Arabidopsis thaliana landsberg
cgaattaggtcaaaaaaacaaatcccaaatcttcatcatcttcaacgtttatggatttgagtcgttctcaaacaaattttcaattagggtttggttgttcacacgcatcaatgactccaacaaccaacaccaagagctccaatcgcagacagattcgattaatctacaagtcgatcaaagtttccgatcattaccgacaactttctctccgataccgtaacaataacaccaacaaaaagccgaaa

SEQ ID NO: 151861 - DNA, 495 bp, Arabidopsis thaliana landsberg
ggaaagttatgtgttgttgttgtcttgatgggtttgaagggatcgatggatgggaaaacatggacagacttgagagtccatgaggatgaccaaacaatgtgcaaggccggtcagtttgcatcatggccaatcactgcagcaaatgcattactcccctttaggtttttcaggctggttctgaccggtccaacggcagatacatcaactccgtggaacttttgcatttgctacttggagctctacggttacttccgttgaagcgctctgcaatgaatgaccttttgactgtttctactacccacgtttttcacttttatactgtttaccttttgttcttgtactacagtgatctttgaacctgaaagtgtttctcaagatatgttaaacttgattccagttagattgttttggtttttatacaagagattttggcctatggctgtggagtaatgagttctactttgtttttatgaataatttaagaatctcttgcat

SEQ ID NO: 151862 - DNA, 649 bp, Arabidopsis thaliana landsberg
ctcgtcctatactagctatttggtacgcgttgttaacaaggcaagtaagagcatgtccattgcagggaccttgcaagtttttaaagaaaatccttatgaataaaagcaaaaaattaaatcagaatagtgaaataaaccaaggtgtgaaccttgtttaaggtatttttgggtatattaggtgcgctgacgtggctgtatcttattggatgacaataaaacaagttttgtttcttttcccgtattttttttctttgcctattcccaaactatttttttctttctctctctcgtatatctctaagtggttttagctgagataacttgtatgtctgttgtctttactttaagttcaatatgacttgtatgtctgttgtcttaatctttagtttaagtattctatgttttcttatttgtgaatgttcagtcttcagtgtgagtgtgttgtgtttcaatagtgttcgtaagaagttccaccttctctaaatcactctagtgctgacattactagtattaaaaagagaccacatgttttaagtcaccataagtttgtactttggtttgaatgcttgtacaccacaaaataatattccgaaaacactagttcttattgtgtattctatgacatcacttgtatgctaaacaataattt

SEQ ID NO: 151863 - DNA, 1985 bp, Arabidopsis thaliana landsberg
tagtctgtagaaacaaagttgccgcttcgattccaaggagtaacctagctgagaaaatgggattctgggtttagttttctctgctcagtgttttctttgattttcccggagcatgattcctaggttctgattttgtgttgttaacatatgcaggacttgaagtgaaacctgggaagcctcaagcttataatccaaaaaatgaacaaggaaagattcacgtgacccaggtactatactcttgttccttcgagctgatttgggatatgaattgtatatttgtgtagtctagttttggaatctgaatgtgtttgatatatctattgatgtatgtatgttttgccatcattcaggcaactctaggtacgggtttgagcaaagaaaagagtgtgattcagtgttcaataggagacaaggctcctattgctttgtgttcattgttgccaaacaaaatcgaatgttgccctctgaatcttgagtttgacgatgatgatgagccagtggaattcaccgtgactggtgacagaagtatccacttgtctggattcttggagtattatcaggacgatgaagatgattatgagcatgatgaagatgattcgtatcctttcattgttactagtttactttagcaaataatgctttcttgtttttctattattccatctgtttagaaatcttaatgttttcattgcgactatattatagagatggtattgatgttggtgagtctgaggaagacgattcgtgtgaatatgatagtgaagaggatgagcaattggatgaatttgaagacttccttgatagcaatcttgaaaggtatcggaatgctgctgccccaaagagtggaggtactttttcttacagagatccttatcagattgcatcttagtacttccattttagcttagtgtgattgcttgattcgtcactcttgtcttataactagaaggtttcaaaaagatattgataaaagacttttcaaatgtatgtctgtaaatttaagcttttgtacaagtgtgtctccttggtgctgatcctgttctacatttgtgttaatagtttatatgattgatctttccttgttctgttaaaactaatctgaatgatatctttgctagttataattgaggagatagaagatgaagagaaacctgccaaagataataaggcaaaacaaaccaagaagaagagtcaagctagcgaaggtgagaatgcaaagaaacaaatcgttgccatagagggtgcccatgttccagttttggaaagcgaagatgaagacgaagatggtttacctattcctaaaggaaaatcatctgaagtagagaatgcgtcaggtgagaagatggttgtagataatgacgaacaaggtagtaacaagaaacggaaggccaaggctgctgagcaagatgatggacaagaaaggtactactctctttgctctctattgactctgaggacagagttcacatattttatatatcgtggggatatgaagttgtttctaaaatctgttccagtgcaaacaagagtaaaaagaagaaaaatcacaaagagaagaacaaaggggaaaatgtcttaaatgatgaagctggacaagttcagacgggaaatgttctgaagaagcaggatattagccaaatttcttcaaacacaaaagctcaagatggaactgcaaacaatgccatgtgagaactcttatttcttgatttgagaacttttttggtgataacagattgtgtttatgtcatttgtgaaatatcagtaagtaagtatttgaattattactcacattattagatcacaaagtaaaaaacgcttatgagtatacagcggttctttcaaactttttctcctaacaaaagtctgtgcttttttatggtattattgcaggagtgaaagctccaagaccccagataaatctgctgagaagaaaactaaaaataagaaaaagaagaaaccaagtgaggaagctgcagaaatttctg

SEQ ID NO: 151864 - DNA, 1294 bp, Arabidopsis thaliana landsberg
caatcttacagtttccagcagtacataagaaacggcctgcaaagtctggatatcgacgtacagaaatcacgcgtaagatattttctttagataacctcgtccgtagtttttactttttttgctatgctgcatgtttaggtactatccttgttactatccaaagtgtttccaacaccgagctgattgggtacttcaatagccagaggttctcgtgtatacttacttgcttgtgattacttgcccatccgtctctgcaatagtgttgagttctgcagctagctcacaaaatctagagcagtatcataggctcttggggaaatattattggcttgataaccataggatgtgggattactgttctttttcattttactaactttactgtatatattacctttcttctttctggatccgtaatgtgcttacatatcgcctagaaaggcattttcgctctacgttttagacctttcatctctgtttcgttcttgttgatttcagcatcaacttgggaaatcaaaagcttgaaaaagcgcagcgatgcagaaactccaagttgtcttgtaacacacatgctagaaatccactctaaacgttggtgcaaatggaagaggaccagctactcaaagtttgaaaagactattccatatgcattactcctccaagtagcaggttagatgcatgcctcatctccttccagatcttactaagagtatgaacacaagaaatgagtaggaagtctagatgtgatatctgtggtatgtatgatatgtgttgaggaatgagaacttgtgagcacatatgaagattagcagtcactatatatccgcacatctttgggataataatacatgtagtatgcttcgcctttattacaattggaagcttctttttttgggcatagaagttaataaactttatttggcatgctgttgaaagtaaatgcctgacctctaggtacaatagatgtcacaagttccaaatggtttttgtttcatgttcttgttaatgatatatcaggtctgaaggagtacattggagcaaacccagccttcaagtatgaaacttccgccacggttgtccagtccaagttccaagatgtccccaatggtgaatatgtagatgaagaaatggaggagcagttttatgatgccacggactcatcatctggagaagaggatgaggaggaaagcgatgacgatgatgaaaatcaggacaataaggtaactatttggttttgatatcctcttgtcaataaataattaaactttcatatttatagagtaaagaatcatga

SEQ ID NO: 151865 - DNA, 557 bp, Arabidopsis thaliana landsberg
actgaaattgtgaagcttcttaacttcttcaatcctccacaagttcctgatgatgatgaagacattgacgaagaaagagtatgatatcatttggttttaagacaggccctattttgactatgtttgattatacttttgtagtaatgttttctgttcttggtgcaggccgaggaacttcagaatctgatggaacaagattatgacattgggttcgtcttcttgaacataaactctgtcaatttaatatattccgtctaacttattaccaactgtataagagctctagctagcatcttttatcggaaagttaatacattatttagtatctgattcaagtattccttgcttcttgcagttctacaatccgggagaagatcatacctcatgctgtctcatggtttactggtgaggctattgagggagaggagtttgaaatagacaatgacgatgaagatgatatcgatgaggatgaagatgaggatgaagaagatgaagacgaagatgaggaagaagacgacgaagatgaggaggaagaagtaagcaagaccaaaaagaag

SEQ ID NO: 151866 - DNA, 572 bp, Arabidopsis thaliana landsberg
atgattgtatcgaatgttttacacttattggtgcagttgatcatcagatcacatgaaggtccagatgctagagagaagagacctgtttttggtgcaatggacaatggatatacaatagtccacaatgtcgaatccgcagagcttatcactattttcagtgcacttgactatccgcaattccaagtatgtatttttacgcctttggtatttgcattttctaaagatatgcgttaacaatcatttttgtgtgtggtgtaggcaacagaagagaggtacaaaaacaaaggagcatatattattttgcaggcgcctgatttctcggatcctcaatttcatagtttcgaagctgttaaaccgcgaccaaaggtaactaacttacgatgctgataatgaaccaacgagttgttttacttctttgatacacatacatagcgacatcggtttttaaatgtgcaggcgcatccatattatgactttgaaaatgtcattgattctcaccatgccctggataagtcagcaatggacaccaataacgaacaaccaaatagctgaccgaagctgaaaaggagtat

SEQ ID NO: 151867 - DNA, 855 bp, Arabidopsis thaliana landsberg
cttcttcgatttctcagattcaattctgctttttgctttcctcctgttgtttttaggtttttgtcgatctctatgttcagcgattcctaaaccctacttgttttccgctctattgtagtgaatccaacccagatttttcagattttaatcggaattattcgggatctaatgctcgcgtcgagtttatcgctagaaaaccctaatttcggaggatctgtcacttttactatcagaagcttgttgttgtaattacggattaggtatgtcctgatcgttattgttctttgtttgcaggttgcgatttgttgaaaaccttgatttagactatgaagtctcttaatgatcttcctgcgcccaaatcaaccactaccacgtattatgatcattctaatgatgcttggttcaaaaaccgagtcactgaatccgagacggtgaaatcctccagtatcaaatttaaagtggtgcctgcttacctgaatcgtcaaggtttacgtccgaagaatccagaggattttggcgatggtggtgctttcccggagattcatcttcctcagtatcctcttcttatgggtaagaataaatccaataagcctggagctaagactctccctgttactgtcgatgctcagggaaacgtggtctttgacgctattgtgaggcagaatgagaactcgaggaagattgtttattctcagcataaggatattattccaaagtttctgaaaaacgagggagacttgggtactgttgttgatgaagaggaggaattgcagaaggagattcaggagactgctgaagaaacgaaagctgccattgagaagattgtgaatgtgagactgagtgcagcgcagccta

SEQ ID NO: 151868 - DNA, 935 bp, Arabidopsis thaliana landsberg; identical to SEQ ID NO: 60964

SEQ ID NO: 151869 - DNA, 194 bp, Arabidopsis thaliana landsberg
attttggctatgcgttatcctaggagacttgtgttggctggttgtttatcggctctgattgtaagtttttctgaatgctttgacctattggtttcagtgacctctctccatagattttgaagcttatgtctttgtttaattcttaggttatgactatcctctctgctactcttggatgggctgctcctaatctg

SEQ ID NO: 151870 - DNA, 2468 bp, Arabidopsis thaliana landsberg
gaacaaatgaggcatagagaagaagaagacaagaaatctgaggttggagttggtagagactacaatggaagctcagctttatcgaccgcagaaagcgagaatgctaagaaactagataatggaaatatcgaagaagccgagttatctctgcgtgagacgagttcattgaactacgaggtttgatttcttggtcactcttgagctttgtttgattggacaagcttagccattgtgttgttgtttcaggaggcgagagcgcttttgggaagaattgagtatcagaaaggaaatatagaggcggcattgcgagtctctgagggatagatatcaatggtatcacagtaaagatgaaaaccgctctaaccgttagagaagaccggaaacatagaagacggtctaaaggcggcttttctactgctccttcacctgccatgtctaaacatgctgttagtttacttttcgaagctatttttctcaaagccaagtctctccagcgtcttggaaggtatccaaggtagtaacaggcatttctcttaatccgtgtttggttttgtttttggctaaacagaaatatcatgtgcttcttcttgcagaagctgccgaagtcttgcaaagttattcttgatataggcgagacttctttagcagaaggtgcgtcggataatgtgactggagatattaagttgcaggagacactgacaaaagcgtgagagctgcttcctgagatgaggaagcttgctgattcacctcgtgatgctattttgtcgtatataagagcgcttctcaatcactggaaactcgatccagaaaccacggcgaggatacagaaagagtacgcagtgtttctcctctattccggggaagaagcagtgccgacaaacctacgttctcagactgagggctcattcattccgaggaacaatgtggaagaagctattcttcttctgatgttacttctcaggaaagttaatctgaaaagaatctcatgggatgcggcaatcttggaccatctctcgttcgctcttacaatcgcaggcgatctaaccgctctggctaagcagtttgaagagcttagtcctgagctcttggatcagagggaactttatcatacattgtctttgtgttaccaaggtgcaggagaaggtcttgttgcgttaggtttactgaggaagctattttcagaacgagaggatccaaacaggacttcgggtttgctgatggcttccaaaatatgcggtgagaggtctggtcttgctgaggaagggttagattatgcccggaaagctatcggaaacttggggaaggaatgcagtcaattagatggagcagcgcgtttcgttttagggatcacgctcacggaaagctctagaatggctgttacagagactgagaggatagctaggcaatccgaggggattcaggccctggaatctgcagatatgacaaacccgagggttgtgcaccgtcttgcgttggagaatgcagaacagaggaaactggattctgcattagcatatgctaaagaggcgttgaaacttggagcagagtctgatcttgaagtatggttacttttggctcgggttttatctgcacagaagcggttttcagacgcggagaccattgtggatgcagcgcttaacgagacagggaaatgggaacaggggaagctgttacgtttgaaggcaaagcttcgtttagctaaaggagaagtgaaagatgcgattaagacttacacacaacttctagcactccttcaggttcaaagcaaaagcttcaattctgcaaagaagctgcctaaggtaacattttcgtatgttctgatttctctaccaaagttgtgagttgtgcagaattaacactgaaacagatttattcattacagggatatgtaaaggaattgatgagtctggagcttgggacgtggcacgatctggctcatatttacataaacctctcgcaatggcgtgacgcagagtcatgtctctcgagatcaagactcattgcaccttactcttctgttagataccacattgaaggtattaccttcttctctacttccatttagacttggagtgtttgtttgtctttttgaaacaagcaaggcggtaatattgatagcttattcgtaccgattggcaggtgtactgtacaatagacgggggcaattagaagaagcaatggaggcgttcacaaccgctcttgacatagatccgatgcacgtcccaagcttaacatcgaaggctgagatactgctggaggtcggtaaccgatcaggcatagcggttgttagaagctttctaatggaggctcttaggattgataggctgaaccactcggcttggtacaatcttggaaagatgttcaaagctgaagggtccgtctcgtcgatgcaagaagccgttgagtgttttcaagccgccgttactttggaggaaacaatgccagtggagccattcagatgattttgc

SEQ ID NO: 151871 - DNA, 1133 bp, Arabidopsis thaliana landsberg
aaagccatttacaaatattcaagcttactcagtctcacatttaagcaacctctctctctctgattctctctttctctgagaaaaatctcagtttctcagagctctcaggttcttttattcttcttcttcttcgatttcatcccccaaatctgcatgctctggatcttacgaatgttgctttgtagttttatgatctgagatcaaattttaacaaatccgtcaccggagacgaaaatgcgggttaaagagttacatccactttgttgtattactttggagagtcctcacgggattaatagccagtcaccggaagaaccggtgacaacggctttaactaggtcaaggagtttaccggcgaaatcgttgaccggtggatcggaatcggagactgtagctgggatcttatataaatggactaattttggtaaaggatggagatctagatggttcttactccgtaacggaatcttatcttattctaagatccggagaccggagaatttgaatctactttctccggatgatgatgtgaggttaatcggagatatttccggtgaacgtctttcgagaatggatagttgtagtggtcgccggaaacaacaaaaaaccgtcggcattgttcatcttaaggtatttacaaaaagtttgatttctgaaattttttgattttggttttagggagaaaaaaaaaaaaattcacctgagattatcagtttttatgatttattgatttctggtcttgttgattcattattaaattttgactatcatggatacagatttgtttctggggaaatgaaacgccttttatcactcatagttagaggaaataaccagtggtttatagatttgtttgttgtgttcttggtgaaaaagataaaccctaaatgtgaaatttactctcttgtttcgtttctatgaatgacctttcatcatcagattcatcacttcttgaccactttgattttggtctttgtgtaataataatactattaatcttgctggtattttcccagcttttaacttgctgtgaatctctagtgggtcacatcaacaggtgcttgtttgtttttcaaaatttaaaatcttttgtgtgttggctgcaacaatctggcttctttttgtaggtttag

SEQ ID NO: 151872 - DNA, 1002 bp, Arabidopsis thaliana landsberg
atgaccagagctgatgctgcggcggcggcagcttcttcttctctcggcggtggaagtcaaatattcgacgagcttcccaaggctgcgatcgtctcggtctcgagacctgacaccaccgattttagtcccttgcttctttcttacaccttggagcttcagtataaacaggtatatatatagtttacaatgtctgacttgtagttttaaaagaacttgatttcctctctgttacattgtgattagggttttgattttgtctatgtatacgaaatttatgacaaagagatgccattaagagattcaatttcttgctaaagaagtttattcatgcatatatgaaatttctagtggttgtttctctaaaagtttatgttctgtttttattagtaacaaacaaagaccttttttaattggtattctctgtttttggtatatgtatagttcaagtggacattacaaaagaaggcttctcaagttctgtacttacattttgcgttgaagaaacgtttgatcattgaagaacttcacgacaagcaagaacaggtcagaatgttcaggctttgcagatttgctactaacacaagccaaacaaataattattgaactccagagatgcggttttcgacaggttagagagtggctacacagcttggggatttttgatatgcaaggatcagttgtgcaagatgatgaagaacctgacgatggtgctcttcctctgcactatactgaagatagtatcaagaacaggtgcttttaaatgccataaaacttttcggttttgtggattcaaagtaaaaattgtttcgtttaaatttctgaaacagtagctatttatgttatgcaggaatgttccttcccgtgcagcgcttccaatcattcgtccaacgataggccggtcagagacagttgtagatcgtgggccacccccaatgcaaggctacttgagtctcaaactagaaaacttggacattgtaaactccaaagaggtttgagattttt

SEQ ID NO: 151873 - DNA, 1502 bp, Arabidopsis thaliana landsberg
ggtttcctcttccgcattcgtcgtcttcagctcctcctacacagtttcttctctgaatcgtaagttttgaattaatctgcaaattcgtttagattcttatcaattagtcactaatttttcaattgatgattcgatctcagtacttaggaagctaaaatgggtagatgtccgactagaaaagtgaagaagaggagattatctcacaaaacagctcgccgtgacaaattcgaagtcaaaggcgatgacttggtttacacagagttgcgtaaaccggagacggagattaagccgttacagcttgacgaggatttgcctggaatgggtcaattctactgcttacactgcgagtaagagagattctatgattactctattgacgattcttttggtttatgaaacttttttttagcaaatacattatctttgaattactctatatgacccatttgtttgttttaccttgatatgttttagtcgatacttctccaacgcatcagtgagaaatgatcatttcaagactaagaaacacaagaagcggtatgtggattcttctccttccttggccttggtttctattttgttttgtgttcttggaactgtgtttggttcttgtgctcgtttactttcttgcttgcaatgttaaagctatttctcttcacttctgtgtacctaaagatgttttagcatttgtaatttgattacctttgtatgattatacatgtctgttgcagtgttgctctgtactcaagacttattatatgtgttttgtccacttggattgcagtgtgaatatgatgatgggacaagcgccacactcgcaactcgatgcagatttagccgggggaatggggatgccggacaatggcccaaagctgatgtctaatttggtattcacagagttgcgtaaaccagagacggaggatttacctggaatgggtcaattcaactgcttactctgccagtaagattatatgtgcaaaaagacaatctttgaattactctagatttccatgtttgtgtgaacatttgtttgtatttgattgaccttgtctctctaccttgatatttttcagtcggaacttctccaatgcatcagtgatggattatcatttcaagactaagaaacacaaaaagcggtatgtggattcttcttccttggtcttggtttctatcttgttttgatcttggaactgtgtttggttcttgtgctcgtctactttgaattcatcttgctggcaatgttaaagctatttctcgtcactggcgtagctaaaaatgttttagcacttgtaacttgattacctctgtatgattatattattgatctatgcatgtctgttgctctgtactcagacttaatatctttctattgtccatttggatttttgtgtgattgcagtgtgaagaagatagagggaccagcgccacactcgcaactcgatgcagatttagctggtggaatgggaatgccagacaatggtccaaagctgatgtctgcctga

SEQ ID NO: 151874 - DNA, 321 bp, Arabidopsis thaliana landsberg
ttcttggatttgatccccaaatcaactggacatctaagaagaagaagaagaagagcgaacatcaaaggataaggaagaagagaggaaaatgtgtactcatgctgatgaatcacaacacaacaatctcccttgtctccattgccaaccacattcttacattcgcatggtacataactacatatatacacatactgtatatagtttatacgctttgtatttgatgtaacaatcctcacaactagtggttgattttggtcggttcaacatatgatagagagatgcattctactccgtatgacgcgggacgaatgcgtcaggcgt

SEQ ID NO: 151875 - DNA, 711 bp, Arabidopsis thaliana landsberg
cagaaaagttcaataaaaggaatatcgaagagtcccagtttcagtctcaaagggcaaagaagaatgtcaagtacatcgaagagcaaagcgaagacctgagggagaaatttactgcctctgaaaagagtatcaaagatttctttcaaagtactaaagaacggttagaaagtgaagatgaacagcctctaaatgcaatgtgcttcttcgctgaactgagccatgtgcttccagtgtctaatgaagttcggtaagctccagtttaaggctaatttattaagtcatcaaattgagttatccccgtccctaataatgttggttttgtgtctcacagcaattgttttgatgctatcatgaagaaactagaactttctcagaatgtgaatttgattgataaagtggagggtatggggaaacagatacatcagcacgaagatgttgtaaagcaactcaaagtacttttgaaaaactgaagaactctatttccttcctttgttaccattacagaatccaactagttatacctgcggttgttggtatgtgcaggaagaactgaaacaggagaaactgaaggcgaaggaagaagcagaagaccttacacaagaaatggctgaattaaggtataagatgacatgtttgcttgatgaggaacgcaatcgccgtgtgtgcatagaacaagcatcattacagagaatatccgagctagaagcacag

SEQ ID NO: 151876 - DNA, 675 bp, Arabidopsis thaliana landsberg
gaagaagaagaagaataagaagaaagacaattgaatggcggcaagagccaacaacaaatacacctctatcaacttcaaccacatccttcacaaagatcctccttcttcttcatcttcctcctcctctgcttcttattcctccgtcgctcgttccaatggccgtatgctcgttctcaccaaatcttcccccaaacctctaagatctccctccgctgctcccaccaccaccaccactacgaccacacctccaatctctacagctccgaggatttcttcaaatcaagccatctctgatccagatccgaatcagatctctcttcgtcccttaggtcatacaggatctagttcctcgctttcttttccaattcggactcctgaaatcaacaaggctccggaggtaaatgctccaactccggtttcattgtccccgaaacctgatcggttcgtgccgccgcatcttaggccaggttttgttcggaaagacgagaaacctggactcaactcttctcgagttagagatccgaatccgaatctgaatcagagattgcctaaccaggaacagccacggcaggaatatttcggttatggacagcccggacggcccaaatcgggcgggtatgagaggatccgtacggatccgagaataaccggaaaccgacccggcacctccggatg

SEQ ID NO: 151877 - DNA, 2121 bp, Arabidopsis thaliana landsberg
aggtcttttgcagtggcgttagtggcggctccagtgttactaagaagaagccacgaaggaaaagtaatttttccgatttacctaggtctaagaaaattgagaagaggaacgataatactgaatctgttagtttaagtgttgttgaggaaccgaagaacgataaagaattgagtcttcgtgctttgaatcaaaatggtgatccattagggcggagagatttagggaggaacgtagtgaagtggattagtcaggcgatgaaagcgatggcttcggatcttgcaactgcggaggttcagggggagttttcggagttgaggcagaacgtccgatctggtttgacgcttgtgattcatgctcatccgtatctcaatgctatttccatgccgttaggttctgaagtcatttgtttgaaggcttgtactcattatcctaccttgttcgatcatttccagagagagttgcgtgatgttcttcaagacttggagcggaagaatataatggagagttggaaagagtctgagtcttggaagctgctcaaggagatagcaaattcaggtttgaattcttcgagtctaagttattattggtttatagtttggctgaagttgaactttttggcttgtatgatgttgtatagctcagcatcgggaggttgctcgcaaagctgctcaagctaagcctgttcaaggagtttttgggatggactctgagaaggtgaaggctatacaggaaaggattgatgagttcaccagccagatgtcgcagttacttcaagtggaacgagatacagaactggaagttacacaggaagaactagatgttgttcctactcctgatgagagctctgattcctcaaaaccgattgagttcttggttaggcatggggatgctccacaggaactttgtgatacaatttgcaatttgtatgcagttagtacctccacaggtgagaattatagccaaagtggcaccctttctaatctagttttcaataattcaaatttattttgttgtaatatgttcttttccagtttcgattaaatttgttgtaatatgcagggctcggaggtatgcatttggtgttgtttaaggttgggggaaaccaccgtcttcctcctactacactttcccctggtgacatggtttgcataagagtttgtgatagtaggggtgctggggcaactgcctgtacgcagggctttgttcacaaccttggagaagatgggcgtagcattggtgtggctctagaatctcgtcatggagatcctactttttccaagctctttggaaagagtgtgagaattgatcgtattcatgggttggccgatgccttaacttacgaggtatatctttgttccatattggttgaagttgcagagttttatcccagtaattttcatcttaaatatgcttgtatcccattattgcaagtgtttgctcaagtattgatagtttacattactattctttcttgccacttgcttattatatagtcttttgttgcagcgtaactgcgaagccctaatgcttctgcagaagaatggtctgcagaagaaaaatccatcaatatctgttgtggcgactttattcggggatggggaagatataacatggctggagcaaaatgattatgtagactggagtgaagcagagttgagtgatgagccagtgagtaagttatttgattcttctcaaaggagagctatagctcttggagtaaacaaaaaaagacctgttatgatagtccaaggacctcctggcacgggaaagactggaatgcttaaggaggtcattacccttgctgttcagcagggggaaagagtacttgtaacagcccctactaatgcagctgttgataatatggtcgagaagctcttgcatcttggactaaacattgttcgagtaggaaatccagcaagaatatcatctgctgttgcttcaaagtctttaggggaaattgtgaactctaagcttgcaagcttccgagcagaattagaaaggaagaagtcagatttaagaaaagatcttcggcaatgcctgagggatgatgttcttgcagctggcattcggcagctcttgaaacagcttggaaagacgttgaagaagaaggaaaaggagacg

SEQ ID NO: 151878 - DNA, 866 bp, Arabidopsis thaliana landsberg
tctcttctttaaaaccgtgcccaagcgactcgtgagtgagactcgctctaagacccagtttgactcgttgatcaacgaaaggtaacgacaaaactctgatttccgatttcattactatgaatcgattcgaatttctgagtttctgactttgtttcagtgtgagtttgaggtgaaagatgacggcgacgatagatcggaggttatcaacgctgaatccaaacgcgccggtgtttgatccggtggaatttcgtgaggtggaggatttttcaccgaaatggtgggatctagtaacgacttcgaaatggttccgtgacttttggctcagtgctaactctgagtatgagttcctcggcggcgacgatttctcagttatggaagaagagttcgaggagatgatcgcatcgtctgatggtggatccatggctgatacagttacaggtaacgatttgtttactgttttaaaattagttgagatttagggattcgaaacattcagatctgaggatttttgtgtgttttaatggcagaagcagatgtggctagttatttgaagatgcttttgaacatagcggagtctacgaaagagaagatttatagatcgaaggtttcgtcttgttcaccaaagtataatcagaagaagtacatgaatccgaactttaattgtcgccggaatcatcatatctatcagccacggtgaagcttctagaaggaacaaagctcttcttcttcttctttcgagataataatcagagtcgtgtctgtgtttatggctgaatctgatcttttctgctttcttgttttttgtaattctgtgaatattcctactttctataataacatcactttatgttatgagcataaccaaa

SEQ ID NO: 151879 - DNA, 1799 bp, Arabidopsis thaliana landsberg
acaagtgggacctttcaagtttatctccaaagctccaaacttttaccctggagaacctatgagcctcacaaaacacaaggatggacgagaatctatcttgctaaggcctcctagtaaagatggagataagatcttacaaccctcgtttctaataccccttcttgcaattttggctactggagatgctgcttctggtgttattgatcccagtttgcctcagttactctcagttgctactgttacatcactagcgataggagcaaccgtaaattcttttgtccttcctaagctaaatcaggtttatattctctatcacatgaactgcgtcaagtaaacatatgatagtctcttgggtatgaatctcataatcccttgcacggtttcagctccctgagcgaacagtagatgtggttggtatcaagcagcaacttttatctcaatatgatgtgctccagcgtcgcattagagatctaaaagaagcagttgagaaagaggtaccaagtctcatttatccataccttttgaaacccacaatatgtaatcaaaaacacttacaaaacttcgttgtatctatttaggtgtggatgttggctcgaatgtgccagctcgagaacaaaattttagcagtgggagagccagcttaccggtatgagcctctcagatcattggaacctcatcatctaagaaattgttaacagaactatgataacatgtgtatcttactcaaatatagtactcgaagaacaagagtaaagaaggtacgagaaagtctagagaactccataaagggaaagattgagctgatcgatagttatgctagagtaagaaaacgatacaaaaccaatttagatcttcaaaatgtcacttgatcttctgtttttttaacttttcagctcgatttctttaacgtttagatatcttcaatgattgagattgaggtggaaatggacagtgatgttcttgcagccgaggcagtgaacaatactgtaagttatttctaagagtttagttatgaacctgacatgttcgaatctgagagttgtgtgtaaaactccaaatgcttcacaggaaaacattgctcaacagatagagcagatcatggaacttgaaaaccttgaagaggtatagagttcgaaactcatttacatgtacatttaatcatatatatctttttcctgcaattttccagtttcaatttggacaacagaagcatacatactaacaacaacatttgtgtttaatgttactttggtctttatgtttgtgaatgcagaaatggaaaatacaggctgaagcaaacgacgaggccgaaagactacttagctcccaaccttaagcactcacacacttgtcaacaaacccggttagttaatcattatacatcacacatcatacatcatcatcatcattacttcattatcatcatcatgtcaagcaattatctttcggcggcatatgtatgacattcacaatgtctgctgtcaaaactgcaacgtatattcctcaatgatctgaaaatgtggacgactgttctggcaattacacttttaagtacaatatttattgaattttaggtccctttttaagaatcttgttctttctccagagctgcattgggatttttgacactgtaaacataatactttctgaaaattttagtaatggaaattgtgatcatcttgtatctggcacaggtcaaaaactctggagcatccctaaaagctaagtttctttagtcggtcgctataagttaatgatgataaattagcttgtaatactataagttaataatcaccgaa

SEQ ID NO: 151880 - DNA, 2124 bp, Arabidopsis thaliana landsberg
agaacacaaaaaaccctaacaaaaatggaatcgaaagcaatttgcttagggtttcttcctccaagacttcgattttcatctccacgtttactctctcttcctccttctcctcctgtaagtgaaatttaaccatcaaaatttcatttttttccatttcgattcttccaaaaccttatcctaaaatttgtcaatatctcctgattctataggcttcttccacatttgcgacgcgtcacaaacttgattccagacgtaagtatctctatcttaaatcctcctacttcacccagattgtagcataaagactgatcctttttctcattttcattcttgtttaagaaaccctcctttggaacaaaccgcaattgagccgagttcgtgtagcgtgttcttcttctcaatctgactcaagacctgagaagaagcaatcggataagagtaactatgctcgagctgagctgttccgtgggaaatcaggttctgtttctttcaatggtctgactcatcagctggttgaagaaagtaaactggtttcagctccgtttcaagaagagaaaggttctttcttgtgggttttggctcctgttgttttgatttcttcgttgattcttcctcagttctttctaagtggtatcattgaagctaccttcaaaaacgacactgttgctggtaggtcaggttttactactgctttaatgtttaacatcggattatgacttatatgaatcctaggaaggaacaaatggagtagaagctatctatcttagtggtgttacatctgctaactcattatgttttagtgtagtaggctttggctttgaggttttgataggcttagtacatcttttctgatgtgcaatattagaatcctttttttcattattatcaagaacacatgacctgagccttagaaagaacctaaacgagatctcataactctcctaaagctaagagacttagcaaatgatctatctcttgttgtatgatactcattttgatgctctctcttattataatttcttgatgcagaaattgttacttctttttgctttgagacggtgttttatgctggtcttgcgatattcctgtctgtgactgaccgagtgcagaggccgtacttagacttcagctccaagagatggggtctgatcactggactgaggggataccttacgtctgcattcctcacgatgggtttaaaagttgtagttcccgtatttgctgtttacatgacttggccagctcttggaatagatgctttgattgcagtgcttcctttcttggttggctgtgcagttcaaagagttttcgaggctcggcttgaaagacgtggctcatcctgttggcccattgttccaatagtctttgaggtaaacttatattctgattttgaccattttggtcttaagtttgtctgcccatcttcttgtggtccatgatgttgtagtcttgttttgagtaactatggttgtgtatgtcatggcaggtgtataggctgtatcaggtgacaagagcagcgacttttgttcagaggctgatgtttatgatgaaagatgcggcaacgactgctgaaataacagagcgaggagttgcactagttggtttggttgtgactttgcagtttctagctgttatgtgtctctggtcgtttatcacttttcttatgcgcctctttccttctagacctgtaggtgaaaactactagatctcagtgtttagtgattgttagatgtagccaaatcccatcggttttgttttgtttctgtgttcatttcaggagtaatgaattgtattaagtcactttaagaattggttgatcatgtgaaatgagaattggctggaaatgttatagaacgatcctacttaacttcagtatttgatgagatttcttattggagactcttgtgaccccttctctaaagtttcaatgtgtgaaatcacaacataagtaacacaacaatagatgggtctggtctcagcttgtgttttggtcctttgtatgcaacaatagagaagctgaatgcttatccacgtggaagatttgtgcctccgataggtgtctttgacagtgtgacgtgtctgtattgtttcattgatgaatctgttacaccgttgagtgattga

SEQ ID NO: 151881 - DNA, 2322 bp, Arabidopsis thaliana landsberg
aatttgtcttactggaatgtgggcattgctcattcggttctctatgctcttcataagcatcacacattgggtttatagttggaggaatcctaaatgcacagggaaacttccacctggttccatgggcttccctttactcggcgagagtattcaattcttcaagccaaacaaaacttcagacatccctccttttatcaaagagagagttaagaagtaagtatctcacttctctcattcaaaacaatgtgattaatgcttataatgtgtgttttaaaagtgatgttgatatgtgcaggtatggcccaattttcaagaccaatctggtggggagaccagttattgtatcaacagatgctgatttgagttattttgtgttcaaccaagagggacgttgtttccagagttggtatccagacactcttacacacatcttgggaagaagaatgtgggttcattacatggtttcatgtacaagtaccttaaagacatggttttgactctctttggccatgatggtctcaagaagatgcttcctcaagtagaaatgactgccaataagaggttggagctttggtcaaatcaagattcagtagaactcaaagatgcaaccgcaagcgtgagtttcccattcagaatatagactttttctgtttcagtctataatgttttattacttgtctaacatgttagtatgatcagatgatatttgatctcaccgcgaagaagttgatcagccatgatccagacaagtcatcagagaatctaagggcaaactttgttgctttcatacagggattgatctctttcccttttgatatcccaggcacagcttatcacaaatgtctacaggtgaatatcaacgttcatgcttcaaaagcttttctcacattggtactaatgcttgaaacttgctttgcagggtagggcaaaggcaatgaaaatgttgaggaatatgcttcaagagaggcgtgagaaccctcggaagaatccaagtgatttctttgattatgttattgaagagattcagaaagaagggacaattctgacagaagagattgcactggatttgatgtttgtcttgctatttgccagttttgaaacaacttctttggctctaactttagctatcaagtttctctcagatgaccctgaagtcctaaagcgtttaacggttagtcagaagatacaagtacataagcaaaaatgacaatttttatggttattatcaaaaaagctaaactgatatgtgttcatcttcatcaggaagaacatgagacaattctgagaaaccgggaagatgcagactctggacttacatgggaagaatacaagtcaatgacttacacctttcaggttgcttaaaagttttatcaaagtatgataatttgctaaatttcaaatacaaaatccagttgatcctaaagtcttgaaattcaaataaacagttcataaatgaaacagcgagactagcaaatatagttcctgcaatcttcagaaaggcgttgagagacatcaaattcaaaggtatgtgattgaataaacaataacattctcaatgattaaatgcctcttttaatctttatattatcataaagagtttgtcaatgatacagattatacgattccagccggctgggcggtgatggtctgtccaccagctgtacatttgaatccagaaatgtataaagatcctttactctttaatccatcaagatgggaggtgagtggtcaaacctaaataagtaactttcactccaagtaaagtaaaaataataataacaaaacaaatcaaacaatacatacagggatcaaaagttacaaacgcatcaaagcacttcatggcgtttggtggaggtatgaggttctgcgttggaaccgacttcacaaaattgcagatggctgcgttctttcacagcttggtaacaaaatacaggtttgacaaaatcatctctcttaagtgattattcttttaactttgtaagaacactaatgctgatgtttattccggctcttgaaattatcaggtgggaggagataaaaggagggaatataactcgaacgcctggatttacagtttccaaatggttaccatgtcaagctccataaaaagagagactagagaatgttttttaattagtaaagaattggtaggatacatacgctatacattttccgagactgtaataaacttgaacaccctaataagtgaaaaggggaagatttgttttaggttaaaggctaagaatcagctacaaaggtgaatacacaattttgttagtagcttctgtgtctggtcagaaactgtaatgtatagtattattg

SEQ ID NO: 151882 - DNA, 244 bp, Arabidopsis thaliana landsberg
tgttatgttgcagcttaacatcgttgaagggaagatgcagtacttgtatgatgagagtggtaggcgatatctggatgcctttgctggaatagtcactgtgtcgtgcggtcactgccatccggatattcttaatgcgattacggaacagagcaagctacttcagcacgcgactactatttacctgcatcatgccattggtgattttgctgaagcattggctgccaagatgcccggaaatcttaag

SEQ ID NO: 151883 - DNA, 2838 bp, Arabidopsis thaliana landsberg
cagagaaaaatatttggaagaagaactcagaaaatacataacgaagcggttggaagaagatgaaactgttcgacgcgcactgtcaccttcaagacccgaggattatcaccaaagctcctcagataatcacctccgccgttgcttgcggcgtctctgctttcgccgtcaatggagtctccgaggtttcgattttgtcagattgatagcttccaaatttacgagtttagctacgtttttaattgaatctgtggtttggtttggtctagaaagattggagtttggtcaaagagatgggagctaaatacccttctgttgttccttgctttgggatccatccatggtagggattatataacattacaaattactggtaaagtttcaaactttaagatcttttgttcatgttttgagttcaggtatgtagcagagaggagtcctcaatggtttgagacattaaagagtttctttgagaccactcctactgctgctgttggagaagtctatctttatctcttgtctctttttatcacattcttttgattgaaactctccttgatatgtgtatggttgaaactgctttgttttttttgatcagattggtttggacaaagggtctaagggaagggagattgatttctcagaacaggtttcagaattgaaaaacagaccttgtggttaaatggtttatgttctcagtgatggcttttgatgctaaagacatcatttttaatttcaggttaccgtctttcgtcaacagcttgaacttgcaaaggaattgaagaaacctgcgtcagttcattgtgttcgtgcatttggggatctactcgagatattaaagtatgatcttcggctttatattcctcatgtgttgctacaattatgtcaatgtgttcttatgatgtgttattgtaatatgcagatctgtagggccttttccttctggggtcatgcttcactcgtatttgggttctgctgagatggttcctgaatttgctaagctcggtgcatatttctccttctccggtttccttatgtccatgagtgagaaaaaagccaagaagatgttgaaagcagtaagattttcaaatttttgtacaccaaattacagctttaggtagaatggaacattgatatcagttcttggtaggttccatctgataggatcttattggagacggattcaccagatgcactaccaaaggcagagtcaggttgtctctactttgtagacggagatccttctctacccgaagaaggaaattcagctcaggatcttgattctgcttcatatgataagcctaatgtgtctagtgactcgatgaagttatcaaaggaaacacttaatcacccggctaatattcatatcgtatgttgttgctttgtggctgcttaaaccatcttcctaaatttatggccctaatcaatcacggttacaggtactcgaatatgtagcgcagttgttggatatgaagaatgaagaactcgcggaactaagttatcaaaatgctgttcggttattctcttacgaaggttcaaagatacttcttgacagaggtaaatgatttcctgtagtttgtttcttcacatctttttctggtcttgaaacaatttagtcctgaatggatttgtgtctttaggtactggtgatgtctctggtcacactcaaaaccagtcaacaacacatgtatcatgagttcttacttcttaagaaatcgtagtgtttctcatcactctattacgagtctttgaatttggactctctcttttttttttctttttttttgaatgtttgaatttggaattattgtactagtgttatagacaatcacacttttctttgtacaaactacaaaggttctgattttgtgtgaaaattaattcagttaatgatgtgattagagtcttttgcgtacagttccttattaagaaattagtaaaaattatttcaagtttgcttaatttcactgtaatatagaaactaactaatacttttcccccggagaatcctgctatatctcaacttaatcctatatccctggaagagccatacttttcttgataagcttttttgtttttgtttttaatttcaagttttaccgatttgatttttaagatagatttttgtttctgaaatttggttttgtttgcctttggttctctgttttcatccattgttgcagaacacatgagactgagtactctgtttcttggagattaagatacagagcaactcacaattctactatccttcagatgatcaaaaactcttacaaaaaatgtcagattcagataagaagaacagcaatgagaatcggtaagatttcttaatctcttttattttaaagtagtattcatcattacgatgtaatccatgatatctctaattatatattcattgcttgaagaaattcaatgtcagcatcatatgtatcagatcttcatatcaacgttaagggtgttccatttcatctttgcaaagtaagtttcactcgattctccataaattcgttgaaaagactcgacactttcgtttcttaatttctctgtgtttgtttttgtaggaaatgttagcaaagagatcgtccaaagtgagctcattactcgagcgaaacgagatcgatgagctgcgtttgatcctacgagatttagaagtcgatccagaaacctttgagctcgtcgctagattctgtaatggctctgaattcaagtttacatctgataccatcgtctctgttctctgcatcgcgtattacttagggatgaatgaagaacaaagctctaataacttgttaggcaaggcatctgagttcttagagcaccgagtttttccgagctgga

SEQ ID NO: 151884 - DNA, 1185 bp, Arabidopsis thaliana landsberg
  unsure (1)..(1185): unsure at all n locations
gtccactactacatctctatgactctatataacaacaaagccaaaaccacatcttctcacacaaaacacaaaaaagaacaaatatggagaaacaaatctctctattgctctgtctactcctcttcatcttctcaatatcatcctctctccatgaaaccgaagctcgaaaacacaataaatataaacccgcaccgatcatgagcctagtcccaagaactctctacgaccaaatcttcatccacaaggacaacaacgcatgccctgcaaaaggtttctacccctatgaagctttcgtggaggctacaagatccttcccgaagttcgggagcgtaggaaacttttggacaaggcgacgcgaagtggctgcgtttttggcgcagatatctcacgagacaacaggtggttgggccacggcaccagacggaccatacgcgtggggattgtgttttaaagaggaagtgagtccacagagtaattattgtgatgcttctaaaaaaatttcaaaaagggaggaaattntttgngncccttgtggtttctaggncaagtcttacaaaggaagaggtcccattcaactatcttggtaagtctacaaaattaattattaaccaataaccatttatatctatttatttgctcgaacaactaggtctacaatagttcaatgccccatgaaaacattatatacttctaccattttgcgaattaccaacgaaacttcttttgaatggttgtatcatctttgctacaagtttcatatccatatatcagtcttaccttttggttaacgttactttcttttttgggatatataggaattacaattacggacaggcgggtcgagcattgggtttcgacggtttacagaacccagaacttgtagccaacaactccgttttagctttcaagacagctctttggttttggatgaccgaacagactcctaaaccgtcctgccataacattatggtcaaccgatacagaccgacgaaagcagatagagcagcaaaccggactgtcggttatggtttagtcaccaacatcataaacggcggtttagaatgtgggattccaggagatggacgggtcactgaccgggtcgggtatttccaaagatacgctcagttgtttaaagtcaccacaggacctaatttagactgcgagaaccaaagacccttctcctaa

SEQ ID NO: 151885 - DNA, 208 bp, Arabidopsis thaliana landsberg
agctcccaacagaggaatgaactggtctttctcaaacaaagtatcagctgcttcttctcagtttctatccttcaggccaactcaagaaaatagacatagaaagtctggaaattatcatcttcctcactctggttccttcatgccatcatcagtagctgatgtttatgattcaacccgcaaagctccttatagttctgtacaggtattt

SEQ ID NO: 151886 - DNA, 1708 bp, Arabidopsis thaliana landsberg
atggcttttcctgccgctgctacttatcccacccatttccaaggcggcgctcttcatctgggtaggaccgatcattgcctcttcggtttctaccctcaaaccatttcctctgtgaattctcggagagcttctgtttccatcaagtgggtttctcttcttttgattatacccttacgattaggttctgggtttgatgaaagttggggccttttgtttactgtttactgaatctagacgtatctatagatgtctgcggaattagttaaattcgaaagctttttaatgtggattgtgaaattcagaaccagataagataaagttagagctttggtgatggtataattgaagtaaactttgagtttgatttttgtggtgggacatatttaggtgccaatctacggagccaaagacgaatggtaacatattggacaatgcgagcaaccttttgacaaattttttaagtggtggaagtttggggtcaatgcctactgctgaaggctctgtctctgatttgtttggaaagcctctctttttatctctttacgactggttcttggaggtatactattacaacttatttcagtgctttacttgaagaagtttatctttgtttgattctgtgatgtttttatctaaagcatggaggaatttataaacttgcgtttggtccaaaagcctttgttgtcatctcagatcccattattgcaaggcatgtcctccgggaaaatgctttttcttatgacaaggtaactgaaataaccctttcttttgttttcgttggtatcatcaagtaacttcctgtgtttctctagggagttcttgctgagatcttagagccgattatgggaaaagggttaataccggctgatctagatacgtggaagttaagaagaagaggtaaaagcacgttgtaatctctatctttcagaattcagatattgcagtaccgtggccactgatgattgtttctttttaatctctgttgtagctatcactcccgcattccataaattgtatctagaggccatggtcaaagtatttagtgactgttcggagaaaatgatattgaaatctgagaaactcataagggagaaagaaacttcaagcggggaggacaccattgagttggatctggaagcagaattctcgagtctggctcttgatattataggtcttagcgtgttcaactacgattttggctctgtcacaaaagagtcccctgtgatcaaggtaatcattctactattgaactggctctccaccagtcgtctgaggtacactggtccattgatattttctgttacatcacaggcagtttatggaactcttttcgaggcagagcatcggtctactttctacttcccttattggaactttcctccagctagatggatagttccgaggcaacgaaagttccaaagcgatctgaagattataaacgattgccttgatggcctcattcaaaatgctaaagagacaagacaggtagttcactttcttttttgttcttggttccgctctcctcttctcattttgttacttgttctcccaggaaacagatgttgagaagctccaggaaagggactacactaatctcaaggtttatgttgcacaagtgttaaaaaaatatccttccctttttattcccattctgaaaaactactgattgtttactcttggattcttaggatgcaagtctttgcggtta

SEQ ID NO: 151887 - DNA, 578 bp, Arabidopsis thaliana landsberg
atggcgaatcaagctgaatcatctgattcgtaagtacttgttaattactgagtaactctttaaggttttgttagtcttcgtgttggggtttttctaattctatttttttttctctgaatatcttaggaaggggacgaagaaggattttagcaccgcgattctggagaaaaagaaagcagcgaatcgtttggttgtggatgaagccattaacgatgataactccgtcgtttctcttcaccctgataccatggagaagctacagctttttcgtggtgatactatcttaatcaaggtttgatttttgaattttaaggctcttcttctcttgtttcctttactgaattagggtttataaggttttgcgattgttcattggtttgctgctagggtttatcagaagggttgttttttgaattgggtctttcaattttcatgcttttgttttgggatagtttctttgagttgtgtgtatttacatctttgttttctctctctttgttctgggaatctgtggttgcagggaaagaacacgccggataccgcgtgtattgctttagccgatgagacctgcgatgaac

SEQ ID NO: 151888 - DNA, 707 bp, Arabidopsis thaliana landsberg
atgggttgaatggttaatcctccaaaagctggagacatttcatatgcccagttcgcccgtaaaaggtatatatataagcttacatgctcgtgttcatcatccctggattgaataacaaatcgcccttttgcacatttctttagcaaggggattcttgaatctttgagaagaagagcaaggctcatgacagatggattcaacagctgcaaaaacgtcgtgtgcaatttcacagaaggtaaaacaataatgaagcaattagcacctgtgcagtgtagaaaatttgggagtatatgttgttgaagttgatcctttaattcttggtgtaaatgttaggtgcaatgtattcgtttcctcaaatacggttaccaacgggagctctccaagctgcaaaacaagctggaaaagtgccagacgttttctactgtctcaagctcttagaagccacaggaatctccacagtacctggctctggatttggacagaaagaagggtaaagaatctgctactactgtttctttcttgctcatctgatctcttcttatgaactcattccacttgtggattttgacagtgtgttccatctgaggacaacaatcctgccagcagaagatgagatgcgggagatcatggccagcttcaagaagtcccacgacgagttcaaaactcagtatgatacaaactttggttattcgaaaatgtcatgcttt

SEQ ID NO: 151889 - DNA, 339 bp, Arabidopsis thaliana landsberg
tcagtttgttcaagtacgaaatatcacttctaaggaaaaaatggcaaaatggaagaagaagtggagacctaggactccaatcacatcaaaagtcaagaaagtcaagattaagttttattcgtacgtgctgaaacttctgattcccagattatcaacaaatcttgttagtaatagtttgggcgtctctctcaacaatttttttttgtgttgaatctatatctcaggtcattcaaagacaggtttaaaccactaaatgatggtaccatccgtcgctggaaagaaggcaagcgccacaacgcacatttgaaggtaacaacaccttattcctcatatcgatga

SEQ ID NO: 151890 - DNA, 937 bp, Arabidopsis thaliana landsberg; identical to SEQ ID NO: 56647

SEQ ID NO: 151891 - DNA, 1768 bp, Arabidopsis thaliana landsberg
  unsure (1)..(1768): unsure at all n locations
ctgatctggcattgctaatgcctttagtagggaagaaaaaacatctgcattcatctcctgaaagcataaagcaattaatcaattatgggttcactagacgtaaattgctacaaattttaataagtgactataatatatcatatcgcagcaaatggttttcttaaatatatatatttcggtgatttacagcatcaagaagaataagttaaatttacacctcaggtaggcaagacgcaagctctccaagtacccaatttgcagatgcaaccaagtaaggtgagcaatcaggtgtagaataaatgggtagcacacgggtacggacaaaagatgccacatactcaggattttgttcttggataaactgccggaaaaaaggagccatcgtannnnnnnnnnnnnnnnnnnnnnnnnnttaattccaaagcaaagagaaccagatttgctcacctcttgcaggctaccatatgccattaggacaccgaaatagctgacatgtcgacatagcaacaaagtcagcttaataaaaaagtaaaagggaatgaaacaagatatactaaagtgaaagagaacagttaacaagaagcacttccaacccgatattagattttcaaaatgtttaatagttgtctgaggagtcttgcaaagaagataagagagccttgtatatactttcagtctactgaaaaaatatctatggcaagatgatcacgagcttgcaaaacgagtttttaaagttcaattgcaagaacatattttctaataaccaatgcaagcatttaacataacgttactcaatacgtcaaacaaacatgtaccacactgctcagagcttgcaaaagcattttttatttggtttaggcatctgccaaggatttcaatgagttagaatcagaagtaatgaaaatgtatagaactcacgctgctgaagtactagcatccagtttgtaactcttcgaaggcacaggaaattttgacaaaaatggaagcaccagtagatcacccatgcatctttggttatttcctctgttcttttcacctttcttccgcttacatgctgctggggaagctgtatttgtagtagatactggtggtccctatgagaaatggatcacaacctataagaacctattaacaaatagctggaataggtaaatgaacaactatagtttcttcacctttgacatggcaaggacacaaagtaagttcatagcgcttctcctggctgtaaacaagtcatccctccacccagaaatttcttcctgccaaaacgagagtgctattatttcctaacttctggaacatagacaaaataataatccgtgtagagagagatagagataagtttccatactagttcagatggaaggtttttccttatgaattcatctgcatcttcctcccactcagagatgtcctacttgcaaaagcaacccagaaagaccactaaagtttttgaaataatggtagtaagcaatgcttgcaacacagattacaaaggaaagcgtaccctctcattaagcaccagggctggaaagattgcggagtccaacaaaaaggaaaaatggggtgaaagtaatctccatccctgtttacaaggtaccaaatatttgctttcataaacatttgataaaatctatttatatttgctgtaaatttgctaacaacttacagggccaatttccatgacgcgtgaaattacgtcaaaagcaagtgatataattctctcagttaggcatccgagcttctgcacatgatagtaggccctcat

SEQ ID NO: 151892 - DNA, 1382 bp, Arabidopsis thaliana landsberg
ttttagatgtttatcttcaaaaattttggcagatccaatacggaaacccagataaactatgtgtaccactcgtggaagctcagaagaatcgtgatgatttagtggtaagttcttttctttttagatccctctttgcttatgcttggtgtatatatgatcaatgattgatcatatatgctagaagaactcgttttgcaaactaaatatttgtatttgctgatacattagatgtggtgtattaatgcaggaagcatatgctaaatatgttagagagttttgtgtgggggttttcgggctaagctctaaaacatatagccggaaacatctgctagacactgcggtcaccccagaaagtgcagataggctttggtggttccaagtttgcactgaagtggcatatttccaagtggcacctgcaaacgatagcatccggtctcatcaaatcaatacagagtacacacagtcccaagcttttatccataacttttttcatggtttatatttattgtcctgcttacgtttcttttaatttgataggtatcatttggatctatgcaagagtctgtttgggaaaggtgtttaccctgaagtcgatgcaacaaacctgtattatggaagtgacagaattgctggtatgtaataacggaaaacatctcgatgctactcatatattttcgcacattccaacagtttcttcttattcgtaatttgcagcgaccaagattatcttcacaaatgggtcacaggatccatggcgtcatgcatccaaacagacctcatctcctgaacgtaagtctccatttagtatgatcaaatccttataacattatctcaggcttagtctatgtcgtacagtagcactcagacaaatactttctatgcgacactaacaagttaatacttgacgacacagtgccttcttacattgtgacttgccacaactgtggccatggaagtgatctccgtggatgccctcaatctcccatggtcattggaggtatattactggcctcttctctctttccgatccctgaagtcaaagacagactagtattggaacaactgttaaaaaaatattatttttccctgcttttttcattctcatattcaggtgattccaagaattgcagttcacctgatgcagtgaacaaagtgaggcaacatatagtagatcatatggacttgtggctctctgagtgtcgtggagggattaggagttccatgtaaagagtcacactaagtcagaaactgcggttatgcaaataaataaaacatcagatgtatgtttcaaacctgtatctgtgtaactgtaacctctgatgtatgtttcgaacttgtctctacggacctaatacagtagtttacacgatgagacgatagaa

SEQ ID NO: 151893 - DNA, 7915 bp, Arabidopsis thaliana landsberg
gaggaatatacgtgaggagtacaatgaagctggttctatcgccgaacaagccatctcttcggttagaaccgtctgcgcatttgttagtgagaagaagatgatagaaaagttctcagatgcgcttcaagggtcggtgaagctagggttgagacaagggctagctaaaggaattgctattgggagcaatggtatagtttatgctatatgggggttcttgacttggtatggaagtcggatggttatgaactatggctacaaaggtggtactgtctccacagtcacagtttgcgtcacctttggtggcacgtaagtatttaagtttaagtctcttggcatttcctaacacacaaaaaaaaaaacatctcttagttttgatatttggtattttacattatgcagagcacttggtcaagcattgtcgaatcttaaatatttctccgaggcgtttgtggcaggggaacggattcaaaaaatgataaaaagagtccctgatatagattcagacaacttgaatggtcagattttggagagaatgaaaggagaagttgaattcaaccacgtgaagttcacatatttgtctcgacccgaaaccactatctttgacgatttatgtctaaaaattccagctgggaaaactgtagctcttgtaggtggaagcggatcgggtaaatcgacagtgatatcacttttacaaaggttctatgacccgatagcaggagagattctcattgatggtgtgtccattgataagctgcaagtgaattggttgaggtcgcaaatgggtctagttagccaagagccagtgctctttgccacatcaataacggagaacatattatttggtaaagaagacgcatcattggatgaagtagttgaagctgccaaggcctccaatgctcatacttttatttctcagttccctcttggttacaaaactcaggttatattcataatataagaacaaattgttttttagtttatgtaataaaaaacattgatgtatgttttgctttctgtaaacaaaaaggttggggagagaggagtgcaaatgtcgggaggccagaagcaaaggatcgcaattgcacgagcgataatcaagtcaccaaaaattctccttctagatgaggcaacaagcgcattggactccgaatccgaaagggttgtccaagaatccttggacaatgcctctattggtcgtaccactatcgttattgcccaccgcctctctaccattcgtaatgctgatgttatctgtgtaatccataatggtcagattgtcgaaactggatctcatgaagagctcttgaagagaatagatggtcaatacacttctctagtcagcttacaacaaatggagaatgaagaatcaaatgttaacatcaatgtaagtgtgacaaaggaccaagtcatgagtttgagcaaagattttaagtatagtcaacataactctattggtagcacgagttcaagcattgttacaaatgtttctgatttgatccctaatgataatctaccgcttgtgccatcatttacgagattgatggcgatgaataggccagaatggaaatatgcattatatggttgtttaagtgcagctttagttggggtcctacaaccagtttctgcatattctgcgggatcaatgatatcagtatttttcctaacgagccatgaccagatcaaggagaaaacaaggatctatgtgttgttatttgtcggtttagctatattctctttcttggtcaatattagtcagcattacggttttgcatacatgggagaatacctaacaaaacgtattcgagaacagatgctctcgaagatactgacatttgaggtcaattggttcgatatagatgataactcaagtggtgcaatttgctctagactagcaaaagatgctaatgtggtatgtcttccgctctattattatttgaactttaacaaaacaatatttttaccatttcttgatgttgtaatgcatttttatgataggtgagatcgatggttggcgatcggatgtcattgcttgtacaaaccatatcagcagtaatcatagcttgcataattggcttggtcatcgcttggcgattagcaatcgtgatgatttcagtgcaaccactaattgctgtttgcttctacactcaacgtgttctgctcaagagcttgtccgaaaaggcaagcaaagcccaagatgaaagtagtaaattagcggcagaggcggtatcaaacatacgaacaatcactgccttctcgtcacaagaacggatcataaagctactaaaaaaggtccaagaaggtcctcggagagaaagcgtccacagatcatggttagcaggcattgtgttggggacttcaagaagccttataacgtgcacttcggctttgaatttttggtatggtggtacactaatcgctgatggcaagatagtgtcaaaagcattctttgagatatttctgatctttgtgactacgggtcgggttattgctgatgctggaaccatgacaacagatctagccaggggtttgcatgcagttgggtcagtgtttgcagtgttagatcgctgcacaacgattgagccaaagaacccagatggatacgtcgcagaaaagataaaaggacaaattacatttctgaatgtggactttgcttacccaacacgacctgatgtggttatattcgagaacttttccattgagatcgacgaggggaagtcaacagcgatagtaggtacaagtgggtcaggtaaatccacaataattggtttgattgagcggttctatgacccgttacaaggtattgtgaaaatcgatggccgcgatataaggtcgtatcacctaagatcacttcgtcaacacatgtctttggttagtcaagaaccaacattattcgcgggaacaatccgagagaacataatgtatggaggaacatctgacaagatcaacgagtcggagattatcgaggcagcaaaggcagcgaacgctcatgatttcatcacatcactatctaacggctatgacacaaactgtggagacagaggagtacaattgtctggtggtcaaaaacaaaggatcgcaattgctcgagcagttttgaagaatccatcagtattgcttcttgatgaagctactagcgctttggacagccaatcagagcgtgtagtgcaagacgccctcgaacatgtgatggtagggaaaacaagcgttgtgatcgcacataggcttagcacgatccagaactgcgacacgataactgttttagacaaagggaaagttgtcgaatgtggaacacactcttccttgttaggtaaaggtccaacgggtgcatatttctcactggtcagtctccagagaactcgttgctgaaggctaaatgaatcttttgtgaccgtttagttattgtacttgtagcccccaatatacctgaaggaaactagttagttgtaacacgacctatttagttttacaattttccaaaataactcatgctttaatattttcgataaatatcataaactgtattaatttggatgtagatatggaaaatcatgttgttttaaaaaatttaatattacatcgttgcaatgaaaaataatttgctcaccactatggggttagtctaacaactgcccgaaaatggggaaccatgcattgatatatttctcaattatctgtcctaattccatttttggcttctagattttaagccaaatttaagtaattgaaatctaaatacacaaataggataaactgatgaagacctactacaaaaactaaatcatttgattacacgtaaccatttatcgttgtttttcatgtttcaagtgatattagtggtgttgtgtgttgtgtgtctgctttatgatataccttgaaatatcttaatactcaataaattaataaaatgataatataaagaaaataaaattctctgaaaataaagaaaagaaaataagataaatactatatatttaaaattttctatgtaaatatatgatatattaatatcataaattaataatcttataaatttacataaatatatacttactacatctatgttttattttaagaattttaactcatgtaatcataagtgaaaatagaatactttgagaaaaataacttatagaatttaacttttcaattacttttaatgagaatattttcatttattaatcttcactcatttaatattaatttgcatgatgtaaaattaacttacgagattacgacatatataaaaaatatattttcaacaatgtttggtttctaaatatttttgtggatttctatttttttaattatgttttgttaattgttaattatttttaatactaactaggatatagatttgatatgtcataaatataattttgatatgaaaatgttatcacttaaaataaagtgtagaatttaaatcgagtttattatgatgacatagatagttaaactgtattacaaaattgaatgtgtaaaatagaaatttgtttttttctttctagatactaaattaaatataaaataactcactaaaaaaataaatataaaataagaatcagttactatttaaaattcaaatatcatagataagattgaatgtgtataattaaaatagaatgcataagactgaaattttattttaaacaataattattaaattaaatatttagaaaaatatattgattattatacaaaattcaaatattgtcaataaaaatttatttttgtatcttatatcagtctaaattggcaggccttatctagtatcatatatgttataatttcattagtttgtatgtaaagtcaacgaatgtcatgtgactacaaaaggaggcagtaagagacgtaacttgttggagaagttacaactgttaccaacggttatgtagagtagttatgtgaacatgtatataagagtgtgtcttgtcttaataaaataacaacaagtttctgttttaataaaacaaagttttgttcttgtcttctttttcttctctgtttttcttttttctctaaatagtccacaaccttagttgaaagtaagtacagtataaattttgatcatgcacaagtaattcggttgacaattttatatcttccctttgccggtaccacttatattagatatttccagagagtactttgctttgaatcagttattctgactcagcccacgcctaatttcaaatggtttttaaagtaaaaaggtgcaagttgcataggccaacgccaatgtaaccctcattaacttcattattagtctaagaaaaactcttaggcacgatccgcaagctacgggggtagactaaaatgatcgttgactttgaattcggacagcttgagattgtcttgtcacactttatttttttaatctctaaaagttgatcgttgaatttgtactcgaacagcctgtaatatgggatggagagtggatagcctgtatacatgattatacattgtttggttagataaacatataccaatatagagagagcagcaaacataccaaaatcattcaaatctctcgcttaattactcagataaactctctatcggcgaacgctatggattcggagcagcagacggagctcttattacgcattagtcaactagtgtctttcgtcgatcctctcttttggatttcggatgaagcaacgagttatgtcgtattagtcactagtcgcataatcgatctcctcagctctatggatttggactcgctaccaaaaccggagaccaaactcatgtcactcactactcaaaccatagctctcttcaacactatggatttgttatcccatttcgaagccgctaaggaagttcatatcattagtatctgaaaacatctatctcgtcaactctatagactctgctacggatcagaagctcaagttgctcttttttaaaataagggaactcgagccggagccggagctcatatcactcctccaccaaagttactacctcgccaaacctaaggatccacagcgggagaagcttattcccttatgcccacaagtgcaagtaagctttcacgacggaaaacatcaagtgactggaaatgtccagcggtgcatcaatgaaaagcgggactgccaatttgaacgctacaagttttcaggagaagactacacccattttcactgctcggctggcaacggcgacgaccatcatgaagataatagcaaggctccggtcgagatcaaacaccctcttcatcctaaacattctctccagcttgccttgttcaatgatgacaaaaccaggcaatgctattgctgtcacgaacttctccgtgacgataccgcaagtatgttttatttttgctctccttgcgattttgggctcaagtttacatgtgcaaagaaatcaccagtcttgtctatcgaccaacccaagtggcatgagcatacacttgccctgtttccaagtcaagatccccaaacttgcagcctatgcgccttgaaacattcaaatttgcttttctatatatgtcccccttgctactttatcgcccatcaaagctgtttcagcttacctcatgtcatacggatttctcgccacctccattttatcttttttacccattctttcccaaaaggagattggatttgtggtatttgccgccggaagattaacaatgattacggggggtatcattgcatcaagaaaggttgtctttatgcggttcattcaaaatgtgccactcaaccaaatgtttgggatggtatagaacgtgaaggagagtcagaagaagaagtggaagaacttgagccattcgtgacgataagcgatggaatcatacaacatttcagtcatgaagatcatcatttgacacttgatgagaacacgagcaaagataacgacgagaataagctgtgtcaagcatgcatcatgccaatttattttggtaactcctactcttgtttgcaatgtgatttcattctacatgaagaatgtgcaaatctctctcgtagattacatcatccaatacatccacatctactcactttagtatcagataaccctctcagatatgtcgagttttggaatagttatgatcgtgattattgttcagcttgtccttcgttgtgtatagctggtttcttctataaatgcagtaaaagagattgcgattttaggctacatgtgcagtgcgccacaatttcagagcctttacttcatccaagtcatatgcatcatttattcctaacatccaaaccaaatgaggaaagaaactgttcggtttgcgccaaagcgccaggcgagtacaccaaggaaaccttcaattgcattgaggaggagtgtgactatgctttgtgtttcaaatgtgctactttaccacaacaagtgaggtataagcatgataaacacatactccctctttcttatgggaagaagacaagtagcatgacgtattggtgtgaagcttgtgagggaaaaataaatccagaagaagggttttataggtgtgatgagtattgttgtgtccacctacacattacatgtttgcttgggaaggacttatacttgaagcctcgttcatcctggtctctctcatgtggagcgctattgattctgcctaactatctgtggatgtctcgacctatttgctcctcctgtggtaatcgttgtcctcagagaatatttttatttttactctcaggtgcatctttcttctgttctgtgtattgtattcccacgacgcgtgaactgggtttcttcccgggattggaagctggcgagttagctctgatacttagttcttttcgttcctgatcccaaagctagtagtcatctcagaagctgaagttgaaaatcatttttcttgtctagaccagtcatgcaagtctccattgtgtacacgggtttatcgcaaactgcaacttcgtcagtagaagaagcagagtag

SEQ ID NO: 151894 - DNA, 1168 bp, Arabidopsis thaliana landsberg
ctacagcaatctgatcaagctgggaattatgattatgtctcctctatcctctacaaagaatcgtggaatctatctagtatatcataattcgcacacgatcaactattaaccgatagccaggttcttgctgttaacacttgaaagcttaaagcgctctatcaaagctggtcctaggcacaccacacctggtcgtaaaaaaattaaagcccttttgaccggtagaaagctcacaaccattgtcttctttctcgatgaaacttttgaagaaatttcatatgacatggctaccacagtgtctgatgctgttgaggtatcttcttgctttcttttttcataatttaccgctgatcatattcttgtccctttttctctcactgcattgacatctgtttcaggagctagctggaacaattaaactatcagctttctctagctttagtttgtttgaatgtcgtaaagttgtttcaagttctaaatcatctgatcccggaaatggtatgctttcatatgactggcttcgtcatatattgtgaagtaatacaacattatcgatcatttttctatctgtgcacttgcagaggaatatataggattggatgataacaagtatattggagatctcctcgcagaatttaaagctattaaagatcgaaataaaggagagatactacactgcaaactggtatttaaaaaaaaattattccgagagtctgatgaagctgtaacagatctgatgtttgtgcaactttcgtatgttcaagtgagcattttcttcattggtgacatttatttccacacaaaaggcttgcctttcgttgctgacacacatatatgcagctgcaacatgactatttgctaggaaactatcctgttgggagggacgatgctgcacagctttgtgccttgcaaattcttgttgggattgggtttgtcaatagtccagagtcatgcatgttagttttcttaagctccgccattgactttattttagttgtacgatactctatttttccaattttcctcccttaacaatatcatttgctttctcaatgtatcacatatcagagattggacatcacttcttgagcggtttttgccaagacaaatagcaataacccgagcaaagcgtgaatgggaattggatattcttgctcgctaccagtcaatg

SEQ ID NO: 151895 - DNA, 3312 bp, Arabidopsis thaliana landsberg
atgtctttggataaagttttggaagacgaggttgttgaagatacaggggaatcacaagtctttaacttgcttaatccagcatttgtagactttgatacttgtttagatcctatcacaaacgaaattccaacttccggtgactgaaaaaaagatgcaagtacaaaactttatcatataataataagagctagcaacatgtatactttttgagtttttttagagtttttaagccaatcagaaggctctatttcgtaccgagtcgcagaaagagcgcgttgagcgagtgaaagcgattctgtgggtaaacccttttccaattcatgcttttttttatcgacgcacatctctccaaattctccatcgcgtgactcttttagtttttttccacaaaaccaatgaaaccgaaccgaaatcagttttaatttcaaaaccaatgcaaaccaaaccgaatcagcaaatagtgtgaagcaacaattctggacagaaattttctcaacatcttaacaacgggaaaaagagaaaacaccacaactcaaaatcacaaagaacaatctactgcttcagttaaacatgaaaaacgattagacttaccagttgaaatctgaaagcatgaatctcgttgtgagctcttcgtgtttgcctcgtccttttattatctttcttattttctcttctttgtgtgatttcaactcacaacttttatattttactctgctgcttcgagatcaacgcattaaaagtaatggggtaaattaagaatatttagattttaaggggttgaagttgtaattttgaagaagtggaagatcaatcaaaaataatagaagaacagagacgacgaaacctgccggagaaccgaggagagaaaaaaccccggcgaaaatgggaatttgaattcgtcttctgttgatcatcgcttcacttctgcttccaggtcttcatcggaaccaaactcactttcactctctaatttctaaattgaaaatcgatcttatcaattgtgtgtgtgtgttttgttgcagagcttttactcagaagaagcttgatgatctcaaatctctctttgtttccctcgcttccaagtctcacagcaatgaccaatacgtctcgtaccctgttttccaggttttgaccaaaaaaaaaaattgtgttctgttctcatctggtttttgtggttgataattttgaattaagccttacacgatgtgtcggatttcgattttcacaggagtattttggtctgagtggttctttaggagaaaggatctttgatatggttactcaacacaggaaagatgataaaatgacttttgaagatcttgttattgctaaaatgacttttgaagatcttgttattgctaaggtacacacttaagtcttttcatcctcttaatcattggtttcttcttctgagcttttgaagatcttaaaatgcagagttcaattttgtaatctccatatgaaaagtgattgtagttataaatgtagaaccagtctcacgttgaatagaatccttcctcaggttaactcactgatttttctgaaaagtctattcctttttgttaaaaccctggtttcaatgcttgccattggaatttttgtggtaaaataaagaaaattcgcaaggatgaagaatgatgaagaagcttctaggttatggtaacatgacacgtgtatcaatctcagacgtccttttttgttataattgaggttatataaaatcagagtgatgttattttgtcttttgaattaagagtactctgcctctggaatttctgggttcttctcggattctctcaaaggtactctcttttcttagctcttgttcgaactcttcgattatcttatagaacgataggttatatactctatttgaaaatcatctattagagatagagatttggtgaagtttgtattcaatttaggttcttcatagagatttttgcttgatgagtatagagaagagtttctgagatcatgatactatattttatgcaaaaagattgcagagataaaaagaggaattaggaaaatgggtgatccatttggtggtagatttggaggatttagaggtagcttgtttggaggaagagatccttttgatgatccattcttctctcgaccatttgaggatttgctcgaaccatccaacacctttagttcaggtgcttcctttagtaatgcacataagaacaatggtggaagaggtttaacaattgaagaattaccgtctgatggagaagttgaagaaaggaaagatattggtagtgatgatcaagaacatatcagttcagtgaatcaaccatctgttgagcaccctgaagatgattctgatggtaattaccactagggattagataactttgtttacggttatgtgtatgtgtgagacttgcttggttgttgttgtagctgagaggaagattcagaatgtgaatcaaaggagtgattttaaccgaagagagggtacacagtctcgagctaacacattcagacatcacatctctaaggttacatatggtggcatagatggtgcgtactatacatctactagaaccagaagaaaagacggtgatggagtaagtttgtttctattttccgatcctttctattagtggaagttttacacatactgataagattctgtttctagatggtggttgaggaaagcaaagaagccgataagactaccggtgaagccactcataggatctcaagaggaatcaatgataaggtgattggttactctgttgatgttttgctccatcacttcttggttccaccaaggttcagttttagatgagtcttgactctcgagtctgagactgttggtttggtgtattcagggtcattcagttactaggaagctcaactcaagtggtggtgtagagtcgacacagactcttcacaacctcgatgaaggtcctgcagaatctacacagccttatcataacttaaagttctttgaaagaaaactggcaggattctaaaagatcgtttctttaatttttttgttttagatgaattaagtggctttgaagaagcatggaaaggcaattcatctcttggcaagcatgaattcactggttagtaaactcttcatctcaaaactaatctttgatctcaagagtttcagtccattatactgtattgtttttgttactgtacaatgttacaggctctgataatagttttggagggtgggtacttccatctcttgaccaaattcgtcgccaaacagaccaaagtcagactggttcgagccgatctgcaactggagctaagaaggttgttcgaatcaacattgaatga

SEQ ID NO: 151896 - DNA, 2224 bp, Arabidopsis thaliana landsberg
  unsure (1)..(2224): unsure at all n locations
ccgttcgtggataatagcaatcgcagatccgataagggtatttacgaaattgtaaattagcaattgcagatcgaatggagacatgcgaataaagtgcggtacggtttcatctccattctaaggatatcaaatattactatcggaagaatacattaaaaatgtgggaaacagtaggatacagatcattcggatattagcaattactatcggtggtagcataccggttcgtggataatagcaattgcagatcgggtaagggtatttaggagattgtaaattagcaattgcggatcgaatggagacatgcggttcacctgcggataaagtgcggtgcggttccgtctccattctgaggatatcgaatattactatcggaagaatacgtaaaaaatgtgggaaacagtaggatacagatcattcggatatttaagttccaatacggtagatcggtgaaattggcctgaaatgcatatacaggcctatatcatcaacatcaacaaaggatattctgaccaaggtttacgaaaaatatacataacttatcatgaatttgactacattacttaccatgaatttgattttatatatcctaaactataacaacttcaacatagagttaggtattttcacggtctacttagagtttccaatagatcttgaatctgtgaaacacaccagtgaccaaaccccagaagagaannnnnnnnnnnnnnnnnnnnnnnnnnnnnccaactcttcttgaatgccaaactcggataaaaacatgctcccgaatccaatttatctaaagcaggtatcatgatactgtcagtatgataagccattcaggcctatttaagatttcagagtaagtaactgattttttaccagtgtattgtgcgggtggcgatagtaccaaccattgaagaaagcagccaaaatgccttcagctcccatcacgtagaccaacattgcgttcatgcctatccattttagaggcagaaacatgtgtttccactccaatatatcgacctgcaaacactcgaaataataagcaacaaatttgtccaaagtttgtcatacgtcttggttgttgtcaatgtcaatgtggtggcttaagaatcaccagagaatacaacgaagagaagacgagcgctgctgcaccggaggtcacgcatatgtagctgaaactgtagagttgtttgttcagaggcatcactgcaaaacatttttgagtttgtaatatatggtaagagaagagagactgttttgagttggaccaaaaagcaaggtgtttctcacagtgggtgaaatgcagagtaagtccgagagcgaggagaacaagaccggtggagatccaatgttttagccgcgctgaatgtccctgcaaaaatatggtaatgatgagattgaaaggacaaaacggtgatagtttgtaggagcttgaagcttatgttttattcagtttgttgaccttcaagtgtaaaataatatgtccaaaatggactccgatgattgtagaaagaatagcagatatggagctgcataacacaagtttgtgagtgttatcaacttgaagataatgctaatgctcagttagtgattagggtgacaagattagaccttaacattccttcaggctcaaacggagcacggctccataaaggtgcatcttggtgtatagctccctcatagggggaatcatcggtgcaagcgtaaatctcaaaagaacacattatgattgagtccattgacatgaaaaatatatctttaatctatcaacccttccttttatcttctatgacataaaactcaaaaaggcataaggattgacataagccatttggcagtcagaaattgccaacatggtcatttcagcggcaagcacaaccggaaattacgtcttgtaccttggatcgtctccacgcagaatggtgatacatatgattgatccctaaaacttgtctgtcaacatatccaacagcattgcaagtagggttcagctttcctctcactccacatgatacctaggaagaattcagagaatttttcattgaagtgtacacaacacttacttagtaatggtctcataacattaaaacatcgaaagactcaccgataggattttcccgtacagaacgctatctttatcatagacaacaaattcccagtcaggaacgtacgttccatagagtgtagccagataaatcacgagaactgatgcggccacaatcctgtgaatgta

SEQ ID NO: 151897 - DNA, 1724 bp, Arabidopsis thaliana landsberg
atgacttcaccgtgtcaagctccgaggatcactagccacatcaaaagcatgcaaactttgggtctaatgggcctatatacaaaaggaccaaataacccttcaaaaaacaacgaaatttctattgtacccttcgccttgcaccatcatttgtcttctaaacacttcagagaatctccccacttcttatccattcgaagcaatgaagtcttcttctatcttcttcttcttcctcttctcatggccattctacttcactccctctctcttcatccaccaaaccctaaacctcaaaacccttataaacccaaaattctctcttcttctgctacctttcggagagatgtggtgcttagaacagcatcactctgtttcgtctccttcatctttcaaaaccaaattccagagtcattagctgatcctttgaagtctaccaaaccgttacgactcggcattgcgaacactaagtcttggttccagtactttggtagtgggttcgctattagggttcctcctgactttgaagacgtcaatgagcctgaggtgtgtaaaatctgttgaccaatctcttatgaatacgaatcaatgagtgataaaatgatgcaaagactgctccttttggttaaagttgtagactttttagtgatcaatgtatttagctgccaagttaggtctgaatcaatggttgttgttctagtcaatttgattttggggtttaatagttagtgttacattgtgttctgtgtttcaagatcagtagaatcttaagcttgaattgaaaactggtgctacttccttttttgggatgcagtgatcattgttattgacattgtgtgttacctcatcctctaggattactctgcgggattgtctctctatggtgacaaggcaaagccacaaactttcgccgctcggttccaaactcctgatgggtattgtttgttcctcttcctttataatccctttggatttccattaggataacttgtgtgacaaatcatttgtgtatgcagatcagaagttttgagtgtagtcattcgtccttcaaatcaacttaagatcactttcttagaggtttgcactgcaaagtcatttcctttacaagtttacattttccgcagtcatcagtttgccttgttcactaagctcatcgaatgatctctgattcaaataggctaaagatatatctgatttgggatcattgaaggcagctgcaagactttttgttccaggttcgctaaatcatatacatattagaaaattgcttagaatcctgtctttgatattctttatgcatgagcaggtgcggcaacaatttactctgctcgtacaatcaaggtaaaggaagaagaaggtttaaggcaagtagcttcaaactatactcccatcggttcgggaatcaatgttcttgataggagaatttccaaaggactcatctgtttgaaattcttgctatttatatctgcagaaattactacttctacgagtttggtagagatgaagaacgcatagctctagtagcctctgtgaacagagggaaggtctctgctgcaaaacacatatttgattactccttgacattcatatttcgagattcattactcactctgtgtctctttcttaatcttgaaaaggtttatatcgctggagcagctgcaccggaatccaaatggaaagacgatgagttgaagctccgatctgctgccatttctttcactattctatag

SEQ ID NO: 151898 - DNA, 2075 bp, Arabidopsis thaliana landsberg
ggaagtggaccagcagcacacacggcggcgatctatgcatctagagcggagcttaagcctcttctcttcgaaggatggatggctaacgacatcgctcccggcggtcaattaacaacaaccaccgacgtcgagaacttccctgggttccctgaaggtattctcggtattgatatcgttgagaaattcagaaaacaatcggagagatttggaactacgatcttcacggaaactgttaacaaagttgatttctcatcgaaaccgtttaagctattcactgattcgagaactgttctcgctgattctgtaatcatttctactggagctgttgctaaacgtcttagcttcactggatctggtgaaggtaatggtggtttttggaatcgtggtatctccgcttgtgctgtatgcgacggagctgctccgatttttaggaataagcctcttgtggttattggtggtggtgattcagctatggaggaagctaattttctgactaagtatggatctaaggtatatataatccatagaagggatacgcttagggcgtctaagattatgcagcagagagctatgtctaacccgaagattgaagtgatttggaactctgcggtggtggaggcgtatggagatgaaaatggacgtgtgcttggaggattgaaggtgaagaatgttgttactggcgatgtttcagatctgaaggtctctggattgttctttgctattggtcatgagccagctacgaagtttttggatgggcagcttgagcttgatgaagatggttatgttgtgaccaagcctggtactacaaagactagcgtggttggtgtattcgctgctggagatgttcaagacaagaagtatagacaggccatcactgctgcaggaactggtttgtactctaacttgtatttttacatttctgcacaacgagttagctctttgaaatcatgatttgaatctatcctgagtatctaatgtgtgcttgtggcctgatagcataatgttctaaggagtagttaggtacatatcgttaagtgaacaattgtttgtctgtttaggatagttgttgattgatctgttcaaaaagaggcgagttttcgaaagttgttagctttttatgacgaggccctttcatgttctcaaaatggctggctttgtatacaatttgattcattttacaaagttgttcaggcatgcatttggttagataagtgtttgctgtagagtggccttgtgttgtgccttgttttgtatatcatttgattcattttacaaaagtatatgaggcatgcttttggttggatgtgttttttctgtatgtgatctacgttctcattcgtatactctttataagactagtagtggtcattaccatttaccaagtatatgtcttgatagcctgcaagggaaatggaactgtatcaagtgtctcgttataagatctgttatctaaatcttctcttgctacgatgaaaaagcctgacatatttagcgatttacacttgcatggtgtgtgtgttcgttaaactcagcttataactaaagctgaaatcagattgttctcgccactctaaaagtgatttgtttacttcaaatgtttctcatctgtttttttggtttcatgaatcaaaaattcaactttcataaacaacttcatggatgctgcaggatgcatggcggcattggatgcagagcattatttacaagagattggatctcaggagggtaagagtgattagaagaagctgtaggagaaggatccattataaatcactctctctcccccttatttgctttgccatttttaaaaccaataaaggatcagattgatctcatacagacaaatctgagtagaattttgttatttgcatttgtttgcagttggattttgtgccaagttgtaaactctttagttgtcacagcttccaccaaattcatcttttaagatttgttccttaggtgagaggactttttcatatctttaattctctttttaattgattatgtaatcacaatttaaaattgcatatatggattggagtttctagagctcaagaaaattatgtaacattggt

SEQ ID NO: 151899 - DNA, 809 bp, Arabidopsis thaliana landsberg
aaaagactatatttcaccgacaaacacttgtccaggcaactatgctggcgtcatcctcggagaaccttcctccaaaccttaccttggttacgtcggtgatgtttctagattcctatggaactttctggcagataaaacatctgtccaaaagggaaatacaacctcagtttgttcaaaaggagtctgtagcaaaactgacgaagtgtgcatcaaagcagagagcaacaaggaaggaacatgtgttgtctccacaaccaggtaaactctgtgcttggaaattgcaatttggtttgcatgctcaagttctctcttatgtctcaaaatgaaccaaaatcttaagtctggtaggcattttataggaattattaattaggataggcttcagaagtggagtgtttttagacttgggagaaagtctatctttagtttgttgacctttgaattgaagctatcatcattttcttcttcccctgacctgatatgttgtatgtgacctaaccaatttgctgtctgagcataatacattaagttctggttttggcaggtatgttccagcttattcaactcgattgaagtataacgatggagcttggacaattctaccacagaactcatcagattctatggggatggttgatccagtgtggaccgaaagcaactgggacactttaagggtgcatgtgtacacagtccagcactcagcatacgacaatgcagtcctcgttgcaggtattacagtcacaacgttggcttacatcggaattttggctgctaagtcaatcatcacaaaagccttgaagcaggactga

SEQ ID NO: 151900 - DNA, 1383 bp, Arabidopsis thaliana landsberg
tgatgcttctagttcagatggcactcttagtgtaggccagcacagagttctgatatttgcacagcacaaagtaattacatatcgattaatcttacatctctgatttcttccatttttccgttgggtttgtttccttacaagaatgtccaagacctaaccatgttatgttatgcaggctttgctggatatcattgaaaaggacttgtttcaagcccacatgaaaaggtgagtttcaacttgtggatttactctttttattgtcagtatatttctattggaggactttgtactgattaggtctcctaatttgtgacttgaaaagtctaaaactgatcagcctttttttcgcttaagttgatttgagcttagtttgttttttgtaattccatgttcctctcttaatatatatccttaaatctggcttctacaatatattgcttatcggtctcaccttattcttacaacagtgtcacatatatgcgactagatggttcagttgtaccggagaaaaggtttgagattgtgaaagcctttaattcagatcctacaattgatgttctgctcctgacaacacatggtatgctttttcaattcaacaaagttctgctattgtgagatgatattgtaagcaacttctctgaattaaatcctttctgatccttcagttggtgggcttgggttgaacctgacctctgctgatacacttgtatttatggagcatgattggaacccaatgcgtgatcatcaggtaaggatttatatttttctttggcttacgtccatgtaaaatttcactttgcaaggaggaagagttccacatctctttcgtttttgattggaaagaatttaaaatagtatcggcacacacttagatggtgtattattatttgaagtttgctaatatagagctgaacaaactctggcaggcgatggacagagcgcatagattgggacagaagagagttgtaaatgtacaccgtctgataatgcgtggcacacttgaagagaaagtgatgagtctccaaaaattcaaagtgtcggttgccaatacggtaatcaatgctgagaatgcgagtatgaagacaatgaacactgatcagttgcttgacttgtttgcttcagctgaaacgtctaaaaaggtatgctattcattgtatttaatagcaattctctaacggaagaagaagattgataatcctcaataaccggtctttattgtagggtggtgcgtcttcgaagaagggatcagaggataatgatcagattgctggaactggaaaaggaatgaaggcaattctaggaaacttagaagaactgtgggatcaatcacagtacacagaagagtacaatcttagccagttcttaactaagctcaacgggtaa

SEQ ID NO: 151901 - DNA, 3306 bp, Arabidopsis thaliana landsberg
atggcgcgtgtcatccaactcccctgcgacggcgacggcgtatgcatgcgatgcaaatccaatcctccgcctgaagaatctctcacttgcggcacgtgcgttactccgtggcacgtgtcctgtctctcttcacctcccaaaaccctagcttccactctacagtggcattgtcctgattgctccggcgaaatcgatcctcttcctgtttccggcggtgctactggtttcgaatctgctgggtcagatcttgtagctgcgattcgtgcgattgaggctgatgagtcattgagtactgaagagaaagctaagaagaggcaacggttactgagtggtaaaggtgttgaggaggatgacgaagaagagaagaggaagaaggaggggaaagggaaaaatccgaatctggatgtgttatctgctcttggagataacttgatgtgttctttctgtatgcagttgcctgagagacctgtcacggttcgttctctttgttcttatgctttgttgatagatctcttttggtgaatctgttaaacctggaatcttatttagggtgtcttcttaagtgggttgtgattgtttattatccacttggtttactgatttgagcttgtgacatagaacactaaagctgcgtgatacaaaggcataaactttattgacatcataaatggttcctttaactgttttacaaaggctttgacttcattgatctttaccatttgtgacagaatgtgtcaatgttacatacatttacagttcatagttgttgagttatcctgttattgggttggattatttagtttgagtaatctattgtgttgttgaaaattgttaggattggtatgtggatggttgatctattttatattcaaaagggaaaaccataaacgttgctttttatgagtatttttatgagtaaggattattgatgaagatggagactatttaacttgggctgatggaatcttgtgtgtttgtttttcagaaaccatgtgggcacaacgcttgcttgaaatgttttgagaaatggatggggcagggaaagagaacttgtggtaaatgccgcagcataattcctgaaaaaatggctaagaatccccgtatcaactcgtctcttgttgctgccattcgattagcaaaagtctctaaaagtgctgctgcgagtacttcaaaggtctttcatttcatcagcaaccaagaccgaccagataaagcatttacaactgagcgtgcaaagaaaactggcaaggcaaacgctgctagtggaaagatttatgttacaataccaccagatcattttggtcctattccagctgaaaatgaccctgtcaggaaccaaggtcttttggttggagaatcctgggaggacagactcgagtgtaggcagtggggtgctcatttcccacatgttgctggcattgctggacaatctacttatggagctcaatctgtagcactctctggaggttataaggatgatgaggatcatggagaatggtttctatacacaggaaggtctgcctttcattactcctaaattttggtccatttgactcatgttgattttacttctctcatgtgttagaagtagctattgtccagtttgttgacatagttttgtttgttttcgtcttgaatatatgtcgatgtgtcacgcagtagagggagacatttcgctaacgaggatcaggagtttgaagacttgaatgaagctttaagagttagttgcgaaatggggtatccagttcgagttgtcaggttagcagaacaaaactccattgctctctcacattctcattttttcgttaagtttcctatatcgaaagttgtaccacaaaggtgaaatgtattgcttttctttgcattgaataaagaatagagttatgctaagttccatagatacaactcttaatatcagttcccttaatctaggtcttacaaggataggcattctgtatatgcccccgaggaaggagtgagatatgatggtgtatacaggatcgagaaatgctggcgaaaagctagactccaggtacacatatagggaaacaagctcgtaggttttttccctgttctttttatgcattgacatgttcttctcatttccataggattcatttaaggtctgtcgttacctgtttgtaagatgtgataatgagccagctccatggaacaggtttggtctttgttttttcccggaaagtgtcttatatgtatttgctatttgatggctcatgcatttattaattatatactgcagtgatgagcatggcgatcgtccaagacctttgcctgatgttccagagctggagaatgctactgacctgtttgtgagaaaggagagtccatcatggggtttcgatgttagtaaagtctctcttttatatgaccagagcttatatctaatattcttcggttggttcattattttgtaacttttccctcatcaggaagctgagggtcgttggaaatggatgaagtctccacctgttagcagaatggctttgaattctgaggagaggaagaagaataagagagcaaaaaaaggaaataatgctatgaaggccagacttctgaaaggtaaacgtccattatcacttgtgttattactgtatatagcacaatttataactgtttttttttttgttttatttgacacagaattcagttgccaaatctgtcggaaagtgctgagtcttccagtgacgacaccttgtgcacacaacttctgcaaagcatgcttagaagcgaagtttgctgggataactcaactgagagagagaagcaatggcggacgtaaactacgtgcaaagaagaacatcatgacctgcccttgctgcacgacggatctctccgagtttctccaaaacccgcaggttaaaaacagaaaccaactcttcttcctacattctagttctttccagttttgttgtgattaactttggctaatcccaaaatgtccaaataaaccaggtgaacaaagagatgatgagattaatagagatttttaagaagagtaagtaagaggctgaagttgcggagtcatcaaacatttcggaagaagaaggagaagaagaatccgaacctccatctaagaagattaagatggataaaaactctgttggtggtacaagtctctcagcttaaggagctctttagtttttccaaacaaacttcctttctttttttggtaatattccgcaaacgtctgaagttatgcattgcgacttatcatttttattttaaaacttatcagaaattgttcgattctttttttccgttagatataaattcaatattactaca

SEQ ID NO: 151902 - DNA, 292 bp, Arabidopsis thaliana landsberg
ggaatttgctatgattctccatggaaataaaatctgaacgaacaacttttaacggttttgggatgcaaagctacttcagaaggagaagaaggtaatgtaatttgtttgaatggttaatgttaaaactctcttaaagttgtatcagaaagagcgcgatttgctcttttgcattactctactttctttattgtttgcttgttatgtttattcgagtatgaaagcacattttgggaacaaccaaagaaacccttttcatgtttgaaataaagaatgctcctttttgggtttataa

SEQ ID NO: 151903 - DNA, 1473 bp, Arabidopsis thaliana landsberg
gatctggaccttcaaagtccactgctgtagatgattctgcgtccaagacaagcgaaaacacccttctaacatgtggaagggcatgggcgatttctttgacgagcaaaagtacaataagcgaggagattttgagctcatgttttcccggcaatagcggtgaaccaaatgaacatcttctataccggtatctcactgccttatatctgagcaacttgtttatcttttcaagtgttttgaatttgattttaaattgtcattcatgtgaacatctgtttgtttattgaacattctgtttctacagagcagctaagttatgttcgtctctctttcagctcatattatcacgggaaaggcatgaatcgactgcggcccaacgttgaagggtatcatgctcctatactagtgataatttctgcaagttgtaaagtcgaacatgaggctacttcaagcgagaggaagtgggtcattggtgcaatcttgcagcaaggttttgagaacagagatgcattttatggaagctctgggaacttgttctccataagtccagtctttcacgcattctcatcttctggtatcgcaaatatcgaacatttttcggcacactcgcttttccagtagtgcagtctttcatacttatgtgttaacaatcatcaagtaaggagataaactttgcgtatagccatctgcaccctgctggcggagtgtaccacgcacatcccaagcctgttggaattggattcgggggaacacttggaaatgagagaattttcattgatgaagactttgctaaaatcacagtccgtcatcatgcagttgataaaacttaccagtcaggctctcttttcccaaaccaggtaaagccacaacaccataaaggaacaaaatgagtatatcatgcatgtcaaattttgtgctcttggatcttaataacatctcttgctaaatatgatttctacagggttatttaccagtagaggctttggttctagatattgaagcatgggggttaggtggaaacaaggctagggaaattcaacaaaaataccagaaaagagaagagcttttcactaaccaacgtcgaaaggtaaaagaaaaacaccaaaagagcatgacatctattatgacatgcgcaaaggttttcaaatttgacacctttgttttatctgcagatcgacttgaaaacgtttacgaactgggaagattcacctgagaaaatgatgatggatatgatgggtaatcctaatgctcctagaaaggaagagaggtaatgaatgaaagacgagaactggtttgatatatacacacatatacgttgttgtctcttaaaatatatatgcaagaaactcttttgctgttcatgagctcttggattcaatgtgtaagttatgtatactagtgttgccaaaacttgaaccagccagttgatttgatatttgcctataaaaattggtttttattcccagagcttcaata

SEQ ID NO: 151904 - DNA, 718 bp, Arabidopsis thaliana landsberg
atggacattcttgatccaaataagagtttaaaagcagaaaaagattttgatttattaaagtttacaacatcagcagtcttgaaaagtattctgataggaaattacatgatttttgcaggaatgaacactggaattcaggatgctcataatcttgcatggaaaatagcagctcttgttcagggttctgcaaactctttaattcttaaaacttatgaaacagaacgtaggccggtatggtattcatcttttctaactttttcttgccatctctttcctcctaacttgattcattaacacatatcttattgtgactgctagattgccctttccaatacttcactcagtgttcaaaacttcagagcagctatgtcagttccttcagcgctaggccttgacccaacagttgcaaactcaggtaaactaaaactagcttgtcttttgctcatttcatagttccatgatcaggtttaaagcaattatatctctatggtgttgtagtgcataggtttataaacaaaacagttggttcaatccttccaactgggctgcaaaaggcaatcttggataatgtctttgcactaggtcgtgcacagctttcagaatctctgttgaatgagagtaatccgctgggaaatcagagacttagcagactaaagagtatcttcgaaggaggaaaaagccttcaactacagtttcctgcagaagatcttggtttcag

SEQ ID NO: 151905 - DNA, 196 bp, Arabidopsis thaliana landsberg
gaatgtgaaaaagagattcttacttcttattataaaaaactctggtcttatcacagtgtcttacaatttacattggcaatggcttgttgtcgagaaacgactgaaaaagaagaaaagctcgacgagggcggaaaagaggtacctcatgtcctgctccatgtattgtcaccagagtcagccctttgtaaactggctc

SEQ ID NO: 151906 - DNA, 1421 bp, Arabidopsis thaliana landsberg
taaaaagtcgattttttcttgaaagtcttaaaatcttgttcctgcaaaaaatctctagctgaaaaatattatcattggctttgatttaaaagacatatctttgttgttgattgcgttacacatcttttttttcccctaaattctcgaatgttctaaaatcttctttatttaaatttgtagtttttgtaagacaaatctttttgtgggacatctctttttaagtctctgtcttgatctcagtttcatttcgacaatgtcacagttcttacagtgagttttttcttgttcttattttaaaggaaagaatcaaaaatgggtgcgcaaattatactctctgaaggcttcgaggtggttcctccgccggagatgaacgatttggtactcttcggaagcaaccaatctgtatcaagttgcgatgtatcaacggtcaccaccgaagatggcactgttttttccggtgatagttcaccgggaggtgcaactgaagaggatttccctgaagagaaacctttctctttctactttgttaagcaaccagcttacgatgatcccgagatcaaagctaagatcgatgaagctggtcatgagattaatcgatataataaagaccgaattgttgtctccaatgctcaggaatccgaaaaggtgagtctgttttttctttaagcccacttttgtttttttgtgatgattaatatgttttttttttcttgtaggctgagattttgtctctgtttggtcaaatgaagagtttggtttctaaatcggaaggatatagagtggttattgaagagaagaagatggaatttgatgctctacatgaatctctacggaatctccggtgctctactagtgatcaactttgtttttcgaaggaggagctcgatcatcttgtaatgacaaccattagatcattttgttatatagcaaattttttatttatttttgtttctgattgtagaagtgttttggtgtggtggatgcagatttatatagctcattatcagattgaacatggtagcattggttttgaggaagaagattgggtgcttaaggagactgagaaggctgatgggatagttctaagtgaggattctcttgcggagaaagaagcctccataaaccgtgtcaaggtaaactctaatcaaagtttttaactcgttggaggatttgctaaaaacattgttgaatctaatgttgtgagtttttttttgcttcatcattagtctatggctgtggaattgaatgaagtaaagaaggagcttgatgcgattacatggaagataaaccatttgagtgacaaagtggggaagagtcagaacaacctcagggttttggatgtaaaaaaggcacacatacttgaggaaagggacacatcctatgaaaggattaagatgttgagaatacaacgagacaaaggg

SEQ ID NO: 151907 - DNA, 526 bp, Arabidopsis thaliana landsberg
tgaaaacgctaccgcgaaagcaatacttgctaactccaacgccagagacatgatcgtagaaatcgaaaaccgctcggtttatctcctcgcggtaatagtttctctttaaccggctcagtaaatttcggtttagtttctgtgactgtcttgcgtcagtaagaattgactgatcatgccacctcttcctcgtccttttccaagtaacgttcaaaatttaaaatcataaaccggtttgatttaactttaacccgaacattgcagataaaacccgacgtagaaacgcaaggagatttcataaggttcttgatcaaagaagtcggaagcgctgcgttttcagacattgaagacgttgttcctttcgtcaaatggctcgacggcgaactctcttacctggtatgaatcaaactttcaaattttcccagagtttctggaattatttagttcaccgtttgtccatttgttgttgtatctttgaagaatgatgaaaaagcagtgttgaaacatttcgagtggccggagcccaaag

SEQ ID NO: 151908 - DNA, 1676 bp, Arabidopsis thaliana landsberg
atctatctgggaataagcttggtggttcgattccgactcagatcgttgagtgtaagttcttaaacgctttgattctgagtgataataagctttctggttcgattccttctcagttgagtcgattagatcggcttagacgtctttcactcgctgggaatgatctctccggtacgattccgtctgagctggctcggttcggaggagacgattttagcgggaataacggactttgcgggaagcctttatcgagatgtggagccttgaatgggagaaatctgagtattattatagttgctggagttcttggagctgttggatctttgtgtgttggtttagtgatattttggtggttctttattagagaaggtagtaggaagaagaaaggttatggtgctgggaagtctaaggatgatagtgattggattggtttgttgaggtcacataagcttgttcaggtgactttgtttcagaaacctattgtgaagattaaattgggtgatttaatggctgctacgaacaattttagttcagggaatatagatgtttcgtcgaggactggggtttcgtataaagcggatttaccggatgggtctgcacttgcggtgaagaggcttagtgcttgtgggtttggtgagaaacagtttaggtcggagatgaataagttaggagagcttagacatccgaatttggtgccgcttttagggtattgtgttgtggaagatgagagactgttggtgtataagcatatggttaatggtacgttgttttctcagttgcacaatggtggattgtgtgatgctgttttggattggccgactcggcgtgcgattggtgtgggagctgctaaagggttagcttggttgcatcatggatgccaaccgccgtatttgcatcagtttattagctccaatgttatacttcttgatgatgattttgatgctcggataacagattacggattggcaaagctagttggatctcgtgattcgaatgatagctcgttcaataatggggatttgggggaattaggttatgtagcgcctgagtattcgagcaccatggttgtgtctttgaaaggagatgtgtatgggtttgggattgtgcttcttgaattggttacagggcaaaagcctttgtctgttattaacggtgtggaagggtttaaagggagtttagttgactgggtgagtcagtatttgggtactggtagaagcaaagacgctattgatagaagcatatgtgataaaggacacgatgaggagatattgcagttcctgaaaatcgcatgtagctgtgttgtgtccaggcctaaggaaaggccaacgatgattcaggtgtatgaatctttgaagaacatggcagataaacacggtgtttctgagcattacgatgaatttcctctggtcttcaacaaacaagaagcttgagtatctcttaccagaaagtagtcttttttggcagcttaagcgctaaaaaggtatgagaaatctactttgtattttactctatatctcattctttgttccttccccctactgttgttagtttttaaccgtgtcagtgctgtgtttgtcttgtatcctcctaccgtataattctgtacattcgtttgggtcattaatgtactctttggaatgtaacctcttttgatgaaatgagaagatttcttctgtctt

SEQ ID NO: 151909 - DNA, 243 bp, Arabidopsis thaliana landsberg
aattttattcattatatcttcaaaacagcttgtgcttatatcaaaaacagaagtcacgacgaccctcacactacacacgacacataaaattgaaagccccactgcgaatccaccacaaagcaaaaaaaaattgtttgttattcgaatggagctcctgagcacgatcaatctcttagcaatagatctagtgcttcttgtagttccgaagatatatggagcttgtcggatctaagttggcggcca

SEQ ID NO: 151910 - DNA, 2705 bp, Arabidopsis thaliana landsberg
atgcaaagatctggtcaagaacagctctgtgaaatcttgacggcaaattacggagatccagaggttcgacacgcaacgacatgtcgctatagatttcgccggtaatctcaggagtatctcgatgatgatatcaactgggatctggactgacttttctgttttattcggtgaggtcttcttctccgttctacgccgggagatggtaagaagattctccgtaacatttctccgcagtgttctcatggcggatacgccgacggttaaaaccctagagactgagagtttatggggaagacgaaccaatttggatgagaaaatcgaaagcaattttcgtaattttgttttaatggacttggatttgaattgggctttcaaaataaatatgggcttttaactaaaaacgacgccggatacattctcggtccattattcgccacgtgtttaatttctagatgctcttgttcttattcttctcgtcttctccataagccaaattgagtttatgattttggtttctgaatcaccaatggcgattctctctctacgatcttcgagctcattgccacttatttgttccacaatttctcctctgtgctcgaaacccatgttgtctcagttaccatcgaatttctcatcgtcgattgctgctgttcctgtcaccaaattaaaatccagttacagttcctccgtttcaccgattagtaggcctcgtgtggttgccgcgagagctgccactgagtccttcactgattacagagaagatatcggtgagattctcggcgatgtctctatctttactgcttcaggccaacgcctgcaattcagtgatctctgggatcagaaagatgtatgttaggatgcttatgaagaacgaattcttttcattattttgggatattattgtttgaatagtgtttttttttggacacagggaattgctgccgttgtactcttgaggcatttcggatgcgtttgctggtaaattgattcattcataaacacttggaattgttgcaaaatcaaggattgttgtaaaacgtttttgataatgaattattttttttatatgaaagttgggaacttgctactgctttgaaagaggctaaaccgagatttgatgcggctggtgttaaattgatagctgttggagttggaactcctgacaaggctcgtatacttgcaactcgggtataagatttctccattttcttcgatatatataccaacttactgagctcatggatatgttttctttggatgtacgttatgtttgcttgttcattgggttgaactttttaagagaagaacttgcttttgattgttatgctatgctctagtggttttcctctctgatgataagtgcatttagtagtactctggtttctagccatgagtcgaggatgagatcagaccgagtcttctccatatctctgagtgtctagctccctcttctcactttaacattgcatgtttacgaagaccaaccgttagttagttgtatcactaatgggcgttttgagcatgtttggtgtcattgtgaattaaaaaatcagaccaagattgggttgagttttgtgagattattctcaagctctttagtgatacaatttagtaagatttgttaattgcttggtctttgcaaaatctgcaactcgaacatgagaagagggtgagagatatagggaagagttagcttgatttcattctccattcaagcgcattttcatggctttatatagtgtacttttggatagaatcagaaataccaacaggcgcagcataaatcaaaatagcaagttccaacttcccagagaagtccttgtattatgggagctttattgtttaaccaagatactgagtctagattgtttccttgttttagttaccttttcccatggaatgtctttatgcggatcctgaacgcaaggtaacacaaacaaacatataccttgtttttaagatatcttttatgttgaaatggtgattgaagttttgagagggctcttcttaaatgcaggcatatgatgttcttggtttatacttcggtttgggccgcactttcttcaacccagctagcgtatgaacctactcacctcaaacattgttaccgtctcattgtatacactattttcacctcgaaacatgagaaaacttcgattattgcagaccaaggtcttctcaagatttagcgagattcgagaagcaacaaaaaattacaccatagaagccactcctgaagacagaagcagtgtgttgcaacaggttctttcttgttaagttctccacaagacaagatatctgcttttatttttggtttgatcatttgttctgtcttcttctcagggaggtacgtttgtgttcagaggcaagaaattattgtacggtcgaaaagacgaaggcacgggagatcatccatctctggatgatgtcattaatgtctgctgcaaagccactgttgcttgaaacatatgggatcaaagtctctctggtttgtcctcatacttaaaaatcactgtatatttgtagctatgaaataatgtctatatttctttaagctttggaaaaagtatcaacactaagaagttagcgcaacatatgtccaagtccagtctctctcaccgctcatgtagatttttgtaagatgtcgacaattcattgaaaccacacaagtcttttctaatgtaatgcaagacaagtgtttggtt

SEQ ID NO: 151911 - DNA, 1532 bp, Arabidopsis thaliana landsberg
ttatgagtttgagtacaaaacaaaaggacacgacgactttgtattatttgcttcaaatcctctgttcttcaccttccttgttccttcttctctccttcttttttatatagattttcctttcatgttgtaatacttttattctattagcgttcatattcagctaaacagacattttttccgcctttaagtcgaaaggatagaaagaaattaaagaaagaagaagcttgttgtctttgcttcttgaggctctcttcttgacttgatcatctcggtaccgttgttccacgaaaagaacagtagctttgcctttccatatagggttattatctgaaatgggtaattgcttagattcatcagctaaagtggatagtagcagccacagtcctcatgctaattctggtaattttcttttaaatctctctatacctctaaagtttcttcctttatccaaatttcgttgcttctgaagtttctgtttttggaaatttctccttattctttaagatggtgaagattcgacttttaggcttttgttctttttgtaacatgttcaaaatcaaacctttcgatatacccatttctgcttatgtctgatttctcttagtaattttggggttaaatgttggaacaagttggtgttttgaatctatatgttactccattatctcactatttgactgtttacaagattgagattgaaattcgaaatcaagttatgatcatgctttaagtctgattagtaatcaattttattgaatttttaagttagaaatcaatctgacatagatatctttatttggatctcttttagcttcattgagctcaagagtttctagcaagacaagtcgttccacagttccttcaagcttaagcataaattcttacagcagtgttgagtctttacctacaccaagaacagaaggagagattttgtcatcaccaaatcttaaagctttcacctttaacgagctcaagaacgctacgaggaactttcgacccgatagtcttttaggtgaaggaggttttggttatgtgtttaaagggtggattgatggaactactttaactgcttcaaaaccgggttctggaattgttgttgccgttaagaagcttaaaactgaaggttatcaaggtcataaggagtggttggtacgctcttttgttcctttcttctcttattgattttgatcatgaattgtgttatctaacatagtttttgtatttgtttggttttagactgaagtgaactatcttggtcagcttagtcacccaaatctcgtcaaactagttgggtattgtgtagagggagaaaaccggttactggtatacgagttcatgccaaaaggaagcttggagaatcatctttttagacgtatgtaaaacctgtgattatcaaagcaatccttttcagaatcagcacatcttatcttcttctttatacttgttttgtaatccttgtcaaatgcttttttgatcttccaggtggcgctcagccacttacgtgggctataaggatgaaagttgcaatagga

SEQ ID NO: 151912 - DNA, 1392 bp, Arabidopsis thaliana landsberg
  unsure (1)..(1392): unsure at all n locations
tttataattccaagaaaactccacatgcttttataatatcgaagggtttaattttgatattattttatactaagattccctgaaaaaagtattgaagttttaacataagtgaataacactaccctttaaactctcttagcaaataactgaaaattgaataatagtaataatgtgaagtgtgtttagaattatggtctattagtagtctattcaattcatgagtgaataaacacccctaaagcttgggtcctaagttatattgtatcttctttgtgtgtgcaggtggttgtggcgcttgtgttgttcttctttcaaagtatgatccattgctcgaaaaagtcgatgaattcacaatcagctcgtgtctcacgcttctctgtagcattgatggctgttccatcactacctcagacgggctcggcaacagcagagtcggtttccatgccgtccacgagcgtatcgccggttttcatgccacacaatgcggtttctgtactcctggaatgagcgtttcgatgttttctgctctcttgaacgctgataagtctcatccacctcctcnnnnnnnnnnnnnnnnnnnnnnnnntgtagaagctgagaaggctgtgtcagggaatctttgccggtgtactggatatagaccgcttgtggatgcttgtaagagttttgcagcggatgtggatatcgaagatctcggattcaatgccttttgcaagaagggagaaaacagagatgaggttttaagaaggttgccatgttatgatcatacatcatctcatgtctgtacatttccggagttcttgaagaaggaaatcaagaacgatatgagtcttcattcaagaaagtatcgatggtcaagcccggttagtgtctcagagcttcaagggttattagaagtcgagaatggtttgtcggttaagttagttgcgggtaacacgagcaccgggtattacaaagaagaaaaagagaggaagtacgaaagatttatcgatatcaggaagattccggagtttactatggtgagaagtgatgagaaaggagttgaattaggagcttgtgtcactatatcgaaagctattgaggttctaagagaggaaaaaaatgtttctgtgttggcgaaaatcgctactcatatggagaaaattgcaaacagattcgtgaggaacacgggaacgataggtggaaacattatgatggctcagagaaaacagtttccttcggatcttgcaaccatacttgttgctgctcaagcaacggtgaagatcatgactagcagctcgagtcaagaacagttcacattggaggagtttctacaacaacctcctcttgatgcaaaatctcttcttttgagcctcgagattccatcttggcactccgcgaagaagaacggtt

SEQ ID NO: 151913 - DNA, 537 bp, Arabidopsis thaliana landsberg; identical to SEQ ID NO: 45903

SEQ ID NO: 151914 - DNA, 211 bp, Arabidopsis thaliana landsberg
tgctccatctgccaaaagcaggctctttttcgattcatcatcatcttctccttcaaaacgtaagagctctaacaaaaatgcatagaaagagaaacttccggagaagtaagttttaatctctagggtttataaaaagtttcaattttttcccctttttaactgattaggatttggatttgtgcaggtacgagaatctgggaaagttctttga

SEQ ID NO: 151915 - DNA, 1281 bp, Arabidopsis thaliana landsberg
atggcgtcaatatcaaccaccacctggctctaccgaggtcaagtatgcacagacagtggaaagtccagtaattgtattgtgcaggttggttcttacacatcaagtttcttgttctgatccaaacttatctaatttagagatagtgaacattttagcttgtttcaagatgtcaaactggtaaaagtttgtttatgtatgtagagacgggttaaatgtgggtttccactcaagacattgcatgctgggattacttctagggatcggtctttgcgacattgtatcaaatgcaagaaagaggatggagatggtgatgtaagtgaagggtctaagaagagtgaagaaggatttgagtatgtgactgttgagaggcatccttaccatagttatatggattcaacttctgggaagcttgagccagcgtccggggctcgggctagtattccaggtgaggattattggcctgaaggaacttcgagccgggttagagctgctagagctcctcaaccagctggtgagtcttcgagttttccttcctatggaaagaatcctggaagtaggagaaagaagaataggaaagctactgaggagaatgtgactgttgaaacgaatgacgaagtatccgattctgaggatagctctgaagaagaggaaaatgattcctcggatgggtttgttacctataagaatgaatttgagagagaagaagaggagactggttttgaattagacaaaaagcttggaaggccacatcctttcattgatcctacgaaaaagaaacaaattgaaaagacactcacgagcgatgaatcgtggtggaactggaggaaaccggagaaagaacaatggtcaagatggcaaagaagacgtcctgatgttgaaacggttagtcatcacaatgatttcaggtttaaacatgtgtgtgtttccccaatgtttgatccattatggtatttttttttgttgttgatgcaggttttcctcaaggcaatggcagaaacaggacaagtgaagctctatggggaagaaccaacactcacagaaacttctctttatagagcaagaaggcatcttttcaaggaagagaggtatattgatctaacgaactttcaagtgaaaatctgttttattaggattttctttcgagttttctttctctcaggctgcaagctgagcgagagagattagcgaaagaaggtccaatggctttttattctgaatgggttaaagcatggaagagagacacgtcaagagaagctgtacaaaaacattttgaagagacag

SEQ ID NO: 151916 - DNA, 1644 bp, Arabidopsis thaliana landsberg
aacacaaggggtgagaatccaggtgtttttagcagattgccaatgaaaacgttagctgataggcaacatgtaaatggcgaaagcggaggaagaaacgaaggcgatctcttttctcagccactagtcatgggcggagataaaagggaagagttcatgcctcaccgtgggtttggtaagctaatgagtccagaaagtacaaccaccgggcataggctggatgctgctggggaaatgcatgaatcatcacctttacagccatctttaaatatgggtttggctgtgaatccgtttagcccatcttttgcaaccgaggctgtcgagggaatgaaacacatcagtccttctcagtccaacatggtccattgctctgcttctaatatactgcaaaagccatcaagacctgctatttcaactcctcctgtggctagtaaatccgctcaggcgcggattggaaggcctcctgtcgaagggcgagggagaggccacttgcttccgcggtattggccaaaatatacggataaagaggttcagcagatctctggaaagtatcctttatttgcttctagtacttttgccaaatattttattctggacagacttctggtgactcattgtttatcttaaaaaattctagtttgaatttgaacattgtacctctctttgagaaaactcttagtgccagtgatgctggtcgcattggtcgtctagttcttccaaaagcctgtgcagaggtaaatttcccattcctatggtgatgtcttttcttgtccttgaaatattttgtagagttatgactgatgtctgcattggtatataggcatattttcctccgattagtcaatccgaaggcattcctttgaaaatccaagatgtgaggggtagggagtggacgttccagttcagatattggcccaataacaatagtagaatgtatgttttagaaggtgtcactccatgcatacagtccatgatgctacaggctggtgatacaggtacttttaatatagttcatgtcttagctaaagcttcaagcatttgctggttttaacatcaaattttcatgaaccattttctaaaactattgttggttttctgtgtttttcacctctacagtaactttcagtcgggttgatcctggcggaaaactaatcatgggttccaggaaggcagctaatgctggagacatgcaggttggggtttctatgaactggtttctgtaggaatgtgctggtttttattttctgcttagctccattcttatccggttacaatatttataaatagggttgtgggctcaccaacggaacatcaactgaggacacatcatcgtctggtgtaacagaaaacccaccctccataaatggttcctcgtgtatttcactaataccgaaagagttgaatggtatgcctgagaatttgaacagtgagactaacgggggcaggataggtgatgatcctacacgagttaaagagaagaagagaactcgaaccattggtgcaaaaaataagagacttcttttgcatagtgaagaatctatggagctgagactcacttgggaagaagctcaggacttgcttcgtccctctcctagtgtaaagcctaccatcgttgtcattgaggagcaagaaattgaagaatatgac

SEQ ID NO: 151917 - DNA, 1483 bp, Arabidopsis thaliana landsberg
atgaaacaaccgtctaaggatgtgtccgctctgatcaaacgattagaatttgcgatgcaagaaagaaaagatgggttactagccgacgacaatgttttgattgagatgataatggaacttgaagggaatatttctactactaatggtgatgatgaagatccttattcacaaggcagggtaataaaagggattgaaccgatcgggctagacgaagacgatgagtgtgttgagattgggttggggagttgtgaacaatacaagagcgttttggtgatgataaagatccttcttcggatcacggaaacgtagaatctatccggctagaagaagaagacgccgttttgtttgagccttggttgaaaagcagggacagggaacagtctcaacgacaaggttttggtgaatacgaagattgtttctcggaacgcaggttcttacaagaagaagaagaagagtgttttggtgacgatgaagattctttctcggatcagatttcattcttggaatcgaaccggctagaagaagaatttgaagaagagaaagaagcagcccggttttcaaacgacaacgatttcgttgagcttttgtttcaaggtattgaacaatcaaaaccaaagccaaagaacatgttcttattatgatgatgatgattgatgatgatgatgatgatgatgatgatgatgatgatgatgatggtagtggtagtggtagtggtggtggttatgaagatggacctaaatggtctgttcaatcaatccccacaaagaaagaggtggagtatccgattatcgactcaggagattacgttgacgacggatatgattcatccggcgagctctctacaacgacgacgccgccgattcaaggaaatgagaaacctgaagttaacttgaaaaacgttttaactgggttgattgctattgttactggacggaataagaatccgttagatcagaaaaacccgtcttcgaatgtttcgtttcttggctctggcacgaacggggatacttttgttcattcgtctgtttacataccgagtgctccgcctctacttgaacctagtgggataaactatagtgtttacaaggagttgcttgaagctgaacctcctgagtggctacctgatagtttagctagtacttgcatgcagtgttctactccttttactgcaattacgtgtggtaggcatcattgtcggttctgcggagggatattttgtagaaactgttcgaaagggcggtgtttgatgcctagtcggtttcgggaaaggaatcctcagagagtgtgtgattcttgctacgagaggcttgatcctttgcaatgtgttcttattaactctattagtaatgctgtgcaagttgcaaagcatgatgttgttgattggacttgctcaagaggatggttgaatctccctgttggtctatccatggaagatgagatatacaaggctgctaatacgttgagaggttactgccaggtttga

SEQ ID NO: 151918 - DNA, 1109 bp, Arabidopsis thaliana landsberg
gcggccaaaaagactgcacaaaagagcaagaccattttgacggatatcgaaaggtggcaaaaggtatttgactattagagtctgaaatctgattgtatgccgttgatttgagtttggtctctaatatctattctttgtaattctgcagggagttgccagctcagatggtaagttgatcgcaatatatggagagattacagtttaaacgtttgttaatcgaaaattcaatggattctttgatgtggggatacttaattatattaccgttcttgagataactattagtgattgcgtgtctgaaatgctgtgactttctctgtatgacaaatgtttttggcactcagtgtttggtgttgcgattgagatcactgtccagcggcaggagtcaagcaggcctattcctctgatactacttaaatgcgcagattatctcatattaacaggtgataatgtttggaccaatggagcacataacacttttattgctcacaccttctcatatcgagttatcaatgtgatattttcctcttacccaggacttaattcaccgaacttgttcaaggccgaaggagatagaaagttgattcaacacttgggttctgcttacaatcaaggtagcaagatttcttttcgactcttatggctcatggagaaattgtcatttaattgaatcacttgtttggcagatcctagggcgtcaatacctgagggtgtgaatccagttgatgtcgctgcactcttgaaatactatcttgctagccttccgacaccactaactacttttgagctttataatgaaatcaaagatgcacggtcgagcatacacagaatgagacagtcactccagaagctttccaatgtgaattataatacattggagttcataacagcgctattgcttcgtgtgagccagaaatcacttcttaacaaagtgggaataagttgttataacactaatctctgattctagatacttaagatgatccttttttcaggaatcatataagttatctgaatattgggaatcatccgtttgcattttgcagatggattcacatagcctaactatggaaatggctccagtgatcatgtggcgagaagacaacagg

SEQ ID NO: 151919 - DNA, 1010 bp, Arabidopsis thaliana landsberg
aaccaaggatggttacgggccgatacggttagagccatggaaacttctgacggaagaagaagagacttgtaaaaacgaaaactctttaatttcagatctaaaactaaaacaaactgaagccggtcggaatgaaaatccaccggaaacaaaagcaagacaaaaagccgactcaggcgctgtgaaagccgcccaaagccagaggtctgaacttatgattttataattcaacacactaaaacaaacttggagattattcaagttataaacatgcatttggtaactctgatgcatttgtaaagataaaaacttgaagaacagagcatttgttggctggaaaaaaacagagaggtttaaattaagaaaagtcgtaaacattgttctcctcccctgccctcaaatctcacagatattatgactgcgggtttatctgccggagtgtaactcatgtaactcccaagatggaattttccggctaagaaactcggaaataacgttggcctccaatatcttcaaggcttcttcattcgtcaccgacctcggtgtcttgtactgactcacagaagagcctctagacagaaagaagttcatgagctcgtcaaaagcgccaggcttaacaaccttaatctcaagtggtccaatgttcttatcattctttcgtccttttctgtatacagcatcgagagactcctcaacagtgaagcagcattcttccataacatcgcggttaggttcaaacttggcgtccttgactttgctcccgagttcccaatagagtacatagtgtcctacaaacgaggacgaatccacacggctagtgaactccattagcatcaggtcatgtggctcgagcaggagctttgcgtttgtcactgccttaaggaggtcttcgtcgtaggtcttgtccatgtcgatgctcagaacaactttctgtcttcccacgaaatgaaactgtggcgcattgttgtagaaaccagtcactcttaaaacgtcccctaaacggtacctataca

SEQ ID NO: 151920 - DNA, 2359 bp, Arabidopsis thaliana landsberg
atgcacaaaaaggaccatgtgagtctttctttttggtaaattttggacaatttagtcgtaagctcatactggcgataaactcatacgaaactatcttaccgccttgcagtcgatagtgatatatgtggagagcttattaaaattggagaatagctcaatagggcaagttggtggcagcatgattcttggtatggtgatggagaggctgcgagatttggatgtaagtagacagaatatgcttatacaattgaggtcagtaagtaatgtggtattggtgagtgaatgatatgctggtgtatccttgtagttagagattgaatgggatgatattccacaagatgactctagtagaggaatgtttgatatggaacttgaagatgcagctgaaggcactatgaatgatggagacgaggtagactttatgtttatgtttcctttttgtatcagttaaaagttgctagataacaagttagttggaacattctttttgctgaactacgaaagtttggacttgatttatctattgcagcttccagtgggacctctaaagcaggatacatcagatggaagtatagtctctaagttgttggacaaattgatggtcgtagcttttgagcatcttgaatcctgtcaaaatgatggtcgtttggatcaggtatggcaccaaatgggacctcattgacatatgcatctatactttccttaatgatggactcgagaatcttcttagcacttctgattttttttaattattttggcgtaggtgtttgaaagcctcttcaagtcatttgaaaacttcattctgaacacatacaaatcaaaattcacccaggtagtccatatagctatcatattttgcataattatgtacatattcttctagactctagcatggtcgacatgagatgtctcggtttatactcactttctatatcatctgcagtttctgatattctatgcctgctcactggatcctgaaaattgtggtgtgaaatttgctagtaagctagtggagatttttctctccagcaacaagcatgtagctactaggcaagcatcccttcggtttaaattttctcgttcgctgcatgatatgttctgtcattgttctaatcacaaacttggttgtgcttttgtctctcccccttaacagaatgagtgcggtggcttatcttgctagcttcttggctcgtggaaagtttttgcctgtttcctttgtggctagcatgttgaaaaggtggaagcgatttctacaaaatgtcacctcaaacataatcattttatctgattgaagcttcagtttgttgtaacttgtaacattgtttttgttgtgtccaaaaattttaggttgatagatgagtgtgtgggttactgcagaacttgcaatgatgatactaggcctgaagcacatcagattttcttctccggatgtcaggtatatatagcattcaagcccaggcccctgctgtcacaaaattctacaatcactctgttgctatttcatcctcgaaaatattttttttacctgtccttgagagttttaagtttcaaagagtcattccaaaatgtagttacattattttaaactgtcatttgaatctgttctgtgaccacaggcaatcatgtatgtgctctgcttcaggatgagatccatcttggatgttcctcgctttcggtcccagcttacaccattggagtcaatattaatgcacaaactaaacccattgatggtgagttatcttttcgtcacataaggtcaactgttatatggaagtgtgccaatgtatcaaatgcatgataagcgaattctgctttgagaataggtatgccttccatcggtagttgcggagttccttagacaagctaaagaaggtggtctgttcatcgtctcagactcgttcattttcgatgacctacttgagtctgagctttcccgtgcttttggcgggtttgagaggctggatacattcttcccatttgacccttgcttgctaaaatcctcaaacaggttcatctctatctttaaaccattgcaccgattcttttacaggaatcttaattgaaagtcttgactctgtttctgcattttcttgggtgatgttgtagctttatctccccaaatttcatctactggtcaatggtcaaagcgacctatgacgaagatgatgatgataatgatgctgaggtgatcgtgaatggagatgaggacagtgacgaagatgacgaggctgatcttgattacgccctgaacaagatgtccataacgcctaagcactctttcaagaacaagatggaaagagacagacttttaagaatgccttccaggatcagaccgtcaacgagtcctgaatccttgtga

SEQ ID NO: 151921 - DNA, 1674 bp, Arabidopsis thaliana landsberg
atgggtagttaccatggaccacctcaaggtcgtggctttagtaatcaggacattcgatttgatgacaggccatcttatgagcctaggatggttccaatgccgcaaaggtcagtatgtgaggagcctattaccttgggtccgcaaggtggtcttggtcagggaatgtctattagaaggcctgcagtagcatcaaacacttatcagtctgatgctactcaggccggtggtggagattctaggcgaccggccggtggtttgaatggttttggctcacatagacctgcaagtcctgttactcacggacggtcaagtcctcaagagcggggaacagcttatgttcatagggaatttgcaagtctgtcgcgtgcttctgatctgtcaccagaagtttcgtccgctaggcaagtactacaagggccatcagctacagtaaacagtcctcgagaaaatgctttgtctgaagaacagttagagaatctgtcattgtccgcaattaaggaatattacaggtactatatctctcctttcttgctggtcatttgtttcatttttcgcaaagtcatcagatactgccacatttaggaaattattctgtgggaacctgtgtaggtataattggatcaaattacagttcattcgtttacagttagagcgtttgtttacaacgacagatcatctgataaagtgtatatttcttgaagtatgtaaattagaatttgctccaaacaaaacggcttaaaaatacatatgagagactgtgttctttgactttaatagaatctctaatacaggggtaaactctgttttttttactgactgtgcgttttatgtatgatgttagtttctattcgtttaccctctttattattgataagcactctggtgcgttccaatgtgttcttgtgcagtgcccgagatgagaatgagattggtatgtgcatgaaagatatgaattcaccagcttaccacccaacaatgatttctctctgggtaactgattcgtttgagagaaaagacaaagaaagggatctcttagcaaagctccttgtgaacctcgtgaaatctgctgacaacgccttaaacgaagtccagctagtgaaagggtaagtaaacaaagcccataaatcttgaagccctagtctaatcaaacgtctgttgcttaaatcttttactgctttttttttcacaggtttgaatcggttttgaaccccctggaggatgcagtaaatgaagctccaaaagcagcagagtttcttggtagaatgtttggaaaaagtgtgacagataaagtagtgacattgccagagattggtcggttaatccaggaaggaggagaagaaccagaaagtctgatagagtttggattaggcggcaatgttcttgggagtgttttggagatgataacaacagaagctgcagaagaaacgttggttgagattcgccggagctcaggtctgaggattgaaaatttcaaacctcatgcacctatccggtttaagatattagagaaatttacttaggaaaaaaaaatggaaccatcttttgggttcctttcttcttctctttttttgtttctctattaaaagtcttttatgttttcaagtgcttcaaagaaaggtaatctgttataacggcagtttctctcttttattatatagcaaaaaacttccaaaa

SEQ ID NO: 151922 - DNA, 553 bp, Arabidopsis thaliana landsberg
ggagaagattttgaacctctgacacatgctttgctttcaggctctcttgtgaggccaaaggttgttaaaagcgttcacttttgtgcatcaaccggtgaatttaccaatcgagattatcgacacataacatctcacgctggtttacccactggctctgtctatcccacaagggtaattacatgttttttgttttcgttttgttcatttacctgtactgctggaagatttgcctcttactgaagattgagtttttttttgttcaggatgataagggaaacttattggtgactgagtatgggctgtgcaaatacaaagatcaccagaccttgtcaattcaagaagtgcctgaaaatgctgctcctggtcagcttccacgaagcgttgatgtcattgctgaggatgaccttgttgactcatgcaagccaggagatcgagtatctgttttcggtatttacaaagctcttcctggaaaaagcaagggtagggtaaatggagtctttaggtgcgttttcttacacatctgttagttcaagatgttttcactctgatagtc

SEQ ID NO: 151923 - DNA, 275 bp, Arabidopsis thaliana landsberg
gtcctcaccggaacgcgcctactctctttccacatcgtacgtttcctctctctaaattcttcaactttaaaggtgataaaaattgaatctttcccacaacccacaagaaaattcgaatcctttctctctttctatctctaagacacgctttcgatcagcaatctcctcgaattctggttggttccgtctctgttttctgtacacaaagccctgctgctgttgatacacgtgagccgacattaatgcccctgtgttttcttctacaggtacgtttt

SEQ ID NO: 151924 - DNA, 697 bp, Arabidopsis thaliana landsberg
atgaacgacctaagaggagacgtggcaagactgcagcaaggaatgagccagatgcagaggatgcttgaagcctgcatggatatgcagttagagctgcagcgttcggttagacaagaggtctctgcagccctaaaccgatctgcaggtgaccaaggtcggtgcctattctatccaacaaacttggtttctcatttttgtgatcttatgtatatagtatcttaagaaacgaattatgcagcaggtatgagcgcggaaacatcagaggatggttcaagatggagccatgtaagcaaaggaacttgttgcgtttgttgtgacaaccacattgatgctctcttgtataggtaactaactaactctttgctcaaaaaaaaaattattgtctcttaaactcaaaactgaacaaatcctttaaaattacagatgcggacacatgtgtacttgctcaaaatgtgcaaatgagcttgtaagaaacggaggaaaatgtccgctttgtagagcaccgatcatcgaggtaatccgagcctactccattttataagcctcagagaagaaggtatagaagaaaggaccagcagaaagagatgtgttttggttttggggttaacattttgtagttgtagtatcttcttcaaattcatatttgatgtgtatagtctaaattaaattacttaaagggaagaaaagaaaagctctt

SEQ ID NO: 151925 - DNA, 579 bp, Arabidopsis thaliana landsberg
cacactttcaatattattttaaatatctatgctgaagaaatattttctgatttggttaatcagcttgtgaatgagtattgcatgaaaagaggagtttcattgtcatcgacggacaatcaaaaatcaaatcctaacgaagaaccgatgaaagatttgagaagtagagggctttgtcttgttcccatctcatgcacactacaagttggcagcgacaatggtgccgactattgggctccggcgttcggaaccactctccagtgaactattcactttctgttattttatttttggtcagccaaaaaaaattagtagatgttataacatcatgagcaaccaatcaattgagaaaacatcaaaatgagtttccaaatttgattgctcatgatgctatacaaagttcttcgtttaaaactttgctagagaatttgcgtctggcgtctgatgaatatgcgtttggcgtttcatcatttgatgcgttatcagatgatatgaccaagtgatcaatttatgttcttgctttaggaaactgtttgttttcttttaccggttaattgtaatttgtggttaagtacttatttt

SEQ ID NO: 151926 - DNA, 81 bp, Arabidopsis thaliana landsberg
agaatcagaaacgtagctctttcttcagaagaattgttgggactgttgtgcggtcggttcaagatgaccaaaaggaacaag

SEQ ID NO: 151927 - DNA, 280 bp, Arabidopsis thaliana landsberg
ctttgacaaaaccagggaaagagacagagagagataatggcggctaaactaatctgttcgtctttaacagtgcattcaatggcaaataagaagccatcaccttctgctgcaacaagaacaataacctccaagaaggtaaaagttgaaaatcaaaatttatcttcttatatgtcccgaaatctaatctatttgttatgtttggcagagcacagagacaccacaggaaaactgctgacaaaagtcgagcagctcaagcttcagaccaaagccgagaaagcag

SEQ ID NO: 151928 - DNA, 579 bp, Arabidopsis thaliana landsberg
gcattctctctgttctatgccttcaacttatggctaaggccattaccggagaaaagatttatgccccaacaacaccctctataggagagagaaggttccaaagcccaaacccgacggttaaagatccggtttcaattaaacgggtcaaaccggttggtgatctctgggtcactccaaacgacaagaaattggcgaattactgtttcaatctcgtcgtcgccgatcagatatcaccacattttccggcgaagggagatgactcgattccggtgttcgagattctcgccggaatcatatggaaatgcatagctaaagttagagcagagccaaagcctgtaacggttacgatcattaaaaaagatccgaacgatctgaaacttaatgcgattcgaaacagtcaggtgataagctcagtgagcgtggattttccggtggcggaggcgacggtggaggaattagtgaaagctatgggggaagcgaaggatgagagatgtggaattgaggagatcggagagagttgcgatgggaatttggattttgttgtttatggagcgaaattgacgtttttggatctgagtg

SEQ ID NO: 151929 - DNA, 298 bp, Arabidopsis thaliana landsberg
ccctaagaaaaggctcatctttgcgactgctcccgtgttcttcgtctctctgtcaatggctcgcctcctcagatgtctgagaaaaagtttcatatttagttcatcgacttcgattgcgtacagaaaccctagaatatgtgttcagtcaaatcaaagctatattttcttaagcagccgcaagtttctcagctcgggaagttacgtttcagaaatgcggagaacagctttcgagggtaacattctcagattaattcgttcggagattcagtccgagctcgatcactcgcctattcttcag

SEQ ID NO: 151930 - DNA, 1097 bp, Arabidopsis thaliana landsberg
gataaaaagtcccgccttcgcgttagttctatggcccttgatgggagtgaaagctggttggtaagaactaagcaactagataatctaacattttcgcaacctgctatttgtttgaagggattgttgcctccagtaacctaagaatatagttcctttctcctgaagaatcacttagaagtttaaatactgaacatgtatttactgttattggtatgattttctcctctttcaggtttgtggacagggcaaaaatttagctttatggaatcttcccgcctcagaatgcgtacaaacaatacccatccctgcacatgtacaggatgtgatgtttgatgaaaagcaagtaagcagaacaagattagattgaaatctaagcagtgtaatttaaagccttgggaggccgtaggtgttatttgtttatcaaggcttaataggtttatgtagtatctctttgaatcatccctcttcaacgaagtttattaaaaaatttactgacttttctaaactagaaacagaggtcaacacctagttttaattcctgtgctaaagtttaaacatctttttaaaaatgttgtctttaacaagtatcgcactatcagattttgactgtaggagcagaaccacttctaagacgtttcgacttaaatggagctttgctttctcaaattcactgtgctccttgttcagtattttccatttccttgcatccagcaggagtatgtttccaatcccttcttttctccccatttcctatatatgtgtttgcttttctcccatttcctatgttactgctaatattctgcaaatatgttaccccttctggactagaaactcaatgtttaaccgttgatccaattcttttgtatttgcaggtagttgctgtgggaggttatggaggtattgttgatgtcatctctcaatttggaagccatctctgcacatttcgtagcagttcattgtaaaactccttacagtttcttgatttggctcgataccctaaagaggtaccgaaatgtgtcagtcagattattgcagaggttaagaaaccttttctttgttttcttaggatcttgctcctgactaaagaccaattagtt

SEQ ID NO: 151931 - DNA, 2018 bp, Arabidopsis thaliana landsberg
ggtgagaagaataatggaaggaaatcatcggatgggaatggtgggtattgtgtcctttttcttctttctttcttcattatacattcgtaaaaggttcctaactagtaaggtttgccgttccaatgttcataggtagctcttgattcggcgacaggttctccagtggatgttgcttgcgaagttgaaatcacagagtctgttacttatttctttctgattatatttgttgttcttcagttgatgattttaaattacattaactcacacaaagtctgctgatgttttggaactacacaggtgtgatccactcccggatggacgttttgtcctggaggtgaatatcatgttcactactttatcttaaatccatattacttggatctatttgtctaaatctctgataccgtgacatagtcaacctatagagttcatatttttggggtacttttcaagtgtaagttgtcaaatgattaacttagtatatgcttctgcagctggaaagccatagaaggtgccgcattgtaaaagcttgggatcaagatgggtaagctttgtcattttgattacttgatattattcacatgtctttttaaacaatctctctgttttcgtgtcagatgtgattgatatacattataccaaattacatttttcctttatttttcaacatgtgtgaagatcaaatatttaattttgggtcttcttgtaaacacgattgtctgactttgtttcatatacgttactccatttcagcatattcagacacaaaaacgcttagcttcttattaccatttttttcttttcagatatcgtgttgcagaggttgaatgggtgaaagatataccaccacaaagcgagcaagggaaagcagatgtacgatttttctctgctgttactaaagtgattttatttcctttctcttattttcatatctttctttgtgacttcttaaagctgcgggaactgacgaccagcgcagcatcatttgctcggtcatggctagatagagcaaaggaagcagctagacaaggaggtaagcaactattcattagctgagaaagagaattgaattactcatgacttctggtatttccatccaagctatagcaattgaaacaattcattagatcattagttaagtgctgtttcttttcctggccatgatctttgaatcaactattgtctttatggttgttttagagcaaagaattgagtatatgcacggcagttagaccatactctaatagttaccagctaatgttttatgatcataattgattgatagttgtggcacttgtatactcatgttattttagacatgatcgagtaattccctttttctttgtttttacagacagaagaagacttgaaatacttctaaatgttgaatctatgataccaacgcctcaagatcccgagcgcttcagtttctgggtaaaacacacaactattggcatatttccacttgtgttaaattattgctcaatgagtttatttttggcgccagcttgctacactgacagataggagaccttcagaaagattggaactacttcggcttcaggatactggagaggtacttgattatcggctagtacagattgctcgacaaatctcattgtttcaccagtccctttcttttgattgttgaaactttgttgttgcagagaataaagcgcgggttgatatatctccgatcagtagaaagaggatgcagaatgcaatgaactggcagcatgatggcattgtattgccggttaaactacagagataaacttgggacctgttcataagaaggttgacaaaaacatttattcatgattaaaggaatacataagatagagatccttgtaggatcgctgtcatcctttgtcggatccattgttgtagattttgtttgcgactgtattttatttaattaccatattcttcattatgcaactgtagcaagaagaaacaaaaaaaacaaaacaaaaatatgtaagattcttgacaagataatatcccttttcggacac

SEQ ID NO: 151932 - DNA, 2035 bp, Arabidopsis thaliana landsberg
  unsure (1)..(2035): unsure at all n locations
aaaacgattgtcattctactgcancatgtcctaggtctagcaatcctcggtcaatgccantgacacaagcaatcatccgggttagctctaattatacgcttgttgttgcaattgtttactttgaatctctgttttctgacgctctgtttgcaggaggaccaaatatttcttatgaagccgaggcctctgaacgcgtcagatcggctaatgccattggtccaagcccacagataaataataatactgctgcagggaggactccggggttgatcaccctgtccacaagaatgtacgtatttctgcatttgcctcttccaaagaaccgttttattctgcaaactcgttgcttgtgttagcatgtcatgtatagtattactcttagaacacttcatggttccctgaaaactgattttaccagtatcgctttgtcaattgtcatgaattaatgaaacaatatattgatcttcgagatgagttcccttgactgttattttactgaaaacccattgcagatgaacatgccatccacttcattatctcctgcgggtacctctaaaagaaatgtcggacccgaaacctcaaattttgggtttgggagcgggaataaaacctgcggttggacttcaacattcatgtcaccggggaaatgatgcaaaaaagttggagtatatcattcatctgatctgctgagcaagattatgtgtgcctttgggtctaaactgtgatttctgcagtgaaaagctctagactgaggttgaagatctgaatggagtttttccatgaacagcttactgtttgacagaaggcatgaagattatgtttgctttccttcaagattctcacaaatgactgacttccaacctttgtataaaatcttgcaaccgggcgtgtaatttggttcttgtgattcattctcccaagtttttttctataaaacttacactgttcgtatttctgtgcgtagttccctgtgttggggcataacctgggtttgctgtgtcaccaacattgtttgcagaaaatcaagagcaaagcatcagcagcttcagcagagatgccttcaaaggcttgagtcaagagttgcttgtggcagggacatgtcagcatcaagctaatgcgcagctgacgagaatctaaaaggatacgtgatgggctccattagctatggctacttggctagcttctgaaatgctccgagaaacacttccccctttttttttctctgaatttcgtattcagttaaatgggattctgtgtttgatttttcttactcgattttgtgcattaaaaaaacttatatccaaaagcttgacttgatccaaaaatgcataatcaattgctattatttttaaaaaatccgtataaaatcctagtctcaatattaaaatacaaacacctagaattgatgatataacagatttgacgatttggtagagaactagttagtggattagatttttttatagctagctataacattttcgaaccttcatcattttgcagacctttaaaacgggaatcatcaaatcatccaccgggccagcgtgacattacgaaattacgtaaataccctcgtgtttgtttataaggtaaaaaagattggcggacccaaaatggtgtagcagttaggtgtacaatctttttttttgaaggatcactactacggctcaaacaagcctgggtccatgtcactaccaccgatgtcagtcaaacaaaaataataatatatgttttgagttcctctaatttcaatcttctaaacaacaaccctaaattgatatctctatccttgcgcttgatccagattcggttgtgatcggagctgccatggaacgtatcatcggcggaaagtacaagctcggacggaagattggcggtggttcctttggagagattttcctaggtgtgtgttctcctctgttcttgtccctttggttttccgagtttgctttatgatttgaaattgacgcgtcttctgtttgttgttttcgcaactacgcacgtctataccttcgagattcgagctgttaagatc

SEQ ID NO: 151933 - DNA, 455 bp, Arabidopsis thaliana landsberg
  unsure (1)..(455): unsure at all n locations
ttgtaaattattcaggtgggtttaatgcttagaggaatggggttcaacaaaagcacatatattttcctcgcgtctggtgaaatatatgatgcgaatcgaactatggccccgctactagagatgttcccaaatttacaaactaaggagatgcttgcatcagaggaggaacttgctccatataaggtttgcttctttcctggtgtttgttccagagtatatttctcgtgatgaatgataaatctgacttgaaactctgtgttcagaatttctcttccagaatggctgcaatagattacacggtctgtctccacagtgaggtatttgtgaccacgcaaggtggaaactttcctcatttcctcatgggtcatcggagatatatgtttggaggacattccaagaccattagaccagacaagcgaaagttagcaatcctctttgacaatccaaacatcngg

SEQ ID NO: 151934 - DNA, 833 bp, Arabidopsis thaliana landsberg
aatcaatcttcacccgccactgaaccatgagtccatgaagaagatccgtctctaattcttatcgccggatctgtaacaaatcacacacaacaatcaatcaatggaagaagaagatctgattctatctccatctccatacgatcttctctttcaagctctatctctcatcccaattcgtcactacctcatcgctctcttcgttctatgtaccatcttcttctacaatttcgttgaatttcacttccttggagatgcgattcttcgttatttcagatgtcgcgtcaatctcatttgcaatccagattctcctctttatcacggtgttgtttctcggtgtcggattcttcacggccggtgagtgtgtgtaacttagattttgggcgagattgtgaattcggtttctgatttttcgtttttttcagatatgtggcgacgccatggttagcgagccctcatattcagacttgtttcttgaatttccatggattccctccagttttcacctatacaaggtgatttggtatttttcaatatttctgtttgattttgagtcacaaatttgtataaacttgatgttttattgtattgttttagacagctatttcttacttctgatggtggaacgattgcattagattggcttacgaattctgatggtaagatttagtgactgattttactaccaagatggttggttttggatggatatttgaatctgtttgatttgtgtagttcttgatggttctcttcacaataagagtgaaattacaaaagaagatacaacgcctatagctgttgttattccagggttaactagtgattcttcatctgca

SEQ ID NO: 151935 - DNA, 592 bp, Arabidopsis thaliana landsberg
atgtatcatcgcacggagacggagagacagagttggaccagtcagagtcgaaaacactttacctccgtatcctcctcctccgatgacgtcggcggcggtgactacgactactttggctagagaaggattcacgaggtttggtggtgtgaaaggtttgattcttgatgagaatggtcttgatgtgttgtattggagaaagctacagagtcagagagaaagaagtgggagtttcaggaaacagatcgtcaccggagaagaagaagacgagaaagaagttatttattacaagaacaagaagaaaacagagcccgttacagagattcctcttcttagaggaagatcatctacttctcacagtgttatccataacgaagatcatcagccgccaccgcaggtcaaacagagtgatccggcaccaccgccgccaccaccgtcaattgcggtgaagcagagtgcaccaacgccaccgccacctcctcggattaagaagggttattcaccatcgccaccgccacctccgccggtgaaaaaggttggagctttatcatcatcagcttcgaagccaccacctgcgccggttagagatatagag

SEQ ID NO: 151936 - DNA, 253 bp, Arabidopsis thaliana landsberg
aacctgagcaaaaaaaagtctttttaatctgaggaaaacaaagaggcgacagtatattcgattcaataagagtattcctttgagattcaaccaaaatcaattttcagtctaataaagtttgaaactttcgattcaggttatgtcggaaaaactcaccgtcaatgcgcttgttcctctcttggtatcggcgacaacttctctccttctcagaaaatgctaccgagtttgtaacaatcttaaacgacgccgttga

SEQ ID NO: 151937 - DNA, 654 bp, Arabidopsis thaliana landsberg; identical to SEQ ID NO: 23962

SEQ ID NO: 151938 - DNA, 245 bp, Arabidopsis thaliana landsberg
cgaacttcaagttcaaagagcttaggggggaagactaagggatcgagttctaaagccagcagctccgattcaagccattggccttgtgaatattgcacttacgtaaatccaaggtcgaccaccatttgccaaatgtgtgaacatggccggtgaaatgccataaactggcattaaagactgtattagtaatgcttcttcgcttttggtcataattaattttcatgagtcgtcgtaatctttgatgt

SEQ ID NO: 151939 - DNA, 807 bp, Arabidopsis thaliana landsberg
atcatttctctttaacttcgcaaacttctcctcgataaaatttctctctctaaaaaaaaacaattagaatcttgccttttacagagtaacactacatgccgacaatggggaataagaattcgatgtgtgggctaaaaaggtaataataattggtatcaaacgaatcttgcttgctacgttggtttctatatatacaagtatttgtaactcttgtagatagacatatgaatatataacttatatgtgttgttgtgtatatcatcaataggtttccgaactacaagaagtctccgatcggttcatttgcgaaaaactcatcatctcacgacggtattaaaacaatcgaagctgttaacagttgcagtttttctagaaaagcagatctttgcatccgtatcatcacatggaacatgaatggaaatgtacgtacgtatatgtaccacatattcatctaattctgccatatgaaaaatcctccttcataattagattcaactatgttactaaatgtactatattaatacatgtgaaggtttcgtatgaggatttagttgagcttgttggcaaagaaaggaagttcgatttgcttgtcgttggcttgcaagaagctcccaaagcaaacgttgatcaacttttgcagacagcttcatctccaactcacgagtaagtaataactgtttatttctacttatatccataataactatactctactgtttatttctacttatatccataataactaatataccaaaaatttgccttatcttcatgtaattttaacattgcaaattaaagttctatatc

SEQ ID NO: 151940 - DNA, 850 bp, Arabidopsis thaliana landsberg
ctttctctctcgttttctaacgcatacactttgaatggcgcccatgagtttgcctccaggattcaggtttcatcccactgatgaagaagtggtggcttgctatcttgataggaaggtcaacggccaagccattgagctcgagatcatcccataagttgatcattatccatgcgagccatgggacttgcctggtaaaaacgcaaaactttatatctctctctatatatggttcagcttgtttatgtcaatctgacgttatagattacatatattggtcatgatgcattcatacatatgatattggaggttttatgagctatttatttggataatacgcggaacagaaaagtcatttttgccgggaaacgacatggaatggtacttttacagcacaagggataagaagtatccaaatggctctaggacgaaccgtgcgacccgagcgggttactggaaggccacggggaaagatcgtacagtagaatcaaagaagatgaagatgggaatgaagaagacactggtttattatagaggaagggctcctcatggccttcgtactaattgggtcatgcatgaatatcgtctcacgcacgctccttcctcctccttgaaggtaaattatttcccatgcacaaacttctattaacatatatatctatattcatttctgatctaatttttttttttttgataaaccatatcgactaatattaatgttgatctaaaacaggagtcgtatgcattgtgccgagtgtttaagaagaacatacaaattccaaagagaaaaggggaagaagaagaagcagaagaagagagcactagtgtaggaaaagaagaggaagaagaaaag

SEQ ID NO: 151941 - DNA, 1170 bp, Arabidopsis thaliana landsberg
accggtcctgtcctttgatttccgtgagaccgctattacatcaattgcggaagacccagacggtcatactatctatgtcgggaatgcttctgctgacctagcttcctttgatatacgaacaggttcattgattctctctaaaaatgtatcataaactatgttgcttgctgaatcaaacaattaatcgagcatctctattgcaggaaagctgttgggaagctttttaggaaaatgctctggaagcataagatctgtggttagacatccacagcatcaagtgatagcttcttgcggtaagattcattatcacaacttcaacgtccatatgccgtaacccgtaacaacaatctcatttgtgttgttttatttaattgttcaacaatttcatctgtttttcttttaattgaattgtctagggctggaccgatatttacgtgtttatgacgttaagacacgccagctcatttctgcggtatgctcttcaacctttggactagtatttttttggtgaagttgagtcttacttatatatcattgttttattgcaggttttcttgaagcagcatcttacaggtcttgtattcgactcgggcttttctggagaaggtttgtttgttttctaatgccgttcacaaatcgcatctatgtttgtattcctctgttagtatgtttgtaaaatgattggattcatggttgaagcagagacagctgtagcaaacacagtggctgaggctgccacagaggagaagatgacgatcatggaccaggaagatgatgaaacagagaaggctcctgtgaaaagaaagaagtcaaagaaagagaaacgcagtagagaaatagtctttgagggtgaagacgatgaggagaatgaagacgagattgagaaggctccggtcaaaacaaaaaagtcaaagaaagagaaacgcagtagagaaaaagtctctgaaggtgaagagaaagacgagctaagaagcaagaagactcgagagcacaagaagaagaccaagatagtgaaacacaatcaagaagactaggtttaagttttgaagacacattgttaacttggctctgatctgagctacagttttgaactaaacactcgcacaaaagaaacagagtttgtgtgttatctataaagactagttttgataaaacgatgcctcttctcaa

SEQ ID NO: 151942 - DNA, 986 bp, Arabidopsis thaliana landsberg
gtacctggatacagttgatccaaatacgaaacaaagttcaccattttagatcaagtgatcggattcaccctgaactagactcaatacataagaaactgaaggagttggagaagaagatgaaactagctggatacaaaccggaactagagtttgctttacacaatgtagaggaagagcagaaggagaagctattgttatggcacagcgagaagttagctgttgcctttggttgcataaaactccctgaaggttcaccaatacaagtgttcaagaacttgagaatctgtggtgattgtcataaagcaatcaaatttatctcggagatagagaaacgagagatcatggtaagagacaccacaaggtttcaccattttaaagatgggtcttgctcttgtggcgattactggtgaaaagagaatgctttgactctctcattggtcaaacctgactgtatttatatgcgttattgtgtggtaaagtttcgacctttgactttacaagttggcgttaagaagagagatgcgtagatcagcgagtggttcgagagttttggatcattttcccccgacttcacggtctccacgtcgatctcagagcattacatcattggaagatgatgtggaggtgcttttgcctaggtacgatccgaattctcaagcggggaagagagagaagtcaagattcagatttgcagaaaacgtcatccatttgattcctctcattcttcttctctgtatcgcaatcctctggctctcctcttattcaggtaagccgagaaattgattcaatctctatgaatccataattgatatgtgaaacttaattagggattttacaaaggctcatatggatatgatatgaggatcgagatgtctctgtaacattagaatcttgtgttgaattattgtttcaatttgttcatattatactaaaccggtgatggatttggaatttgtcagcagcgttaaggagttgagttcaagaag

SEQ ID NO: 151943 - DNA, 1512 bp, Arabidopsis thaliana landsberg
  unsure (1)..(1512): unsure at all n locations
gtgtcagttgttcagccagtctcgggatgtggccttgccattctttccgtcttttcgcatttttatttgaaggaagtcatgaatgtttttgactggattgggattactgttgccggcattgggaccataggtaacatcaatcgttgttgcttcgttgagtgttgcttactnnnnnnnnnnnnnnnnnnnnnnnnnnnnnnaaagatattatgatactacaggaaatcacctaatatgttttgacgatttatacattttgccgtaggagttggggctggtggtgaggagcaagaagcatcattaatatctgtcttccagttgctgtggctagcattggttgttgccatcttgtttgtaggtacctttcatccatggtatatgatagaacgtcttcctctattgtcatcatctcctttttatcttctgttgactgatggctttctcttgacttgtatacatcattgagttgtaaaacaattggttttttttatattttgtttttatcagataatatcagtatatcgtttaattactgtggtaatggcaatgtttctaataacttctgtgttggatttttgtgacaaggtactactaaatgcgtggcttcatatcttcaaacgccagcgcatggagcaggagctggtatatcatcctcttaactatctaatttttttgagctgttagaagtagtatcaccgttaatgttactctctttaatttctcctaccaaatgcacttagcctaatttattttttgtagggggaatatgaagtggtggaagaaatcatatatggcttggaatctggcattttattcgggtatctttcagtgcccataaacatcaaagagcatatcgttttcgcattatgtaccgagcctctgatgtttaccgattatctcctatatatccattaacatgtgctgttaattttagaaaacataaaaggaagaacctatgtcctggtgtctgcagaaacatttgagatagagaaaaatgtatttgaactgattttatcgtttgttgcgtagctgacaataagttataactcgtttgatcacagaatggcatctgtagtatcaaagatgggttttgtattcgtggagcagggattttctacaatgttcattcccatgtgcatttcgattagtatatgctgtagtggaactggatttttctaccaggtactttgtccgagcttagtctttttacacttcctcatagtcttatctccatatgaatgtgtaatgcaccgccatgtataacataaaggattctctctgtacatgtagttttttataggtttatattcaggttttttaagtaaccatgattctcgtcttctttttgtttttactttaccagactcggggactaaaacatgggagagcaatcgtagtatccacttgcgctgctgtggcatcaattgtaacaggtgtggttgcaggaatgtttgctctgggtgagaaattacccacttcaccatctggacggcttttacttctcctgggatg

SEQ ID NO: 151944 - DNA, 4059 bp, Arabidopsis thaliana landsberg
atgcacaatcgtcttacaacgggggataggatgagtctatggaatgtgaatgtacaagttgaacccatcaacggaatacggaagctatgttcctcatggtgtcatcaatggcatgaagtttgtactacattaaattgaatcatcttacccctttctctccatagctcacatattgaaactaggagcaatcttggagaagataggtaagtcagaactcagaacatgagaactttttaatcttttagtactcaaagaccaagtcataagggttgtgcttgagactgacattagctttaattgcgcgtcaaagaaagagagaggaaccagtggcatggccaagccttttgttttttattttattcaattataaacgcgtctttttttgtctgtaactgtaagctgttgagtgttgactatatagggtcaaagtcttctggccaagaaaattaaactacattgtataaaacaaaaaaaattaaaaaaacatcacactacacacttcatatatacccaacaacaaccagtgttaaatgaaaaagaaagaccaagaagccaaaacgtcaagatgctaacaacccttgtagtctaaccactcccaagatttaagaattttcttacttttgttctagttttgttgagaaaaagatgcatccgatcttcgatgccatccttcaaaatgaccttccagcttttttagagttggtggaagatagtgaatcttccctggaggagagaagcgaggaacagaacaccaacaacacggttttgcacatggctgcaaagtttggtcaccgagaactggtctccaagattattgagctccgaccttcccttctctcttcccgcaacgcatacagaaacacacctttgcatcttgctgctatccttggagatgtaaacatagttatgcagatgttagagactggattggaagtgtgttctgcacgcaatatcaacaaccacacaccactccacttggcttgccgtagcaattccatagaggctgccagactcatcgcggaaaagacacaatcaattggcctcggtgaactcattctcgccatatcaagtggatccactagtaagtttttctagtgcgcgctcaacatttttcgtaatcttgtgtaaaaatcactagctcactactactgtgtttggatccttgagcaggtatcgtagggactatactggagagattcccagacctagctaggaaaaatgcttgggaggttgaagacggctcgcgatcaacgttactgcattatgcgtgtgacaaaggtgaccttgaactgacaagtatattgttaggactcaatcaaggactagaagaagctcttaacagcaaaggtttatcacctctgcatctagcagtccaaagaggctcagttataatcctggaggagtttatggacaagtctccattgtctttctgcgtaaggacgccgtcaaaagagacagtctttcatctcgcggcacgaaacaagaataccgatgcctttgttttcatggcggagaatttgggaactagcagcccaattcttttgaagaaaaaagatcaacagggaaacactgtcttacatattgctgcttctgtgtcttgtggttctccggtgagtagttttctttgtccctctctagtctctcctttaagaaaccatgttttggtgtgtgtgtgtgtgtttcttctcatatattttcctgaaaaaattgcagcttatacgttacattgttggtaagaaaataatagatatcagagacagaaacaatatgggttatcgagcttatcaccttctccctcgacaagctcaagactatgagtttatatcaagctacctgaggtgtgacaccaagacttcagaagaagtggactctaaaaaggctgagagaaatgaaccacacatagggcattctgaggtaataaggctgcttaagctaatcgaaataagcacatcagagatagcagagagaaagaaaagcaagaaacatcatgttaaaagaggtcataagagcttggaacatgagatgcatatagaagcattacaaaatgcaagaaatacgatcgcgatagtggcagtcttgattgcttcagtttcttatgccggtgggataaacccgccgggcggtgtttaccaagatgggccatggaaagggaaatcgcttgtaggtaatacggcagcatttaaagtctttgcaatatgtaacaacattgcattgttcacgtccttgtgcattgttattcttctcgttagcatcataccttaccagaggaaacccttgaagaaattattggtggccactcacaggatgatgtgggtttctgtagggtttatggcaacggcttatgttgcggcatctttggtgaccataccgcattttcccggaactcgatggttatttccggttattatctctgtagctggtggatcattgacggtactcttttcctatctaggagttgagaccatcagtcactggtttaagaagatgaatcgtgtagggagaggactacctatttattttatcaaaaataaccgtgtagaagatatacctgccattgcaaaaaatgaaggtgaaatgccttccttagcaaggaccaactcagacttggccgcctcagaagggtcaggctatttcacctattgaatctttaaggtaaattttctacgagactactctctctggtgctcgagcttttaccgtggtgtttgcagcctatcttatgggttttgagtgtctaaagtgattttcttgatgagcttcttctcctcacagggaccggcacaagatttacttgaagcagatttatattgccattgtatgatgcatccctacttaaggagtttcgtgtaaactggtctcacctatgttatctctatcatttaaagtccaaaaagaatgaaaaatgttgtcaatgatgttttacatgttttatatcaatactcagtacatgtttcatcaaaaataacaacttcaaatctagtcacttgaataagtacgaacacaaaattgctcgattctagttgttaggagatatcgtcgtcatcatgtttagttgattatgatgataagtaaaacatatgacaacaaagttttgctaaatataaaaagtgaacaaactcatgaagttggatatctgtaaattatttttcataaaaaataagtattttcaggacacaacaaaacaggacaaagataagaaacttatgaaaatctactccttttactagggttttaaaccaaagcatcatcagaagaggaggcagccaaaaagccttcaataaagacagaatgatccttgaatcaaacatgatgaaattgaaaccaatgagcagaaaaatctctcgtttaaagattagtccatgtaccaaacgtgatgaaaccaaaggaatgactattgcagatggcgataagtgtttatccaagtgcccacctcaaacaaagcagagacgttctacatactctaaactattctacaccgtaagacaagtttcttcgaagcctgcctgaaaggtatcaaatacctgccagagtagcaagtgcaactcctcggccattttaagttcaagaaaagcaagaccagcaatcatcagagccaatgaagttttcaaacataagagcatctagatgagaagcagagtagataagaactaacataaagatcccaaagcaggccgatcaaaataaccaagaagccagaagcagttaagcaatgaagcagaagtagtggtaagcgattatgaagatcccgaagtagacagatcaaaataccgaagaagcgacaagcacataagcaatgaagcagaagttgtggtaacgtactatgtagatcccatagcaggccgaccatattaatcaagaagccaaaagcagataagcaatgtagcagtagaaacttctagttccctcgagatgatagaacgtataacaaagaccatgcgtaggtgtctagcagagcgtttgtgtatgtctttttagaacgtaggtccatatttagaaggagtttacgtgctgtcagatgcgtttatggcgtctattagcataggctataacatgcgctag

SEQ ID NO: 151945 - DNA, 564 bp, Arabidopsis thaliana landsberg
gtcttctagttgatacctcagacataccagcaccctttgatgatgatgcttttgatgttgatagttttgttgacacaactagtttgagaagaaaccgtagaagaccttcaccagccgtacgagcttcttatcagagaaaccgaagtaacaatgcttctcaaacgatttcgttcaggctcggttcttcagcttcatcagcacctagagagtttgctgttccaagctcctccattatgacgagaagccaaactgtaaaccctactgaagtggttacttcgagtacttcagcttcatcgtctaggagaagaacagaagatgtaaacaatggacctcggaccaggtctagaaggaggctgaggtaaaaaggaaaaacggtcgccggaatcttgacaccatccattctcaaccattgctccatcattactaaaacctcatcataactctgttcttgtctgaatactgaatgtatatgtacattctatgtctacttgtaatttctgctcttctctgaaactttggatatcatatctttgttttttttttgggaaaataatttaacttgat

SEQ ID NO: 151946 - DNA, 2113 bp, Arabidopsis thaliana landsberg
cctgcttgcttctctctttgcttgcgttttctcaaaggttcgaagaaaacgaagaaccacgcttttgcttttttcccaagacttaatctaaaaagcgagatttccttctttcgattcttttttctcaatctggttttcagtcttcggattcaatggcgtctggatcttcgggtcgggtcaactcaggatccaaaggtttcgattttggctccgatcatatcccccgctcttatgatgactacaccaaccaagacacctctaatggtcctcactccgatcctgcgatcgctgcttccaactccaacaaggttaaccacactgatttacccttttcttcctttttttaggttcgggtattttgctcgatcggcgatttttgtttgatttttgggaatctagagttttgatttgtggtttgctcagagatacgtgtaaaaacaatttcgaggagtcaatatcgaactagtcctcttagtgttgagctaatttagctagttatttctatgttggttgtgacttatgaggagctatgttctgtggaaacgccttagctatgaatctgacttggaactagagcttgttaagctgtgcttgtcctccttattttcaattggaagaaaatttcatccacttttgatcagatatactgagcgagtctttgtttattgtttcatttttttgcttgtaggaattccataaaacaaggatggcaaggtcttcggttttccctacaagctcttacagtccaccagaggattctttgagccaagacattactgacactgtcgaaaggaccatgaagatgtatgctgataacatgatgcgctttcttgaaggcctcagttcacgcttgtctcagcttgaactctactgctacaaccttgataagaccattggagaaatgagatcggagttgactcatgcacatgaggatgccgatgtgaagcttacatctctcgacaaacatcttcaagaggtttgttattgttatgcaatgtttttaatcctttttgttaattttagtttgtaaaactctgatcagtaattgaccatggatgttctgttgtaggtgcataggtctgtccagattcttagagacaaacaagagctagcagatactcagaaagagctagcgaaacttcaacttgtgcagaaagagtcatcttcgtcgtctcactctcaacatggtgaggaccgtgtcgccactcctgttccagagcctaagaagagcgagaacacctctgatgcacacaaccagcagcttgcacttgctttgcctcaccaaatagccccacagccacaggtgcagccgcagccacagccacaacaacatcagtattacatgcctcctcctcctacacagcttcaaaacacacctgcaccagtgcccgtttctactccaccatcacaacttcaagcaccaccagcgcagagtcagttcatgcccccacttcctgctccatctcacccaagctcagcccaaactcagtcattcccgcagtaccagcaaaactggccaccccaaccacaagccaggccacagtcaagtggaggctacccaacatactcgcctgcaccaccaggcaaccaaccgccagtagaatcgttgccaagcagcatgcagatgcaatcaccatactctggacctcctcaacagtctatgcaagcttacggatacggtgcaccaccaccaccacaggctcctcctcagcagacaaagatgtcttacagcccccagactggcgatgggtatctaccctcaggacctcctcctccttccgggtatgccaatgccatgtatgaaggtgggcgaatgcaatacccaccacctcagccgcagcagcagcagcaagcccattacttgcaaggtccacaaggtggtggatactctccccagccgcaccaggcaggtggcggtaacattggtgcaccacctgtgttgagatcaaaatacggtgaactgatagagaagctagtgagcatgggtttcagaggagaccatgtcatggctgttattcagcggatggaagagagtggccaacccatcgacttcaacaccctcctcgacagattgagtgggcagtcctcaggaggacctcccagaggatggtga

SEQ ID NO: 151947 - DNA, 749 bp, Arabidopsis thaliana landsberg
ctagaaaaaaaaaaaaaccaaagcaaaaaaatggctttgaaactcacttctccgccttcagttttctcacaatcaaggagattatcttcttcttcgttaattccgataaggtcaaaatccacattcaccggatttcgatcgagaaccggtgtttatttaagcaaaacgacggcgcttcagtcgtctacaaaactgagtgtggcggcggagagtcctgcggcgacaattgcgacggatgattgggggaaagtatcggcggttctgtttgatatggacggtgtgctttgtaacagtgaagatctttctagacgcgccgccgtggatgtttttacggagatgggagttgaagtcactgtggacgatttcgttccttttatgggaacaggtaaatgctttgaaaatttggaaaatcaacttgtttattggttgatttcgttaatttcattggtttggcaattaacaggtgaagccaagtttttaggaggtgttgcttcagtcaaagaagttaaaggatttgatccagatgcagctaaaaagagattctttgaaatatatctcgataaggtgattcttgattagaaaaacactgtaggagggaacttgttgatgttattgatagagaatgtgattgatactcgtgctttgttgtgttttgatttcgcgtattttcttgtgctttacttattatatagtatgcgaagccagaatctgggattggatttccaggagcattggagcttgtgactgag

SEQ ID NO: 151948 - DNA, 452 bp, Arabidopsis thaliana landsberg
agctgttgtgtacaacagatactaccatgtctttagcgaaggcgaacttgaaaggtacgtgagttttatcgagagatttgctctccgtgtattctttagtcgtgtttgctaatactgtaatctttaacaggttggcatctggagtaggcaatgcaatgatagttgatagatttttcgacaagtcgaattggtgtattgttcttcagaaagaagctttaaaccaagattgaactttggtttcaaacttatcaaatctttgtgatattggaactccattgcatatgtaatcggaaattattattgcatttttcatggttgtagtttgagattctgtggcagctcattttccctgcaatttgttgtctttaaggggttttgtattatgtgtaacacaaatcaaagaaagaatcttctctacatgataaataaaatgtcagaaatatgatttagac

SEQ ID NO: 151949 - DNA, 719 bp, Arabidopsis thaliana landsberg; identical to SEQ ID NO: 15732

SEQ ID NO: 151950 - DNA, 1669 bp, Arabidopsis thaliana landsberg
gagggagcatcgaagaacgacatagatcaaatgccgaaattcagatttacaaaaactggcaatgttgaaaagctctcaggcaaagcacggggaataatgacggaatgtggaacagattcacctattgaacgctcgctttctccagaagacgcggtacaatcccatttccacattcttatcaagttgtacattttgaaagtgtgtaaaattgataacgcatggcttcttatgattctgcaggaatgctgcatctgtctctgtgaatatgaagatggagttgaacttagagaactcccttgtaaccatcactttcattgcacttgcatcgataaatggcttcatataaactcacgttgcccgctctgcaagtttaacatcttgaagaacgcaaacaacgaagtctagtaaaatcttgttctggttctaggatcaatccgaacgaaccatcccagaccagaacgtttcagatatatgtaaactctggttcgtgttttagtgttgtgtagttagaaaatctagtccatatctctttctcctgatcttctattacaatgcgtcaatgcgcctattgatagtatgtaggaataaatcgttggattagtcctactttattttttaattttcttggtgtggaacgtggaaacaactgagctttgtgtttctcgtttattaattacaaaatcaaaaagatatttgaaaatcgtaaaccggcgtggtcaatggtcagaaacaatcggcgcggtcaccgatcacaaagaaaatggtcacagtataaaacaaaacgttcttttaacgacatcgttaacaagaaattaaaaggacttaccaagaaattcaaaacgacatcgttaacaggaaattaattgttccgtcgttacgaatgattcaaaaacatttaaggacttaccaaaaagaaaagaaaagtcagattcatgtcagaatatgaaaaggatctttgtaaggttattttggtcttttgctgatcagtcctcgtgctttttccgcgcttccccctaaacccaaagctctctcaccttcttccatggagaggggacaacaaagtacacgctgaaaaagcctctctgcagctccattcttcttcctggatttcaaattatacgctctaggtcagaggcgattttttcgtttcctgattctaacgggagtcaaagatggattctctgttgcagcgttaccggaacgatcgccgcaagctcatggagtttcttatgtcttcgggtttggtaaaagagcttcgttccccttctggttcccctacttctctttctccggctgatttggatgctctcagtgccgattatgttttagattgcgtgaaatccggtgagtttacgctgagaaaataatccatccttcgttagtatctatctctgagtttgcacaagtgtttaatggttttctcagcttttcccacactagtttataaatttgtgaattgttttcgtctgatttctaaattttgttgacgattaaggtttctacacagttagggtaatggaaaaattggctctctgcttcgttgttttgatttgcaaatctatcagaaattgctgaaacactccattttgtgaacacgaatgcaggtggtgtagttgatgtatccaagggcagagagaaatacaattttgattcatcataccctgtaaca

SEQ ID NO: 151951 - DNA, 1894 bp, Arabidopsis thaliana landsberg
  unsure (1)..(1894): unsure at all n locations
cataaacccgatcttgtcaatctccagaaacaaaaaaaaaaaaatggcgatcaagacatagactattctaattccaagttgttcatcacctgaggatctaaaacgcgttttgcaaacgctaggttcgagctggggagatgtagttgaagatctggagcgtcttgaggttgttccgttaaaaggagctatgactaacgaggtttatcagattaattggcctactttnnnnnnnnnnnnnnnnnnnnggaaagttcttgttcggatctacggtgacggcgttgaccttttctttaacagaggtgatgaaatcaaaacgtttgagtgtatgtctcatcatggttatggtcttaagcttcttggtcgtttctctgatggtcgtcttgaagaattcatacacgccagagtacgttttcttctttcttttctttaaagttttgatttttttaggaagatcagaggaagataggtttagttagtgagattagagataagaattgtttgcgtttcaagaaatctcgtgatagagagagattgattgtgtatgattggtttggtccgtttaccagactctttctgcagatgannnnnnnnnnnnnnnnnnnnnnnnnnnnatcgctgcgaagctaagagagtttcataagcttgatatgcctggtccaaagaacgttcttctctgggaaagacttaggtaaaagagaaaagaaatttcatttctttatgtataagcataacaacgtttcttgataaagtctttgttgattttttaggacttggcttaaggaggctaagaacttggcttcacctatagagatggataagtatcggttggaaggtttggaaaatgaaatcaatttgttggaagagagacttactcgggatgatcaagagattggtttctgtcacaacgatcttcagtatggaaatgtcatgattgatgaagtaaccaatgccattaccatcatagtaagctttttgaatcaaaagcttatacccttttcatcaagaaagtgttctgtttttaataagtttttgattgcaggactatgagtattcgagtttcaacccaattgcttatgacattgcaaaccacttttgtgagatggctgctaattaccattcagacactcctcatgttctggactacactctatatccaggtccatatctgtaaatgcaagtgtatatatctcttatgttactcaagggtagtttagagtctgattgtgtgtatatgtgtggaatgataaacaaacaggagaaggagaaaggagaaggttcattagcacatatcttggctctacaggtttgtgtcctatgaagcattaggtacttctccacacctcaagaaaaactcgtctctaaatcatgtttttgtgaatctcagggaatgcaacaagtgatgaagaagtagagaggttattgaaagatgcagagagctacactttagcaaaccatatcttctggggactatggggaatcatctcggttagctttctctctctttctttcccttctttgtctaaaaaactccttaagactctgatgttgaaactggtagtaatctctagtgtctgttaatgcaaagcagggacatgtgaacaagattgagttcgattacatggaatatgcaaggcagagatttgaacagtactggcttagaaagcctttgcttcttgaaggatgaagcagattcgcattgaaaagccgatatacaactaaaagtttctgcaattaggtcaaaagaaaaaaagaaaatttagtagactatatgttgctattgttactctcatcagtttgtgtgtttcttcccttctatatagaggtttgttaactctcaaaacagttaaattgagtaaaacttgttttaaacaaagtattatatgataatagaaga

SEQ ID NO: 151952 - DNA, 574 bp, Arabidopsis thaliana landsberg
tggatctgtcagaatctgaaaacctgacagaaattccagatctttcaagggccaccaagctcgagtctttgatactcaacaactgcaaaagtttggtgacacttccttctacaattgggaatcttcatagattggtgaggtttgaaatgaaagaatgcacagggctggaggttcttccgaccgatgtcaacttgtcatctcttatgatcctcgatctcagtggttgctcaagtctgagaacttttcctctgatttcgactagaatcgaatgtctctatctggaaaacaccgccattgaagaagttccctgctgcattgaggatttcacgaggctcactgtactactgatgtattgttgccagaggttgaaaaccatctccccaaacattttcagacttacaagacttaagctcgccgactttacagactgtagaggtgtcatcaaggcgttgagtgatgcaactgtggtagcgacaatggaagaccacgtttcttgtgtaccattatctgaaaacattgaatatacaagtgaacgtttctgggataagttgtatcgtgttgcatacctccagga

SEQ ID NO: 151953 - DNA, 870 bp, Arabidopsis thaliana landsberg
aaagttctaaatacctgaaatatgagcgacatacatatcccatttgcatggaccatttttgatattacacatacaagctttatataggttatttacatgactgtgtacaactatgtatgtttgtttctgagaccttcgatacaactatgtttcataaagtttgtgtttcttcctcaacaggttttgtctggcaagtcttcaacttcttttcgtcgaggtagtgctgatagacaaatgaaaggaagccccagatagctaaaatgatggagaaaatctttgatgcatccatcttatcatggaaaactatcactgctacaactggaactataggcagtcccacagcagttatggaattggagaacacagaagatgactcgaagattaatcccacacaaccaacagtgtatacttgccaggaaatagctgctgaggccaaagtcaagatatatgacactttccccagtttgtagtttctcatctcacttggcagagttctccactctccacttgcaaacagtcctatgagtaccacacaagttgcaactagagactggtaattggccaagtccaggactgctgaggatgtatgcttcgtgaaaactttcctgaagagcagttgtatcagagatagtaccaatccaatcccagcggaagcaccaatggtacagatgaacccaatcacatattgtactctagatacatttgttgtgttttctgaatcagtgttgaccacgaggagggcagaggaaaccgtaaggagaaacaaagaattgactatcaaaggagtgaacctttgcgagttaaggaaatatgagaaaaaggcagtgaaggccaactgtgaggccaagatgagggagaaagtagagactg

SEQ ID NO: 151954 - DNA, 493 bp, Arabidopsis thaliana landsberg
ctgacagtagcaagcatcaaaatgggtagaccagagattgcagaaaaggcggttgagttagccgagagacggatttccttagacaaatggcccgagtactacgataccaaaagagcaagattcatcggtaaacaggcacggctttaccagacttggtccatcgcaggttacctagtggccaagctcctcttggcaaatccagatgcagcaaagttcctcactagtgaagaggattcggatttgagaaacgcattctcttgcatgctcagcgctaacccgagaaggacaagaggacccaaaaaagctcaacaaccatttattgtttgagaggctcagacttatttatttcaaagtgagccatggaggaggcatggaccttcaacagattgatacaaaaacgtggcattgttgtgtaaatagtctctcttagaaacttacataaaaatagatgatgtttgtttttatcatattattaaaagcgtgtttggctcaa

SEQ ID NO: 151955 - DNA, 1863 bp, Arabidopsis thaliana landsberg
gttcaaggcattagaggaactaacgcaattcaagaggaaaccagacccaacgcaaaacatggggacaaaacctgacgagcaagagaaagagcgtgatattgcatccgaggacttcgaccaagatctccaagtaccactacacaagcccttcctcttttccccatcgttcctatgtcgagctcaaaagttatcagactctactaatccatgagaagctagttagttataaatccaagagagaacacgaaaacgatcttagtaaccaagatcaaacattcgtgcaagatatgaaatcttaccggatctcccagattccgtcgatatgctccgggcaaaattttccgatgaggcggaggagaaagagagatagtgtacactaatgaaaaaacgtaattgggcccgagggaattaattaggcccattacttacaagcccatgtattatgattctctgacttaactaaagaagtcacgtgtctgtcacatgcgtgattatcttgacggcgaacggctaggacttctcactttcaccgtttcacggcgaagccaccatcgacggcgaagttaggattcgttctttcctcgtatatgaggtctctgagattgtgagacgctaatgaatctgaaggatgataatcagtctggtaagttcctgattctaaattttaatctcataaacataataacatcagttagtagtttggcgttgaaattttgtaattttgggtgattcaggagaagttggtcgtactctggtggaatttatggaagtagccatcacaatgattgtatacctcaaaggtttttacccatctggtgagtaaagagcgatttgtgagattgacatgcatctccaagtgattgattgatcaatttagtgtgttgtatgtaaagcggcatttgaaaggaggagatatatgaatgtggtggtgcaaagagcaaggcatcctgagctacgcgactatattcactctgctgcttctggacttcttccttttattgaaaaggtctcttcttcttctttttgtcctgctttaagtgtaacatgatgtatatgtgggaatgctgcaattcttatgcatgatcactgaaacagggtcttgttgagagagtagcagtcgtgtttttcagcgaggataatgttcctgtagagaggttcatcttcaagctcacaattaaaccgtcttgcgctgctttagtagaagagggtcaactggagtttgcgcttaggtccttcttaatcaagctttccgtctcaaaatcccttgtcaaacctcttcccctaagtaaatacatctctagctccacccaccctctgtacattctctcttcttatagcaatgtttctatgttttaaagcgttttgatctttcccactcgtataaacagattgtagatgggaggtaacggcttatctgaggtcacttcctcaagtgggttcaagcaaagaatcagagctgtggattccaacagacacaaagcagtggcagaacccaccagttttaacgccagtcaagtctttgaacagcgaaccactctgcttgcagctttacttggaacacccaagtttgtctgaaccactcaaccttgtcaaccccaaggatgtcgcaccccatgacccataagtcagatcacatgtgagcctcggctccgtttgctggacccaatttctgaagcaagatgcattattgtataatgccaaagatgcattataaacatgtttgggatagtgtggtcacctcaccggtagcagaagagagttgtaaaactaaccacaacgttgtcttctttcttaacacttggttagtctctttccgtgtaaaaaaaacgaaagtgcttatttttaaattattggttccaagtt

SEQ ID NO: 151956 - DNA, 1006 bp, Arabidopsis thaliana landsberg
aggttccttatctcaccactgtgtttgtacctggagccttatttgtgatgccatcggtaatttgacatttctattaattgatcattaatattactgcttttgctacttaatttttttttgtgaagaatcttacattgaaaatgaaataaggcctagagtaatgtataatataatgtataggaaataataatatcacacatctaaaattaggcaagaattttaagtgatatataatgaatggattatattggtctatataataactaaagatggacaataatttcattttcaaatggtttgaatctgatgtctataaaatttaagagtttgaacatttttggctgcaggtttgtggtattgcctcgagacaagttggacctggtgaacaggtaaaaaccagtttcttgttatcattggtttttgatttttgttgtatcaacatttatacaaaaaagcacacaagttaactattgttaatttgaaatgtgtagggaaaagtgcaaggatgcatatctggagtgaggtcctttggcaaagtggtggcaccatttgtcttcagtccattgacaggtttgtaaagccataagaacacaaattactaccaagtttcattcatttgttttgacacattcaataaattgatttcatgtatatagcgttgtttctttcaaaaaatgcaccgttctatttccctggattcagcctcctttgcatctcgttgtcctcggtatatatgaaaatctcatccatcaagactaactttgatttgattgtatatgaattatgatggaccaacatgttttgcatgcacagttgatcggattctttcagagtctactgattaaagatgttcatactccaccattgaacaaagcaatcaacaaaacctcaggggatgaagtgtgattatatgaactcatcaagtataaaagagaagagtgtataacagtatataaagccttttagcatgtgacaaaaatatatatgtgattgatatattaaaaac

SEQ ID NO: 151957 - DNA, 1700 bp, Arabidopsis thaliana landsberg
atttaatccaaaacaaaaatttgcatttttgcttatgttaaattttcagaacccagtaagattatgttgcgaaaaatcaggactgttttagctacctagattatgttaggtatatactatgaaaggtttaatctttgcataaatttggtgtgttaggcattactttctgtgacatttgatcagatatctaagaaacattgagaatttggttgaacacatttgtgccctgaagatgtttacgaagctatttcggtgtaggacttacttaattttctttagttcacgcgtaattccttaggcattggctctgtgagttaaggttttgaatatgttagaagttggatccgaggtaaagactgctgtgtgctttagttcatcacattattcagcattaagggtcagattttcaattatgcatcgcgtcattagaaagtgaaaagattttatactttatgattttgttaagcttcaatatacttgttttgtatcaaaatgttcaaatctctttgtcgtctggtatctgtttcagattatactctgaagttcttagttatatacttatatatgtagcggtttggcttactctgtatggtattgatttgttaaatacagtttatggagcttcagatagcaggagcgtctctaaatctgctgtgtcaaaaagaaccctcgccgtattgccttgctcgtcctgtcgaattaacaaacgttgcatcgagaatggacatctacaatctgctactaacaaaacttcctttgtgtgctgagcaagttcttcaggccataggagaaataatcctgatttctcaagaaacaataagcatggtttccgaggcagaaacaggcgaaacgaagataaggatggtttagtagatggtggtcttgaagacgacatgttgtctttcaaaaacggtcctttactctctctatccagttccccaaaattccaggctacttaatcacgtggaccaaaagagaaagagatagtggagcttttcaagaaagtccaagttcagctccgggctcgagctgctgctaagaaagaagaaaagaagactgaagaagcttctaaaggacagggaggaaaagagagtgagacagtggactcccttcttaagttactgaggaagcactcaggagaacaaagcaagaaacaagttagcaatttcaattctgagaagcagctccaaagagatgatgatgcttcagaaagacaaaatcacagttccagtcgtttcgattcgcgaaacaaagatcataatgcaacaccctttaccaggccagcatcaagcttcaaacgtaattctcctgtaccgagacataaatctcaagccagttattctagtgaggccatttttgatgaagcttcaagttacagtgtgacttggacccagaaaaaggatcaagtagagtcgcgtgatgaacctgaatacgagcctgagcctgagtctgcagctgagtatgatgaacctgaacctgaggctgagtatgaacctgaatctgaaccagaacttgctattctcgaatcagtgtcagagctgaaactagagtcgttttaccaagaggaagatgaagatgaggaggatcataacttcgttatagatgagttatcagatgatgacgagtctctcaataccgactaccgaggaagagactgcgaaagacgaagatttgagtgcactgaagttggtagaacttag

SEQ ID NO: 151958 - DNA, 688 bp, Arabidopsis thaliana landsberg
gttgaagctctagctgttcagttgactcagcgagaaggagagctattcatagaaaaagcggaagtgaaaaagctagcgtcttttttaaagcaggtaaagtgtgcctttgagacagtgacaatattttcttttctcgtgtcacttgaggtgaatagttaggagacgtctatgtcatttcacttgaaacaaccaagtcctctaaaatagcaaatacgttttcgtccacggcttaataccatgcagtttttgttagtccttgagctaaccagatgattaagagagagtctgtcctttttgttttcatttgagtagtttatattctattacttttgacaaagaactatgatgtagtttctttacagacataatctttcacttactattcttgattctttttcttatcttgcttgggacatttgtattagtcttctgttgtcggttgtaaattagtggttactagatgggctagcttgaaaaagatgcagatgtgttctaataatcttgctgattagtgggtatgattttttaactaggcctcagaggatgctaagaaacttgtcgacgaggaaagagcgtttgcacgtgctgagattgaaagtgcaagagcagctgtacaaagagttgaagaagccctgcgagaacatgaacagatgtctcgtgcctctgggaaacaagtattttagtcatg

SEQ ID NO: 151959 - DNA, 1577 bp, Arabidopsis thaliana landsberg
  unsure (1)..(1577): unsure at all n locations
aaagcttgtctgcactgttcccccctggagaggaagacaacgttataggtttacctcagctgatggatgagagttctgatgattttgatgatgatacatggggtattgctggactcattataggtttggggatgtcagttggagcaatatacacagctgggaagaaagacgctgttgtaaagattaaaaatctgattgtatcatggatcccatatgcagattctttgaagcaaaccttgggttctaatagtaaggtatcagtgagactgttttcattttgtttttgccttgcactcccaattgtgataggtttgggccaaaaagtagaactgtttgatgcacatgaggtagatgatataatcggttgtttcaaggaccttatttccgagttgctaatcgttagaaagtctggtgctttacgtaagaggttgttgatggcttcctgtattggggcgggagacctccttggttctgtattgaatgaaggtnnnnnnnnnnnnnnnnnnnnnnnngttaaagagttactagaactgttcaagaaatgttactctggactttacccaccggttgctcactttggaggcatgctcggagttgttaatgttttaggagcaggtgctgggaatttggtgtattctcatcctcgaccccgtgctcctccagccagttctgaggagaacgtaagttttctggtctatctttctcaaagatcattgctgatttattcccttttagataaatgtgtatgggttcctaacaattcatttatttgctacaggaaatctcttatgtatcaggtcctttgctttcaaacgcatattttactcagcagttgacgccagttgtgcaagaaatatttcttatcgcacaaaataccaaggatcgccagctccaacattatgctgcatgggcaatctcaattcttagaacttacatgcggtcaggggaatcgtcaagtctcagcaatgaaaaccaatctgatgactctgaccgtaattccatctctcacaatgttcctgaacataccatggtcatgaaacttgctcaaggcctgacaaatccaagttttcctttggcgggtagccctttgaatattggcacaatggcaagtgctttgcggtgtttgtctcatgctccgagattgccaaacttggactggggagcaacaataaggcgtttaatgaaacaagagactcagactgatgtaacgcaatcaggcgatgttcctaaggaaataactcttagggaagagtgcttcaaattttcattagcccacgcaagcgaatttgatgaacttctagcttttctggacgaactgtcggaactatcgagattcaaggcactagaggagagtcttcagtcgtgcctgctctgtcatctagggggtttaatgagaatattctcaggttcaagaatgaataaattgtttgacgatgtctcttgctttgtagtctcgctatcatcagaccaaacatatagctgtgatcagaagagctcactgagggtctcttgttggaagggtctgagtcagtaataaaagaaacttcacttgaatcttcagaatacgtcacaaagat

SEQ ID NO: 151960 - DNA, 156 bp, Arabidopsis thaliana landsberg
ctcttttctctctcttctctctctctcgaggaagaaaggcaacaactatggaagctatgcttgtggactgtgtaaacaacagtcttcgtcattttgtctacaaaaatgctattttcatgtgcgagcgtctctgcgctgagtttccttctgaggtaa

SEQ ID NO: 151961 - DNA, 458 bp, Arabidopsis thaliana landsberg
gctgaatttgtttgttgatggtcatctaaatttgtaacctttatctgttttattgagttgtgaaattcagagaaaaaataaatgaagttttgtaagaagtatgaagagtacatgcaaggacagaaggagaagaagaatcttcctggtgttgggtttaagaaactcaagaagattctcaagagatgcaggagaaatcatgttccttctagaatttcttttactgatgcaatcaaccacaattgttctcgtgaatgcccaggtactgttcgacataattcccctgtgaatgaatcatcatcccctgcttttctccttttggtttgagaattcaatattgattttgtagtttgtgatgggacttttttcccggagcttctcaaggaaatggaagatgttgttggatggtttaacgagcatgctcagaagcttcttgagcttcatttagcttctggttttac

SEQ ID NO: 151962 - DNA, 269 bp, Arabidopsis thaliana landsberg
tcaaagaacttatattgcagcctttttttgctacttgctaacacagcatcggaagtgattcacgatctatcaatatggaatcaaaatataacaagaagagagaagagagtatagatcaagaaacaagcgtacgcgatcaagccacggtgctcttctccaccatcagcaagagataccaccaatgtagagcaggctctagtggaccacaacacaaacaaagccgcaagcacaaaccgaaccggccctgctccctggggaacgaacaatga

SEQ ID NO: 151963 - DNA, 673 bp, Arabidopsis thaliana landsberg
cggagcaaacggattcagaggtgtacgagatcgattacaggggaccagagactcataactctagacctccaccggaaactatgcacggcaagccaccgtacatccaccacaatacctccgccgctgggctcggtgctcatgtaggaggaaagagtaagttgccatctccgcctttactaatatttatttatggcatttacgtaaatatgagtctttggttttttaaggggaaaaaggtaaataacagtcattaaatgatatatttattattatcaaatattcaaattgtatattttattcttattcttcgaaattattatgatccaatcaaatgaagtaaatttccctttcttgcatataatggtgaccaaaacatgcaggattaattaactaactctgaatttgtttccaaattccatgtattttgatatgttctcttctccatttatcagactagagagagagcgagaccttttccaaggagaagactcagaagttgaagaggaagattacgagagttgtgatatatatatgagtaattattaatgatgttgatacacatttatactttaattatttatcatatgaagatgatcatcgatgtgtgatcagtacagttagtgtgaataacacactactctcctgatgtcatgtccggtcttttatttatttc

SEQ ID NO: 151964 - DNA, 339 bp, Arabidopsis thaliana landsberg
atagaagatctgaagttggtgattaaagcaacgaacaacaagtacgagaacatgcttgacgaggcgagacatgagatcgatgttcttgtcaatgcggtagaacaaaccaagaaacagtttgagagcgcaatggtagattgggagatgagagaagccggtttggtgaatcacgtgaaggaatttgatgaagaagtttcttcaatggggaaagaaatgaataggttgggcaatttggttaaaaggacaaaggaagaagctgatgcatcatgggaaaaagaatcccaaatgagagattgtcttaaagaagtggaagatgaggtgatttatcttcaggaaact

SEQ ID NO: 151965 - DNA, 426 bp, Arabidopsis thaliana landsberg
agacattaaattcagagtttttattatccaagaacgtgcaaccctcacgaaagtctttacaacaagagtcccaataatcaaacgtaataagaaaaagtgagtaaaataaaatccttgataggcataacaaaagcatccataagaatcctaaatgagcaaatcagtcacttggtaaaatatgcaaaacaacaaaagatgacttaagactttaagacttagtagtagtactgtacattcacacgtaccttcccttccctgtctgtctctgttcgggaatcagtgatgtcccacgtcatcaatcattcagacaacgattgtgccacgtcattcaactacagtcacctcctgatcaaccttccagtagttagtgtcgttgtactcctgcatactatcatcagggctctcctttcccggtgaggctgtggt

SEQ ID NO: 151966 - DNA, 428 bp, Arabidopsis thaliana landsberg
gcccagacgagatctgattttgctatcaacacggcttttccgttgccgtgttcttgccgttaacacgaagtagttgttggattttccatagagaggtggaggacgtcaaacaagagacctacagatcttcaaggagaagagaaaccacccagatctgcaaacaacaagacacatcggaaggaaacgaagaggacaaacgaaagactttatacgtgaggcgaaaccagtttggattctgcgggagaggagcggagcaacaaagagaagacaaaattcgacgccggggagacatagctacaccggcgccagaagacggtgaatcttttggagtctcgtgtatgtcgcatggcagagtttttactctttttttagtactagaataaacatttaacgttaatcattacatctaagttcataagctactatta

SEQ ID NO: 151967 - DNA, 948 bp, Arabidopsis thaliana landsberg
gctgcaaagagagaagctgctggtgaggttgtcaaatcttgtgatggtttacacgttaagaagagtgaaaccaagagtactagtccgagtgtttcacctgttgtgagaacggtcaagaagactaatcttgttgtaaataaggcttcaaggatcagccagaacaaaagtcctaaagaggatctttcgaagaatttgaagaacaaagagaaggggaagattgttgaaccggttagatgtgatgatgtattagagaagacagatcttgaagttaagaaggtttcaaggatcagtgagaacaagagttctaaagaggatactctgaagaacaaagagaaggcgaagatcgatgagccagttagatgtgatgatgtattggagaaaacgagtcttgatgctcagaaggtttcaaggatcagcgagaacaagaattctaaagaggaacgtttaaagaatctgaagaacaaagagaagacgaacattgatgaaccggttagacctgatgatgcggtggagaagacattgtatgttgttgaatctagtgttgagaagaagaagaagaagatgagcaccaaaagtgttaagatcagtgagactcagcaatcttctgagaagaaaatcataagaagcaccggcaagaaaagtcttagcttattaccatctttgcctccaccctcagaggtggttacagggtcagatcctaggccaataagacagactacttccaggtccaagactagtttgcctgagaagaaacagagtggttctgctaatcttgttactaatccgaaacccgaaagcaagattagacccgaaaggattggtttaaaggttactccacctcctccttcaacaaagcagcaaatgaatttcaagaaagggaaagttctttgaactaaaaccagaagattccactacaacatcgatcaaattcaagaagagagttgttca

SEQ ID NO: 151968 - DNA, 579 bp, Arabidopsis thaliana landsberg
ccagattggatttgatcatagccaggatatccttctatgaaatacccatttcccattcgatttatcggaaaactatacatatacatttttacattcggtttttcgcagatgtgaaacagtacccaaacttgattaagtctctgacttttcttctcaaaaaatacaaaccaaccaatgtcgttagtccagcagaaggtaagctaaatggtcagtatccctttcatcaccactcacacacatcaaaagaagtcttaacattactcttttacctgtaggagcagacacagaactgcctcgtcctgtgttcttaatgagctggagacgaagaattgggaaagacgatgagtctctattctttacgggctgcgaagaagctggcctggaggtgaagcatctcggaaaccgagtttattgtatcaagcttagagaaagcaacctctgaagaataggctgacaaactcatgaatcatccacatgctcgcctctgaaactaaaggttctgtttgtttctctcgctgcttatttggatttgctttttctgtcaaaattaatgtgaaatgagatagtgtcgattcttaa

SEQ ID NO: 151969 - DNA, 1545 bp, Arabidopsis thaliana landsberg
ggatctgcggaacaatgggttttcaaatatctctggcagatccgatctccgtccaaatgtgaccgtctggtttgcttctgctctttcctatttctatttattatctgcccatacgtacttatttttgctttgcatatcattctagctactcaatgatgtatataactgctttttggatcttgtttgctcattctgaaatgtattaaactcttttcctcagattagtgtccacttttcgggtatcatttaacaacgtttgttttttcaggcttcaggggaatccgttgtgctcagatggaaatctgcttcgattgtgtggacctataactgaggaagacattaatcagggttcaaccaattctaatactacaatttgttctgactgcccaccccattatgaattttcaccagaacctcttagacggtgcttttgtgctgctcctctgcttgttggatatcggttgaaaagtcctggtttctcggactttgttccttacagatccgaatttgagcaatatatcacctctggtcttagtttgaatctgtatcagctacgccttgactcattccagtggcagaaaggacctagacttcgaatgtatttgaagttctttcctgtttttggttcaaatgccaacaattctttcatattcaatcgtagcgaggttcggcgaataaggggcatgttcactggatggaatatccgagacgaagatctctttggtccttatgagcttatgaatttcacattgttagatgtctacagagatggttagtggcagaatattcgtcctctcatatttattcaaaacagaacgtggttaaaatacaagtaaacgagctgatgtctttctgctacattaaacataaaagtgtcatttgtttatcagcgtccctgataacaatagatcctgtcttacctttttgttcttacgaagctataaaacttttgcatacatggacattgttttgactgtcatgctttttatgttcagtgtttccttcagcttcgccatctggtctaagtaatggtgcagttgcgggaatagttcttggttctgttgcagctgcagtaacgctaactgctatcattgcccttatcattatgagaaaacgtatgagaggatacagtgcagttgctagaagaaagcgatgtaagcattttcttgtggatgccgatttgtgctcgagtaaatgatttatcggaattgtacgttttttttggtttttggtgttacaagtttgattcattcatgtgcagcttccaaagcttctttgaaaatcgaaggtgtgaagagcttcacttatgctgagttggctctggctacagacaattttaatagttccactcaaattgggcaagggggttatggaaaggtatacaaaggtacacttgggagtggaacggttgtggcaattaaaagagcacaagagggatcattgcagggtgagaaggagttcctaactgaaattgaattgttatcgagattgcatcacagaaaccttgtttcgttgcttggattctgtgatgaagaaggcgaacag

SEQ ID NO: 151970 - DNA, 1461 bp, Arabidopsis thaliana landsberg
ggtttttctctgcaaggtcatggcttcgtctacggtaagaaaccttcgtgatcttcactatctaagttcattagatccttgtgtttagtctcttggtcctaacatttactcactttgtctgatgttctctcaggctcagagcaagaagcagtttaagaggtctatgactaagaaatcacattcatggtggtgggatagtcacaattgtcccaagaactcaaaatggcttgcagagaatctagagagtatgttgcttcacttagcattgagatctccacttaatcaaaaataaacaaaatctgatgttctctttcttgttcttgttttggcttctcagagatggatgatcgagtgaaccacatgttaaaactgattgaagaagacgcagactcttttgcaaagaaagctcagatgtattttcagaaacgtcccgagttaatccagcttgtcgaggaattctaccgcatgtatcgcgcattggctgagcgttatgatcaagctagtggtgaacttcagaagaaccatacatctgagatccagtcacagagctctcttgagatatcatctcctaccaaagagaagttgagtcgccgtcaatctagccataaagaagaggaagattcatcgtctttgacagattctggttctgattctgatcattcctctgccaatgatgaagacggtgacgaggcattgatccgtagaatggctgaacttgagcttgagcttcaagagacgaaacagaagctccttctccagcgcgaaagtgttgatggtgacaacaatgttgatctccttcacaaaattactacatatgagggagagcttaaagaagctaatgagaagatgcgaatgcacgaagacgagattgctaatctgaagaatcagcttcagagcttcatgtcttttgacacagaggatcatcttggtgctgaacaaaagagtgttgatttggataaagaggacactaaagaagatgcagtagctacaaaagtgctagccttggaggaagagctgagtatcgcgaaagagaagcttcagcactttgagaaagagacttattctctgaaaaatgagctcgagatcggcaaagccgctgaggagaagctgaagagcttacaacatgagctcgagctggctcagagagacgctgatacctacataaacaagctcaacgcagagaagaaagaagtcttgaagttgcaggagagattggcaatggtgaaaactagtttacaggatagagataacgagataagggcattgaaaactgcggtttcagacgctgaacagaagatattccccgaaaaagcacagatcaagggagaaatgtcgaagatgcttgaagaacgaagccaacttggagagcaactgagagagctggaatcacatataaggctgatcaaggaagagaaagctgaaacagaggagaagcttagaggagaaactgagaaaatcagc

SEQ ID NO: 151971 - DNA, 739 bp, Arabidopsis thaliana landsberg
cctcatcattcttcttcgtgtgagagagatctttttggaaaacgaaagcgggatttagcgtatagcaggtaaaaccctaatttcttcgatctgcgtttctatgaaaatctcttgatagtttctaaattcatcgttttcctccttttcagcttccaccgtttcgccgaatttcatcgagcttcaagtgaacatgaggtaattctagttctaggttttctcatcttcgtcttctaatttttatcattcttcttcttctagatcttctctaacacttttttttttctcgatttcagtaaaccaatggaagaggataccaacgtaagtaactctccccgtctttctcgttactgatttctcgatctatcaagcataaacatagaaccctaaattcgatatctgtaccatgtctatgtctctagctttttagtgcctggaatcttttgttgcctgatccttcattttatgtaatttgttgatgaatatgtaccattacaagtcatgtggtttctgtatcttcaagtagttgtgttagtgaatagaaaacactgtcctgagaattcatcacagatggtcagctagagttttggctatatgaatgaatgttgctagttttggatgagagtacttaacaaggcaatcttgtattggatgcattgttgtttaatactcttccttgaatgtcattctttagcagggaaagactgaggaggaggagttcaacactggaccactctctgtt

SEQ ID NO: 151972 - DNA, 257 bp, Arabidopsis thaliana landsberg
aaaccaaaaaaaaaaaaaaaaagaaccatttaaaaagcttatcaagcacaatggccatcgaaaagagaactatgattgcctccttcatcatcgttctgatgatggtaacgatgatcgcaaccaacgttgaggcccggaatcatgtcaaaatcaagccaccagcaaaccccaagttcttctttttctaaattgatggctcataatgtttacaagaaataactggttggcttcaacaaccagcttcaagccttcaagca

SEQ ID NO: 151973 - DNA, 400 bp, Arabidopsis thaliana landsberg
gttattgcttgagcatgaacctcaattgagtaaaacagtagctcaatcaaacgcaaccccacttgtgtcggctgcaactcgagggcattcagaagttgtcaatgaattgcttgctaaagactcaagcttgcttgagatttcaagatcgaatggaaaaaacgcgcttcaccttgctgcgcgccaaggtcatgtagatattgtaagaaccttgcttgataaagatccgcagttagcaagacgaacagacaagaaaggacagacgtctttgcatatggctgtgaaaggagttagctcacaagtcgtgaggttgctccttcgagctgatccggctattgtcatgcttcctgataaatttggtaacactgtgttgcatattgctacacgaaagaaaagagcagag

SEQ ID NO: 151974 - DNA, 533 bp, Arabidopsis thaliana landsberg
atgattgaatctggtttaaccaatttgaaccacaacccaacaatttatccggttcgatttggaaatagcaagtgtgggactgttatgaggtcatcacaatcaaagtaaattaattcctccgtgtgacctaaagagtgaccgttcccgttcactaccgccgcaaagtcttgtggctacagagcttagggtttaaactttcttcacgataattttccgatgggagttccgtcgttctacagatggcttatccagaggtatccattgactatacaagaagttattgaagaagagccactcgaagttaatggcggcggcgtcacgattccaatcgattcaagcaaacctaatcataatggttacgagtatgacaatctttatctcgacatgaacggaatcattcagccatgtttccatcctgaagacaaatcttctcctactacgtttacagaagtgtttcaatgtatgtttgattacattgctaggctttttgttatggttcgacctcggaagctcttgtttgtggctattggtga

SEQ ID NO: 151975 - DNA, 473 bp, Arabidopsis thaliana landsberg
acacgaaaatacatcccaattctaaaaaaattgttttttcaatttttctcctttgatttcttaaaagaagatccacaacaacaagaatgaatacattcaagatatcatatttcattatggtgctcataatggtcttagccattgctataacatttagcgagccgctaacggttgaagcaaaacatcaacacaaatatggttgggggatagccgcttctgcaaggaacaaaggtaggaaacatttaggtgcaacattgacatgtgacaaaagctccaaggtatgtcgtctcaaaggcagtccaggtcgtaattgttgtcgtaagaagtgtgtcgatttgaggaccaacaaattgaactgcggaagatgtggaaaaagctgccaatactcggaggtttgctgcaacggatattgtgtaaacccaatgtttgataggagacattgtggaggttgctttaagaagtgcaagaaaggg

SEQ ID NO: 151976 - DNA, 1058 bp, Arabidopsis thaliana landsberg
acttgggattgaggttgtacaagaaagagccaatgcagattctttctggtggccatacattagcaatctcccggatacttatactgttcccatattctttcccggagaagatatcaaaaacttgcaatatgctcctcttctccaccaggtcaacaaaagatgccgttttcttcttgagtttgagcaagagattagacgtactcttgaagatgttaaggctagtgatcatcctttcagtggccaagatgtaaatgcatctgccctagggtggactatgtcagctgtttcaactagagcgtttcgtttacatggtaataaaaagcttcaaggtggatcttctgatgatgttcccatgatgcttcctttgatagaatatgtgcaaccacagcttcaaacctaatgctcggatcattcaagaacagaacggagctgactctaatactcttgttaaggtttgcgttttagatctctggttttaaactggctttttgtttaactgaatgtaaatgatgtttctcttttgttgtgcattaggttgttgcagagactgaagtcaaagaaaacgatcctttgctacttaactatggttgccttagtaatgattttttccttttggactacggatttgtgatcgaatcaaatccatacgatacaattgagcttaaatacgatgaacagcttatggatgcggctagcatggcggctggtgtttcttccccaaaattctcttcaccagctccatggcaacatcagctgctttcccagttaaatttagccggggaaatgccaaatctgaaggttttaaaccgccatttctatatcacgatattttaagtactatttatttccgagaagaagaatctctaactattttcttcttatactaataggtaaccattggaggcccagagccagtagagggacgactattggcggcgttaaggatactgctttgtggtgaactggtggaagtagagaagcatgactcagacacgctgaaatctttatccgccgtagccccttttggaattgcaaacgagattgccgttttccgtaca

SEQ ID NO: 151977 - DNA, 1397 bp, Arabidopsis thaliana landsberg
caagaaacagagcctattacgtgcttgttcagaattggtcatgcatacgcaaatatgaagaatggtgtagacaccttaaatttgcatgggtacttcgaatatggtaatgtattagtttaatcctttttgcaggagcgctgtttttcatttctttatcaatattgatttttgacctctgctacaacctcacaggtggttggttgcttggctggcgaaaaacctcaaatgattagtgctgctgtcaagggtgtagctcgtttgacatatgagttctccgatctcatatctagtgcttacaatttacttccttcaacatttcttctcctccagaggaaaaataaagaaattacaaaagttagttactcatcttccctttcaagagtccacaactttatcaatgatacacaatgaactgtttcctttttctgaaacttacaactaatgtattttgggaaacaggcaaatttaggtttgttgaaggtgttggtggctaaatcacccgttgaaggactacacgcaaatttaaagagcatggttgaaggcttactaaagtggccagaaggaacaaaaaatctgttcaaagcaaaggtgtgtttctgatatggttttattcatacagaatgcccaagatgacatctttgatgcctagaatttgaatctcattaccgcaactttaccttctctcacacaactcagacgcacacatttatccatgttgagctggtgcttgtacataaaatttgtttcttagcggcaggcatatattatgatttgtttttgcgggttcttgtctttttttttaagagtcatgttggtataataggtgaggcttctgttggagatgctcatcaagaaatgtggcacggaggctgtcaagtctgtgaagcctgaggaaaagatgaaactcctgaaaaatacgaaaggtttgcttacaatgttcaaagttggctagatttcagtatttgtgttaactcacatcttctctcggttcatctcagatcaaggaacgtaaggagaaaatatatgtagctggttctaacataaggagatcgcagcattcaaatgatatttcattaaaagtacctttccaactcagttgacaaatgctctcatagaagtatttgagtgctcaatccctgatgttcttgatttatgttttttcattactaataggtggaaagtctttggatggggacgaggacgatgatggggactatatgaatgcggtgtcgcatggccatagcaaggcttcctcgatttttaaatctaagaaatctaaggcatctctttgaggttggttgttataaagtatacacattttggcataatcttcgtttggatctatccattcaactttttggtgacatattacagatccaagtatattaaaaccagag

SEQ ID NO: 151978 - DNA, 921 bp, Arabidopsis thaliana landsberg
ggaagaaggctcgatgaagagcagattgaagagttacaggtggaagaagctagggttagccacaggtatcggggtctgttctctctgtttcctcttcggtttctatggctccactctactttctcaggtgtggaaactctctgatcttttactctgtactctttagatgtgattggagtctttagcttggttttgtgactaatcgagggttctatgtttgggatcagaatgtgcctcgtgttaaacccaggttgagaatgttggatatggttgagaatggggaagaagaagctagctcgatgcctcatggtgttactggagaagaatctattggatcgattccttttcaggtctgattttgttgctaatttttagacttttaagatgtttggattggcaaattaggtgaaatcgattagttagggcaagattgtgcatttgattatctaattgaactttgtttttttgttcatgtgtggtgaccatgagtgtgagtgagagtattgtgttttttagcaattagtcaactagtgaaatttagtacttcatctttatggattatttggtttaaaattggcaggtacttagttggagacctagggctatatattttccgaattttgcaactgcagaacaatgccaagctattattgagagagcaaaggttaatctgaaaccttctgctttggctctccggaaaggagaaactgctgagaacactaagggcacaagaacaaggtctttctttctttctagtttcatgttgcattgtcttcttcagtcaaacattcttcagtagcctcagtgtttttgcctggtgtgttgttgttacagctcaggaacttttatcagtgcttcagaagagagtactggtgctctggattttgttaaaggaaaatcgcaagagctacgatgatcccc

SEQ ID NO: 151979 - DNA, 484 bp, Arabidopsis thaliana landsberg
agaaacagagtgaacaactttcttctgcagcaaaagaccaagtggaagctgcaaaccctggaactaacgtctctgtgtcaaaggatcattttgataggacagtaacaactctcaacattgtatgttctgatgtattcccatgattttttgagtctcagctatgccattcgcatttctcaaggttaagtattgatgttcattggtctccctgcaggcggttacctggtttcatctgtatcactattcaaaatcttgttccattctagaacctttgtttcaaaatattcagcggctagacgaggtttgtatccttctttttgcttgatttggttaaacctgtcctactggctgtaagctgacaacttgctatttatatgcagacaatcgcacttcaaatctgcttcttgttgctggatatttcactggcttgtcgtgatgctgtaaattttttggtaagtgttgtttttactggtctcaaactctt

SEQ ID NO: 151980 - DNA, 218 bp, Arabidopsis thaliana landsberg
tggaaacttcccaatgaagctaatattactgatctgctcattctctctcatgcagtttactgaaacagctccatttaggttgttgctattagtgtttccatagaaacagaacagtgatgatgatgatgatgatgaaaacttaactcgagagcacaattgggatattgttatctccattttctcttcataaaaactgattgatcttacaaaaacaaaat

SEQ ID NO: 151981 - DNA, 1230 bp, Arabidopsis thaliana landsberg
ggttgatctttctaatttgttctcaggggttgctaaagggaaaggagagagatgggtggtgaagcaggaagttgtttctgttgagctaccagcaccttcttcatggaagaaattggtttgttttctttgtttcatacaaagacttagaatttgttgtatatgtgtagtgctgcaattaccaaatctttttctttgaagactctgaatatggtagcttttggtggcgaaatgttagtataagtgtaaataactttatgttgattaggtgattcaaaggttatagacttagaaaaagccacatttgattgtgtttgatctactatttctacttctttgttcttgacttaatgcctcattttgactatgtttgatttacttcttacttttcccgattcttatggattttaagccacttgtaaacattgtttaagctacattaaggtcttctttagaatttaatgtttcagcgttttgaacctcaaattttcatattttcagaggtttacattaactgacttgtttttgcagttttaccccatcaaagtgggttcagtgaagaaaacagaggttgtgtttgtggctccaacgggtgaggagattagtaacagaaagcagctggagcagtatctcaaatcgcaccctggaaaccccgcgatcgcagagtttgattggacgactagtgggacacctaggagatctgcaagaatcagtgagaagactaaggctacgccgtcaccagataaagagccacccaagaagcgaggtagaaccaaatctccagtgtcaaagaaagatgcagaaggtgagaaatcagagggaggaggagaggaaaactctcatgtgaaagatactgaaatgaatcctccagagggaatcgccgagaatgaaaatgtgaccgataagaatggctccggtgaaactgagagggtgaatgatgcaaaagaaaacattgttgctgaggaaactccaaatgcggctccagttcaagaagagggtgagtcgatgaaggagaaagctctggattctgttgatgataagagtaaggagactgacaaagaaaaagatactggctcaatcgaaaagaactcggtagatgtagagaagaagaccgttatagctagtgatgagaagaagaattctgaagctgagaccagaacccatgaagaaaatggtctgaccacagaagctgaggggaaagagaaagcagcagaaggagaagctaccggatag

SEQ ID NO: 151982 - DNA, 419 bp, Arabidopsis thaliana landsberg
gagagtgaaggaacatcatgggaagcagcacgggcgatcttgtgacacgtatccaatcagctcaccgtttcgatcacgatgccttgtttcgttttgccgccgacaacgtctctggctttccgaccaacccttcccaattcaaagtctcacaggtatgttttccaatcgccgaggttttttctccggtaagaaagaaacttttatctgactgtgttttgttttggtttggtttacatacagttcggacatgggcagtcgaatccaacgtttctgatagaggttggctcagggagttccttgaaacgatacgttttgaggaagaagcctcctggcaagcttcttcaatctgctcatgctgttgatcgagagtttcaggtatcaatcaattaataatctttacctctgtaaaattcatggga

SEQ ID NO: 151983 - DNA, 4924 bp, Arabidopsis thaliana landsberg
gtttaggtcgatttttcccttcttgacgtcgataatggctcctgcagtagctaggaatggtcttcctaggattaatgggtcttttggctcctcatccatctccagtattatgaaatcagtaggaatgtttattgatccgactttaacaggcaggtctgtgagaattccatgagggtattctgactgatctgtcagctaatatcaattggataccgcaaggcttctgctgagccagcaataacttgtctaacttttcatttagagccttgatatccttgctttgtttgtcctcacttcctccagttccactcattcagcaatcatagtcttcattgtagcacccatcagattgtgctagattttcgaccaactcccagccttctactacatccttgtttaggaagtttccattggaggcagtgtcaagtagcattctgatctttggtaaagctcctctgtagagtgtgctcaataatgaagccttcttgaaaccgtgatgggggcactgagtggtgtagcttttaaatctctcccaagcttcacagaaagtttcattgttttactgtgtgaagcctgagatctcgttcctcaatctaggggtgcgagcgttagagaagaacttggcaagaaaagctttcttacaatcatcccaggagttgatggagtctgggggtagagtcttctcccagtggtgtgtcttgtcttccaaagagaagggaaatagtctgagcttaaacatatcctcagtgacaccattgatcttggtaaagccacagagtctatcaaagctgtcaaggtggtccatgggctcttccataggtaaaccatgaaacttgtttcctgaccactcttgatctcaaagttgttgttctgaactggtggaggcactatcccttgtctttggtgatgattctttggggcatcaccagcaccaatgtttcatggttgatcaacattaggtgggtcttgaacatcaactggtctgttctgttgatccatagcagctggtctgtgttgatcacaggttgcctttgctttgatttcttgtaactcacgagctattctgtcaattctgtctctgaatggtaataggtgtgcagaacctttggatcgagtttccatgcacaaagattagtacctataccacaaaaataagcagacgaaatgatgagttagtaacttgaaaaatgtaaaagaacttgatcttaaaagtttatgatatcttgaatgtaacaatgcaacaatgaattggcaacggcgccaaattgataagcaagtttttcaggcctacttatgttgaatgtgtgattcagttcaattcccctaaaacacaaacatgtcgatgcaactatagggggtgtcaatccagtccactgttattgctagcaatcaagatgtgcacagaaacaactaagtcaagccagattataatgatggtgggtttctagaaacaatcctaggtcaggattcaaacaagtaaaaatgagtacttaagagccctactcgatcattgggtcgagtagaaccaaccggcagaattaaaatgcaatcaacaggggatgcaaatagaggatacaaataacaggtaaataaaagtgcaatcaacaggggatacaaatagatctaatagaaatcttaaggatggattcattgataagggcaactctagggttcatcagatggctaataggcaaaaggtaggtacccttgacgatagattcaaaaaccgggtcaatccactctggtgacagagacccccataactctactacttcctaatatcaactctcgttgatgaaacatagaagagcagggtttaagaaacaatctaccaaagccagtaagcagacaagccaatctcttggtcgagtctacaaatctctggaattcgtagatcagacatccatttgaacgtcttttggacgctggacgtctatgatcgaatctccacattagccagcaaaaaccccatagggggcaagcgaatccagaagagtataaacctaaacactaaccacctaactaacctagagattacccttttctaatccatcctcaagaaccctaatccctactcaagcaacattctcaagaacacaaatccagaaattactgaaatcataccaaaatgtagatctaaacaagctaaacaactttacttaaacaatcaaatgcaaaaacgaaatagattaagagtaattaaagtttcaagattcagaaacataaagaaaaactgaaagataaagtctagatcttttggacaaaccccaaaatgatctatttatagtaaaatgttgaaaccctagattcactagaagacaagagacttgaggcggtttgggcgaatactcgaccttggggatcgtgtaaagagggtgctgcaaagtctacgcctttgtgtccatgctccgagtgatcaattggtcgagtagatgcttcttcctctcctatctgtatgcttagaggtttggttgagtggggaatcaggaggatccgaagacgccttgaatgatcaacaagtcatgtagagtaggtcgcccttgatcgagcaaacgggtcgagtagaggatccagtaggggggtcgagtagggtctgttgcctcctctgtggctgcctggatcgagtgaattggtcgagtagaatgctctgctacttccctcctagtttgatagagtagagggtcgagtagaaatccttgtaagctccttctacacctgaaaacataccaaaacatgcaatatgtatgcaatatgattctatatgcctaagtgtgcaaaataagctaaaataatgcaaaatgatatgatacaatgagtgatcactaagctaaatgatgataaatacatgtataaaatgagtaaaatatagtgttaacccatatagagcgtttgaggaccttgttctaagcatcaaagctaatggagtctcagaggactacctactgtgcaagttcttcccttattcccttgttggctgaaataactcaaagcaggttccctcaagacttggagaagcatcaagatagcattcttgattaatttttacgatgatgctaagtttgaggcgctgaaaaacaagctgtctacctttactcaaggtccagcggaggctttcaaaaccgtttgggttcgtttcaaggagtatcaacgggactgcccgtatcatggcttcagtgaggtacaacttcttggtaccttttttagaagagttgattggaggtacctgatggctctagatgcagcgagcaatggtaacttcaatgcacgttaccccgctgatgttacctctcttatagagaatcttgcttgtagcaacaacactaaaaaagctgacttcgagaggaaaaagatagttgaagctgtttcaggcaatcagatggcaaaggtgaattctaagctggattcggttcacaacttgcttacagggaagaagcatgtccactttgcaactgaggatgagaccattgagcgtgaaactgagtccgaagagggagtcttctacatagttggacaaggctacagaatgtttgggcagccacttggcaactttagtggcaacaggtttacagggaaccagagatccttgaactacactccaaagcctgccttccagaagacatttcttcagagcaacttctagaggacttatggtaattcaacttaccaggcccccctccacccttattagagagccgaatggaatccatgcttgttattgagtttaatggcaagtttgatgctgtctacatagatcttaatgggaaaatcgacaatctgagctctcacatgaagaagctagatgtacaagtagctcaaactgcacaatccatcaagcgacaagaaggttttcttccttgaaaccctgatgcaaactctaggaagagctgtaatgtcatcttggtcagagatggagatgatgaatgggaggaattggacactgaagacgagttgaagctcgcagcagcagagctggtgtcgaccgacacctaccagtgtcgatcgacaccctatggaacactattttctgagacgattccatacgaaggtgtcgatcgacactgggtccggactgcaccatatgaggtaagaatcccgatgcagaccgaatctgcctacactcctcctgtcccttatccaaggaagcgtcgttctaagcaggagattcatgctgctaagtgcacaaccatcatggaaaagatcctcacttctcttcctaaggatgcttctaagacatcttcttctccactcaacaggtatgtcaagcgacttgttgacaatggcattagctcagatgaagcctcactgctgacaagggacatcagtgaaatcatgctgcataagttcaagaaagagaaggcacagagagtggacattgcggagtacatccgcaccatcactcatgattagaccactgagaatcttccagatccaggtagctttgttcttgattgctctatcttcacaagcaggttcagtcgctctttgtgtgacatgggatcaagtatcaacctcatgtctaagtctgttgctgagagactaggcatgactaactataggccgactcgcatcacccttctcttcgcggatcgttccaaacgaatccctgaaggaatccttgattttgtggtcctcgactatgagaaagaatccaaggatcctcttatcctttgaagaacgttcctagctacagctggtgctaggtttgatgtgaagagaggtagaatatctctaaaggtttgtgatttggagatggagtttggcatggatggttaagagcttactaagtctattagtagtattgcctctagcacaaccacacctcctccaactgctcagaatcccacaacagagccacacacaacactcccataagcttagctcgccaatgagagttgtagagcaacgatatcaattgacaccacca

SEQ ID NO: 151984 - DNA, 2311 bp, Arabidopsis thaliana landsberg
  unsure (1)..(2311): unsure at all n locations
ataacctccaaaacaaaaatatcacagatccaaaagatcggattaacataatctctccaaataatcatgcgttactctcatactctccagcagttctcaattctatctttcttcgttacaatatggaccgttcaatcagtaccaccacaaccaccgattcgatgcgaccaaaccggctgcaccgtctccaacgcgtacggcacgtggcctgaccgcaaaacctgtcacgcggctaacgtcacatacccaacgacggaggaagaccttcgtaaagccgttgcnnnnnnnnnnnnnnnnnntctcaaagtcaaaaccgtcaccaaattctctcacaccataccgaaactcgcttgtccttcaggttcagacgcattgctaattagtacgtcgaaatataattcggttatcgagattgaaccggaactgttaacggtcacggctgattctggagtttcgatgagagagctgatcgagaaagttgaaggagctgggtttagcatcggaacgtcaccgtactgggaaggagtcaataatcgggggctgattaatactggctcccacgggagttcgtggtctgcacgaggtggttcggttcatgaccatgttgtcggaatcagccttgtggttccggcgagccaatcagaaggtttcgcgaaggttgttagactcgaagaagggagagatgatacgcttcttaacgccgttaaagtgtcgttgggtgttttaggagtcatttcaaaggtacaataacttaacgccgttaacagtcttacagtgctttttattttattgattcaattgtatataactatatatttgacgtaacgccgttaaccatattatctgtaggttaagctttcgatagagaaagcatttaagagaagtgtgacgtacaacttcacatctgacgtagcacttgaagacatttttatggagcatgggaaaaaatacgaattcggagacataacttggtatccttctagaaaaactgctgtttaccgttacgatatccgagcaccggtcaatgtctccggcaacggagtcaacgactttcttggttttcagtctaatcctatcttgatctctaaaggggtacgagcattaggttagttcctctttccttatagtagctagacgactccacattaccaatattcccggtttaattagtccggtttggatgtttaaaatcaaagttttggctttgaaaatgttgcagagaaggggtttgaatctagcaagaatgagaatggaaaatgcaccactgcagatactacgttggcatacaagaaattaatcgggaacggtttaaagaatagtggtttaatctttactggatatccggttatcggaagacaaggcaagatccagacttctgggtcttgtctttactcatcttcaattagaattgatgtcgcttgcgcatgggacccgagatataacggtcttttcttttatgaaacgactgcaatattcccagtttctaggtttagagattttcttctcgacgtgaagaagctacgagacatgaaacccgaaagattgtgcgggatcgatatctataacggtatcttcatacgtttcataaagggctcaaaggcttatcttggccagacagaggattcagtggtcattgactttaattattaccgagcggatgatgagttgaccccgaggttgaaccaagatgtgatggaggagatggagcagatggcgtttgtcaaacacggcgcaaagccgcattgggggaagaataggaaagtgggtttcttcggcgtgaagcaaaagattggacctaactttgataaattcttggaagtaaagaacaagttagatcctaagaagatgttctctagtgaatggtctgatgagattctcttaggaacagaagcttccaagtatgacggatgtgccttggaaggaaattgtgtgtgttcagaagaaagacattgtaacccttccaaaggttacttttgtaaggaaggccttgtttatacacaagctagggtttgcagattctcgccagctcaagttatagtgatgtaactcgagttttgatgttcaaactatgtcatccggtgaagaaatgatatagagactgaagttactattctttcatcatgagttttccaaggatataaatgttttattaggatctcgtcttgtacggaaatgatctgttttatccatatttaactctttcaaaagtatttgcaaatttttagtttattccgtggattattacccgtttacaccgttgtctgaacaaaaaagaaaaataatccctaccctgcatacgtttacccgataa

SEQ ID NO: 151985 - DNA, 732 bp, Arabidopsis thaliana landsberg
agcaaaagcatttggtagtcgtaaccaaaacgccaaatcattaccgttcaactgaaatctaacagagagccctcttctcttgggaattcgattccttgtacgttatcttcttcttcttcttctctttctcaaaattcgtgtatcttctgggaaattttcagatttagatggagaaaggggttggatttgagaaagacatgaagacagtgagtgatgggtttgtcggaggttttttccctgtctctaccaccaagatcgcgtgaaatcaagaaaaagatcaggttttttccactgtttcttgttttctcagaccattaaagattctagacctttattagctaccctttctatttctggtctgaaagatttggaatttatttaagcagactgaaatcatcaattgttttagctctatgtgaactatttcctcgagatctagacatggagctttagtcttcttctctctgtcttttgtaactttcgttttgctctgatccgtttgcatgtgattttggaactcaaagcattaactattttgatcgcagcattgttgaacctagacaaagcaccggaggctgttacggaggtcacaccagagaagaacgagataacagcaatggataccgagaaagttggggaaccaatgaccacaactcctcttctgtccgagaaaaggaaagctctgttcgagccacttgaacccattacgaacttgaacggaaagcgaccaac

SEQ ID NO: 151986 - DNA, 798 bp, Arabidopsis thaliana landsberg
ttagaaacatagagaagtccaacactcctccaagcgtccaaggtgtgtgatagtgtgggtcactttccacttgtcgaagtaagagaggtcccgaattaaaaatttataagtgaagaacaaaggagtcaatgtcaaatgccgaccacgcgagagaaaatgacctgaactgatttttttaacgaagagatgaaagagtaaaatggtcaaaacacactaaggacagccaagaaaaagattcaaggttttagagcttcacatacgaatgttctacacttgaaacaatgaatccaaaccaaactacataagtagcaaatatgttcaccctacccttgaaacaacactattctgcaggtcataaatcagttggggaatcttgtagctcttctcacccacgggaccatcgaacgctgctgctgatgagatccagctccattgttgcctacattgcttctattgtctgcaaaccttctcattctcattctctcttccttcatgtttgcaaaccgagaatccagtgtctgaggccattgcctttgccctcctcctcctccatttgcctgctgctgcactatcttctccctttgctgctgctgctgctgcatgtttaataagcccatcaatcaatcactaataaatctctttatggttatacatgtaagccagtttattgatgcagcaaacaaaagatcgaaggtttaagaagcaggtctaatgcaacataatagatggatatgaataattacctttccgacaaaccctctttgtgaagctctattctgagctggtggagcaataaac

SEQ ID NO: 151987 - DNA, 518 bp, Arabidopsis thaliana landsberg
atgttagcgtctgcggttcaaaacgttatagccaagaaactaaaagagaaagacgacgaaatcgtacggattcgaaacctaaactgggttttacaagagagggtgaagagtctttacgtcgaaaatcagatttggcgtgatatcgctcaaaccaacgaagcaaacgctaatactcttcgaacaaacctagaccaagttcttgctcaactcgaaacgtttccaaccacttcagccgttgtagaagacgatgcggaatcgagttgtggaagttgttgcggtgatggtggtggtgaagcggtaatggcggttagtggtggttgtaaacggtgcggtgagagagaagcaagtgtgttggtgttaccttgtcgtcatttgtgtttgagtacggtttgtggtggttcggctttgttacggacttgtccggtttgcgatatggtcatgaacgctagtgtgcatgttaacatgtcttcttgaccatcttcttttttgttcgtacaacttaattttttttttttttg

SEQ ID NO: 151988 - DNA, 1486 bp, Arabidopsis thaliana landsberg
ttcctgatcttaacaattttgttgtgtatcatcagattccagacatttttcctctattggctgctgctcagatagcacttatctccaaatcacgcgattccttatcaaccagaactcttcattctgagcttgtctacaattactcaggatctaagcacgtaagtacaatcttttcttgtccttcttaaacctattcctgtctacttctgataaacaatgggtctagttctgttgttccacccttagctataggtcgactataactagattagacttaatgcatcagattctagctgttttgagttggttagagagcagttagttagctagtgaccagttagtgtgtctagttcagttgttcaagccttagctacaggtctgctataactagatggtgatttaatgcagtagattttagctgttgtgagttggtttaagatgagatagttagttgagtattgagattctctcatttatcaagtttctctggtttggtaaattgtaataagaatagcagttcactcaacttctctaatgttgtttttcctcttcaactagattacagaatcattgaaacgatgtgggatttctgagaacactacttacattctagctgcccggttcaatgcttctcccgttgaggttataatcttttcaaccatctaagagctgactatccatgttgttgctctttttagtggtttttttttatcaaccatgacatgatttgagatcaaaaccagatggaggaggtggcgaaattgatcaacgggaaggagattgatttggaggaattgaagacacatgcaaatcaagccaatatactaaaggtaatgttttggtaacagttgataacccttttatttcgcttccaatgttacagaaataaactcaaatacattcatgttttcagcattacaagataactagccaagagctcggaatttcctctctgggagatgccattgtttgtcgaatagctgcacgtgatgctttgtaggagtagacatcttttctttatgtcttttgtcaccaattatagttttctcctttataaacaacgttgacacttacgtttataattcagaccaatgttgggtttcttaacctctttatttactctctcctcagataggtttaactcagattttatatgagataaacatagaattgaccacaaacaaaagaatgagactactaattacatgctttcttgttcttgttcactttaaacaagccacagtgtcaatctcttcttgcacttaactccaaaaaacgccaacaagaaagagctcatttatcactggaacatatcagcaattgtatttcctgaatctgaagaatctccattcccaaaatccatcatcatcatcatattcatccactcctccatattgcaatcctctcctcctccgttccattgctctgcttcaactgaatctgtggcgctcacactggcgcttgcacttgcatttgctcctatatc

SEQ ID NO: 151989 - DNA, 247 bp, Arabidopsis thaliana landsberg
tgcctgctgctttccatgatgtcagctgatatcgtcggccagaaaatatatgatgaacaattatatgactctgttaacctcttgctgtctttacaggtgaagttatatatactcatacgattttcatcaaattttgtgttaagtttttttaaaactaattgtgttactaaaactgccactctttatgtagagcggaaatggaggtgtcaatgcgtgggagccatcccgtgcatataaatggttggaa

SEQ ID NO: 151990 - DNA, 6466 bp, Arabidopsis thaliana landsberg
  unsure (1)..(6466): unsure at all n locations
gtttggactttgctttctttgatgttaaatatgaaggagacaagctgtatgttggcagagtctataagtcgaagactgattgcaagattaagatagctatacacaccatcaaccacaagttccatgataagtgtgtattttgcatgttttgagcatccatttgtcatcactttagcatcatatcatcactgttttataccatttcacatcatttgtcatcactttgcatgtttaggatagttttgcatgcatgttgcatatttgcgttgatttcaggtgatttggagctgttgacgagctatctggaagaagcagacctgatcatgacaaaccactcgaccaagaggtcgagtaggagcttcaagatctcaagagaccactcgacaaccaggtcgagtagagcacatcaccacttcacctcaccactcgaccccctggtcgagtgccttcacctccatcatcagacaaccactcgacctcctcactctacccagaggtcgagtatctccatcacaccactcgactgcatactcgatgacaagcttcagagccttcttcattccgcactcatccagacactcgagctctcactcgaccacgtgagtcgagtacagttcttaacccgtccaaatacttcgtcgttttgagtattagggtttcgggatatttggctataagtagcatgtacttctcattttcgcaaacaagttggtttttacctagtttttatttccgcagaccttgtgttctagattttttgtaatccggatttctctttatctattcagtattcaatattcagtttctgttcttgattttcgtttactgttattcattctgttatcatactgctgttatcatgtcttcaacctgttcaacgtttatgctttctgtcatgatgtctgagtagtgaataggtttctgaggatgggttagagtagtgtagaattctcagtatgctaggtgattgagtattgattgatagatcccttctggattagttgttcttaatgcctattgctttctgatcaactggaatttgagcccagacatttccgcgcccaaaaggtgttcgatgaaatgtctgaaccactaattccagagattcgtgaccctgtaccaaggtattggttgcagggagcgttttggcattaacttgttgattcgtaatgcctgttaggttagctctcgtcaatggtgattaagtctgcgactaggttaacttgagagtctctgttgcggtggcacttagatttggttaatgaacttgttgtctaggtttaatttattgagcatgtcaatcacctgtaaactgaggaaacgaaactactcaattaccccatccttgggaattctttatctgattgaattttttgtttactctattgttgtttagtgcatcctgttatctgtcgcttaatttctgcaattctttcttgttactcgacctcgtactcgaccacccagttgtctggcaacagactgtgcagtcgagtatctgtgttttattttctttctgttactcgacctgtcactcgacctcacccagtgctttgcaaagagctgtgttggtcgagtgttttattgtttctgcttgaatttctattttctgcatgttcacttagaactgctagaacacaccaaaacctgttattgcttggcttgacttagtgacttctgatcacatcttgattgttagtatcacacccatttggattgaaaacctaaaatactacaatgatatgatttgtgttttaggataattgactaaaaaacctattatcaatttggcgccgttgccaattgggtgtttgtttgttacatttgagatttcagacttgcttagatcaagttcattttcaattttcttttcagttactaactgtgtgtttttcttgttgtcttcttggtccaggtacacctctactgtatgcaaactcgatcaacaggcaattagaacctccttttcgacgacaacatcaaccgcatagctcgcgaactcagaaaaaggagaaccacagtcaaccctgtacctcagcaaccactcgaaatggctgacgaacagaatcaacaaaatggccctgctaacattggtgctggagatgcaccacgtgatcaccgtcagaggaaaggaattgtacctcctgctatccagaacaacaacttcgagattaagagtggtctcatctcgatgattcaggggaacaaattccatggtctgccaatggaggatccactcgaccaccttgatgaattcgataggctctgcaacctaacaaagatcaatggtgtcagtgaagacggattcaagctccgtttgtttccattctccttgggagacaaagcacacatctgggagaagaatctgccccatgactcaatcaccacctgggatgattgtaagaaggcttttctgtcaaagttcttctccaatgccagaactacaagactcagaaatgagatttctggtttctcacagaagactggtgaaagcttctgtgaagcatgggatcgtttcaagggttacaccaaccaatgccctcatcatggcttcactaaagcctctctgctcagcactctttacagagaagttctaccacgcannnnnnnnnnnnnnnnnnnnnnnnnnnntgggaatttccagaacaaagatgttgaagaaggctggatttgcagcaaccaccaactggatttgctggatttgcacctcagcaaaaccaaggtccggctgctcctgacgctgacatgaaacaaatgctacaacagctgcttcacggagaaacctctggctccatggagatggcaaagaagatatctgagttacataataagctggactgtagctacaatgatttgaatgtcaaggtggaaacactgaataccaaagtcagatacttagaaggacattctgcatcttcctctactccaaaacagataagccaacttccaggcaaagcaattcagaatccataagaatatgctcacggtatcactctgcgaagtggaaaagcacttccaactagagaggaaccaaagacagtcactaaggacagtgaaatcaagatgggcaggatttcagtctcgataaaaattgagctgacaaaccactcgagcgaccactcgagcaaccactcgagcagccactcgaccaacaactcgagctgccactcgaccacgttactcgaccaactactcgaccaaccttcccagcgacatcaccaactgctccaaaaccagttgctgtcaaaaacaaagaataggtctttgtccctcctccctacaaaccgcagcttccatttcctggccgtcacaagaaagcgttggcaggcaaatatagagctatgtttgccaagaacattaaggaggttgagttgcggatacctcttgttgacgctctagcgctaatcccagactctcacaagtttctgaaagacttgatcgtggagagaattcaagaagtgcaagggatggtggtattgagtcatgattgcatcgctatcatacagaagaagatcattcctaagaaacttagtgatcctggttcattcactctaccgtgctctttaggaccattggctttcaatagatgcctatgcgatttaggagcatcagtcagtctcatgccgctttctgtcgccaaaagattggggttcactcaatacaagtcctgcaatatatccctcatcctagttgacagatcagtgaggattcctcatggtttgctcaaaaacctcccaatcaggatcggtgctgtcgagatacctactaactttgtagtcctggagatggatgaagagcccaaggaccctttgattttatggagacctttcttagcaactgcaggagctatgattgatgtcaagaaagggaagattgatctaaatcttggcaaagactttaggatgacctttgacatcgaagacgcaatgaagaagcctaccatagaagggcaactcttttggattgaagaaatggatcagttagctgatgagttacaggaagagctggcagaagaagatcatcttaactgtgctttaaccaaaagtggcaaagatgggtttctgcagttggaaactttgggataccagaagctgttagactcccataaagcgatggaagaatcagaaccctttgagaaattgaatggaccagcaacggaggtaatggtaatgagcgaagaagggtcaactcgagttcaacctgcactctcgaggacgtactcgaccagccactcgaccttgtctgccaacgaatctggggagccgatcattccaacttcagatgactggtctgaacttaaggcaccgaaggttgatctcaaaccacttcctaaaggtctaaggtacacattccttggtccaaactccacttaccctgtgatcattaatgctgagttaaatagtgatgaagtgaacctgctattatttgagcttagaaagtataggagagcgattggttattcattatccgacattaagggaatttcacctagtttatccaaccataggatccatcttgaaaacgaatcctattctagcattgaaccacagaggaggttaaatcccaatttgaaagaagtagtaaaaaaagaaattttgaaactgcttgatgctggtgtcatctaccctatttctgatagtacttgggtttctccagtgcattgtgtccctaaaaaggggggaatgactgttgtcaaaaatgaaaaagatgaactgatcctgactagaactataactggtcatagaatgtgtattgattataggaagctaaatgctacatctaggaaagatcattttcctttaccattcattgaccaaatgcttgaacnnnnnnnnnnnnnnnnnnnnnnttgttttctcgatggatatagtggtttctttcaaataccaattcaccttactgatcaagagaaaaccactttcacatgtccttatggannnnnnnnnnnnnnnnnnnnnnnntttggtttatgcaatgtccctgcaacatttcagaggtgtatgacctctatattttcggatttaatcgaggagatggtggaggtctccatggacgatttttcggtctatggcccctttttctcctcatgtttgttgagtcttggcaggatattgaccaggtgcgaggagactaatcttgttctcaattgggaaaagtgtcatttcatggtgaaggaaggcatagtgttgggtcacaagatatcagaaaagggtatagaggttgacaaagggaaaattgaagtgatgatgcagttgcagccaccaaaaatggtgaaggacaaaagaagtttccttggtcatgttgggttctacagaagatttattaaagacttctccaagatagccaggccgttaaccagactattgtgcaaggaaaccgaatttgaattcgatgaggactgcctcaaatcctttcacaccatcaaggatgctttggtatctgctcctgttgttcgagcgcctaattgggactatcaatttgagatcatgtgtgatgcatcagattacgcaagaggagctattttaggctagaaaatagacaagaagcttcatgtcatatattacgccagccgaacgttggatgaagctcaaggaagatatgcaacaactgagaaggagcttctagctgttgttttcgcatttgagaagttcagaagctatttggttggatcaaaggtcactatctatacagaccatgccgccttgaggcatctgtatgccaagaaggatactaaaccaagactgttgagatggatacttctcatgcaagagtttgacaaggaaatagtaaccgagaagtacattgaaaatggtgcagctgaccatctttcaagaatgagaattgaacagcctattccgattcccgactcaatgccagaagagcaacttatggttgtagaattcttcggtgggagtttacagcggaaaagagttccaccaactgaatgctgttgagggaagatctccatggtatgctgatcacgtcaattatttggcatgcggagtagagcctccaacctgacaagttatgaaaggaagaagtttttcagggatatacaccattactactgggatgagccttatctttacactctctataaagataagatctacaggagatgtgtctcagaagatgaagtggaaggtatcctgctgcattgccatggctcagcatatggtggtcacttcgcgacgttcaagacagtgtccaagattcttcaagcaggcttttggtggccaacaatgtttatgaacgctcaggagtttgtttcaaagtgtgattcaggctatggagcagtcactctagctggtaagagtggagattttactgtaaatggtcaaaggctcaagaaatacttagcagaccaaatccttccagaggtgacatcggttcatctccaggaacttcttgatgattaaaggagtaaaggagtcaagctaatgactttaaacaagctcacttggga

SEQ ID NO: 151991 - DNA, 386 bp, Arabidopsis thaliana landsberg
agtaagagacagagctcaagcaacagtctcactcgagataaaataaagtcgtgattttgattggacccatgattctcattcgtataaattatcatcttttggcttaatcggaaaatggacgttctcgccttatcctcttccgcttccgccgccgcaccctccgcttctctcgccggaaaattcctgtcgtttccttctagggttagagtgagaagaaaccgagagaatttgttagctaaacagaagaagtttttagtttctgcctcgaaaagagaagagcctaagctcaacgaatgggatcaaatggagctcaactttgaagtaaactcggcgaagacccgaaattgactttggctaaggtgagagatttcgtaaaaaacggttcc

SEQ ID NO: 151992 - DNA, 3115 bp, Arabidopsis thaliana landsberg
tcgatgcttatgcagattcacaattttatgagaaattggacaaaaccctgatgtcggattccgtcaaaacgacggtggatccgcttttgaaagatttggatggtaaaaaagagagtttccggcggaacgttgtgtctatggcagctgagttaaagcaagtgagaggtcgtttggtttctcaagaacaattctttgttaaagaaagcttttgtagaaaagtaagttccttttattaatttgttaatcttctcactgttccattgtttttgattctctgtttgatttcttacctttatgttattgttactgctttggtagggtcagaaatctagtttcaatgttgagaaatgatttgtttttttggtttcttttaggaagcagagaagaaagctaagaacatggaaatggagatctgtacattgcacaagaagttggaagatagaaattgtgagcttgtagcttcaacttctgctgctaaaaaggtttgtttattctctcagaacccttttcatcttataatatagtatgacttaaaagacttccaaatttgatattgttgtctgaaaagtttggggctttgagtagtgttggtactgaaaagtgatcatcatagcttggtaatcaatggcccttttagatcttgattaaagtagatgaagctgagtgtggaaaaagaatctcaaatttattataattaatgtccaatgaagcttgaccttttcaaaaagagttccttgaatggttttggaatgctaactgggtcaatgaagatgaaaatgggtctctagattggcctgaaaagttatattttcatgaaatgctagaattgagaatcattgaggtaattagtgaatggattatttcatacattcattcattctaagaacgttttgatcttgttttgggaaaacagtttctagaagaagtggacgatctgagatcacagctagctttaacaaaggacattgcagaaacaagtgctgcttctgctcaatccgcacagcttcaatgctcagtgctaacagaacaacttgacgacaaaacacgttctctaagagaacacgaagaccgtgtaactcatctcggtcaccagcttgataatcttcagagagatttgaagacaagagaatgttctcaaaaacagctgagagaggaagttatgagaatcgagcgtgagataactgaagctgttgcaaagtctgggaaaggcacagaatgtgagctcaggaaacttcttgaagaggtttctccaaagaactttgagagaatgaacatgttattggcggtaaaagacgaagagattgcaaagttaaaagatgatgtgaagttaatgtcagctcattggaaactcaaaactaaggaacttgaatctcaggtgcagcatccatatctctgtccttattcttgtgttctgtcgcagaaactgataaatgaacattttcagttggagagacaaagaagagcagatcaagagttgaagaagaaggtactgaaactagagttttgcctgcaagaagctcgtagtcagacaagaaagctacagagggtaaagtcctcaagatttataaagcttttcttgatttagtataatgagaaaactaaatgtttttattgtatgattgatgaatggaacgcaggcgggggagagacgagacaaggcaatcaaagagctaagtgatcagattactggaaaacagttgaatgaatcggtttcaggggagaaacaaaacttctgggattcttcagggttcaagatcgttgtgtcaatgtcgatgttgatattagttattatctccaaaagatgagttcttgtgtcttgaactctctttctttttgttggtgtgtaaatgcagtagttgcagatagtagtcagataatggtgcatattattactccttgaggtttagcgaagagaaatcttgcttccctttgttaagttataagtttgttcatgtgtatttgaatcatttctcaaaaagaaaatgggaaaaatgtcattcaaataatcagtttaccattttcgttggttttaaacatgaattttggacctggtgatttaaatcctcaatattatgttgacttttagtttaaacacaaattttcattgattaacagacattctcagaaattccctagatcacataccctttatcccaaaaccgatttttggattccctcttcttcttcgaattcgaagtaatctcttgtctggaggttgaccgatggcgtaaaaaaagaagaatttgtatctcaattagtttagtttacaagaactcttcttcttcgaattcgaagtaatctcttgtctggaggttgactgatggcgtaaaaaaagaagaatttgtatttcaattagtttagtgtacaagaactcgtgattaaattgaaagtcaaaataaaaatgagaatttaaattaccaaatcaagagttttcatattttaaatggtaaactgatgacattttccctgttgaacaatattggcccataatgtaacccaattactcggcccaattacgtgaaccgcctttcacctggcttaaggaataagtaaggaccattcatgaactcatcacttttagctttctggcttctctgcttgagctctctcgagtctgcctcaagtgtttttgggggaaattgatttcgttgagaaaaaccctaaattccgaacttgaagcaatttttcaatttcgtttgcagaaaaatggcaaaggataatgaagcaatcgccattaacgatgcggttcacaagcttcagctctatatgctcgaaaataccactgatcagaaccagctcttcgcggcgaggaagttaatgtctcgatcagattacgaagatgtcgtcactgaacgagcaatcgctaagctctgtggttatcctctttgccagagatttctcccttccgatgtttctagaagagggaagtatcggatttcgttgaaggaccataaggtttacgatttacaggagacgagcaagttttgctccgctggttgtttaattgatagcaaaacgttttcggggagtttgcaagaggctcgtacattggagtttgattcggtgaagttgaatgagattttggatttgtttggtgattctttggaagtgaaag

SEQ ID NO: 151993 - DNA, 647 bp, Arabidopsis thaliana landsberg; identical to SEQ ID NO: 50608

SEQ ID NO: 151994 - DNA, 715 bp, Arabidopsis thaliana landsberg
ctcagccctaaaaaagcttcacgccggtttgtttcaccgccgttgtgcttcttcttcttcttctacctgggttctctctcaaacaaacaaatctccgacgactcattcgttcctcccaggtaagcttcttcgaccaattttactttcgcatttttctccgattcacagaccctagctgttcccattaatcaggatttagccagaaacttctagggatctaattgtttttgaatctgaatctgtatttgagtttatcgttttgtctccttgtgtagaatcagaagatttagtgaaatggctttttgcaataagctaagccgtttcgtgaggaggcagagtgagaatgcttccatgattggctctctcaggtctttctctgctgatgccactcaccatagattccaccaggagactcacaattttcttgagccagaaaactatattggtagctgggaagctccgagtgatccgaaagatgcagagagaaagcttgctcagcttaggagagattatgctaagaaagttagagtgtatcgtaaagagtacattcatgagattgagatgcttcgtgttgagaaacagcgtaaggatgaggctagattgttggctgaacgagctgctaatgaagagaggcgactcttgaaggctgaggctgctaaggttagagctgaggaacgtaagattgctgacgaagagttcaggcaaactctggtga

SEQ ID NO: 151995 - DNA, 506 bp, Arabidopsis thaliana landsberg
tcttgttttctctaaatttttcaaaaaacctttagaattttcatttttttacgattccgatgttaactgtttctccggctcccgtactcatcggaaacacctcaaaggatacttacatggcggcagatttcgcagattttacgacggaagacttgccggactttacgacggtcggggatttttccgatgatcttcttgatggaatcgattactacgacgatcttttcattggtttcgatggagacgatgttttgccggatttggagatagattcggagattcttggggaatattccggtagcggaagagatgaggaacaagaaatggagggtaacacttcgacggcatcggagacatcggagagagacgttggtgtgtgtaagcaagagggtggttgtggtggtgacggtggttttagggacaaaacggtgcgtcgaggcaaacgtaaagggaagaaaagtaaagattgtttatccgatgagaacgatattaagaaaaaacctaag

SEQ ID NO: 151996 - DNA, 883 bp, Arabidopsis thaliana landsberg
  unsure (1)..(883): unsure at all n locations
gggcggcaagagcactctggaaaactgtcaggttttgcaggtatgcagtcactcgtatgaaaatttaaactaacttataacaaactactatttaaggtttccatgttttaaaccaacttacagtttattcatatctacgacaagtcttcaatatctatgtttatagccactattctctcataatttgcctcatgaccggctttaaagctttagtggaggcttctctcagacgatcggatttccacagaacactctcttgcatattcttctttgcgtttacttataaactctctccatccaaaacttcaaaccaaacatactcttttaggcctgttgcttctttctattacttgtaatcgtttactttgtttcgtttctacatttcaggcaaaggtaaaccgatcaaagggtaataaaaccgatatttctcgatccgagcttatccaaaggagttcttactgtcgagttgctggtaaatctactctttcttctctatgaaacaaactataactaggttttatcctaaacctttacgaaaaatttgtaggccgagatatggatctgattgagctaacagcttacgggaatgtacagcgtgcacctacgtccagcggatgcagaattcagtgatctgttgaagatctattgatggaattgaaaatgtttgggtttctcaatatttacttggtcaagagtctgtaaacttttagttcttctccgagttacttgtgtactcattagtcattatctttcctatattgtgtacatgtaagtaagttgtaagttgtaacattagtcatttattgctcaatcttcttctatattcaattaagttcnactctttttattacattttcacataaaaaaaataacgccttctact

SEQ ID NO: 151997 - DNA, 1354 bp, Arabidopsis thaliana landsberg
cagaaaatcgataacccacgttgggtttcaggaatctatggctccggtgaggttcagaccgaagaaagctgctgtcttgatatgtctcttcgaaggagacgatggtgatttgcgtgtgattcttactaagaggtcttccacattgtctactcactcaggtttgtaattgcttttcgaaagtttggtttgcttagtctcatataaatctgatgatgaacatctttggaacaattttgaaatttatcattgcaaacacaaatcattccaatatgagcggaacatttaaagttctcgtctttgcagcttttatttaactgttcaaaccttacaaaattgttgcaggagaagtttctttgccaggtggtaaagcagaagagcatgataaggatgatgggattactgcaaccagagaggcagaggaagagattaaattagacccttcgcttgttgatgttgttgctttcctcgaaccatttctatctcaggtatcaaaaagtgctcattgtctcattttaaaaggaatgcatgttcatatcaatagatctgggagctgcgttttgtgaggccacagagttacatttgattgttaggcggatttgtgttttgaagtgtcgagacaatattcgaccactggttctcttaggggtttccattcactgattttaaaccgttgttcgtagttttattacaattttctcgtatcctaggagcagagtaatggtaactacagtgactctctatctggaaaatccttaataattttcagtagtggctgaagccataatatccttttttattgttggtttaggctctatgccaaattgtttctgccgtatacaaagctgtctttagcttttacgaagtgttttgcttatctgtgcttcattttccaatgcagcatctgcttagagtaattcctgtggtaggaatattatgggacagaaaagcattcaatccaacaccaaatcctgcagaagtggaagccgtgtttgatgcaccctttgaaatgtttctgaaggttcctctcgtctcttttcttcaaggacgctttatagttactgtgtttatttactctgaaacatcgctggttgaaatatatcttacgcaggatgagaaccggagatccgaggagtttgattggatgggagaaaagcatttggtccacttctttgattacaaaacaggagatagtgattatgttatatggggcttaactgcaagaatcttgattagagctgcaacagtggtttatcaacgaccacctgctttcattgaacagaaacctaacttgaagtactccaaaatggtaggcagttgctcaattgtgttatccagacgtccacttgtactataa

SEQ ID NO: 151998 - DNA, 570 bp, Arabidopsis thaliana landsberg
  unsure (1)..(570): unsure at all n locations
gactccaatatgcttacaggttcagcaaatatcaaagcatgcaattgcntgtgccctcacaaaattggcatatctccgccatgaagtgaaggaccccgaaaaggcaatatccttccttcaagatttgctccattcatctggattaagtgaagaccaaaagaggctcctgaggacaagcgttttatgcagggagcagttagccaaagtcataagcgactcagacatagagggaatcgaagaagggtactgaaacctggagtattctattcttctcattcgcttagttactaattctaaatcttctgttctaatcctgtgccttttttaatcgctttaaacagctatgtggaactggattgcagcgaattcggcctgcaggaatccctggaagcagttgtaaaacaagtgatggagctgagcatagaacgtaaagtacaaatcagctgcgattatcctcaagaagtttcatcaatgagactgtatgccgccaccttaaggcttcagcaaatcctctcaaaaacaaaattaagcagcatacgcttcactcctgcgtggaaaggagtgtttgtc

SEQ ID NO: 151999 - DNA, 1125 bp, Arabidopsis thaliana landsberg
tttgacaagaaccttaccacgggacttaaggacattgtttggaaaaccatcgacgaagagaaagaggaaggaaccgatggtggtaagtatctgccttgaatactctgttttttagataaagctcctagaaaaggagaaactaacgaaacatgtaaacacaaatcctgttttgtttcttcatgtttcaggtggtactaatggtgccatggctaaccggacaattgcaaaacagtcgacataagctgtttacttttttctaatatagattttgttcgttataaattactatagtagtacggagtggttttgaagttaatacaaaaggaagcgtcaagaagtggagcagaagcactttgaacccatattggggaatggggattatatgatattttaatcatgtttgattccatggaatgttgtgaatagcatatgcgtgttgcgaggttcttggcttgaatcgattaaccggaaagtaaaagctttacagatttggttttgcaatttctatattgtcggacgctgagattcgatagatatttcagttcaaatgtactgaaaacaaactaacacttgtgtgtgaaccaaatcgaaatttattttcataattttaaaacctgaaaaaggaaagcggactgaaaaccaatatcagtgtagacaaaacaaactgaatatatagcatgacttgaagttagtgagattttaaaaccaaaatcaaggaaagaaaaatatcaataaagattatgtcggaccaaatactataacaaaaatttagagatggaaaacttggtggccaagttactctgtattaataatgagggcgaagaagatgtgaacaagaacaccaattcttcaattaggggttttgttattcttctgtattactctcttgtttattgctaagaaacaggtaaggctgtagctaagagtgtggaggaggaggaggttggtcttcataatttggaaacaactaatgtggatgtggatgaggagtttgttcctcacagtttggatgaagctaaggctgttgtggatgttgtagatgtggaggaggaggttggtcctgttggtttagaaacagctaaggctgttgtggatgtggagaaagagtttggtcctcgtggttag

SEQ ID NO: 152000 - DNA, 933 bp, Arabidopsis thaliana landsberg
gtacttgaataataactatttgagtggagggattcctgctcagctgtcaaatcttacaaacttagagattgtgtaagcagtctacactctccatctctctgcaataaactatatcactagatctctgatgtctgtttgattggttttgcagttacctgtcttacaacaaatttattggaaacattccttttgccattgctcatattcctaaactgacatacctgtaagtctttgtgctagatcgctgatctttctctttgtctttgatttgcttactatctaaaagaaaatatgcattctaatggcgatcatgatgttgatgaaaccaggtaccttgatcacaaccaatttaccgggagaatcccagacgcattctacaagcatccattcctcaaagaaatgtgagttctcacccaatttttgaagagttcatcaaagctttgactcagacaaaatagtaaacccatcgagtataagaatttgaacaatgtgaactgttttgtgtgaaatccatctggatgagtttatgatgactggtttttcagaaaagttgaatgttttctttcttcattctccactctgacgataaggagttctgtttctattttgcaggtacattgaaggcaacatgttcaagtcaggcgtgaacccaattggtacccacaaagttttagaagtttctgatgccgattttgccgtgtgaccggatagaagattccaggaaggttctcgagaaaacgtctcagaaccacctagagattgttccactttagccctcttcactattattattttttgtatggtctgtggatttgcaaatgaaagaaagcataagactacaagtttttatcttcatattgtatagttagacacattccactaatctatatttctccttaatcaaatgattatatatatttagattggaataaa

SEQ ID NO: 152001 - DNA, 1075 bp, Arabidopsis thaliana landsberg
agtaaggcggcagatccttgtccaacacttttcatagcgaatatgggaccaaattgcaccgaagctgagctaattcaagttttctcgaggtaagaatactctattctccacgcaaaactgtaaccactagagatagttttcactctctttcctctcagatgccgtggattcttgaagctgaagattcagggtacatatgggactcctgttgcatttgttgatttccaggtacagctcttgcaatatctttttcttgaaatcgagagagatcctagtttgtttaaagagtgaattgactctcgcatgtttactttgatatgtggctttgcaggacgtcagttgctcaagtgaagcactacatactcttcaaggcacagtgctttactcatccctcactggggaagttttgaggctgcagtatccttcacttcttcccattttatttctttgttttttactcgtgggacttcaccgctttccgaaaaactgacttaacaagcaatattagatatgctagatcacggatgggaatgcgtaagaagattaattagggttagaattgattaagctctgataagtaaagataaagtagaaatgtcatgccaaaacagcataggtactgaactttgctatatgtatgtatagttagagtccgcagattataatttatcatggttccttcatacccaaaggaggagaatagtgttgttggggtcgtcaataatccatatggtaaagtttaatcgtcatcgtaattagcaaactaactgtgagttcccgtcaaagaccccttgctgacccacacagaagaccacgtgcccaatgcgactcaaagcacatcataggcccacgatcctaccaggtactggactctcgccatctagggtgcggcactccaccgcttcgcctagcagcacgacgctttttttgctctcccacagccccgttttcacggtttaggctgctcccatttcgctcgccgatacaacggaatgtaagcatagacacagggaacgggttaccgactcttaacggtcaaagcgaacccgttcattcttacattctgaattcttaa

SEQ ID NO: 152002 - DNA, 946 bp, Arabidopsis thaliana landsberg
atggcttggagcttcagttctcagtatcggagaatggtttatcaagaagatgcctctcgtaagctacatctactcagcttctaaacaaattagtggagcaatctcaccaggtataattttaccaaccttacttaccaacaagtactaataagagtcataagactaaccttattaccttttttcatcagatcaaagctcaggtgcattcaaggaggtagcaattatcagacatcctcatatgggagaatacgcttttggtttcattacatcgactgtgattcttcgaggccgtgctggtggagaagaactatgttgtgtctatgttcccaccaaccatctttaccttggagacattttcctcattagctcaaaggacatcataagacctaatctctcagtccgggaaggcataggtaacttgtgacttgatctagcaactcttaaaacgcccctggtgccttaacaaatccatctcattgctctatttttgcttttttcaacagaaatcgtcatctcgggtggtatgtcgattccacatatgctaacaactctggactcagagactattcacaggtcagtagttggaacctttgccatgccacctgtgtgaagtcgatgaatcatagttttgatccaacgatcaaatctgaattggagctctctggttaactgacatcaacctttgcttatacaagaatgttggaaagttttggaattttagagtttgaatatgtttgtctaagtggagttttaggttggacattggcattatgcattgaggaagttccgtctgggttttgctctggtcatatgtgcacaagatatagcttccacagtgtttagtatcctccatgtcttctcaagtatttgtctttcacatcagtgtgtttgtattgttctcaatcaccagataaacggtttaagaagacaagagtgtaatgttgag

SEQ ID NO: 152003 - DNA, 511 bp, Arabidopsis thaliana landsberg
tcagccgtggcaattggcgtccacatactcattagcataaacttagtagagaagagcatcgaggtttcgtttaccctcaggacctttagagtaccaggaagaaacatattgaccatacacaacttccttgtaagacggtggggagagttgagaaactggtgctatccttgcagtcttggagggatcatgaaaggtagcgactgataaccgcgcccgattcgcattagtcacagctctatgttgagcacttttgtatcttccattggtaatgatctgcacaagaattttaaaagagcatgtcagaatcttctctctagcttgcattctctatcaaagagagaatagaaacctcggtttgatcggcaataagaacgagaatagcatcagagataggaggaacagtgagccattgagcatccttgtaaagctgaagaccttcaacatcatcttgaatcaagagagtaatggcaccaaaatcggaatgagactgaagaccaagagtgagctcagg

SEQ ID NO: 152004 - DNA, 860 bp, Arabidopsis thaliana landsberg
tcaagatgacaaagcaagggaaaaagaagcaatggagatgagaaatgtgataaagaagtagctaactgaggaggcagaggcggttgagatgctaccggctggaccattagcgggattacctggcaagataccaccaccaggaagcatagatgatcttggtgaagatgctatggatcctggaccatcaaaatctggtgaaggtgctggtgcatacattacatccctaggaacagtatctggtggagctagaagcggcgcaaattgttgaggtcctgcatttttaccattgcacttacatgagaccgaattctagcacatgatttcccttacaaagataacatggtttaaaaagaacttaccgggacatcgaggttgaagagacctggtcagcctataaaacgaaagagaaggaaatagtttcgaatcattagtaggggtatgttgataagaggagaagacaaagtgaatgtatttctacttacatggttaagatagtgccgttggctataccgttgtaatcacaagttgtaacattacagccagcgctagtctgctgcaccgtgatgttaccgagcatgaggttgctgtttctacactgcatacttgagcaagagacggctagggaagcaggctcacaatacaaactgcatcacatcacccacacacaacacaagtgagtcaaaatgcaatcagagatgaatttgattagtcatatcaaataataaagcttagatataattacttgcggctcccaagcgcacagctgcattgcacacagtgacctgcagctagagcatagctaccatttggaacaatcaatccgaaatccgaagcgtatctggggaactttgaagcacaag

SEQ ID NO: 152005 - DNA, 1341 bp, Arabidopsis thaliana landsberg
  unsure (1)..(1341): unsure at all n locations
agaaataagttttctggttatctactaaagctgtagggttttgcatcaaccaagctactgcagagggtgaggggcttttctatagtgatagctacaactctcatcattgtccactggagttcatgaactttctctacacgtgtgacgnnnnnnnnnnnnnnnnnnnnnaacccacaagtcgacttgcaagctcaggatcgtgcccataggattggtcaaaaagaagaagttcaagtgtttcgattctgcactgaggttggtctcctctccgtgaatttcaagttaaaacagccatgagaggtttaaaattaattatgtgttgtttgtttacagtctgctattgaggagaaagtgattgaaagagcttacaagaagttagcacttgatgctctggttattcaacaagggagattggcagaacagaaaagtaagtgcgttatacagtgattgctttatgcattggttcatctctgacagaattggtatttatcttaactatgcagctgtcaataaggatgagttgcttcaaatggtaagatatggtgctgagatggtgttcagttctaaagatagcacaatcacagacgaggatattgatagaatcattgccaaaggagaagaggcaacagctgaacttgatgctaagatgaagaaattcacagaagatgctatacagtttaaaatggatgacagtaagggtgtcacttacctactatttcccctattaggttgtgtgaatattgtaatgttttgataatctgttgttttatttgttgtaggtgctgacttctatgattttgatgatgacaataaggtaacttgtatatttctttgcatagtcttaactttcatgtcatatccctagctttgctctgcattactgatgataaaatttactaatatatttgtaaatttgttcataggatgaaaacaagctcgattttaaaaagattgtaagcgacaattggaatgatccccccaagcgggagagaaagcgcaagtaatgattacttctgtcttatacattgtgcagtcctattttgccagtcttcatatctaaaagaaacatcccttttgttttatctactgtatcttcagctactctgaatctgagtactttaagcaaacattgcggcaaggtgctccagctaaacctaaagagcctagaattccgcgcatgccccagttgtgagtacctcaacaacctccatcttattgttgaatgccttttccctgttttgatgatttttcttacactagaaatctaatttattgtcccctctttcaggcaccatttccagttcttttaacattcacagattgaccgagttggatgaaaag

SEQ ID NO: 152006 - DNA, 559 bp, Arabidopsis thaliana landsberg; identical to SEQ ID NO: 39546

SEQ ID NO: 152007 - DNA, 497 bp, Arabidopsis thaliana landsberg
tcatcgattatcagtttctggatttcgctactacagatttgtcccgtcttgagttacgaaatcatggtaacaatgctcgatcttcgattctgtgtttacgaatgctgccctggatttgaatttcgcatctccgattcgttcttatgcttcttcttcattagtttgatacttggatctgctcttgatcggtggtttcagatatttctcttcaaattattctttgcagatagaaaatttggtgactttagtttgataatgctagcttctgggtttgatttttcgtagtttcgatcctcctagttcagttcaatggcttcaaatttgaaacctttgtttgttggactctttcttaagctggtgagttgatgatcctaataagaaaccaatggtgtgtttttgatttgtgtgttttcagatacattttgtgaatctaaatagccggcaaggaaaggtaaggctcaccaaatggtattctccttatgcacagaaggaaagat

SEQ ID NO: 152008 - DNA, 7863 bp, Arabidopsis thaliana landsberg
  unsure (1)..(7863): unsure at all n locations
atcgattgtttcgttcttcttctttcttgtaaccaccattatttctgttatatttccgattcgaattcagtcaattcttctcgaatttcagtcggatttcttagagatgccgcttgagacgcgtggaggaggtcaacgaaaaagaaagagagaagtgccggcgaagaacgagaaagataaggtgctggcgaagaaagaggaatttaagatgccggcgaacaaagagaaagaaaaggtgtcggctgaggagaattgcccggctcgaacgactgcgacgacgacggttactatggctccaacgacagcgatagacgcgacggctccaaagacggctccaaggacggagaccccgatgcatgaggatgctacgttttatgatgctttagagaaaattaccgttgaagaaattcaagagaatgtgcaaagtgatgaggtgctggatgagaatgaaagagaagaagcaagtgaagaagaagaatcattgagtagtagccgaaccttgggctccaattccgatccagaggaaacggagacaaacgaggacctcgcgtgtgctaatcccgtggaggaggaggagagaggagaggagctccgagagagacgaggacgtcatagtgaaaaagtctctggaggagaggaccatagacgaggacatctcaatggaaaatgtggtaagtattccattttgtaataccgctttaattgggtaataatgcaattgtgaactgtggacaatactagtaacattgagaaatactaagttgatatctaggtaatatttgcggatgtgggtaatactttagagtaatacttcagttgtgcattgtggatagtactagtaacattaggaaatgctatgttgatatctaggtaatattggcggatgtgggtgatactacagagtaatactacaattgtgcccctgtggatagtactagtaacattgggaaatactacagatatgtcctggtttttactgatttataacattatttttagaatggtttttagagtcattatagtctttttcgtatgttttgagtcatttcaggtacacttacgcatgtgggagctatggagcataataaggaattttggaagcttttcagcaatgaagattatcaaagacgttttttcacgtgatggtgtcgatcgacactacgcatatgttgatcgacacccttatttcggctgagagaatttctgtcttctgccaagtctttgagaagccctgaagttttctttatttgcaaagtagtccctgcacgtttttagtcacttatatacctaattatttggtcattgttagacaaaagtttagttttattattttgagatacacttttggagagaagaatcgaatccctgtagagaggattttgaactctttttactcttattcttattcaatacaaactattcaaattacgatttgtgtttctgttatcatgtctgagtaatcaccttgttgggttttagggagtttcaatagggatttagatggattagtagctcgaaaaccccttagaattatttttagagttcttcatcttgattatttttattgctagttttagattgatcacctaaaacttgatattagataataggtatacccgccacaggtacttgttatttgaactattatatatgagcctaagcatttaagaaagaacaggtaggctcatagaagggctctggtttagatactaggtgaactaatcaagcttgataataatgcatgctttagcataggatttctcgacttctccggttatcttagctttaagtatagagagtttcgcggaacgccactggctactctagaatcatagtttgagttcgagaacggtgcgttaacaatcctaatattagctaaatctacaatttatctatctcccgagacaattccttagacctgacgctttaatcacttgaatctacgactcatttacttgcttatttgtctttaatattcaattacttcatctagcttattaaacaacatcataagtctattgtgtgaacatcgagagttcagtggaattcgacccttaagtgcgaacgacgatctcttatttgagagagtaaggttaaggcagtttaagctatatcaaatttggcgccgttgccgaagttctattttagttcaccattagactaggtgtcattttaagtgtagatactacttttctaccacctattaacgtgtttctttgtcttttggtctcttgtgtttcaggtaccttcagattgacaatcacgttcccatggcagactttcacggttgtgtcgaccgacactatcagggtgtcgatcgacaccctctgtagaaatagacggctacaataggcgatttagcagaactgacctcttctacacaaaccgatcagcattcaagttacctccttttgaaagagatgactntgctatacaccctgcctattatgatcttgtatctaaaggaaagtttagaggagctcccgatgaatcaccattggatcatttggaagtcttcgaagacatcgtttcctctattaaagcagaaggtataccggctgattaccttctttgcaaactcttcccccactctcttgcgaccagatgaacatcatggttgcgtcaactagaaccaggttccttaaccagttggactgatacaaagaatccattcatgattcacttcttcgatgaatccgtgacagaggcacttcgtttacaaatctattcgttcactcaggctccagccaagtcccttacagcagcttggctccgtttcaggtcttatcggcgagaatgtccccaacatggcttcgaagagagctaactcatcaatctattctacaaaggaatagccaagccataccggagtcaactcaatgaagcaagctactgtcacttcatgacaagaaccactagtgaagcattactcctcatcaccaatgctttaactagtctttcgacacaggaagttgacaccgaacgaagactttcagctgagattgccaccgcaagcaaagaggaccatgtttcagcaatctttgctcctacccaagcccccactccaccctccttagacaaccgactcgactccatgcatgcgcagattcttgcaagccaaacaaagctcgtggatgagtttaatagcaagtacacagatcttaatgggaaaatcaacaatccgcaatctcgtatccttgagccttctcctacatcagcatctatcaatgcagtcacacgacgtagcggaaagcagctcaatccaatacttcagagcgaacgttcagcttaaccttcatcttttccaattgaagaaaaagagtcagtgtcgatcgatacatcaaggtgtcgatcgataccaattactcttgacgtctctattttgcctttgtcgagtagaatcgataatttcacggaggaggaggaaattattcccgatggtgtcgatcgacaccctgttcgatcagacaatgtgcaaattccagctgcaaccaagtcagcaaatcggcgaattcccttccccaagagtcctaaaaagtcaagacaagccttagatgatgttagatgcaaggctatgattgataagctgattgttgagatgcctctagttgaagctattcatctatctcctacaatcataaggtatgttaagacaatggttactaagaatttgacgaaagaatgcagtgttattatgatttcagagcaaggcagcgacattattcaggaacgaatcccgaggaagctacctgatcctggaacttttgtacttagtgtcaccattaatcatgattccttcccaagagctttatgtgatctcggttctagtgtgaatctgatgcctcgttcagttgctatgcgtcttgggtattccaatcttgagcctacctttatcactcttgtgttggtagatcgttccacccgaattccagatggaattcttattgatgttcccatgatgaatgctgctaccaggaaagaccattttcccttaccatttatcgatcagatgttggagatgttagcaaatcataaatactattgtttccttgatggatactcaagattctttcagatcccgattcatcgagatgaccaggagaaaacgactttcacttgctcttatggtacatttgcttatcggagaatgtcattcggtctttgtaatgctcctgcaatatttcagagaggtatgatgtctatcttcacaaacatgattgaggatatcatggaagttttcatggatgatttttcagtttatggatcatcatttgaggattgcttagcgaatctctacatagtgttagcaagatgtgaggagaaacatctagttttaaattgggagaaatgtcactttatggtgcacgataggatagttctcggacacaggatttctgagcatggtatagaagttgatagagctaagattgaggttatgacaagtcttcaagcgcctgataatgttaaagtagtaaggagtttccttggacatgctgttttctacaggagattcatcaaagacttcgacagaatcgcaagaccattgactgctttactttgtaaagaagtcaaattcgagtttacacaagagtgtcatgatgcctttcagcagataaaacaagccttgatcagcgcaccaattgttcagccaccagattgggatttaccttttgaggtaatgtgtgatgcgagtgattttgcagttggagctgttctaggaaagagaaaggataagaaacttcatgcaatctactatgcaagtaaaactcttgatgatgctcaaaggaattatgcaactacagagaaagagttgttagctgtggtgtttgctttcgaaaaattcagatcttatctcgttggatccaaggttattgttcacacagatcatgctgccttgaagtatttgatgtataagaaggatgctaagccaagacttttgagatggattttccttcttcaagaatttgacatagaagttagagataagaaaggagttgagaatggtgtagctgatcatttgtcacgcattaggatcgatgatgatgtccctagaaatgatttcttgcctgaagagaacatttacattattgatacagctgaagacgatgactacaaacgtgacaggttgcaggatcgtgcttcagtgtcgatcgacactcccgttatgtcgatcgacactcacatttcagaggaagttgatattcgtagttgcgcgatggtgtcgatcgacacccttgcacctgttgatcgacacccttctgaatcgataagaaattggtcaccaactgagaatcgcgccgtcacatcggtcgagaaagattatccatggtatgctgacattgttaattacctagctgcagatgtggagcctgatagtttcacaaattacaacaagaaaagattcctaagagagattaggcgatatcattgggatgagccttatctctataagcatcgttttgatagaatttacaggagatgcattgctgcaacagaggttcctgatatactatcgcattgtcacagctctagctatggtggtcattttgcaactttcaaaacagtatccaaaattcttcaagcagacttttggtggcctacaatcttttgggatactcagaagttcatatcacattgtgacccttgtcagagaaggggaaagatcagcaagcgtaatgagatgcctcagaaatttatactcgaagtcaaagtcttcgattgttggggtatagattttgtgggaccattcccaccttccaacaagaatctctacatcctagtagctgttgattatttctccaaatgggtagaagctatagctagtccgaagaacgattcagcggttgtcatgaaactcttcaaatctatcatcttccctcgttttggagtgccacgcatagtcttagtgatagaggtaagcatttcattaacaagattcttgcaaaattgcttttacagtatggagtccagcatcgggttgctaccccctaccatccacaaacaagccgacaagttgaagtttctaacaggcaaatcaaagagattcttgagaaaaagtgggtaaagcgaaaaaggagtggtcttacaagttagataatgcactgtgggcctacagaacggctttcaaaactccgcttggtaccacaccttttcatcttctatatggtaaagcttgtcatcttccagtggaattagagcacaaagcagcttgggcagtcaagatgataaatttcgacatcaaatcagctggagaaaggagacttattcagttgaatgagcttaatgaaatacgaattcacgcttataacaactcgaagctctacaaagaacgaacaaaagcctaccacgacaagaagattcttactcggacctttgagcctaatgaccaggtacttctttatgattctagactgacaatatttcctggcaaattgtcttctcgttggacaggtccctacacagtccactcggttaggccatatggaacaatcattctcaaaaacaacaattgcaaaccatttggtgtgaatggacagagagtcaaacactactaggctgaagctgagattccagtagaaaagcctttggatcttcaggacccacctgttgattaagcaactgcaaagttaagctattgactataaacaagtgcttagtgggaggcaacccactggtatggttttctttctctttttcttttatttttcgtttttcttttatttttctcgcttactctatatttgagtgccactggggacagtgtcgtttaagtctgggggaggcagttactaactatgtttttctttttgagtcttattcttactcttttttttcttttttttgagtcgttttattgagtcaaaattttgtttggaattatgatctctattctttagattattgcctggttgattaatgctgcaggttcgactcaatccgactaatggaaatctagatggcaaaccaacagaccaatgtgataaaaagaatatgttactctccccttataaaaagaaaaatataatgagatattgagacgattttcagatagtgtataggggtaggaaagtttcctatgaccccattattatacattatttgaaatgatctattacaaaggttggaaaaataccgaggatgtcgatccagtatgcgagttcccctttgtttactctctaaaaaggataagtctgggggagagaaagaacaccaaagaaaaagaaaaatggtcgatttatcatggtatagtacaggaatgagtctagaaggatcttgaatgttagcttgtttgatgagacccagcgatgaaagcctggtggatatagttgtggaacttaggtatggaggctagaatgttgtataagcttgtagagaactacatgttgcttaggatttgattagacttgctaagcatatggatttggttagaatgatcaaggcaatagaatagagattgttgggagttctttgttttcaaacctcttccacgggttcggcttttgtgttttgcttgagggcaagcaaagctaagtctgggggagttgatatatccctatttttaccgattttagctatgatttaggtacaggttttagaatctaattgtaatttctagagtcttttctaatccttttcaggtctttacatgtttgggatgcatttgaagattatggagcattctggagatcaaaagacaacttaagctgcagaagcaatccggagacaaaaatgcacgtagatgtcgaacgacaccacccctggtgtcgagcgacaccaatacctgacggtaatttcgagacgcaacttattgatgttttgaagatttccaaattcggcccagaactttttcctatgtttaattaa

SEQ ID NO: 152009 - DNA, 1753 bp, Arabidopsis thaliana landsberg
  unsure (1)..(1753): unsure at all n locations
caaagccgggagaagaagaaaatggcggtggcttctcttagtatttgcttctctgctcggccacatcttcttcttcgcaacttctctcctcgacccaaatttgttgctagtaagttatctttagcttatgttggtgttggatgaacaatatttcattgttttgatataatggaggcaaatttacgaattttgtatttctctgttctcaaaagagcaaactttagttactgttttgatcatactaattgaatttcatctgtttaattgattggttagtggctgcaatgagtgaggatccaattcgtgaatggattcttacagaaggaaaagcaactcagataacaaagattggttctgttggtggtggatgcattaatcttgcaagtcattatcaaactgatgctggttctttcttcgttaaaactaacaggtatattaattgatgtcttactaaacctctctggtattcatagtcaagacttttaatgttttgttgtttgttacactggttttaggagtattggacctgccatgtttgagggagaggctcttggtcttgaggctatgtatgaaaccagaacaatccgtgttccaaagccacacaaagcaagtttaatctttcttttctttctttggcgtatatacattattatttttgttgatctctctaatcatagattcttgtttaaaagtgttaacaggctggggaattgccaacaggtggatcttatatcatcatggagtttatagattttgggggatcaagaggcaatcaggtgataatgatgaatataaactatgaaccaatgttaagaactttagtttcatgggttcatggttattagtcattaggctgaattaggaaggaagctagctgagatgcataaagccgggaaaacttcgaaaggttttggctttgaggttgacaacactattggcaggtggaatgaattccattttcaaaaatcttagtcacttttattgagttgctgtcttctctcacaatcttcatgatgtgcaatgtgcctattttagtaccccgcagatcaatacttggtcttcggattggattgaattttatggtgagaagagattgggttaccagcttaagttagctagggatcagtatggtgactctgctatttatcagaaaggtttctttctctcttctctctcgttataaacttggtgagaacagattggtttaaggtttgaagaaaatatttgaacaggtcatacactgatacagaacatggcacctctctttgagaatgttgtcatagaaccgtgcttgttacatggtgatnnnnnnnnnnnnnnnnnnnnnnncgacaagaacaacgaacctgtcattcttgatcctgcctgttactgtataagctttcattctcaaattcttgatatattttaccattttcaagcaccgttttgatctcattcctcctccacagatgggcataacgaggcggattttggaatgtcgtggtgcgcaggatttggagaatctttctacaatgcctatttcaaggttctcttccttttctcacagtttctgtatcaactaaaatcaagtttaaaggttgttttgtttcattgctccctcaaggtaatgccaaaacaagcgggatatgagaagaggagggatctgtatttgctctatcattacttgaaccattataacctgtttggctcgggctaccgatcatctgcgatgtcaatcatcgatgattatctacggatgctcaaagcttaa

SEQ ID NO: 152010 - DNA, 245 bp, Arabidopsis thaliana landsberg
ttgtgttcgtaattacaggtaattcgaaagacatcaaaagcaagcaaaagatggctcaaaaggtggaagcacaaggaggtattggaggagatgtatgggatgatggtgctcacgacggcgttagaaaggtgcatgtagggcaaggccttgatggtgtttcgtttatcaatgtcgtgtacgagaatggttcacaggaagttgtaggaggtgaacatggaaagaagtcactaattggaatcgaaacg

SEQ ID NO: 152011 - DNA, 342 bp, Arabidopsis thaliana landsberg
gttagatccctagtcgaggacatcagagatgtacggcttcacaaacttgagactaacttaggatcatttcaaggtacatctgcagtaaaggtaattgttttttattgctacttcttgacattagctttttctcattacctctaaagagtgatttttaacaataacaatatctctaatttgagaatgtagatctctaatgtatcggcaatggaagtaaacatagtacgcccatttgtgataagagccttagaagcattttataagcatgacaagccagaggctgatgtagacagagacaccagaagtagtagacaacagcgtgaaaccaacaatgaaccaagg

SEQ ID NO: 152012 - DNA, 580 bp, Arabidopsis thaliana landsberg
ctccttaaaagatggaaatccatatgtcacatggtttctgatctgtgacaatcaatggctaaaaatggggagagaaggtaacaatagcttattataccacttcttttctcactgtccgtctccttgtcggatggctctttggagtttcttcttctgattcgttggccaattgtctagctgcaacttgagaaaccatcttctgcacagttgatccaaacgtgaaattcaacaaaaggtttaacagtattatttccacaagagaaatctatgatcgtctgtcttggtttcaacctttctctttgatgattgtggaacaagagtatctaggggtgcacgttctaaattccttttcttagcaaccgagcgagctgatagtctctttccactggagtttacaatcttagcttctacaactggcttcttcttggctgttttctgactcttctctaggccatcattgcgcctagcccgtttgctggagtatccaatcttcgtgccatcatcttggtttggctgttcatcccgcaagcgtgatgccaagttcttccatctcggtgcagaaacaaaatcagaatcatag

SEQ ID NO: 152013 - DNA, 1857 bp, Arabidopsis thaliana landsberg
  unsure (1)..(1857): unsure at all n locations
cttctctgtttctctctcttcttcttgcagttttggtttggaagaaagagaacgaagaagacgacatctccagagtttttggcaataatcttttaagaaatgggaaagcttttgtgtgattcaacggcgacatttcaatctccttcaccaacggttccttggagagaaccttctacagtcgccgtgtctctcgaagatgtagatcttgttgaccaatccgcggctgctgcggcggtggacgcggttgagaagacaatggccgccgcaactaccaccgcttgggatgaggtttttggattggaggaggcnnnnnnnnnnnnnnnnnnnnnnntacacgcgagaggtgtgttgtggaaacatcctggtaaagatgaatcctctgcttccgtcgttttccgtctctctcacggcggagaggtttcttccgacgggaactgtttgttcaccgcttctcagaaggctatggaggcgcgtgggatcgacgcgcgagatttacggcggcggacggtgaggaggtttttggaggatttcagatctgctagcgaggaagagaaggaggttattacggatgcgattaggcatatgtattcgccggatctgaagagtggttgggggattcatattgtccaggaagagaagttgttggcgaaaaaagatgaacgtgagagtcttgattccgccattgaagagcttttacagattgggatgcataggtacttttgctaactatggactcagatctggtatcgaccttgatgttttgtttttatgattaggggaaataggaagcaaaatgtagcattattgttcttcttgttatgattaagaaagatataatcttgaggtgacattgtgttctataatttctagggtttgtaatgtttattgattacttttcttcattgcagagaaactgctgcagagtcaatctatagagagaggtgtcttccggtgaatgatggacttagttggtctaannnnnnnnnnnnnnnnnnnnnnnnagaggttgagtatgatatcattaccttgcagtatacgggggatggggtgttatctgtagatgagaaccgagaaggacgtgcagctgcgtttggggatgacatagcaatcgagtgtctagccactgagttcaaacgagaaatctatgtggtgagtagttatctgatgtaacaagtttgttactttggttgtgtttttttttcccaaatgacatctaagtaaagttgtgaaatgttggtgttataggtgcaagcgcatggatcagatgggatggtagaggaagagaactgtgtgttctttcttcctcacaaaccaagaagtgaagttcttgaagtcccagtctttctattcatgaaaggcactggtaaataactaaacaccatttgatcaaaagtcttcaaatctatctcatatttttggacttggtaattactaaactcatctcactggttcaggttggtgtggtggtggagcagaccattacgagcccttgatagcgaatccatctcctctgatatctcatgagaaagtcgccctcgttctctgaattttggagcttcttcaaaatcacagtttttggtagttttttgttattgtattggtagagagaatcaatcatgttagggaggagagagagatgaaattcgctcaggttattattagcctgcgagtttgagctgttttttttatcaattgttgtagtttgagaagaagagtatttgattttttgttcgttattggggatgaaaacgggaaattctctttgtctgtttcagagttgtggctgtaatgtaaaagagtgtaaactcataagttttgtttgaaatgaaaagttctcagaacagagcaaaatcttca

SEQ ID NO: 152014 - DNA, 645 bp, Arabidopsis thaliana landsberg
agaagatgcgattaataattgcaaatctgacgttactccattgtataccaaggattttgcatttcaaaaagaacccgggtatgttaatgacacagtgcgtgttaggatcatggctgaactgtgcggcatggaatctcgagaagaccccttgtatgttgaggacagtgagctttatgccattcatcttaggaccaagaaactcagatccttcaaggttccttgctttctccctctttctcttagatatttctttgtgataaacttgaaaccttgtttcttgttagtgaatgctaatcttgataacagatttttctgactgatattagacttgaaaatttggtttcaataatgatagtcaatgaccaaaaaccttctaaaaacttagcattaatcccatgagaaaagcattagttatatcccattgcctaattttaacctttttattagcatcagagaaaggtcttggacgttttaacttcaaagagaagaagagagaaggaatatgagcagcttccgatttggtacggagatgcggaaatgggttctgatctggccactaaggaagagtctcaacaagtggaagccacagactccaaaagctcacttttacttgaatcagaagattcccagtgggagctattgtga

SEQ ID NO: 152015 - DNA, 1403 bp, Arabidopsis thaliana landsberg
gttctttgccggcaaatgctccaaagattcttcttttttctcctatcaacaagtccaacacacaaacttaatggcttccgcttgcgttaaaagtgccggtgtttcgccggagaagttctcgtcgtacggatggacgagccctcggatgtctttaaccagagacgacaacagacgctcttcctccgttgacaagcaacaatctgacccattaccggaaatccaagatccagttgtggatttcgagttttgccttgaggatccggtcacaatgctctctgccgatgagctcttctccgacggaaagctcgtacctttgaagttctctggccctaagacgacgacgacgacgtcaacgacagtcaacacaactaccaccgaaccaagaggatcaccagaggttctgaaatcatgccggagacttgagatggagatctctgacctcttctctcctaaagctcctcgttgtacgactcgatggagagagcttttaggtctcaagagactcgtcaacgccaaggaacaagaagaatctgttaaagcttcttcttcttcttcatccacaaaccccaaaacgtcatcgtttaagcaatttcttcaccggggatctaaatcttctaccgccgcatcgtcgccgttgcaaaaagaatcagatatctccgaatcaatctcagtcgcatcttcacgtctctcactctcttcatcgtcttcctctagccacgagatcgatgatcttccaagactctcgcttgacctcgataaaccaagtgcgaatccctttgctccgtcgcggactcattcacgaaaccttaaccaaccaagaatcagattagccaaaccaagacggaatcatccaccgtcgacgccttccgttgacggatcatcatcatcgtcggcgaacatcgaatctcggggtctcaccgtgacggcggatagtccgagacttaacgcatccggtaaaatcgtgtttcatggacttgaaagaagctcgagtagtcccggaagcttcaccggtggacctagaatgaagcagcaccatggaatgccgagatcgtactctgctaatgtcagaatcacgccggtgcttaatgttccggtttgttctctgaaatcagggcttttcttcggccagcttttctcatcgtcgtcttcatcgtcttcttcttctccgtctccggggaacaaatctcagttacagagcaacggaaacaagaaccggattaatcgaaccaggcttgaaccgaaattcgaacaattagagaagtaaaccggtttagtcagcaggttaaccgctatgattttagggggaatcttaacgcatttatttttactgggtcgttttgtaaactgaagttttctttgggagctgaatatgtaaatacggtttaacaatttcatttctcggt

SEQ ID NO: 152016 - DNA, 849 bp, Arabidopsis thaliana landsberg
gtgtatttgcgcaatgtttcaaactttttctaaaggttttggttttcatttttatcttaaaatcgatgcagagatctcaggtcacggttaccgtttcggattcaatcacaaaatgcacttatccaagaagtccagctttcaatctcggcttcacttcagctctctttctgatgatggctcagataatagtcagtgtctcaagcggttgtttctgttgtagaaaaggtcctgctccttcaaggtctaattggattatctccttaatctgctttgttgtttcctggtaattctcatcatttctaatccttttcttgcttcaagtttcctacttataatttgcttacaactagtgagtgagtgatttcgcgttactataggttcacttttgtaatagctttcctcgtgctgctttctggagctgcactcaacgatgaacacaccgaggaatcaatgaatgctggtacctacttttgctacatagtgaaaccaggcgttttctctaccggtgctgtgctttcgcttgttactattgcccttgggattgtctactatttatgtttgacttcaaataagcaaattgttgctgccacaacgacccaaggaacaggaatagcaatggggcagcctcagattccagagagagtagaagatcctgtttttgttcatgaggatacttacatgagaagacagttcacttaaaaacagacaaagcttgcttgtaaagcacgttaggtttagtagaagatttagacaaaatgattaacggatatgtgtttgattaagagtattgaaactttgtaatgattgttattcttgattgaagtagaaatctttgagaaccccaaaaac

SEQ ID NO: 152017 - DNA, 1748 bp, Arabidopsis thaliana landsberg
  unsure (1)..(1748): unsure at all n locations
atgctgatcatgggaggtgcagacacggagcctggaaaagattcaaacaagctggcaaatcgaacagttttagttcaggtttgttatgatattcaaatgttatgattccttattgtggagaggatcaaatatgtttcttattgtatcatatttgatccaataacagaaaaaactactagactacctactgatgttgggtgttgaaagccaatgggcgcctgttgctgttcgctgcatggtaagcaaatcttcttttttcaaattcttcttccttagccccttccctttttttgttagtattcatatttcattgtatatcgaaatttcattcctgatttgcgcaactgtcaataagttggaatagtttcattcagattctagaattcagctgttgaacattgtttctaggttgaccatgggaactgatagacttacagtgatctattagcagttttttttctagagattgttgcactttctttttagccaattgctgaacagttgtctgaagcaagtattttattgatgtttttttctaactggtcttttgcattgtgattctttgctgctagacatttaaatgcattggagatctaattgatggacatcccaagaaccgtgatatccttgctagcaaagttcttggtgaagatcggcaagtagaacctgcactcaattctatcctccggatcattttacagacgtccagtattcaagagtttgttgcagctgattacgttttcaagacattctgtgaggtttgaaactttttttcttatagatttttagttcatagtctaatgtgagattgcttcttctaatatagtatgtgattggatctttatctagaatctcattcactaaacgttttcagaaaaataccgagggtcaaacaatgctagcttcgactttaatacctcaaccacatcccacatcccgagatcctctagaagatgatgttcacatgtcatttggaaggtgccatcttcttttctttcttctgcggctttcgcagtgttgttttgaagggatctcactcttcattctnnnnnnnnnnnnnnnnnnnnnnnnnnnnnnnnnntacttctctagtattaaaacttatccaacttttttctatatgtgtcagtatgttgttacgaggcctttgttctggtgaagctgatggtgatcttgaggtaaaattgtttctctctgttggatattaatttaaaagcattccggaacttacagttatttttttacttcttaaaaacagacatgttgcagagctgcaagcattctttctcatgttgtcaaggacaaccttcggtgcaaggaaaaggtaacaaagtcatcactttaaacttatgttctgtacgcaatatttttgttgttcctgcattgactgactttttgggaaactcaataggctttgaaaatcgtacttgaatcacctatgccttccatgggaactccagagcctctctttcagaggattgtcagataccttgctgttgcttcttccatgaaaagcaaagagaaatcaagcacactggggaaatcatatattcaacagatcattttaaaattgctggtgacatggactgttgattgtccggctgcagttcagtgctttttagattcccgccaccacctaacgtttttgctcgagctggtaacagacccagctgcaacagtttgcataaggggattggcgtctattctattgggagaatgcgtcatttacaataaatcaattgagaatg

SEQ ID NO: 152018 - DNA, 1677 bp, Arabidopsis thaliana landsberg
  unsure (1)..(1677): unsure at all n locations
atgcgggtttctttcatggaagccggagctgtaaagcctttggttcagcttttagccaacaacaacaaagagactgttaaattacccgtcatccgtgccttgaaaaatttatcacttaggtgtttatctttgagcattctttacatttttactaagcagtttctcctcagaggttgagattatttatacttgtaatgcagccgcactgtttgccagaggattgaagctgaaggtgcagtatggtttcttattaatcttctgaagcagccagagatctcactaaacgttacagaacacgtatgacttcattttcttcttcctttgttctttgatatctttgtctaggctattatggaataactggacgtgaaatggtattttgtaaactatgttatgcaggttctggatataattgctcatatcttagatcctagcaaggaaatggaatccaaggtgtgtttattttccaaggttgattattatacattaaatctgctttcatttggcttatgctatttctctacatgctacagttttatgaaggactggtgaacggatcaaaagcagactccaggtcagtcttcttctcgatcttcctatcttcagctcattcattctttttgtttttttagaagtattaattactcaaaacatcggatgggaatgaacagaaaggaagttctggacgctgctgttttttctcggctcgtccagattgcgaaaacagcctctccgaacctgctaagaaacgcaatctctgtcatcgagtttggtataatcagtaatccaaacatggacacgatcatctccaaggatatcacaactngtcttgatcttgctctccggcagaaaagtctggaaggtacaaaacttatcttttgatataactctgtttgattttataacagcatacaatactttttatggaaatgcagaacctgataatgaagcttaggagttagagaaacatctgcttaagctagaagaagctggtttgacgatttccgctgcttcaaggctactgacaaaacttcttgactccgagtcctttcgccaaacaatagataccgcggtcttcatagaattagtaaggaagatcctaagatcaagcctccctctacactacaaagactgggttgccgcttgtcttgtcaaactcaccgctctctcctctccctctcaatccctcaacaatccgatcaatcttgaggtaactctgtacaaaacgatcccgagcctcgtggaacaaatgagcttttcctcatcaccagaaacgaaagaagcagcggttttagaactgaacaagatagtctccgagggagttccagaatctatccaaacacttgcttcacnnnnnnnnnnnnnnnnnnnnnnnnnnnntcttgaagaaaggaacgagcggtgcgttgaagcgagtttgtcagtattgtacaacttaagcatggacagtgagaaccacacagccatcataagagcaggagctgtaccagtattgagacgtatcgttatgtctcaacgaccacaatgggagaaagctcttcggttactcagaaatttacccgtttaagacatttttacagattattgtcatgtaaaattttggaatcaattagaataatataatgtatgatttgtcatgtgagacgaatatacaaaaagttaattacattaagataa

SEQ ID NO: 152019 - DNA, 452 bp, Arabidopsis thaliana landsberg
acgccggagcttgctaaccaaacaagactcctcgagcttctccaccttgtttttgtcggtatcgccgtctcttacggtctcttcagccgcaggaactacgacggaggaggatcaagcaatagtgatcacaacaaagctgatcatcataataacaattcgcattcatatgtgccaaagattcttgaagtatcctctgtttttaacgtgggtcacgagagtgaatctgaactgtccgatgattcctccggtgatcaccgtaagtttcagacatggaagaacaaataccacatgaaaatccccgaggttgagactcgcttcgttgatcgagttagttcagaaaacagagagaagcctctgcttctgccggttcggagcttgaattattctcgtgtttctgattcttccggcgataattccggtcgatgggagaaagtgagatctaagagagaact

SEQ ID NO: 152020 - DNA, 359 bp, Arabidopsis thaliana landsberg; identical to SEQ ID NO: 3307
  unsure (1)..(359): unsure at all n locations

SEQ ID NO: 152021 - DNA, 404 bp, Arabidopsis thaliana landsberg
gtcctcaagaaactcagttgagattggactggcctacaagacggaagatctgtatcggagtggcgagagggctagcatatctacacgaagaatcgaggctaaagattgtacacagagacatcaaagccactaatgtgttgctagacaacaactgaatccgaaaatatcagactttggtcttgccaagcttgatgaagaggacagcactcacattagcactcgaatcgctggaacattgtaagtcacaaaatcaatattcaatgataaaagattatatgctatgtgagatttgcttataagttataacacatcatctttttgcaacatttatgcacaggttacatgggtccggagtacgccatgagaggccatttgacagataaagctgacgtttacagcttttg

SEQ ID NO: 152022 - DNA, 790 bp, Arabidopsis thaliana landsberg
ataattataatttatttgctctcggcaggatctatataatacacagaccagtctttgcgtgtgcttgtgtgcattcattgatcgggtttatatcttttcatcggattttctttgtcgagcaaaagccatgtcactgatacccaacgctaaaacggaggttcgccggaaccgatacaaagttgcagtggatgcggatgaaggaccacagatgagagaagacaacatggttgagatccgtaaaagcaagcgtgaggagagtttgatgaagaagagacgtgaaggtatgcaagctcttcagggtttcccttcagcttccgccgcctccgtcgataagaaggtacaattctggtttttagatgattcgattgtactccttgttgtcggttttctaggtttttgtttgtgattttcatgtcggcttactgaggttttagggtttcgtttttgggttctggttacggtagttgtcttgtgattgattggctttaaaaaaacatttgtagttggatagtctgaaggatatggtcgctggggtttggtccgatgaccctgccttgcagcttgagtccactactcagttcaggaagcttctctctattggtaattccttttcttaattctcttttatttcccgttttgatataatttggagtgtcccctttaacttttgtctctctgtctctattataattgcatagagagaagtcctccaatcgaggaagtgataagtgctggtgttgttcctaggtttgttgagtttcttaagaaagaagattaccccgccattcag

SEQ ID NO: 152023 - DNA, 484 bp, Arabidopsis thaliana landsberg
  unsure (1)..(484): unsure at all n locations
aaattcgcaccatgcacggatcaagtccctaatgattcttttaaaggatataggaatcattctaagttagtttgcttagatgatgacgaaaactattgtaagtattataaatttagtgacaaatgtaagtcatataggcctctctcccgggttggcaatagaagaataatgcagtcggtgagagcaatctccaagttgaagtgttttgaagacactagaacaggttagtatcatattactgtgtttctccttggtgcatttctttttagctgccgctctgcccttactttgcttgcggatatatttctagatggtcgtttgaaggctctctaccgcacgagaaaattatgttatggttacaacccatggaagcgtgagaccattcataggaagagaagattgtctgacaaaggtttggtcgtaaattatgatggtgggctcagtagtgaaagtgtttccaattcaccttgaaaggggagatcan

SEQ ID NO: 152024 - DNA, 323 bp, Arabidopsis thaliana landsberg
aggttgccttttggagtgtagcttcaccagtaccagttttccagcatggcttgagaaaacaaccaacggttaagaagcaggaaagccaagaattcgggtaccgagacttggaggcaaaatcaagtaatgtagtggtttctaggaatgcttccaaatcaagtaatgttgtggtttttgggaaaagagaagttgcagagaggggggaaagagaggagaaggaggagggatcgaagaagaaaatggacgagtttgctgaagattacagagaagtgatgccgcatggaacattgaaggtagatgaactagctaaactacttgcataa

SEQ ID NO: 152025 - DNA, 2504 bp, Arabidopsis thaliana landsberg
  unsure (1)..(2504): unsure at all n locations
attggtgtctctcactcttaggtaattacggttacgatttctgggtggagataaatttgttcttcaaaaaagtttccttttttaaaaaatctcttagattcttaaagaattgtaatttaggttttaaatgcatggatgggagagaagctatggcatttccaggctcgcattctcagttctatcttcagagaggagtttttaccaatcttacaccttcccaagtcgcgagtggctccacgcgccgccgccacctccgggtatgaggccaatgtcaaaccctaacattcaccaccctcaggctagcaatccaggacctcctttctccatggctgagcacaggcattctgatttcggacacagcattcacatggggatggcttctcctgctgcggtgcagcctactctgcagctgccgcctccaccgtcggagcaaccgatgattaagaagaaacgtggaaggccaagaaagtatgttcctgatggacaagtttctttggggctttctccaatgccttgtgttagtaagaagtctaaggactcttcttcaatgtctgatcctaatgcacctaaacgagccagaggtcgacctcctggaactggaaggaagcaacgcttggctaatcttggtgagatctcgagttttttctgtgtacttggttaagttaagttgttgttttagctctgttggctaatcttgaaggatcttatgattagatgaaagtttgaatggtagaagctatgtatgattctatgcgttttttaggttttgttgctttagccttactgttactgttactaaacattgattggtaggtgttaaattgactgatccatgtgtgggtacaatgccagttgagatgagtaattggtcattagaatgtggtagtcaactcgatatttgacttcttgatttatggacacaatttgtaagctttggcacaactttcttctatgtacattgtgaagaacacgagctggggtcttatgattaggtagattttggttgctagaagcttaatgattttatggtcaaattagtattgatttggctctgttgttactgctactcaacatcgattgttaggtattaagtatgagagtaatttgactgatccatttgtgttgagataagtaaatggtcatttaactctgttaattactttaggtgagtggatgaatacatcagctggacttgcttttgcacctcatgtgatcagtgttggatcaggagaagtaatctctcaaaactcctttcaatcttaatgagttatgcagcttttcattgtttcaatttccttttatttttcttgcaggacattgtttcgaaagttttgtctttttcacaaaaaagacctcgggctctttgtataatgtcaggcactggaacggtttcttcagtcactctgcgtgaacccgcttcaacaacgccttccttaacattcgaggtttcaaaatcgttcattcagttaatccaaaaaagaaccaaaccgtggagaactaaagattctttatcccttctttgtgttctatagggacgttttgagattctaagtttaggtggatcttatctggtgaatgaagaaggtggatccaaaagtcgaacaggcggtttgagtgtctctctttctggtcctgaaggtcatgttatcggcggtggaattggaatgcttattgcagccagcctcgttcaggtatttcaaaattggtttggctccattaagttttgttttggttgtaattgtttggtataacatttgtgctacctggaatacaaaagttcaaaatacggttccggtacggtttgagaaattttgtttggatttgtttatatgtaatatgactcttaaactaatttttttgttggttgttattttgaaggtggtggcttgtagtttcgtgtacggagcaagtgcaaagtctaataataacaataacaagaccatcaaacaagaaataaaacctaaggaagagccgaccaatagcgaaatggagaccacacctggtagtgcaccagaagctgcagcatcgacgggtcagcatacgccacagaacttcccagctcagggaatgagcggatggcccggttcaggctcaggctcaggctcaggcagatcacttgactctagcagaaacccacnnnnnnnnnnnnnnnnnnntcgcgggtgattgaaaacaaaaacattattagtctttcttcctatttactccgactactaccctttagtcttggaagcagcagcagcatacattatgtgagtgctgtacatatctttgttgttgtagatttctctctgggaatgtttaaaccagacatttcaggattgagaccagaactctcagttccttattgtaacattctcaatgaaacagaaccaccccactttcaggctactcaacgagattttaactcttttatatcactcattaaagcttcctttggtttcttcaatatctgtgttcaattcggttttggttttaagtgtttggttttagaaatgaagtaa

SEQ ID NO: 152026 - DNA, 834 bp, Arabidopsis thaliana landsberg
tagaggatcccgtagatgaatacagaactcctcaaggaaaaagcagaaatgttagaggagtatttcagcgtgcacattgactccagtgcaaatttgtcaaggcttcctgtgatactcgaccagtatacacctgacatggatcgtgttcctgaatttttactatgcttgggaaatgatgtgagttacgcgattactatttgtacaattatatccactattcgtgcctactgaagtgctactaatcatagtaatagtgggttctaatgtcaccctaacgtactgtttaggttgagtgggaagatgagaagagttgctttcaaggagtttctgcagctattgggaacttttacgccatgcatcctcctcttttgccaaacccatcgggtgacggtattcagttctatagtaagagaggtgagagctctcaggaaaagtcagatttaggtatgtaacctcctctagtggacaatgttttcgcttttggttctctgcatttgaaatggatgagagcatttaattttacattcaactgttgcagagggtaacgtcgatatggaggacaatcttgaccaagatcttctgtcagatgctgaaaacgcatgggcacaacgtgaatggtcaatccaacacgtgttgtttccgtcaatgagattgttcttgaagccaccagcttccatggcttcaaatgggacttttgtaaaggttaccatttctttaattaccataaggagcttcacatgctacattaagtaaacaaacttttttctggagaatcaaatttcacaaagacattaattacattctttttactcttttgcaggtagcatcccttga

SEQ ID NO: 152027 - DNA, 769 bp, Arabidopsis thaliana landsberg
cttacatgtgtctcttttcccgtttggagaatccgagtgagatcctgagtctgtttggtagtatgataagaagtggagtgaggccaaagatggatacttatgtgatgctaatgaggaagtttaagagatgggaatttcttcagccggtataatatgtgtggaagacaataaaagagtctggggatactcctgattcagcggcgtataatgctgtgattgatgcgttgattcagaaaggaatgttggatatggctagggaatatgaggaggaaatgatcgaaagagggctatctccaaggagaaggcctgagttggtagaaaagtccttggacgaaacgcttgtctgtagagaatagataactagatatgaagaaactctttggttatgtgttcaaaacagacatgaagcaatagagaagcgtccttttggatggagaaatctccccaaggtatgtcatctttgctataaagtggctttgtttcaactcaaaaccgaggagagaacactgaggttcattgagaaatctggttgagttgtgtgtcttaagccaaattccgaagatttggttttgaaagatggtttgtcgcctcctatatgtgttctactacatatacgtaccatttgtaattcactctctaacttaatttttttttgttgttgttccactctgtgacaaccacaggcattttgtggctattttgtaagatcgttaagctcaataaaacaccctacagaaacgatggatgatccatcatggatcacattctt

SEQ ID NO: 152028 - DNA, 1817 bp, Arabidopsis thaliana landsberg
agtggaatcactcctgaggccacctcggatttcattccatcttatgaaaatgtttgggatggttttgaagataaccagcttcctggtttggttacggtttctcaagagagtttaaatacagcaaaaccgggtaccagtacgaccaccaaggtaaatgatcatatcagaaccggtatgatgccgtgttactatggtgatcaactactagaaaccccatctactggttcggtatcggtctctcccgagacaaccagtttgaaccatcccagtacagctcaacactcatccggttcagatttcctagaggactgggagaagtttcttgatgatgaaacaagtgattcttgctggaaaagtttcttagagtaagatctatctccgcattgattaacatagtatatgatttatatttatggtttattaacagaattgttttatctaatctgcagcttaacgtcacccacatcgtcacctgtcccatggtagaactggattttgttcgggtcgtatactcatagttttaaagacaatacatacacaaagatattcgattaatactcttaattttgtttgttattaaatattgatttaaagtttgtatattttcttgtaaaggaattcttatttgtaatttgttcttatttggtttggttgttgtgtaaagaaacacattgtaatcaccattctattattgcccatttaataacaatattttggataaatatctacgagcagtctaatttatacaatcaaacaactctatggaaacataacttgattcacaagtttaataaaaattcacctatttgccaataaggaaatatattaaaatgtcaatctctcgatgtttctaacagaaagattgacaaaaaatcaaaaaacaaacagtcaccaagaatggaggaagaagagaaaaaccctagttcgatctacatagttgccgatcttctagaagatatattccttcgacttcccttgaaatccattctcatatcgaaaagcgtctcaaaacgatggagatcaattcttgagtcgaagacgttcgtggagagacgaatgagtcttcaaaagaagcgcaaaatcctggctgcttacaactgcaaatgcggctgggagcctaggctcctccccgggtcgtcgcagtgcaaagggaacgaagagatcgtctatctgcactgcaacgccgcacaaccctcgtttacttgcgacggtttggtctgcattctcgaaccacgttggatagacgttttgaacccctggacaaggcaactccggcgatacggattcggatttggaaccatatttggagtaggttcggctttctctccaagacattgggcaatgggatttggtaaagataaagttaccggaagctataaagtagtgaagatgtgtttaatatctttcagtgaaatttgtgcacgtgatcctgaggtggagtatagtgttcttgatgtcgaaactggtgaatggcggatgttgagtccacctccttataaggtctttgaggtaagaaaatcggagtgtgcgaatggatcgatctactggttacacaaacctactgagagggcttggacaatactagccttggatcttcacaaagaagagttacataacatttcagttcctgatatgagtgtcacgcaagaaaccttccaaatagtgaaccttgaggaccgcctggccatagccaatacctatactaagactgaatggaaactagagatttggagcatggatacagaagtagaaacatggaccaagacttactccatagatttagagaatagagttgcttcccgggaaaggcggaacag

SEQ ID NO: 152029 - DNA, 10365 bp, Arabidopsis thaliana landsberg
aagctggttatggatgatgaaggaattaagtgttcggaagtttaaaggagagcagaatactgttttagcggataagtgtttgaggaacctggaaatgaattttgaaacttgaaggtgcccggaggactttaagggccaaatagcggtaaactttttagatgcggatgttcgagcatggtgggatagtgttgtttcatgatactgcgaccagcctatcacatgggaaatgtttaagaaggagtttgagtctaagtattttccacctgaggcacgtgatcgtctggagctacagtttatgagtttggaacaagggcaaaagagtgtcagggcatacgagcaatttttttcaagacttcgaagatatttgtacaatggaagggttgatgaagctatgatggtacgaagttttttaagaggactaaggcctgaaattaggggacgtcttcaggctgtgacttataccaacgtgagtgaattgactgatagggccgtgaatgttgaagaagggattgagttaggaaagggaaagaagtttcaggagactgaaaagtctgaaggcaaaaaggggaataatgtacaatttcagcctggtgttttgaggactaatcagtcgtaaggtcgaaaccagaataatgatcgtgggaagcttaaggttggtaaccaaggaggacgtgtaatgaccacttacgattcaagagcctgctatatgtgcggaaagccgggacattttgcacaagattgctcaacggtcgtaaagactaaattgccaaatctggcatttgttacttgttacacttgtggggagtcgggacatgtatcaaatgcatgcccgaataagaaagcgggactacagggtaaccgagtgggagcttgttccatttgtggagacccagggcattatgctaacgcatgcccagacatgcaaataaagcagtataaccttagccagttcagaaagctaagggaccactggtaaaaaagcaagccactctagcaaatgtttatgccttagatgtagaacctaccaaaccttcaggacagccaaaggtcccataacaggttagtatgggttcttactttttcttgtttatgtgtgtttgagtaattgattgttgtctgcgtagtttactagtttaaatttgcatacatcatttccatatgcattagggacattaattgttggttgtaaccccacgcatgtattgtttgattcgggagcgacaaatagttttgttagttctgacgtggccgataagtttaaccacgggtatgagaaaagagaggtgaatgttttggtacataccgcgggaaatcagccacccatgcagacctgaattgtgttaatagaagttctagtagtaatccaggatacgatcctactggcaaaccttctggtaatgccgatggaaaggttcaaagtcatccttgggatggattggttattgggatatcatgccaatttggattgcgggcggagtagagtagtgttcgaattgagaaattgaccacaactcacttaatgtggaatcaatccaagtatgattgcttcgctcgtgtcagcacttaaagtcgcgaacttactaaaggaaggagaagtctaccatgtcactttaaccgccgttggtggagaagttgaaagtgactcaaggattaaagagatcccaatggtgaatgaatttgaagatgtgttcaagcctttggaaggattacctccgccaaggaatcatccgtttaccattaatcttgaacgtggggcgactctaattgcaagggaaccatataggatggcgccagccgagcttgtagaacttaagaaacaattggaggatctacttgaaaagggatttattcgtccaagttcatcgccatggagagctctggtattgtttgttaagaagaaagatggaagcatgcggttatgtattgactaccgaggtcttaacaacatgaccattaaggataagtatccatttccaagagttgatgagctattggatcagttgaggagagcatgttggttctcaaaaattgatctggcttctaggtatcatcaaatttcaatctcggagccggatataatgaagactgcctttcaaacaaggtatgggcaatatgaatttttagtcatgccatttggacttacaaatgcgcccgcaactttcatgagacttatgaaccaggaattccatgattatttggatagcttcgttatcatatttatcgatgatatcatggtatatttacggagtgcggaagagcatcgtgaacatatgtggaaagtaatggacagacgtagggaacaacggttgtttgctaagtttagcaagtgtaagttctagcaacgagaaattggatttcttgtccaccgaatttcaggacaagaagttacgcggatcctgaaaagattgccgtaatacagcaatggccgcaacctacatccgttacagaagtacagagctttttaggattggcaggctaataccgtaagtttgtcaagggattctcgttgattactaagcctttgactcgacttactggtaaaggtgtacccttcatatggaataaggatgttgaggaggccattgttaagttaaaaaggcattaacaaccgctccaattctagcattgccggagccaaataaaccatatgatatttacacggatgcttcaagagttgacttgggatgtgtccttatgcaagacggaaaggtaattgcctatgcatcacggcaattaagacgacatgaggagaattatcccactcacgatttacaaatggtcgctatagtatttgcattaaaggtatggagatcatacctgtatgggaaagcagtacgagtatttacagaccactaaagtcttaaatacttattcacgcagccagatctgaatctacgacaacggagatggatggagttaatcgccgactatgatttgaagattcagtatcaaccgagaaaggctaatgtggtaggagacgccttaagtcgccagaaattagaagtggatgttgaaaaggatctagactcgttaactgatgagttaaagaaagtgactttattagctctagagggtgaatctagtgagcccttgggtttacaagctgtgactcaagcaaacctacttcaccgaatccgagaagaattacagtacatgatcgtaaaggtttacgacaagaaattttgaagggggcacatacttctttattgagcattcatccgagaagtacaaaaatgtacaaggatataaggaagtatcaccgttggcctgagatgaagagatcagtggcgaaatgggtaagccaatgtgattcatgccaaagagttaaagtagaacatcaagtgccgacaggtttattgcataatctactaattcctgcatggaaatgggagtcaatctcgatggattttatcacttgattgccaacaagaccaggacgtggcaatgatgctatatgggtagtcgtggatcgttgaccatgatggctcatttggtgtcaatgaaaagcacagatcagccatctatcctggcagagaagtatatcgatgaaatcttaagactccatggggtacctgttaatatagtatccgatcgagatcctaagttctcatccatattttggcaagacctccaacgtgcattaggaactaatgttcacatgagcacaacatttcatccggaaactgatgggcaaactgaaaggaccatccgaaccatagaagatatgattcggctatgtgcactagagtgggctggtgattgggaagactacatgcctttggttgagttttcttacaataacagctatcactcaagcatcagtatgtcgccatttgaagcaatgtattgaaggccatgtcaaactcctctttgttggacagaaatacgagaaaggacaagttttattaatcgattgatcgaagacactacagagaaaattcagtttatccgagacaatatgaagaaagctcaagatcgacagaaaaagtatgctgaccgaaagaggcgtgaagtggaattccaagaaggtgacatggtttatcttaaggtaactggtgataacactgtattttactcattttaggtatgtgtttatcatcatttagctttgcatttgctcattgtatcatgtcattttgcaccattttagcttattttgcatacttaggcatctaggatcgtcttgcattcgcattgcatgttttgatgtgttttcgggtgcagaaggagctaaaaaggactctactcgatccattcactcgatccaggcagctatagaagaggcatcgtttcactcggccctcttactcgatctagaatgctacagaggaggctgcagttcactcgaccctcttactccatcaaggcaaccttagatgaagcagcagattaatctactcgcccctcctacctgatccactacttgatccatttactcgaccaatggtgaccaactctacaagacttgttgagctatcaaagcgtcttcggatcctcctcattccccactcaaccagacatctgagcatatggataggagaggaagaagcatctactcgaccaattgatcactcggagcataaacacaaaggcgcagactttgcagcaccctctttattcgatccctaagatcgagcactcgcccaaaccgcctcaagtctcttgtcttctagtgaatctagggttttcaacatttctgtataaacagatcactttgggatttgtccaaaggatctagctttgatcctttagtttttctttgtgttcttgaatcttcaaaacttaattactcttaatctatttcgtttttgcatttagttgtttaagtaaagttgtttagcttgtttagacctacattttggtatgatttcagtaatttctgggtttgtgttcttgagaatgttgcttgagtagtgattagggttcttgaggatggattagattagggtaatctctaggttagttaggtggttaagattaggttagaacccttctagattcgcttggcccctatgcagttttcgttggctaatgtggagattcgatgatagacatccagcgtccaaaagacgttcaaatggatgtctgatctacgaattccagagatttgtaaactcgaccaagacattggcttgtctgcttattggctttggtagattgtttcttaaactctgctctgctatgtttcatcaacgatagttgagattaggaagtggtagagttatggaggtctctgtcacgacagtggattgacccggtttttgaatctatcgtcaagggtatctacctttcacctattagccatctgataaaccctagagttgcccttatcaatgaatatccttaggacttctattagatttatttgtatcccctgttgattgcacttttattttacatgttatttgtatcccctatttgtatcccctgttgattgcattttagttctgcctgttggttctactcgatccaatgatcgagtagggctcttaagttctcatttttacttgtttgaatcctgacctaggattgttactagaaacccaccatcattataatttggcttgacttagttgtttctgtacacgtcttgattgctagcaataacgatggactggattgacaccctctatagctgcatcgacttgttagtgtttaaggggaattgaactgaacctcacattcagcacataagtaggcttaaaaaacttacatatcaatttggcgccgttgccaattcattgttgcattgttacattcaagatattagaaaaatttaagatcaaattcttttacatttatcaagttactaactcatcttttcgtctgcttgtttttgtggtataggtactaatctttgtgcatgcaaactcgatccaaaggttcaacacaccaactaccattcagagacggaatagatagaatagctcgtgagttacaagaaaccaaagctaaggcagtctgtgatcagcaaagaccagctgctatggatcaacagaacagaccagtagatgttcaagacccaactaatgttgatcaatcaagaaacattagtgctggtgatgccccaaggaatcatcaccaaagacaagcgatagtgccaccaccagttcagatcaacaacttcgagcttaagagtggtctcatctcgatgattcaggggaacaaattccatggtttacctatggaagatcccctagaccatcttgacagctttgataggctctatggccttaccaagatcaataatgtcactgaagatatgtttaagctcagactatttcccttctctttgggagacaaggcacaccactgggagaagactctgaccccagactccatcacctcatgggtcgattgtaagaaagcttttattgccaagttcttctctaatgctcgcacagctatattgaggaacgagatctcaggcttcacacagaaaaacaatgaaactttctgtgaagcttgagagagctttaaaagctacaccactcaatgcccccatcacggttttaagaaagcatcattattgagcacactctacagaggagctttaccaaagatcagaatgctactcgacactgcctcaaacgaaaacttcctgaataaggaagtagcagaaggatgggagttggtcgaaaatctggcacaatctgatgggtgctacaatgaagaatatgatcgatcagtgagaggaactggagacactcaagatagacacatgatagaaatcagggttctaaatgacaagctgaataaactgttgttggcaccacagaagcagatacactacataactgatgaagagcatttccagatgcaagaaggggggaacgatcacactaacgaaagcatctacattcataaccaagaaggattcaacaaagattacaacaattacaagtctaacttgaacctctcctacagaagcactaatgtatccacaatagcagaatcagtctaagacatatgttccctataaccaagtatttgcccctaagaagtagttcaacgaaggttatcaacagcaaaatccaccaccagggttcacacaacaaccacaacaagccccaacagcacaagatcttgaagtaaagcaattgatttaacatatcattaagggacaagccactgaagctttgactttcgaaaaaagtagctgaactacacaacaagattacaatgatctaaacgtcaagtttcatgctctcaattcaaaagtgaagtgtctggaaggtcatatagcatcttcctctactcagaaacacccttaacaacttctaagataagcagttcagaatcccaaagattatgctactgcccacgctatcatcattcaacaagacgatgagtctccatctcatcgtatgcctccacgaaaatcactgaagacaatatgattcaagaaggggggggtcaagttacaatgttgcacctgcttataagcaattcatctggactatagagcacataccttttctgaatactcacaattctgaaaaacagttcagaattgaaaaactcaagaaatatcaaaatcaagagatgattagcagtgctaccacccaagaaacttacaagaagaaagtcatccaagaaaagcttgatgatcccggttcattcactctgccatgctctctagaaccattgacattcaataggtgcctttatgatttggcagcatctgttatccttatgcctctctctacagctaaaaggctagggatcatggaatacaagttctacaacctagctctacttttagttgatggttctattgcacatcctcatggtctaatagaaaatctgcctgtcaagattggaaatgttgagatacctacaaattttgtggtattagacgtagatgaaaaaggcaaggatcccctgatcctaggtagaccattcttagcttcagctggagcagtcatagatgtcagaaatggaaaaattaatccgaaccttgaaaaaggcatcaagatgaagtttgaaatcagagaagcttcagggaaatcaacaacaggagttcagaattttgggattcaggacatggaagttgatgaagaaatagaatctgaaacctcaccaaaagtcaactatacttctcaactcagcaagctgaaaaggacttttgaccacaagaagagagcaacacaaaggctagcttagactgaagatcctacagaagatgaggaaaagatttaaatggcaaagcagagtcatagagggattatcttcaagggtgatgaagctgaaagatcaactatggatgtttgaaaaaagagttaaaaaaatttcaaatggtattgatccagagaagatggaaattgcactatctatcaaggaggacgacaatttcacaacagaatggtttgcaccagaagaccagaaaggagttcacttagaggaaagaagcctagatagcaagttgttgagtgaggaggaaacccccattccgacttattctccacgagtgcctaaacggcccaccaacccctcttctgaagaagaacacttgattcatgattctgttgctgaagaattcctggagctctggattggatataaagcttaggaggatacaattggaaagttaactcacaagatagaagagttaaacaacagcattctggaacttcaagaaatggttaaaggctaccccaattttgaaattgaggattggtcaaaggagcctggttcagaagaagaagcttaatttgaagaaaaatcaaatgagtactcatcctaccatttgtcaagagaggatgcagaatatgattcagaaactgaaaatttaaccattgaagatgaggacttctctgttcctctcttcaaccttctttttgactaagctctgtaagagtaaagcttagtgacttaaaacaagctcacttgggagggagtcccgtgtctatccatatatataactttctatctttcttgttatttttgatgtttttgtttaagtgtttcagggaaaaagacttctagagaatttcaggccacactcgaccgtgctacttggctacaggccgagtgtgggcttcaattgaccaaaggcccaagattgaatagtactcggcccacaccactcggcccgaagccgagtcagaaaaagaagcccatcaggcccaacactgtactcgacacgcgcgtcgagtatgtcggccgagttcacacgtgcgaggtcaacacaattcaaattcgaatttgcggggccccaccaatcaaatcctgctccccaaagcccttcaaagattctgctgcaaatagtgagacatgtccccttgaccaaatgaagggtgatgatctaaggtgtttggagggctaggatcaaatcttcttgtctataaaaccacactcaacaagctaagtcactcacactctctttttgctcaaaaatttcgaattctactccgatcataccagcactaatgcaccagatcccatcagaactccgaagttaagcgtgcttgggcgagagtagtactaggatgggtgacctcctgggaagtcctcgtgttgcatccctcttttactgtattatattagctagatatacgaacacctaaccatagttataatgaatgaccatacacgtaataaacagaatatttatgcatttcttactatttaaagatttgtttcttaaagatactcattgacatcggaatgcttagagtaagaaacaaacatattttggtagacacaaaaccggagtaaaccgagaattattcgttatcttcactggttttctctcttaaggtttgttgttgcatactcttctcactaaggatgtcaaaatgggtaacccaactcaacacaactcataatcaaatgagtttaaggttaaatgagttatgggttgacccaactcattttgttaaataggttgggtttacctataactcatttaatttgatgtattgatttgttatatgggttaacccatttaaataataatttaattaattattattataaaaataataaattaataatgattcattatcatcaaacttaggatatttacggattccactttttacggatttacgtttttgacgagaaaatcacgggtttacgtttttggcgggaaaattatggatttacgtttttggcgggaaaatctcggatttacgtttttggcggaaaaatcacaggtttacgtttttggcgagaaaatcacaggtttacaggtttacgtttttggcgggaaaatcatgggtttacgttttttggcgggaaaattatgggtttacgtttgttggcgagaaaatcacggatttatgttttttggtggaaaaattacgagtttactttttctcaatttcatcgcttgtatatttaagaaatttggaaaaatat

SEQ ID NO: 152030 - DNA, 653 bp, Arabidopsis thaliana landsberg; identical to SEQ ID NO: 52910
  unsure (1)..(653): unsure at all n locations

SEQ ID NO: 152031 - DNA, 3200 bp, Arabidopsis thaliana landsberg
atgacacaactggagcgcgtccacctttggcgcctccccctcctattccgccgcgctcgcgccctattcttggatgattgtttcagcgaaaaaacttcgagaccgaggaataaagttccagctgatggagaatgtaggtacaccgttggacatacgtttcaagaacggtttgcttgaaataccgccactagtctttgatgattttattagcattcttatatccaacatcgttgccttcgagcagtttaatatattatgttccacggagatgacaagctatgttattttcatgtcctgcctcaataacagagaagaggatacggtgttcttatccgagaaagggattgtagggaactatattggaaccagtgaggaagttactttgttcttcaagagcatagcaaaaaccattatattctccttttctacgagttacttgtctgatgtgtttgagggggtgaacaagcacaagagacgtaagatgccatggaaggctctatcatcttctgctgctataattcttcttcttctcaccatagctcaaaccttcttcgcagcctttgcttattttcgtcctcccaaaagttgaattggttgcagttatgacttcttcaaaacaaaatcctggcgtggctctaattgatgttgcactttcacacatggctctgtctccaactagaccatgcatgccgcattcattctatcttattattcttgtctttgttttcgattaagtattaatcatgtatgtctgacctttgagactctcaatttcatttgttttttttttttgtttttttgggtgagagtataatttttagttgtttctttttgttcttaatctatatatttacttctattttttgttaaactatattttcattacttttattttacagttcaacctttaatttaattgtgattccggatgtgttaggtatggctttagaggaaacaattaataataaacttttcttttatcattcaacacgatagatatggatactttcacctattccatcacagcagaaatgtttctgtatgcctttatttatgtgaatttggattatttattttggaggataacttcgaaatttgattcaacttcatacatatagataatttggttcttttagaaggcagaaatgaaaagatattcgacaatgtcgataaagatcctttagaggtactacattttgcaggaaaagagacacaattatggatgtcagctcaactcgagttgcaaattgaaaatcacggcaaccaaaatatcgaaactcagattcaagtgagggatatcgctcgcgatattaataattctggatattgttgctatgtggatggatcatggaaaaaaaaaaaaatacgaaacatgatggcattgtacatcaacaaataggaaaatgccaataatgggagcgacaaacctgagacgaagtctattccccctacatacagaagtgaaagcttttctctgggcaatgaagtgtatgattggtgctgataaccaagatgtagtgtttttcacagattgttcagatctggtgaagatggtgtcttttccaaccgaatggccgactttctcagtgtatttggaaaaatatagaacgacgaagaatttacaagttttttttatctttaatttctcgttgtgtgcaaatgttaaaacgaacaatttaatacgaaaaatttgtatccaaccgtatcacataacatattacatatgtaaacaacgtttttctaaactctaattaattttggatgaaaaaaatgaaaaacgtttagtttagacctacgacacttgttccagactaaacgtcatgggttaatacttaatactcttcaaagcgttccaaatttaatcatcaagggttggatataggtcatatatctcaatctccgttgagtcaaggaaccagccaaacttaatcaaccaaacacataacgccattaggatcaggcttgtccatttcaaaacctgttaaaagaacaaactaaataaggaaaaagtttttctaaaacaaaaagatcaagaaaaaaaaagtgttttggagtttggacacgtcgtcgtttcacacgcgtaaactcgtggatgatggaaaaacaataaaagctcgtgtttcgaaagcaagggtttttggaccagtcgtcacttcaccggatttttgttttggtgctctctccctcgaccactctgattccaaatctatctctctctgggaaaagctgaatctagatcatcaaagtaagtccccatcgttacttttatctcttcttgaagatgctttaatcccatttatttgttcatattcgcaattctttcaaaattcctgaggctaaacaaaaatcggatttaacgatgaaacactgaaattggacttgttcaatagtgtcttctctatgattagagcgaagtttggacaaaagttgaaatttttctatgatttgcgatgtctgattcattcatttcccacatgtttaggtctctcgtgtaaagtttgttcctttcttatgtcttcttatccaaattttgcaggtatcatattaaagtttgatcatttcttctttgagtatatagggttgtactcaaaatggcagcttcagaaacagttctacgtgttccattaggatctttatctcaatcttgttattatctgccttctttctttgttaactcaacaccaaacctctcgtttaaacccgttaatcgaaacagaaagaccgtccggtgtacaaactcgcatgaggtctcaagcgtatcaaaacattcatttcatagttcaaactgtgttttgaaaggtaaaaagtttgtttccacgatatgcaaatgccaaaaacatgatgttgaggagagttttagatcaacggtacttccttctgacggtttgagcagtgaattgaaaagcgacttggatgaaatgcctttacctgttaatggaagtgtttcatctaatggtaatgcacaatcagttggaacaaagtctattgaggatgaagcttgggatctattgaggcagtctgttgttttctattgtggcagtcctattggaactattgctgctaatgatccgaactctactagtgttttgaattatgatcaggtctttattcgtgatttcataccctcggggatcgcctttcttcttaaaggagagtatgatattgttcgcaatttcatcctttacactctccagttacag

SEQ ID NO: 152032 - DNA, 1073 bp, Arabidopsis thaliana landsberg
atggagattcttggaaagattagacacagaaacgtgttgaaactctacgcttgtttggttggaagaggttctagatatttggtgtttgagttcatggagaatgggaacttgtatcaagctcttggcaacaatattaaaggcggtctaccagaactggattggctcaaaaggtactctctagtcaataagaaccagtttcaaaatggttaatcatggatccaagattataagaaagaaaagtgattaatttgtccctttttgttggataaacagatataaaattgcggtgggagcggcaaaaggaatcgcatatttgcatcatgattgttgtccacccatcattcacagagatataaagtcaagcaacattttacttgacggagattatgagtcgaaaatcgcagattttggagttgcaaaagttgcagacaaaggatatgaatggagctgcgttgctggaactcatggctatatggctcctggtgagtttccaacttaactataaactttggttcacaagatgaaaactgggaactgattcttttttgttgtaattgtgtgatatgatcactgcagagctggcttactccttcaaggcaacggaaaagagtgatgtgtacagcttcggtgtggttcttctagagctagttaccggtcttcggcctatggaagacgagtttggagaggggaaagacattgttgactatgtctactctcagattcaacaagatccgaggaaccttcaaaatgttttggacaagcaagttttgtccacttatatagaagaaagcatgattagagttctgaagatgggtcttctctgcactacgaagctcccgaatctcagaccgagtatgagagaggtcgtgagaaagcttgacgacgctgatccctgtgtctccaattctcaagacacaactggaaagattacagtatagattgatgattcacctaccacgttttagttatggttaagactagtcactggtcaaagaagtatcagttagttcgataaattagtccaagtactagggattggtttttgcttatttactaatccgttgactaaaagt

SEQ ID NO: 152033 - DNA, 1072 bp, Arabidopsis thaliana landsberg
atgcacaaagacgatcaggagaagacatcattcataacagaaagagggacatattgctacaaggtcatgtctttcggcctaaaaaatgtcggggttcgatatcagaggctcctcaatcaaatgtttgctccacaactggggaagacaatggaggtgtatatcgacgacatgctcgtcaagtcagcaaattctgccgaccatatcgaacatctgagagcatgctttgaaaccttaaacaagtacaatatgaagctgaaccttgcgaaatattccttcggcgtaacatccggtgaattcttagggtatatcgtcacaaagcggggcatcgaagcaaatccaaagcagatacgtgcgatcatggacctccaatcacctcgtaacaaaaaggtagtccagcggttgacatgctgaattgccgcacagcgcagatttatagctcgctccactggcaagagtttgccgttctaccagctgttacgttgggcaaacaaaactttcgaatggacaaacgaatgagagactgctttctcatgatcgtctttgtgcatcaggatttaaacgaaatgatttaaatggcatttcaaaaattcagactttttcatcccaaatttgaaagttgaggctttttttgacattttccctttgttacaacacaaacttaaaaataaaacataagcaatagagtacaaaccaatctcttatctttgtaatgactttttcaaccctagtaattactatatcttaattgttccctttatacagcctgaggaatcattgatatatatgcatcattttacgacttttagtgacccggctcagtactctgtggctgagtttgaacagcctgaccagcataagcacaacacctgaagcagccaccgtagtagcctctgtagcagcaaccatagcgacaatatcctcctcctcggtttccatatcctccacctgcggtttccatatcctccatcacggtttctatatccaccaccacggtttccatatcctccaccagggtttcctccataccctcctcccgggaaccctccataccctcctcctggaaacccgccaa

SEQ ID NO: 152034 - DNA, 459 bp, Arabidopsis thaliana landsberg
ccatttgagtttagaccagagagattcttggaagaagatgttacatgaagggtcataattttaggctgctccgtttgaagctgaagacgggtctgtcccgttgcacaacttggtatcaatttggtaacttcgatgatgagtcatttgcttcaccattttgtctgacacctcctcaagggactaaaccggaggagattgacatgtctgaaaaccctggactcgttacttacatgcgtacccctgtgcaagcagttgcaacgcctcggttgccttcggatctgtacaaacgcgtgccttacgatatgtaaatgtcactctgatctaccttttgttgctgctgctcatactcttgttgttgtttgtagacatgtttcttgtggtttatcatcgaaaaacttttgatgagatttgttgtatcaattctctcaaggagaagtaaagaagccatcttctttgtca

SEQ ID NO: 152035 - DNA, 362 bp, Arabidopsis thaliana landsberg
accgtttttgttataacgaacgacgccgtttcaaacaacttccttattagctagctccctcccggcggcaaacaccagaagatccaccggttttgatctggttgtttgtcgtcgatatggcgaggatctcgtgtgacttgagatttcttctcatcccggcagctttcatgttcatctacatccaggtcaatctatatccgatgatctcgctttttgaagttgaaactgaaattgattccatcgctgcaacctaaatctgtctggaattatcctctcttctcttctctagatgaggcttttccagacgcaatcacagtatgcagatcgcctcagttccgctgtgagtttctacttttaccact

SEQ ID NO: 152036 - DNA, 472 bp, Arabidopsis thaliana landsberg
tggtggtcaaaaggaagttaaattgtggtggctctaatggctttgatttccccaatattcccaaggctcctcgttcaagcagggtaagagatcagggtcttcatctgcttggttttatcctctgcatgcttttgtaatacgtctctgatgccttttgtttcccttttgtagaggaaggtctcaggtaagagatctgatgatcaaagtgagatctgcgcaattgatttgctagcttctcttgctggaaagttgttgcaacaaagtgaaagttcctcaaggtctacctatgcatctgaagctgataatcttgatcatttgggtggactgattaagcaagaactcgaagatggctatactcctaagccttgtaaatcggagtgtttcgatccaggaaaccctgcttcaaagtctaatagtggaaatcctagcgtgtcttgtttgccaccctcgtcttttgataatgattgcattt

SEQ ID NO: 152037 - DNA, 634 bp, Arabidopsis thaliana landsberg
atatgaaaaatcgaatcaaaaaaggatccagcatgattggtgtttatggaagatcagacggatcaagcagcattcagtcttctaatggatccgaaagtcgtgaaagtatagatgacaataagcaaggtaaatgtgttttttgcataataatggtcgttttcagatattttattcgtcttctctttgttcttaaccattgtaaatttaatttggcttctaggtcatcaaagtttagtagagtggttaaatgagacacttccttatctgaagttaccatgggaagcttcagaggacgaactgagagcatgcttgagggatggaactgtcttgtgtagccttttaaatcagcttagtcctgggtcaatgagaatggtacttacgaattgtcatgaccatttcacttacttatctgctgctagactaaccccttttttttttgtcaaaccctcctttttttgactaatcctctttggttattctatagggaggcagctttgagcctgccagtgtaaaaattgagcggtttctgactgctatggatgaaatggccctgcctaggttcgaagtttcagatatagaacaggtctgttatgttttcatggatattattcttcgtttctgtggaaaaagttga

SEQ ID NO: 152038 - DNA, 612 bp, Arabidopsis thaliana landsberg
atggggagagatgttagagaggttcttgagtttcctcagtatttctcgtttagtttggagaatcggattaaaccgagacatgaagcttgtgctgcgaaaggtgtgaggtttccattgccggtgatgttgaagactaatgaagctggttttagagatacattggaggtatgttgtgattcttctccgccattgaagacctctcgccttgttactgtacaaaaagattcttgatttatagagttttgtgtgctaggagaacatggaagcaagtgagtgagagtttcttgctttttgttgttgtttttttgtttaatggagttggagaattggtgagaattgatggggtttgctttgtttttaggtacatttttgtaatgaatgatgatgaagaactcaatgaatgaagaaaccagcctctgcctacattttgagacacacacagggatggtgagttaaatcttgataagagaaagaatgttcatttacaattcacgattccgatgtatttcggtctagttattgttagtgaacgagaaatcaagtgtatgtaagtccagaaaccgtgtagagttgcgatttgcagagaattgtgattctacaattggaggcaag

SEQ ID NO: 152039 - DNA, 469 bp, Arabidopsis thaliana landsberg
aagcgctctctctcaaatctcaatcatccttcttctcatctagaaaccccttatcttggagtaatcagagagtttgaaaacaccagaaatcatggcgacaggaccagttgttcatcctcaaccagttagaggtttgtttctcccctctgatgaatctttgttttaactctaggatctgcataaaaactctcatctatgaatccttttatttagatgttatcaaagattacttacaaatctgttttccaaggatccaaatcttgataggttgctttttgttaaaatttatcaggtgatcccgtcgacctcaaaaacgcagcagcaaagaatcgtcgtgctcttggcgacattggaaacgtcgattctcttattggagtcgaaggaggaaagattaaccgccccattactcgtaactttcgtgctcagttgctagaaaacgcacaagttgcagccgccgctaacaaaaggc

SEQ ID NO: 152040 - DNA, 643 bp, Arabidopsis thaliana landsberg
  unsure (1)..(643): unsure at all n locations
aattcattcatctttaatcttttttgcttcaagaacacgatgagcgacaataaaaatcttctcctgagacgaatggaagaagaagatcgagcaagaaaacaaatctctgttttatcctcaaaaagatcccaaaccacaaacgcaaacgcagctgttacagctccgtccgaggtggcgtttaacgtttgttgtttatgtgtttattgtcctctttgtgttctttggtgctgcatcaaacagccttgtacaattggatggagagccattctaaacgccaaacgcagattaagcggttgcagcggctgcggtagaagctttagcaggagggttttggctgctgattattcgtctttttcggatattgattctgatgatgtgaattgcaaagctcataattgctcaacacgaaatcggtgactacaaaaactttattgagtttcatgaattttccaaacttccttttttctctgatctaaacgccgacgcanacgctggagttgacttcatagttcataatgctgagttgatgaaaaatctcgagattaagctctattatttcgattaattagaggttaaagatgttgctgtgattgattttataaagatgtatatattacttggtgaagaataaagttgttttttt

SEQ ID NO: 152041 - DNA, 1253 bp, Arabidopsis thaliana landsberg
atggatagttttgttaaatgtagagatggggacttctttgctgtcaaggaagtttcacttcttgatcagggaagtcaggcacaagaatgcatacaacaacttgagggggtatggaagtttcagatatgctctgcgacatatgtctcattgatcagtcaaaagtaggttgccatccctccataccttagccacattttttcatttttctacaggaaattgcactactgagtcagcttaagcatcagaatattctgcgatatcgtggcacagacaaggtatggcactgttctccctttcttgttctgagttacagttgcctatgcatttcgttctgcaattaataacttatttcgttgtttgcaggacgagtcaaatttgtatatttttcttgagcttgtaacacaagggtcccttctagaactctaccgaagataccagcttcgggactcgctagtctccttgtacacaaaacaaatcctggacggtttgaaatatcttcaccataaaggtttcatacacaggttagactactaaactatcttgtcacagctgtaatttccaagcctctgatttcctccacatcctaggttacttacttttctcatttgatgcgacaaagggacattaaatgtgcaactatattggttgacgccaatggcaccgtcaaacttgcagattttggattggcaaaggttcttttccattaatagatgtttatagcttttactctaaattttttgcttggtccatcgtttatcccccttactcaatatatatgtcattttttttatttaggtgtcaaagttaaacgacattaagtcctgcaaggaaactctattttggatggctccagaggtatactttcgggatccttcctactgttttgattgttgtgaatacaatgacaaacatatcatatatcaatagcaatgatggatgttatactgtaactttaaatatgttcccgcatatattgtgatccaggcttgataagctcgaaaatccccggttatgtttccttcaggtctttgattaatctgaaactagtttgaaattatttctattttagtttatagttcttattataactgtgagtatgtaattagtgatcataggtaacagacgcggatgtatatcattttgattgtactttaggctatacttgtacaactgtgtttctaaactgaacataataatttgatcaggttattcttaacccgaaggattatgatggtatggaactccagccgaca

SEQ ID NO: 152042 - DNA, 1945 bp, Arabidopsis thaliana landsberg
  unsure (1)..(1945): unsure at all n locations
atgatcgggtcatcaactaggttgcctgcaatacaacgcttggtcaagatcaaaatcatagttgagcaattgcatttcaagatatcaacgcttttgttgcatggtggaaaactcatagaagcagtgacatggtttcatcaacataaaacatcatatgaaaaggttgtcggatccacagaatttatttttctccattgggactggatgagtaggcagtttcttgtctttgctgagttgctggagacaagctcagcaactggtcagagcttaacatcctcaaaccaaggaactgcggaaatatctttgactgagtttgagttttaccctgcctattattatcaggtcagtcaattctgctctatgtaacacatagtcggaacatatctaaacttggtggtgcattttgtgttaaatcttttctgtgtcttttaccatttagttaaaaacaatactacataaacttaaacacctacctctaagcaaatgctggatttttcgtcctctttctcataaatttctgagctgtctgttcctaggtacagtatgttgaaaatataatatgttcttatccactgggaaattttcgttttacacgcagttggctgctcattacttgaaggataagaaatctgccctggaactgttgttgtcaatgtctgaaatagctcaagagattgatagcagctctgcatctattactccttcagtctatgtgggtcagttcgctcagttgcttgagaagggagaagctattacacttcactcgtaagttgttcataattcatcccacaaatctatgtaaaagaaaactaattatgctaccaccatctctaatagtatgaattctaatgtatttgcagtataacggatgaagagtacacacggtatacaatttcagaagcaaagagagttcaggattcccttcaaattattggttggctgaagagatcttatgaatcatttaccaaccttaaagcccagaggatggctgctctttgtgcctttgaagtagcccgggagtactttgatttggctgatcccaacaacgcaaaattcttttnnnnnnnnnnnnnnnnnttgtacagacaagaaggttgggtaactttgctctgggaggtgttgggttacctgcgagagtgttcgagaaaccttgatgctttgaaagattttgtagagttttcacttgaaatggttgccctgcctgtaacatcttatgacaattctgggaacttaagaaacaaaaattatggtcctggaggtcctgcaacaatttcaggaagagaaagtatacatcaagaagtttttactcttgtttgtcgtgaagccgagctgttatcatctaccgaaggaagtgggttcaaattagccactgatagccctcttcatctcgagattgatcttgtcagtcctctgagacctgttctcctagcttcagttgcttttcacgatcaaatgatcaagcctcacgctttgtgctcttttacgttgtcactactttctcatttacctcttccagttgaaatagatcatctagaagttcagtttaatcaatctacatgcaactttgtcatcagaaattcccagaggcctctgtgggcttcggcgtctaacactgtgaaaagtggtagccaagtggagaatgcgccatcgctggtgcttgtgccgaataattggttaaggttgacatatgcaatcaagtctggttagtgtgatttaattataagggtgttgtttgtatctaacacactttgcacgtattgcagttattcattgaaattcaaacctgttttggacgttttcgtattcttagttaccaattagcagaactgaagcttcagaacttgtatctatcttatgaatcgcaaccgggaagttgttttcttggctgcctaacttatcacacatctctttgtttcatctgcagagcaaaccggctagcttgagc

SEQ ID NO: 152043 - DNA, 1047 bp, Arabidopsis thaliana landsberg
gaagcagagagagagagagagtgtgagagagaaagcagcttcttcttcttctcctcctcttctcccttatgtggatttcaaatccttctctgctactctctcttcacatttctctaccaacattcttcttctgacactcaacacacacactgcaacttccacagcttaatctagcaacaccaagtcaaaatccgccactaacgatgcttcttcaaaacttctccaacaccattttccttctctgcctcttcttcacactcctctccgccactaaacccctaaatctcactctccctcaccaacacccttcccctgattccgtcgctctccatgtcatcaggtaaacaaaagctcctccctctctcattacacattttcccagataaaataaaaactcaaactttcttctccgaaattcacaggagtgtaaatgaatctcttgcaagaagacaactaagctcaccatcatcatcctcatcatcatcatcctcctcatcatcatcctcttgccgtaccggaaacccaatcgacgattgctggagatgcagcgacgcagactggtcaacaaaccgacaaagactagcagactgttcaatcggcttcggacacggcacactcggaggcaaaaacggcaagatctacgtcgtaactgactcatccgacaacaacccaacaaacccaacaccaggaacactccgttacggcgtaatccaagaagagccactctggatcgtcttctcttcaaacatgctcatcagactaaaacaagaactcatcatcaacagctacaaaaccttagatggtcgtggctcagccgttcacattaccggaaacggttgcttaactctccaatacgttcaacacatcatcatccacaacctccatatctatgactgtaaaccttcagctggattcgagaaacgtggtagatccgatggagatgggatctcaatcttcggatctcagaagatatgggttgatcattgttcaatgagtcattgcaccgacgggcttattgatgctgtgatgggttctacagctattacc

SEQ ID NO: 152044 - DNA, 8692 bp, Arabidopsis thaliana landsberg
  unsure (1)..(8692): unsure at all n locations
atggatgttattgacatgctaaggggagatgtcaatgctaagcctcgaaagcgattctcaacatggaagaagttgagtctcgcattaatagtcctggttgatgggtttgttgtttgcagcaacagaaaacaacatcggataagtagctcatttcttgagatgcttcatgatttggaattctttatgagctacccatggggcgagctgcttttgaatcaacaatagaacggtttggcccttctattggggaaaatgacctattgctgaactcaagagccggctgataagtgtgtattttgcatgttttgagaatccatttgtcatcactttagcttcatatcatcactgttttataccatttctcatcatttgtcatcactttgcatgtttaggatagttttgcatgcatgttgcatatttgtgttgttttcaggtgattcagagctgttgacgagctaattggaagaagcggacctgatcatgcaaaaccactctacccccaggtcgagtagacgcttcacaacctcagcagaccactcgaccccctggtcgagtagaggacatcaccacttcacctcaccactcgaccacgaggtcgaatgtcttcatctccatcacctgaccatcactcaatcacctcactcgaccctgaggtcgagtgtcttcaccaccattaccagacaaccactcgatctcaccactctaccttgaaatcgagtatcaccatcaccaccactcgactacatactcgattaagagcttcagagtctttttcattctgcactcaaccagaccgtcgagcacaaggaagaaaagaagactccagctattcacttgacctcctactcgaccacctgggtcgagtacagttcttaatccgtcccaatactgcgtcgttttaagtattagggtttcaaaatattttgctataagtagcatgtacttcacattttcgcaaacaagtttttttttctagttttattccgcagacactgtgttctaaaccttttgtaatctggatttctctttatttattcagtattcagtattcagtatttgttcttaatttcgttttactgttgttcatcctgttaccatcttgctattactctgttgttatcatgtctccattccattcaacgtttatgctttctgctatgatgtctgagtagtgaataggtttctgaggatgggttagagtagtgtagaattctcagtatgctaggtggttgagtttgattgatagatcccttctggattagttgttcttaatgcctattgctttctgatcaactggaatttgagcccaaacatttccgcgcccaaaaggtgttcgatgaaatgtctgaaccactaattccagagattcgtgaccctgtaccaaggtattggttgcagggagcgtattggcttttacttgttgattcgtaatgcctgttaggttggctctcgtcaatggtgattgagtctgggactaggttagcttgagagtctctgttgcggtggcacttagatttggttaatgaacttgttgtctagggttaatttattgagcatgtcaatcacctgtaaactgaggaaacgaaactactcaattatcccatctttaggaattctttatctgattgattttattgtttactctactgatgtgtagcgcatcccgtcatccgttgcttagtttctgcaattctttacttttactcgacctgatactcgaccacccagttttctggcaacagactgtgcagtcgagtatccctgtttcattttctgtctgttactcgacctgtcactcgacctcacccagtgctatgcaaagagctgtgttggtcgagtgttttgctgtttctttttgattttctgttttctgcatgttcacttaggactgctagaacacatctaaatctgttatgcttggcttgacttagtaacttctgatcacatcttgattgttagcatcacacccatttggattgacaacctaaaatactacaacgatatgattgatgttttaggataattgacttaaaaaacctattatcaatttggcaccgttgccaattgggtgtttgtttgttacatttgagatttcagacttgcttagatcaagttctttttcaattttcaattcggttactaactgtgtgtttttcttgttgtcctcttgatccaggtacacctcttctatatgcaaactcgatcaacaggcaatcagaacctccttttcaacgacaacatcaaccgcatagctcgcgaactcagaaaaaggagaaccacagtcaaccttgtacctcagcaaccactcgaaatggctgacgaacagaatcaacaaaatggccctgctaacattggtgctggagatgcaccacgtgatcaccgtcagaggaagggaattgtacctcctgctattcagaacaacaacttcgagattaagagtggtctcatctcgatgattcaggggaacaaattccatggtctgccaatggaggatccactcgaccaccttgatgaattcgataggctctgcaacctaacgaagatcaatggtgtgagtgaagacggattcaagctccgtttgtttccattctccttgggcgacaaagcacacatctgggagaagaatctgccccatgattcaatcaccacctgggatgattgtaagaaggtttttctattaaagttcttctccaatgccagaactgcaagactcagaaatgagatttctggtttctcacagaatactggtgaaagcctctctgctcagcactctttacagaggagtcctaccacgcatcagaatgcttctggataccgccagaaatagaaatttccagaacaaagatgttgaagaaggctgggaattggttgagaaccttgcccaatcagatggtaattacaacgaggactgcgataggaccgtcagaggcacagctgactctgatgacaaacacaggaaggagatcaaagcgctgaatgacaagctggacaggattcttcttagccagcagaagcatgtgcacttccttgttgatgacgagcagtttcaagtccaagatggggagggtaaccagttggaagaagtcagctacatcaacaacaaccaaagcggctacaaaggatacaacaacttcaaaaccaacaaccccaatctctcctaccgcagcaccaacgttgctaatcctcaggatcaggtgtatcttccacagcaacaacaaggtcagaacaaaccttttgttccttacaatgaaggttttgttcctaagcagcaatttcaggggaactaccagccgcaaccaccacctggatttgcaactcagcaaaaccaaggtcctgctgctcttgatgctgaaatgaaacaaatggtacaacagctgctacagggacaagcatctagctccatggaaattgctaagaattatctgagttacataacaagctggactgcagctacaatgacctgaatgtcaaagtggaaacactgaataccaaagtccgatacttagagggacattctgcatcctcttcagctccaaaagtcacaggacttccagggaagtcaatacagaatccaaaggagtacgccaatgctcacgccatcaatatctgccatgatcgagagctgccaactcgacatgcctctacctctatcactagggacagtgaagttcaagaaggggaggattttgttcagaatgaaattcaagctaaaatagcattagaggagcccatactcgatcacagtactcgatcccaagctcaagtagtactttcttcagttaaaaagcttgcatctgctaaaaccaaggataaagtctttgtccctccaccctacaagcctccattaccatttccagggagatttaagaagcaactgataaagaagtatgaagctctcttggaaaaaaaattgaaggaccttgaaatcacaatgcctctagtagactgtcttgcgctaataccggactcacacaaacgtgtgaaggacatgattacagagaggatcaaagaagttcaaggaacagtggcgtcaattcaagagtgcagtgaaatcacccaaaagaagattgttcaagaaaagttggaagatccaggatctttctctctaccatgctctattagacaattagctttcagcaattgtctatgtgatttaggggcctcagtcagcttaatgccactcaccatcgtaaggaagctgggattcgtccaatataagcaatccaacctatccttgatccttgctgataggaccttaagaaaaccctatggcattctcgaagatctgcctatcaagatgaatggagtagaagtgcctacagactttattgtgctcgagatggatgaagaacctaaagatcctctgatcttgggaagacccttcttggccacagttggagcaagcatcgatgttaagcaaggaaagatatatcttaatttgggaaaggattttaaaatgaagtttgacatcagagatgatatgaagaaaccaacaatagacggccataccttcttagttgatgaaaagggtcagctagctaaggaactattagaagagcctgcttctaaagatcaggttgaaactgctttgactaggagtggtgaagctagacatctccctagtgagactttgagctatgataagtcattagactcacacaaggcagtagtaggaaaagaattctttggatcgaaaacagaggttagggcatcaaacaaggaaatctcaactcatactcgaccactatgctcgaccgtcaactcgagtaacctttcaacttgtccagagaagtcatgttccaccaaacagctccagtcacgcattttgcaatcaaatgataggttagtactcaaggagaagtctatatggcaggacaaagctataagagagttaacacacacggtgagtactcaaggagaagacgactatcgagatgatcaaaaggaaacttacaagaaaagggatattaagtactcaactacagatttgtcaagagagcatgttgagtacattgctgtatccattgaggaagaagaggagatttcaattcctctatatcaccctccttaagcctaatgagtgtgaggagtcaaactagagactttaaacaagctcacttgggaggaagtcccatgactattttttgtaaataaatttttactttcttgttatttttgatttgttttggttgtgtttgtggttctcaggaagaaaggaataacgtgaaggtagagtaaaaattcaaaacttttactctactgatggcctagagatcgagtatgagtgatgtttaaaaacctaaaaaacttttaaatcatcattttactcgaccaacaggagctacagagtcttatagagagttcatcaagtttagagcaaattttaggattttctgaaactttcctagtgaagaaagagtaatgattcagaacaaagagacaagcgagggacccactgctgcaccctatgtctcccacgctcctaaccaacagacaagaaatccaactccttcttctcacacccactcgaccccctcaccttatcccatctctacactccactcgacctcggcgacatcaccctcctcacttatcacttactcgactttgttatctccacctcacctattaaactcgacccatcctcattcatcatcaccaacaaaacaactctcatactcccaaccactcgacctcctcaccaccctcttcatatactcgacctcatctttctccaaacaccaaactttttgcaactctctcatctcccatagtcgctcattgcaattcaagtcctcaagtgttcgtcacaatcactcgacctctaccccaagaccatcactcgaccgccgcaactcacttctttttcaaagctatctcaccgacttctcttcttggcgcgagttcaacatcactcgagttctcatcacgattgtcattctcacaaactttactcgatctcttcaccaccatcttcataaccgagtcactcgattcaacaaacgcactcgaccgctgcaccaccttctcctccgtccaagccgcaccacttggccgcttcatctctctagcccatacttcactcgaccacagtcccacttcactacctctcattcatagccacttcactcgattcactgcatctctctcatcatcgctcactccgattatcaccaagtactcgatttcaaatcatcatcaacttcaccgctttactccattcactcgaccaccgttactcactcgacttcacggcaagagcacctccgcctctccaccagcacaatcactcgaatcaccgctcctccaatttcactcgacctctcattggctctcgctcatcaccgtttgaccaaggaatcataacctccacacatactcgattacaaagcaactagcgatcatctccgaaagtcactcgacctcttttaaaccgcttcaccatctctcgcctctcaaggtcactcgatcgcgaagcgcactccattcacacaaccaaggagtcactcgaccgcaagttcaccaaaccgaaaaaaaaaaaaaaaaaaattggttcactcgaccggtttactctgttggtttgggttttggttttgttgggactaacgtattaatgtttatctttgattttcgtctgttttcaggtttcatcatgagtaactacagtggagaatcctctatggaccctgattataatgtggatgaagcggagtcctgatccactagaccgagagagcaacatacttatgagagcttcagggatgaatttaaacgctccgctgctcgacgtaatcaaagaagagctgaaaccgctagaggaaagagggcgatgtcgagtagatatgagctgattgatgaggacatcgaaactgagtatgagccagagtcatggcgcaaggagaagaagctgctgaacaaacccaacgaggttacagtggaggagtatatcagattctttgagatgaatgacttctggggaacgaggtatccctgctatgagactttagccgagttgggttactggaggacgtgcatcatttgttcgagaagtgttatctggagacactcatgtcttaaccttacgtataaggaggagacaattgagtttctttccacactgtaagtagagatgtatgagggtctcacggactttgagctggataccatggggttagggttcttgacgttcttagtggatgaatagcggtatcagctttcgatcaagaagttggaagaactgtttggtttccctagtggaaagggaaccaaacccaggtttgacagggaagagcttaaggatttgtgggctactattgggaacaatnnnnnnnnnnnnnnnnnnnnnnnnnnnnnnnnnnnnnnnnnnnnnnnnnnnnnnnnnnnnnnnnnnnnntcggttgccaacattttttaccccagggagtctacaggcaccatgtctaacacggacatgaagatgatagatttcgcgcttccagggattctccgccgtacaaagggaaagaatgtcctgagaggcgatctcaacaacgcgccaccagtaattcctctgttgatccacctgtgtggatacaggaagtgggcattgacaaacggcaagaaaaaagtgagaggagcactatgcgtaggtggcgttgtgacaccaattctggaagcttgtggagtactgctcaaggaaccagggttagcaccgagaatgatggacttatatcatttgcgctgatgtgagttcttggagtatgacatggttggcgacttccaccgctacaggttcgagcattcatcgattagaatcgccaacattcttctcccctgcattgatgctactaggattctcgagggaaggaacattgattcttcaagcctgcgcttgaagatctttatttcgagggcagtttgccaactaaggagatcactcacacggaaggagctacaacagaagaggttgatgagacggatgaaacagatgaagtagagtttgacacgagaatgtatcatttcagtgagcatataccatatacctccagcgagggagagcaagagttttagtgaagctcacaagaacaacagcaagttatagaagtggtgcaagaaacaggataagtaactcgccaagttcttcagggctatcaagtttcttaaggacaagctcagctgctcctcttccactacagctattccgcagggacagctccctcaggacatgccttcgaggagatatgatgagcggacttggcctgagcctagtgagcaggagattccacatgtccatgcgaggcattcatcattcgagcctcgtgaatcttggaggaagaggagaaccacacccactcgatctagcagtacgagcagacgacttttgcagtctcgtagtttacatgaccgcggtgctggccgcagcagaaggagagaggtcgagtttcctcagagcggtgctggccgccatagagttgatgaggtcgagtacccacctgctggagctgataaagaacaaggtggttcgtctatggcttgggagcaatcacaggcagccattgacgagcaactacgtttcattcttcgactgaggtaagcgcctcatttcaccattgtattatatcatctgttgtgatttgtttcttcatttttttgtttctgtgattggatttgtcctgggtactctcttcaaagtttattcgcacagtggactgtg

SEQ ID NO: 152045 - DNA, 967 bp, Arabidopsis thaliana landsberg
gacggcgacccctccgggggcatacttactaaagcggccatggagttacatgagatctcaaagctcggccaataagaagcatccagagagaattgttgaatcgaagatgaagaagagaatgaaaccttattctctcacgtctcttaacaatctcgacgatggttgccttatgcatatcctcagcttcctatctccaattccaggtaaaattggtttctttttcgcatctattactttggttttctcatacttttatacttctttgttcaattctgcttttaattgtttcgttgtttgtaattcatttagaaaatttgaccaactgtttcacatcttaattacggttctgtgtctcaaatttactactttgagactttgcagatcctaatcaaatcataattgaattcaattctaatctccatgatgaattatctgtttctcttgacttggggtgtatgtgatacagctttgtagtaatgtaacagaatcagcaagaaagcttttgactttgtattgaattgctatgttttgatctgtatggtgttgtgtgaagctttgaaaatttcgtattttgtttgtatgattgacttgggcatttgttgcgtactacagtctgtttcaatgctgttttgtgtatctcttgtgagtttgcagataggtataacacagcactcgtttgccacagatggagatatctggcgtgtcaccctcgcttgtggctccgtgttgaccgttttgtcaaggatttatctcagcctggagttttcctcaacattgagtcagctgtatctgcagcaaggtttgtaatattatcagttacgttatttacacttctttgttattcgtaaaagggtccataaatctaaccaaattgtcacctctagacccggcgataccattttaatagtagccggtgggaactatcgcgtttctaatattcagattaaaaagcctctttgcctggtat

SEQ ID NO: 152046 - DNA, 515 bp, Arabidopsis thaliana landsberg
ggatgataagaattgtgatttgacatcggagatccatatcgggtgttctgtgtcggttagatagatagcaccaccacggcaagttaataggattttctctgttggagagtaatcagcagctgagattaaagttgctgcagatatgagaagaagaagaagagagagacggaattgtccctctgtgatcttcatcgatcaagagcacttctccgggacgatcttcttctcagatctatcaaacgaaagaaaatcgaaactataaacttcacagatctaaaaatggaaagtgctagaggtacatgttcgtttggttacgaaaattgagcttaagaaacagatgaaattgaagtttgaatacagtagtaagggagagtgaagtgaggaagatgatgatgatgattacatacctgaagaatcggggaagaaaccctaagcgatgaaatcggagagagtttttggagaagacagagatatttttggggagagagagagaaaatcaattaatgagtggagag

SEQ ID NO: 152047 - DNA, 1864 bp, Arabidopsis thaliana landsberg
  unsure (1)..(1864): unsure at all n locations
gtcgattacaccaccgtctttatcttccgtgtcttcatgtttgttgacaatggtcttgcttctggacttggcttgtaagttccatctaaatctccctagttctagagttacaatgagttttaaaggtttttactttttggaatcttccccggtttcccagagttatctgaacaagttttttttttgcgtaaaattgtctttgctatccttattccttagataggcgtttaattcattgagaagtattagattatgataaatataagctatttgggaagcatagaatttctttgtagctccagtcgaatagcctcttctagttgcaagctttatcttagaagtagctagttgcaacgtttctctatctctctaggtagcaaattttatgaatatatggtttcttatgtcacattgatttctggtatgaacatctgttagggattttggaagtcaacagcggaacgccatgttttgtgggagagtggttgtcctgtctgtcctatctctgctgctgtatccatttctgtgggcttggactgtaattggtacacaatggtttacaaagtcgaaaacttgtgtaagtagtttttccgatcatggcatatgattattcttgttggaaatctgttgctgagttagtatgtattatcttgccatagttacctgaagaaggccagaaatggggttttcttatttggttgatgtttagctactgtggcctcctctgcattgctttcatctgtgtcggaaaggtagatttatatcaagctgtttttttttttggtttgaagagggcaccccacttaatggactttacttgatagtggttgacacgaagacaggtacacttattacgtgctcagcagggaattccgatttcagagttcggggtaagttccaggatccgattattcaacttcaagtcctttacacgatgagatagtttcggagtttgtcattatgatttttgtctctaactgcttagttgcaattagtctctgacacttctgagtaatttttcaatgtctgtgtcttgtccccagattttagttgacatgattagggtacctgactgggcattcgaagccgcaggccaagagatgagaggcataagtcaagatgctgctacatatcatcctggactttacttgactccagcccaggcaagtctggtcatttattctcagcaagctaagcagcgagtaacttttcttaaataaatatgtgcctagaagcctgtggtttcaatctctcccatccagggaaacaaattcgcagcatttatgtttccagtacctgttgcacagagtctgtagagaggcagaaatcttctttgttaatgatgtcgacgaagagatcattggcaggatgtgattatgtccaaatttacatttatcatatctctgtctcatgattccaaaacatctaatatttgatggttnnnnnnnnnnnnnnnnnncagaagctgttgaggcgctcattcaagaacttcctaagttcaggttaacagctgtgccagatgactgcggtacatgctgaatgtgtttacagcagttccacatcggccatgaggtactaagacatcacttttataaatgatctccattgctagggatccaacttcttatccatgctgtgcttgtgtgcttttctcgtcccaatgctgtcctttgattgagcggattttgtctgaatcttacaggttagaggtttaccttgcgcccataatttccatgtggagtgcatagaccagtggctgcgtttaaacgtgaaatgtccccgttgccggtgctcggttttcccagacctcgatctcagtgcattatccaacctccagagctcaggaaccgaacaacattcacaa

SEQ ID NO: 152048 - DNA, 1669 bp, Arabidopsis thaliana landsberg
gattctctttttctctctttcttctcacttctctctgtagtttgtgtgtctctctcgccggccgatatggcgcctccgtagcaaactgctgcttctccgtcctcaatgcctccgttaaaattcaatcttcgtccatctcctcaccgtggtgtttcgtgtccgcatcgtcgttgactccccgagcttcctccaatattaagaggaaatcgtcgaggtctgattcaccatctcctatattaaacccagaggtacattccccacctcataaactcttcaatcaattcccccttcgttttttcttcttcttatatggttggaattattcgttgcagaagaattacccaggtagagttcgagatgaaagttccaatcctcctcaaaaaatggctttcaaggcttttgggtcacccaaaaaggagaaaaaagagtctctttctgattttagtcgagaccaacaggtttgcttccttctcctagtcgggcatttgtatttcctgtggtctaatgccatttccttgtgcagactgatcctgccaagattcacgatgcatcctttctcaacgctgttgtcaaggtttcgaaatcaaattcgctttcttccttaaaattcactctgcttgcttttgaacccacccgtgcttctttccaggtttattgcactcatactgctcctgattactccctcccatggcagaagcaaaggcaatttactagtactggaaggcaagcttttttttttttaatcacatgttccactttttctcgcttttaggttgtttcatgactccatcacatcttcttcaactgcagtgcttttatgattggagatggcaagctcttgaccaatgcccattgtgtcgaacacgatacacaggtttactttccttctcggacttcattttcttattatctgattttctcttctcattatgttaacttttgatcacatatctcttcatcaggttaaagttaagagaaggggagatgatcgaaagtatgtggctaaggtttgtttttcacctgtgattattacttctgctttcaattagtagcaaatatgtgcatgtattcatcaatatgctcattatagttcctacaatagaatttgtttatttctctcttaagttcaattaaacatgtacctgtcgctatacaattgaagataacttccctctcatttatcctgcacaggttttagttaggggtgtggactgtgacattgctttgctttccgtagaaagcgaggatttctggaaaggagctgaaccactacggctgggccatttaccccgccttcaggttccatcatctcatcagataatgatgtatttcttagtcttttcagtttttttttcaagttcagtcctcttcaaatatttaaagaacacatttgacggtctaagcgaagcatgaacaataccaaaaacaaaaaaacagatcttttttctttcctgcattaataagtaaaaggcataagatgttcttctctgtttctttatttctaattatctatctgaatatagctcttctttatagagttgccatgttggctttgatatgcaggattcagttactgtcgtgggatatcctcttggaggagatacaatctctgttacaaaaggggttgtatcacgtatagaagttcccgatatcttggctttgctttatg

SEQ ID NO: 152049 - DNA, 1732 bp, Arabidopsis thaliana landsberg
atggggctggttgtggaatcatgtgggcctcgttttaggaaaatatggcttgagatggtccatcgaactctggaaagagcaggtcctgcttttatcaaatggggtcaatgggcagccacgcgacctgatctattccccaaggatttgtgttcacagctctcaaagcttcacagtaatgctcctgagcatagcttcgcctacactaagaaaactatcgagaaggcatttggtcgtaaactttctgagatatttgaggagtttgatgaggtgccagtggcatctgggagtattgcccaagtacatagagcttctttaaggtttcagtatccaggacaaaagtccaagtcttcgctggttgcggttaaagttagacatccgggtgttggtgaatcgattaggagagattttgtgataattaatttggtggcaaagatatcgactttaattccagctttgaaatggttgagattggacgagagtgtgcaacagtttggtgtcttcatgttgtctcaagttgatctcgcgagggaagcttcacatttgagtcggttcatatataacttccgtagatggaaggatgtctctttccctaaacctgtgtatcctcttgtacatcctgctgttttggtggagacatatgagcatggagaaagtgtggcacgttatgttgatggaatggaaggacatgaatggattaagactagattggctcacatcgggacccatgccctcttgaagatgctcttggtattaacctctttgtatcttttgtataactgatatacgcttcatcaatgctcttaatctcaagtgaattgttacttcaggttgataactttattcacgctgacatgcatccgggaaatatccttgtccggaaaaaggcttcccgtggaggccttttcaaaacgaagaagcctcacattgttttccttgatgtgggaatgactgcagaacttgcaaagaatgaccgagagaacttacttgactttttcaaggcggttgcgcgtagagatggccggactgctgctgaacgaacacttaaattatcaagaaagcagaattgtcccaatccagaggcttttatcgaggtaatactatctttgctctaaggttctttgtacctcggaaaaacagtttgagttgtcaaatatatggaagatatctttcaaagttcttttatttgtgatggctaataatctatactctgacaggaagtagaggaagcattcaaattctggggaacccctgagggagatttagtacatccagcagattgtatgcacgaattacttgagaaagtaagacgtcatagagtaaatattgatgggaatgtgtgcactgttatggtgacaacattagttctcgaggtgacccaaaatcgtccccactttcaaattttagtgtagattttagatcatgctaagtttgatggaaggtttaaaaagaactaaaaaaagctaagcttattatagaaccagagcttaaagctgtagccattaaaactgtttttagcttagagaatggtttctatagccttgtttgattcaaaaactgtttataactccagagatattaagtttactttcgaactaagtaattggtttgattacagggttggcaacggaaacttgacccaggatatgatgtgatgcacacgttgcaaacaatggtgttgaaaaccgactgggctaagtctctttcttatacggtggatggataagaaggcgcc

SEQ ID NO: 152050 - DNA, 835 bp, Arabidopsis thaliana landsberg
  unsure (1)..(835): unsure at all n locations
tcttctgcgtcattatgggcaggatggggaaactgaaaaagcggattcgtccttgtgatattacaatcaacattggtaaagaggcgcctattccagaatgccctatccctggtgaaaggtcttgtttttatatgcttccctttgaaaaagacacatgttttgtttttcctatgacctgattctaagagtgctgttctttttcagatggaaagaagttaagcatgacaatactgttacctggcttgctttttggagtgatcctatcaatccaaaagagttcaagtatgtattcttggcagctagcagttcgttgaagggacaaagcgacaaagagaagtatgagaaagcgaggaagctacatgtaatgagcttttgannnnnnnnnnnnnnnnnnnnnnnnccatcctgctttcccatttcttacctagcaacataccatctgtttgcagaaccatatagggagtattagagcagcatacaccaaagattttaataacaaggatgtaacaaagcggcaaatannnnnnnnnnnnnnnnnnnnngataagctagcccttagggctggaaatgagaaggtaagttaacaaagattcttctttaattaaagagatccttcgttctattcattttctcattggttttggcttataagagatcattactccataagacccgcttcttactcataatagaacatgtttctggaatttcaagcaattctctcacattttcctttcttatttttattgtataggatgacgatgaggcagatactgttggttgttgtacattgaaagtaggaaacgtggagtgtattcctccaaataagttaaag

SEQ ID NO: 152051 - DNA, 6379 bp, Arabidopsis thaliana landsberg
ggaagagcctgctcagcaagatcctgagtcgccggatactgacaatccagctaacagccacccttcgtctcaagggaacaacttccaagaggaagctcctgggacattgcgggagcttcaagaagactcggcggtggctctgcaagatattctctcagtgccaaacagggagcagtggacttgtgtattgtctccaattcctaggccaaaaaccgtgtggtaagtctatcttcctttaatttgttttcgtgttatctgcctttgtagtgtaagtagacttgtgaatcctgcaagatagttgtgaatgatgggttttgttgcatgtttgttatgtgttgtgtaacatagtagccttgtgaatactcgtgtgtgctcttgtcaatactcgtgtgtgttcttgtgaatacttgtgaatacttgtctttgcttcgatttgaatactcgtgtgtgctcttgtgaatacttatgaatactcgtgtgtgctcttgtgaatacttgtgaatactcatgtgtactcttgtgaatactcgtgtgtccttgttcagttctatacttgtgaatcgtgttctcttgttaatcgagtctcttgttaatcgtgttctcttgatgttctattgtggaagttgactttgatgtctgttaattgtgttctgttgctactcatgctcttgttatgttctatagtatgttctcttctctactgtgttctgttgcaactcatgatctattgttgaacatagttgacttttgaacttagttgtgttatattttgttgtgtgcttttgacttttgaactcatactcatttcttattaattgtgttctatactgttgtgtgctcttgttcagttctatagtgtatgttctgttgtgaatctgcctcagttctgcctgtgtagtgtgtaacatagtagacttgtgaatctccctcagttctatagtctgttctcatagctgttgttgtgttttgattttttaacatgtttacttctttcattgttgcatgtgcttggaggtttactcgcgacagaggatctaaactggttagaaagatcacaaggatctttactcaaaagttcaatgctccttactataaatggtcctctgtgccattggctaaaagagagagactgtttttagagttcgcggtaagcttcctgactctttgttttgttcagtctttgttttattgtctgctcaagttcagttcactaacttcttctttttttgtataaaactcaccactgggatcccttaatcatagggactgtccaatattacttcaatgagatcatcaagaggcgcttgaaggacatggtttgcaccgcaaggagaactcgagagcagcctccatggattggagaaactctgtggggaacaatgtgtgcttactgggacacagaagaagcccagaaaaggagtcagacctattctaaagctcggctctctgaccgtaatgatctcggtccacacatccactactttgggccaaagtcttatcaagaaatccaagatgaattggtaagtgtttcagcatcctttcatgtcttttagagtcgttcaaatcataagttagagttttattgtgtgtcttgttcagttcaagcagtctttgacttgtgaggatattgatctgtgtttgtgataagtgtgtattttgcatgttttgagcatccatttgtcatcactttagcatcatatcatcactgttttataaaatttcacatcatttgtcatcactttgcatgtttaggatagttttgcatgcatgttgcatatttgcgttgatttcatgtgatttggagctgttgacgagctatctggaagaagcggacctgatcatgacaaaccactcgacccagaggtcgagtaggagcttcaagatctcaagagaccactcgaccaccaggtcgagtagaggacatcactacttcacttcaccactcgaccacgaggtcgagtgccctcgtttccatcactcgatcacttcactcgatcacttcactcgaccatgaggtcaagtgtcttcaccttcactgccagaccactactcgaccacatcactctgcctagaggtcgagtacctccatcacaccactcgactgcatactcgatgacaagcttcagagccttcttcattccgcactcaaccagacactcgagcacaaggaagaaaagaagactccagctattcactcgacctctcactcgaccacctgggtcgagtacagttcttaacccgtccaaatacttcgtcgttttgagtattagggtttcgggatatttggctataagtagcatgtacttctcattttcgcagaaaagaagtttttacctagttttatttccgcagaccttgtgttctagactttttgtaatccggatttctctttatctattcagtattcagcttttgttcttgattttgtttactgtagttcattctgttatcatcctactgttacactgttgttagcatgttttcaacttgttcaacgtttatgctttctgttatgatgtctgagtggtgaataggtttctgaggatgggttagagtagtgtagaattctcagtatgctaggtgattgagtattgattgatagatcccttatggattagttgttcttaatgcctattgctttctgatcaactggaatttgagcccagacatttccgcgcccaaaaggtgttcgatgaaatgcctgaaccactaattccagagattcgtgaccctgtaccaaggtattggttgcagggagcgttttggctttaacttgttgattcgtaatgcctgttaggttaactctcgtcaatggtgattgagtctgggactagattagcttgagagtctctgttgcggtggcacttagatttggttaatgaacttgttgtctagggttaatttattgagcatgtcaatcacctgtaaactgaggaaacgaaactactcaattatcccatccttaggaattctttatctaattgattttattgtttactctactactgtttactgcatcctgtcatctgttgcttagtttctgcaattctttactgttactcgatctgatactcgaccacccagttgtctggcaacagactatgcagtcgagtatccctgtttcatttcctgtctgttactcgacctgtcactcgacctcacccagagctctacaaagagctgtgttggtcgagtgttttactgtttctgtttgattttctgttttctgcatgttcacttaggactgctggaacacaccaaaacctgttatgcttggcttgacttagtgacttctgatcacatcttgattgttagcatcacacccatttggattaaaaacctaaaatactacaatgacatgattagtgttttaggataattgactaaaaacctattatcaatttggcgccgttgccaattgggtgtttgtttgttacatttaagatttcagacttgcttagatcaagttctttttcaattttcttttcagttacttactgtgtttttcttgttgtcttcttgatttaggtacacctctgctgtatgcgaacccgatcaacaggcaaccagaacctccttttcaacgacaacatcaaccgcacagcccgcgaactcagaaaaaggagaaccacagtcaaccctgtacctcagcaaccactcgttatggctgatgaacagaatcaacagaatggccatgccaacattggtgctggagatgcaccacgtgatcaccgtcagaggaagggaattgcacctcctgctatccagaacaacaacttcgagattaagagtggtctcatctcgatgattcaggggaacaaattccatggtttgccaatggaggatccactcgaccacttggatgaatttgataggctctgcaacctaaccaaatcaacggggttagtgaagaaggatttaagctccggttgtttccattctccttgggcgacaaagcacacatctggggaaaaaatctgccgcatgactcaatcaccatctgggatgattgcaaaaaagcctttctagcaaaggttttctccaacgccagaactgcaagactcagaaatgagatctctggtttttcacaaaagactggtgaaagcttatgtgaagcatgggagcgtttcaaaggttacattaaccaatgccctcatcatgacttcaagaaagcctctctgctcagcactctatacaaaggtgttctaccacggataagaatgcttctggataccgccatcaatggaaatttccagaataaagatgttgaagaatgctgactcggaccataacagctgactcgcatggcaaacacaagaaggagattaaagcgcaaaatgacaagctggacaagattcttcttagccagcagaagcatgcgctcttccttgttgattatgatccgtttcgagtccaagatggggagggtaaccagttggaagaagtcagctacatcaacaacaaccagggctgctacaaacaatacaacaacttcaaaaccaacaaccccaacctctcctaccgcagcaccaacgttgctaatcctcatgattaggtgtatcctccacagcaacaacaagggcagaacaaaccttttgttccttacaaccaaggtttcattcccaaacaacaatttcaggggaactaccagccgccaccaccacctgggtttgcacatcagcaaaaccaaggtcctgcttctcctgaggctgatgtgaaacaaatgctgcaacaactgcttcacgggcaagcctctggctccatggagatggcaaagaagatatctgagttacataacaagttggactgtagctacaatgatctcaatgtcaaggtggaaacactgaataccaaagtccgatacttagagggacatgatctgcatcttcttcagctccaaaacagacaagccaactaccagggaaagtagttgagaatccaaaagaatatgctcatgctatcacactgcgtagtggaaaagtacttccaactagggaggaaccaaagacagtcactgaggacagtgaagatcaagatggggaggatttaagtctcgagcaaccactcgagcaaccactcgaccgtgctactcgacctatcttcccagcagaatcatcaactcctccaaaaccagttgccgtcaaaaataaagaaaaggtctttgtccctcctccctacaaaccgcagcttccatttcctgggtcgtcacaagaaagcgttagtagacaagtatagagctatgtttgccaagaatattaaggaggttaagttgcggatacctcttgttgacgctctagcgctaatcccagactctcacaagtttctgaaagactcgatcgtggagagaattcaaaaaatacagaagaagatcattcctaagaagcttagtgatcctggttcattcactctaccatgctctttaggtccattggctttcaacagatgcctatgtgatttaggagcatcagtcagtctcatgccgctctctgtcgccaaaagattggggttcactcaatacaaatcctgcaatatatccctcatcctagctgacagatcagtaaggatccctcatggtttgctcgaaaacctaccaatcaagatcggagctgtggagataccaactgactttgtagtcctggagatggatgaagagcccaaggaccagttgattctagggagacatttcttagcaactgcaggagctatgattgatgtcaagaaagggaagattgatctaaaccttggcaaggattttaggatgacctttgatgtcaaagacgcgataaagaagcctaccatagaagggcaactcttttggatcgaagaaatggattagctagctgatgaggtactgaaagagcttgcacaagaagatcaccttaacagcgctttaaccaaaagtggtgaagatgggtttccgcacttggagactttgggatactagaagcttttagactcacataaagcaatggaagaatcagaagcgtttgaggaattgaatggaccagcaatagagataatggtgatgagtgaagaagggtcaacacaagttcaacatgctcactcgagtacatactcgaccagtcactcggccgcaacagccagcgactctggggagctgatcattccgacttcaaatgactggtctgaactcaaggctccgaaggttgatctcaaaccacttcctaaaggtttaaggtacgcattccttggtccaaactctacttcatccgtgatcattaatgatgagttaaatgatgatgaagtgaacctgctattatctgagcttagaaagtataggagagcaattggttattcattatctgacataaagagaatttcacctagtttatgcaatcataggatccactttgaaaac

SEQ ID NO: 152052 - DNA, 984 bp, Arabidopsis thaliana landsberg; identical to SEQ ID NO: 24733

SEQ ID NO: 152053 - DNA, 725 bp, Arabidopsis thaliana landsberg
ggccccgtgagcttcaccgcagcttttagatattttctttccccgttcttccggattttttttttctccccctctcaagcaaagcattatcgctattgctctgccttgtgagctgcgatcacctgtttactggtaagtctctcctcgtcttctccttcttcttctctgggagatcttctactgttctctctgtgagctgatttgtttggtttcctccatagagctgatcatatcatcatcgttgggaaccgacgagatttagtctatattggtgaattatttttgtttatctggttttgattttttgaatctgtgactttagagagaagaacactgcgacgtcgttaaaagtaggttgagagcgagaaaggccgagagaatggagatggaagaaggagcaagtggtgttggtgagaagataaagattggagtctgcgtcatggaaaagaaggtgaaatgcggctccgaggttctgttttcccttttttttgtttgtttgttgctcgtctttcgcgtttttctactgaccaacagattccgattacacggctccatgatgaccggtttgtcttttttttactacgtgtgttctcgctcatacattccttgttgttgttgctttataggttttctcagctcccatgggggaaattctcgacagactccagtcttttggtgaatttgaggttcctttctcacttgatgatcaatttgatactctctgg

SEQ ID NO: 152054 - DNA, 868 bp, Arabidopsis thaliana landsberg
aatttttgcaaatcttactcttcttttcagctagattttactaatcactcgccaagaacaaccaatggccgttcgatcaaccgtaagtaacctaagacgtcgtcgtttctctatgattcatttggtcttcacgatttgacttttatcattttgtgtttgaagggtcacttgaaaaacgtagtgcagaggttaagaacttacacgaaggcgacaaccgtaccaagatccaaagcgtattctacggcggcaacagagtatggtggccagagaaccgccaccacagcggcagcaacaaaaggtgacttcacaccagtttacgtctccataggattgatttcattgtcagtaacatttggtgtctacactgcgtatcttcatctacacgaaaaccctggcgtacgtgtcaacaagaagatgagagagaccgttcccgagatcgaagatccagatagagttctaaacgaagcggaccggttcgctaacaggtcttggtttaggaaaatagctcacgttcaagagtttgacaagcaggatgtgatctctgacccaatcaggaaagaccagtttgctcataaacctcgtgccttgacgcttaaggatgttggcgttgatcctaagatatcggctgctgcagctcactaagttttatgaaggctggtttatgtgttttgttttccatgtttctgtcgataaataaaacatctgaaggagatccaagagttttcaaatgggtcggttaaggttttatcctgtttcctcttggatgtattacagtgatcaagcaacttttgagtgtatttgtgttgtttcaacagcatgtaaattatctaatgaaatttcggtcgaggtaataatacaacttcgtttt

SEQ ID NO: 152055 - DNA, 362 bp, Arabidopsis thaliana landsberg
cattatgctcttccatcaatcacctaggccttggcttcgccggaaaactgagagcttgccggagtttcctctgccccgacggactcgaattagagctagcgataggcattccgaaagtcatggtctgtgagagattcaccatatccaccattgattgcgtctggtaagaagttgtagttgaatcactcatatcgcctctcgccgttgctcgctgccaggagtgcgagctcagaccggcgagcacgtaagccctacccgaagcctcatatacttgacggctcgccattctctcttgcatctccttcagctctgcacacagtgtgacacacaattgatctccggctcgacccgacacggactcg

SEQ ID NO: 152056 - DNA, 1049 bp, Arabidopsis thaliana landsberg
atgaaaccagccgagatcaatcgggtgatggacattacagtatttggggatataagccagagaaatggcaccaagattgtgtgcagaaacgagttgttgatgggaaagtgtgtgtggccgttctctctatctcagctgaactaatgaggaaacttcagggagaagaagaagaactggagatagtatcaagattctgtgtatatcttctcaacaaaaccttgtctgaaaattcgttttcttggcaagacactacggtgagaatgagattcttttaaacaatgttagcctatcatcaaaagctttgcttatatcttgttgttttggttgatgcagagcttaagaatacacttctctactagtattggtgtgtccgtagagagattatcggccatttttgtgtctgcgttcagagagcttaacgagatgagtgatggagtaaaaatggacagcttgaaagaacctatcttcaatctcgtccctgtccttggtgctggaaactcttctgcttcactcgacaacataatcacctgtgaactatttgccctaaggtcgtagctttcctgtttctcaaggaacacaaaggtttacttacttgatcttggggtcatcaaggtcatcaagggccatttgattttgcaatgggtaagccaaattgaacggccctatgttttaggcggacagttccatgccgttttttttgaataccttttccatttgcgaaagaacaacacgtagttgttttgttccaaatggaaacggcacgatgtttgttattcttttcttttctttttttccaagtggaggtgcaaagactgtttactttttgccaaacccagtccaaatggaatttatttttatcgaaaggcatgatattattggtcaatacattagtgcaatatgaatgttatttacccgaaacatttagcctggattcgggtttaccacagactgtatgtaactctcctgtcacaagtcgttattattaaacgtatgttagaatctaacgcagagaatgtgacatgttacgcgaccatatatatctcagaaag

SEQ ID NO: 152057 - DNA, 465 bp, Arabidopsis thaliana landsberg
accaaacggatgctgatcaagggcctatggcctaaagaaagagattatatataagttcaagggaaatgcattaactaaaactgaaaaactttaaaatcatacattttgcattggttatcggtccaaatcataatcaacttatttgataatcaaaatcataagttcatattccaaatccgaaaactgcacggatcctatggaatataagatctctccatcctctctcagtgttttccaccacagtcgcattcccgtatctgcatcaaccattggataaacatcagataacagtagttacatcaatgtcctcacatttagcaacattgaatcactcactcatcttaagacacaggccatataccaaagaaaaaaaaatcatcagttatcaagtgttcacaaggaacaaagaaaagttatattgtcagcataagctaagagtgagttagtagcaaagattgacataga

SEQ ID NO: 152058 - DNA, 308 bp, Arabidopsis thaliana landsberg
caagagaacttatcagcaatgaacactgatccattgtactcagcttatcactactcacatcctcctcttgttgaaaggcttcgagccattgatggagaagacaagaagacagattaagtccgcttaactcgtctcttgtacgggttgatgtcttttaggtgacaggtcgaaacaaaacaaaaaaaagtgtaaaaccatataggcagaggcctcttttgtttgttttttacttttacagtgggttttgcctagttactactagtttttgagtttcttaaaagtggaatcactcgcacggttcgatatga

SEQ ID NO: 152059 - DNA, 543 bp, Arabidopsis thaliana landsberg
caactatctcattctcaagcagtgaaaccgataacccttatagtcactcagaggaagtaatctcattttgtccccccctctctaacaatacacgtcaaaaggtcatcacaaggctcaaggagaagaagagagcaagagtgtaagtcttaaacaccgatgatcctaattcacattaaatagtatatcttaaacttttcataatgtaactagcattttcttaattcaggaaggagaaaaaagcttaatatggtcccaagaaaatggcagagtaacacaatttcttgcaatgcctttgtacataagacactaatctacctcttcatctattttacatggctcagtttcttgcatgtaactgtgaatctgaagattcatcacttgttgattattttccattttgtaaccacagacaggtttgcaccaaattcaccagaattaacctttttagaagtcaaatcacaaggtttaacttacaaaaacaatgatgagatagcaacagtgttaccaataaccataattggtgtttggcttaaatcatattga

SEQ ID NO: 152060 - DNA, 1254 bp, Arabidopsis thaliana landsberg
  unsure (1)..(1254): unsure at all n locations
atggcggttggaatggagaacgcgacggcgtctggtgaatgtggcgagatacttaagccacgcaccgacaagagagagtatcggaggattgtactcaaaaattcgctcgaggtgttgttaatcagcgacccagagacccagagaccttgttctagttttactgatgataaaaatcatgacgattccttctttgccttttttgctttttagtgtgctgcttcaatgaacgttagcgttgggtcgttctcggacccggacggattggaaggcctatctcatttccttggtactttttatttattcccgttttaattcttcattgcaggattcaatcactgagctgagtctaaactgtctctataaacagtgtatttatcaactctttcctgtcatttgaagtcgtgtggattcttgatggccatggtgaataacttgtgatttttattgtttttttgggggtcagagcatatgctgttttatgcaagtgaaaaataccctgaggaagatagttactccaagtacatcacaaaggtagtgtttctctctaactctggaatataatcgatgtcttgcatcggtttcttttgctcagttaaaggcaactttaataggaataaaatgggatgtgcttattggaattctgtttttgtagcatggagggagcacaaatgcttatacttccagtgaagatacaaactaccatttcgatatcaacactgattctttttatgaagctttggacaggttagacttccatttgtttttttttttgtttttatctcttgcttactaatttttcttttgacagtgttggatttttatgttattgcctgaccaggtttgcacagttctttatccaaccactgatgtcaattgatgccaccatgagggagatcaaggctgtcgactctggttagcttttgaatttctcggtagctttcctgttgaagtttgcttatagaacaaattcctaacaagttctcccatccagagcatcagaataacttgttgtctgactcttggcgtatggnnnnnnnnnnnnnnnnnnnnnnnnnnnncaaatatctgtgttaattgtactatatctatccatctagttattggcactgaagtgtgcatttcactggtttcttttgagcaagtctgttgatgtgtttgtagtatctaacttggattttgtcttccttttcgtggacacagttacagaagcatcttagtagagaagaccatccatatcacaaatttagcacaggt

SEQ ID NO: 152061 - DNA, 432 bp, Arabidopsis thaliana landsberg
  unsure (1)..(432): unsure at all n locations
gaagctcggagatctgactttaccaggcggtgttcagatcagtctacctgtactgcatgtacatcgcgacaaggagctgtggggaaacgatgcaggggagttcaagcctgagagattcaaagacggccactcaaaagcaacaaagaaccaagtctccttctttacctttgcgtggggaccaaggatctgcattggccagaattttacaatgcttgaggcaaagatggcaatgagtttgattctacagagattctccttcgagctttctcctacctatgttcacgcgccttacacaatcatcaccctttacccacagttcggagctcgtctnnnnnnnnnnnnnnnnnnnnnncataaccccttgtattgttatcgaataggctcattatctttatatgtatccaagtcagaactcgtgtcatagtttaatga

SEQ ID NO: 152062 - DNA, 562 bp, Arabidopsis thaliana landsberg
atggacctttgtatgtgtagggtcgagtcttcgttggctgataaagaagttggaaacagtgaaactatgtcttcatcgtggtctcagtatctttccattctgaagattatcaattcaatgtctaacatttatcaaggtgctaagggacagctagctgttatgttaaataaaaacaaggtttcattctccgccctcgttgtgaaatttgctaaaagaggagatgaccaccaatggatctttgagtataaggaagctaccaactttgaagctaggaggcatttggcaatgctcttgtttcctgacgtgaaagaagactttgaggagatgcacgaaatgctcattgatcggtccaatttgctatcagaatcatttgagtacatagtgggcgcaagccctgaagcacttcatggtggactgttcatggaattcaagaatgaggaagctacaggtcctggtgttctacgagaatggttctatctggtatgtcaggagatattcaatccaaaaaataccctcttccttcgatctgctgatgattttagaagattctctccaaacccag

SEQ ID NO: 152063 - DNA, 523 bp, Arabidopsis thaliana landsberg; identical to SEQ ID NO: 49096

SEQ ID NO: 152064 - DNA, 367 bp, Arabidopsis thaliana landsberg
gtgattccacaatcacgatcaatacaagagccatcaagtagaactgatgatgtgtaagattacaaacctgctcatgagccaaagaaagcttcattttccattttcctaatttcgctacctctgccattttatcagaagcaatggttcttcaaaagatcagccatcatcaagaaagagaggacgacattcatcctaggattcaactacaagactcacaactctagcccgaaaatcacattgaaatgcacaagaatatgtagtgccatttcgattgtacggtgatggagaagttgttgtgatattgtaggatgttcattttgactggtggtaaatagaacccagaagcctgtggctaataatttcttct

SEQ ID NO: 152065 - DNA, 1615 bp, Arabidopsis thaliana landsberg
atatcaaacgtcaccaatttttttttatattactatgagtaaagaaccaagtaagctcttgagcaaaccacaaacaaatgtaaaatacaacatattaataatcaaaaggaaattaaaggtacaaaatacaaatcatcaaacgggggtatatatgcgtaattaaccaaacaaaaacacaccacaatgaaacaactcactacaacaatcttatgataaaatgtacatcatcaatcacatgaagtgatgatagttcaaggactcgaagtagttgtagaaggcgggggagagaagaacggaatggatgggagactagtcggaagagagggaatggatgggagattagttggaagagaaggaatggatgggagattagtcggaagagaaggaattgtagttggaaatgaaggcaaagttggcattgccgtgggaatggtgggaagatttggttgtggcaaagctgatggcattggaaatggagacattgcagtgggcattgtggggagagttggtaaagatggttgtggcaacgtcgatggcaatggaggtagtcccattgttgggataggcagatttgggatttgaggaagaggttgttgttggagaaggcggcgtgaggctgagcaagtgttgatcatcattgaggaagagacgctcactaagaaagcaatgagaaagagcttgtatgatgccattttggatgtgttgataaatctctaactatggttaagtgggcctagtgatgttaaaatgggtttcactgcccatttaattaaatgggtatgttgttaaataaatagtccatttagacccatttataaaaaattgttttaattggttaaatgggttaacccagttaagcccacttattaaatgggttttctcttaaataaatggatagcccatttatttctaacctaaagaacaatttgcagagacacagtgaacaatttgttgcgtcgctaatcgaatcaatttgctgagatcttgctgagaaaaaaactctctctccaattcactcaggtaaaggaacaagacccatctttcttcttccatcaattttgttccagacccaattttgttccaaactgggaagtgacgttttgttttattaatgagtaccaccaattcttcttccatcgttttacctttttattaaaacattcgagaaagtgttttatatgttaaagcatctccacagaggaaagaggcatttgcagcctgtgtagagagagtgggaataaggagtggggcagggttatctcttgatgttccaaccagatggaactctacatatgaaatgctcgctagagcattgaagtttagaaaagcatttgatagcatgaaggcttttgacaccaattataagtctttaccatcagatgatgagtggaatcgtggtgaaaagatttgtgacttgttgaagccatttagtgtaatcactacttatatttcaggttccaagtatccgacatcgaatgtatacttcacccaagtatggaggattgaattactattgaagaagtacgtcacttgtgatgatgaggatataaagcaaatggctatggaaatgaaaatcaagtttgctaagtattggaaggattacagtcttatttag

SEQ ID NO: 152066 - DNA, 843 bp, Arabidopsis thaliana landsberg
atgaaatgcacatttcaatcaactcgtgctccattccaatgcgcttggtggttcccaaattcaatctattggactctcaaagaaccaatcgttttgaaaatacctaattcacttgcttctttgaggtctatcagacacttggagttgaaatctgtaggttcattgtacaatgtgtttgagattcataggaaagaagtcaattcaagtcttttggaagtgaaagctatgaacaaagatactgaagctgatagtgatagtgataggaagattaaagaagaggaaaggagaaggaagattggattagctaatagaggaaaggtgccatggaacaaagggaggaaacacagtgaaggtagaaggatcttttcttcgattttctgcattgtttcttctttgaggctttgtgtagtgagattgttgatactctttaacagacactcgaagacgaatcaagcagagaacaatcgaagctttgacaaatcccaaggtgaagtcaagtaagattcaatgcaaattcagggacattttgttgttgtcccatattatattgtttacagtgagaagtgaaggaagaaaacttatttggcaaagaactttttcttctcttcaatatcttgcaggttcggaagaagatgtccgatcatcaacaaccacacaggtagatttgtaaagtattgagtgtagaatagagaacaatgaagctagagccatatctaagctaagtttgtctcttgcagtaatgaaaccaaggagaagataagagcttcagtgaaacaagtttgggcagaacggtcaagatcgaagcgattaaaggagaagttcatgtctttgtggtcagaaaac

SEQ ID NO: 152067 - DNA, 325 bp, Arabidopsis thaliana landsberg
atgaatagttcacttgggttgtttttaatactttttttttaatcaatgagaaatcaatgctcgtgtcttctcttgtcagccacaaaactcataatccggttgagtatcatgattaataatatgtcacacttttatgctgctgatcggctcactatttcaaagaaaatcataagcagcgtgaaacgggacggtctagttttggtcgataccgttttacatcaatgatgcgaatttgacaaaaatataattttttctcgacggtaggcacatttttatgggggaaaaatggtacataatgagctattatttgtctatgatatataac

SEQ ID NO: 152068 - DNA, 1063 bp, Arabidopsis thaliana landsberg
gagtgagcaatggagatataaatgtagctcctgaagtttcacaggtaagctaaaaaccatggcttcctttcaaggaattgtcagagattgagttggttcagcttttggtgatattggtcattgttgtgtcttatgcagaaaagagttagggtttctagagaaatgacgtttgaagatatttacggtgctgatgcattactcaatgatgatgatgatgaggaggatgattgtgattgggaacctgtgcaggcgcctatggagtttgtaaaatggtgttgtgtcaattgcactatgtcgaaccctggtgatatggtccactgttatgtacgttttttatttactttttcttgcttggctactactttttatgatttcaaagtgacaaacgtacgtctgagcaatgcgcattggacattggttatgtattagtaatgttgattccttgatgtagatatgcggtgagcacaaggaatctggcattttgaggcatggatatttagcgtctccctttttaaaagacactggtctcattgaagtcgaggagaaatatggaggtaggaattacttcccttgcttcctctgaaaatatctttataaatattgttagtctcagttccatgctatttaagtaactgtaagcatgttcacttttcttttaacttgatattaggaagctcatctgcaaccagctcgacagctgttgggttcgacgagagaatgttgctacactcagaagtatgatcctgttactgttatgtgttatgttttcctgagaaacctctagtatctattgacatctctacgttatcatctccaaagcttttcttcgtgcaagtttttctatttaatatgtgctgatggcatgcttaaaaagtttgaagtgaaggcacaaccacatccagagagacctgatcgtcttcgagctatagctgctagtcttgccacagctggtatgttgcgtttacttcctttaaacctagcctctcttgagaagaagactaatgtttggaagctgattattattaagatttggagatcattatatagatctcttgcagccgac

SEQ ID NO: 152069 - DNA, 367 bp, Arabidopsis thaliana landsberg
gcatgaccatcccacatggagagacagagaacgagaccgtccgcattactcagaccatgagtaccctcctagcagacggatagcatctgactgggcccatacagagccgctcccaaaacctcattatgacagacgaccacctctcagtccacctcgtggtggcagatggggacgagttttgagagagaggagcagatccccgccattgagagatgttccaccaccgccattgagagatggtccaccaccgtcattgagaggaggcggtccaccgctgcacagagattaccgccgtgacagtcactttgacagagaaagacgagacgatgggcgtggcggcagaggcagaatgggaaactcttactga

SEQ ID NO: 152070 - DNA, 3203 bp, Arabidopsis thaliana landsberg
ctatatttcaatcctgctactgtgaagatgctcagcaatctaaaagttctggtgattgctgtactactgaagatgataatgaagcgtcggttttccatcatacaggtcacttcacttattcttggttattgtatgtgtgattattatagtatcagatatattcttatggatgtatctgtttgaccatccttatctcctactcttattgggatttaatatattattttttgttgtagtgggaagcacttgctttgttgctcatagggattagtataaatcagctgcgttctcttcctgaaggtgctacaactgtggctgttccaattgctacgggtgcatacatctgtacctttatctttgtaagttttattttctggcttttatatatgattctcttggaaatttagtatggaagtgatcccattgctgtaattcatgttagaggcttattaagcacatcatcatgcaggttactgtcccatctttggcatctgtctacaacgagtatgctctaaagagtcagtatgacacaagcatttatctccaggttagctaatcttgatgcatagtttttttcttccatatagcatccgataaatgagagacttataataatattggagaaggcttgtgctgaccgttgtttgtaactgttggttatagctgttgattctttagtattataatctgtgaggcacatcgctggaactggcatgaacatcacagtagcagtttctatagtaaaagtagaactctttgcctgggttgtagaactcttttttcagttctatggttagctggctgtgttgacactgtggtttgatacagaacttttggctcgtgttgtggaacttgctcgattatttggtctagtcacctctcttagcaatgttgttgtattagtcatgttctttagtctagtcaaattctaacgaagattctctcctgcgttctgaatgtaaagctttaatttcccttgtgcagaacttatttctttatggttatggtgcgatattcaacttcctcggaatactaggaactgttatatataaaggtatggttattttaacatggcagagaagagtacgataaatatttaagtagaatgcaaaaaagcttattaaattaaatcctgttaaacgcagtaatcacaatcttgccactgtgtcgacaggtcctggcagttttgacatcctacagggacattctagggctactatgtttctgatactgaacaacgcagcacaagggattctatcctcctttttcttcaaatatgcaggtaaaaataacactcaactttgttacctcagttaatttatggattagttctggatatggtggttcaatatattaaatttgaattttgctatacttggaaaatataaaccggtcagtaaggttatattctaagatatttagttgcctttgtgtccatatgttctcagatacaatcttgaagaaatattcgtccacagtagccacaatatttactggcatagcatctgcagcactctttggacatatattaacaatgaattttcttctgggaatttctatagttttcatttcaatgcatcaggtaatgttatacaaaccgtttctcaagcgtgtatcaattaactttctgaaaggatcgcctctataaggctgcctctgattcatctcttgttttctctaccttatatttatgcagttcttttcacccctttcaaaagcaaaagacgaacaacaaaacggaaacatagagttagttgacgcaaaggatggccataggtgtgttcaattattctttctctgaaaccgtattacagttataaacaaagtttgttcttttacaccatttaacttcttttcttcttctcttatatacttcaggcctaaagactcattcatcaacatggcagcaggagcaaatgaagaggtaaagaacatacacattcccatcttctctgaaatccatttcttgtaaaaaaaattcgactcaaaaactgaaatcattgttatgtcttccttctctgttaccgcaggctagtcaccacattgaatcagatgacagagtgccacttcttcccagataaaaactttctcagcgtaagtaacaaaacttcctccactcatcaatcataatctggaacctcccgtcccatgtttacatttgtacttgttgttgcaggatttagcttcaaaagaattcttttggccaaagattatttttagagatcagggaatttcgatcttatactacccgtacccgccggattcagcgcaataaacttcgtgagattgggtccttctctcaaagagtcagttaagtcagttaagaaacatctctaaagcctaaaacctgtattctttttcagatagaacaaaacatctctacacattacatgtaatttcagaatgaatatatgtcacttaaaagccactgattcgctatagagagtcataatccgaaccctttaaccggttggtttaaccaaaccggagctcttcaactaactccattctcagtccacaagtgagaaacattacgcaatgaacatgacttcgtgttcttcttcatcttcttcttctttcccacgactcttcgccgccaaatcccaaatctataaagctccagttttatccttctccactcctaaacgtggtcgtcctcgtcctcgccggaaccggaaatctaatggctcatcctacgaccacaccgacggcaatcttctttctatctccacttcctctccctccggagccgacgaccaaagtctcagcttaaccctagacgttcaccggatttcaactctagctaattaccgcttccaattgtttctcgattccagcaaagacgcgttctccgacttgcaaacactaatctcactcgacgataaccggagagtcgttgtctcatgcaaaaaatcaactatgcaattcgtcggcggtgtggttatactaggattcgtatttggttttgcaattagggttcttgtgaaattaggatcagctttaaagggtaatttccaaagtaatcccaaatttgtagttaggagagataggagtcttggtgggaaggaagtggtcgtctctgttgataacattcgttcatcttcaagagattccaagagcttcatagcttctgatcaagcttctcgaagtaactctacgcctagaaatctccaccttaaagctcagaataatttgccgaaatg

SEQ ID NO: 152071 - DNA, 1245 bp, Arabidopsis thaliana landsberg
agtattcatagtattgaaaactttaggggtgaagatgatgatcttatggagcttttatggcagaacggtcaagttgttgttcaaaaccagagacttcacaccaagaaaccttcttcttctccaccgaagcttcttccttctatggatcctcagcagcaaccttcttcagatcagaatctttttattcaagaagatgaaatgacttcttggcttcattatcctctccgtgacgatgatttctgctcagatcttctcttctccgccgcacctactgcgacggctaccgcgacggtgagtcaagtcaccgccgcgagaccgccagtaccttcgacgaatgagtcgaggccgccggtgaggaacttcatgaatttctcgaggctgagaggggattttaataacggtagaggtggtgaatctggaccgttgctttcgaaggcggttgtgagagaatctacgcaggtaagtcctagcgcaacaccgtcggcggcggcgagtgaatccggtttaacacggcggacggatggtactgacagttccgccgtagctggaggcgacgcgtataatcggaagggaaaagcagtggctatgacggcgccggcgatcgagataaccggtacatcgtcatctgtagtgtcaaagagcgaaatcgaaccggagaagacgaacgtcgatgataggaaacgaaaagagagagaagccaccactactgatgaaactgaatcccgtagcgaggtgagtcaaaaaaaaacagaacagagtcgttgttagctatcgtgcgcaagtcaaatacggcgcattttagtctgactttgtagttttcagcgcatttttaattaacttttttggtgttttcttgtggtgcaggaaacaaaacaagcacgtgtatcaacaacatctaccaagagatctcgtgctgctgaagttcataatctctctgaaagagtacgtttgtgttttttcttatgtttttgtaatctttttcgataaagatttcgcaatgaatctgaagaatgtcgcggatttggtaacagaaacggagagataggatcaatgagagaatgaaagctttgcaagaacttatacctcgctgcaacaaggtcttcgacgatcttttttctttctcttcaagttattgtatacgttaaccttgttactgattgttgtttctttgatcctcagtcagataaagcttcgatgttagatgaagctattgagtacatgaaatctcttcagcttcaaatacag

SEQ ID NO: 152072 - DNA, 772 bp, Arabidopsis thaliana landsberg
atggaagaattgcgtgctgagagtcagcaagtctcagagtcatctagggacaataggacgctctaagggtgcttcaatatcatcatctctgcagcagatatcagtcaccgttgtcacagattttgttcgatggaatgaagaagcaataaccagatgcacattgttttcatctcaggttactgaacttagcaatttatgagaaactttttccaaaataagttagttgttgtgtattttgagaattgatgtcggaataggatattgacaaagaaatgatctacaatattgaacttggctgaattatctaacagtaagtaaactataatatctgggattgtatatctgatgtatataattatttctttgtgcagccagccacacttgcagccaatgtcaaagctatatttacttgcctgctagaccaggtatgctgttcatgagattctagagtcattcatattaatagagctgatgcaatgatgagttcttgcaggtgagcgtatacataactgagggacttgaacgggcaagggatagcctgtctgaagctgcagcattgagggagagatttgttttgggaacaagcgttagcagaagagtggctgctgcagctgcttctgctgtaattccttctcttctctctttctcactatttgaattgttattgttaggtggagttatttatagtttctttgattgtttctcaagcagaaactgctgctgctgctggtgaaagtagctttaaaatccttatggttgctgtgcaacgttg

SEQ ID NO: 152073 - DNA, 327 bp, Arabidopsis thaliana landsberg
aaacaccatatcctccttctgagaatcaagccttaaaggatttgcttgattcacctatttactctgaaggctctaaagggtcttccggatcaccattttcacgtccgaatcaatcacaggcccggagatgatcaaaagggaaaatcttaaagtgattaagaacaatcaaagtaaaagtaaaaaaaaaggtagtcgttgttcttcagttgcaaattttcatcttttcatacatatatactctgtaatgtaaaaaaaaagcagtgaacatccgaaagagaatcagatcctaaatgcatataggcaactttataggtatacaaacatatt

SEQ ID NO: 152074 - DNA, 458 bp, Arabidopsis thaliana landsberg
tattattattacttttccacaatatatatcctttatgcatggaccatcaatattagttcacataacgacaatccttcctgatctccccttggtctcccgtgagcgggttggtctcggacaagagcctgacgccacgtgagaactgctcatggaagtaaccattgtccgcagccatcttggccacaaacggtgcggtcctggaatcggtggctagctcatcatcaatgacaagaagccccttatgggccatgatgttcttgtaatacatgttgtctacaaccatcggagtctcacgatcgtttcgggagtacaagacggcgttcgggtccggagttggacttgggcaacgtttttttaagtaaagggcgtaacttgggtcaagagtcgggtcaatcgttgggtatagccggtgcactaggttaacgcagtggaccctacccactgagtgagcacctacg

SEQ ID NO: 152075 - DNA, 518 bp, Arabidopsis thaliana landsberg
gtcaaaaactctcacttaaacaaacgatggcagaaccatcttttgctcgtctctctctcttgttcttcagctttctccttatctttgccacctactcttgggtctttggacccgactcaggcttcttgttcggtactcgtgtccggaaaactctcggctcgaatcgtcaagtccacgttgaccactctttagaaaagcctcatcatccacttgatccactaacggtgcgagaaatcaatagagtcagaacaatactctcgaatcatgacccgggttttggttccgggtcggccacgattcactccatggctctcgatgagccggagaagacacgtgtcgtccagtggaagaagggaaataagcttctgtcacgaagagctgcggtcgtagcttattggggtggtcaaacacatgagataacagtggatcttgattcgggtcgggtcgtttctgatgtgattaaccggacttcagggtatccgattctcaccttgaacgacgtcttcgcagcttcgcag

SEQ ID NO: 152076 - DNA, 495 bp, Arabidopsis thaliana landsberg
gaagaaagtttaagaactcacctaaaacacaaacaaaggaactccactttttttccacaccatttttcaccatgtttagagccatgagcacaaggaaagtccatggtggctacgaaaagctcggcgatgaagaagcgagactgaagagggtctctagcgttccggctagtgtttatggtcattcaagaaacccggttcaagaagtgaagaagacaccgacagcgaaaccaaccggtggttctgttcatcctttgtttagtttctttgacgttcattttcaaagaaagaagaagaataaggcgaagaagaagagtttagcaacggcgaaaccagagtttgctaggtatatggagtatgtgagagaaggaggtgtgtgggatccgagttctaacgcaccagtgattcattacagatagattcgtcaaggaaaatgaataaaagatttgtatatcgtctttttttttcaaatatataatctatgagaaagccaaacaa

SEQ ID NO: 152077 - DNA, 254 bp, Arabidopsis thaliana landsberg
gagaataaacgttgtcgagcatgctcgtttcctatctgtgatgatcttatttacagttgcatgcaatgtgattttatcctccatcaaacatgtgcacatcttcctccgtggaaacaacatgcgacacatcctcatcgccttcttctactggtggatgaggaacatgaagattattttcaatgcactgcttgtaagcgagaaagcaatggttttgcgtacaaatgttgtgctagggattgattcacattagacgt

SEQ ID NO: 152078 - DNA, 704 bp, Arabidopsis thaliana landsberg
gcgacgagtggtatgtggatgacggatgattgcaagaaatcgttcatggagatgaaatggaagaaagtgcatagatacgtcgtttacaaactcgaggagaagtctcggaaagtcaccgtcgacaaggttggtgccgccggcgagagctacgacgatctcgctgcttctttgccggaggatgactgtcgttacgccgtgtttgatttcgattacgtcaccgtcgataactgtcgtatgagcaagatcttcttcataacttggttagtgtcactatctcttgtcttttcgatttctcgaattgtcgattttacccttttcccaccatatagttctatcgtctcactcgatgatcatcaaaggataaaatggtcatttggatgtcctaagcccaggctttttaacccaaggccggtttgatcaaataaccgaataaaaccaatcaagataattgattctgtttggttaaaaaatggtttactttatatcttaagtcgaaaaactagtaaaaccactgaaacttaatcaatccataatgtggttgttattggaataggtcgccggaggcttcaaggataagggagaagatgatgtacgcgacgtcgaagagcggactgagaagagtgttggatggtgttcactacgagcttcaagccaccgacccaaccgagatgggatttgataaaatccaggaccgggccaaatga

SEQ ID NO: 152079 - DNA, 467 bp, Arabidopsis thaliana landsberg
agattaagcgagtcattatcgccgacgacaacaaagtgatccatggagtctcgccgtccgatttccagacctcaatcctcggaaaaaccatcatctctgctcgtagaaagggcaaaaacctctggctcgaattagattccccgccatttccttcttttcaattcggtaagttctctctgaaacagaattagggttttacatcttaaaaatcagaactttagatggaatcaaatcaattacgtcaaaattggaaatttgacgaaatgcaggactgttcatagttcaatgctagaccttttttgctgtgattcattatcaaaggagtgaaagtgtttggctttattgtttcgttgaacttataaatggttttggttttgctttaatgtgtgttcttgaggaatcaaatttcagggttttacttttccattttatcaaattcaggacttgattgaataatttcatcaaaa

SEQ ID NO: 152080 - DNA, 450 bp, Arabidopsis thaliana landsberg
  unsure (1)..(450): unsure at all n locations
atgggtcggattcaatcggtgatgagatattcagaagaggagggtaaggtgatggagctcagaaatcgcttcgaaggtaagacagtgttgcnnnnnnnnnnnnnnnnnnatattttcaagggtataaacctgaagcttctagcaatggaacaaatgctgaggcagcacccgaattggaggggaagggctgctctggttcagatcgtaaatcccgctaggggtaaaggtattgatgtagaggaaatacgtggtgaaatcgaagaaagctgcaggaggatcaatggagagtttgggaaacctggatatcaacctatcatatatatcgatactccggtttcgattaatgaaataaatgcttattaccatattgctgagtgcgtggacgatacagctgttagagatggtatgaaccttacttcctacgaatatatggtgagcagacacgggtta

SEQ ID NO: 152081 - DNA, 339 bp, Arabidopsis thaliana landsberg
ttcgactctctctctctctcacaaatttttgatctatttcactctccttgtcgtggctttgttttgaccggaacattattccggcagctacccaagacctcactcctcgactatttagtttcctcgctgtcactatctcaacgccggaggaaaaacttaaacaaagagtgataggtcgaagtgacaccggtgttgtaatcggtaaacccagaagaagccctaagagtaccgccgatttctgtgctcttatcttcttctgctcaatctatttcgcgcacattgtacagtggaaagtaacagtagctttgcatgagcctgattttcaggtaaacttaaaat

SEQ ID NO: 152082 - DNA, 1069 bp, Arabidopsis thaliana landsberg
  unsure (1)..(1069): unsure at all n locations
agctaagaactttacgatcgatgggcattgcggttctgtttctttcatcacatccatgacagaacacttctgtgctggctgcaatagattgagacttcttgcagatgggaacttcaaagtttgcttgtttggtccttcagaggtaaagtacatttccagatttttccatggctaaaagtcagtaactgttgattcaagtggctgcgaacatgtacaagtgtgcaataacttgagtaccggtaaacatgagtattcgtggttgcttctcaataatgtgacgatcattttgtttcgcccgatgattttcttgtgaacaggttagtctgagannnnnnnnnnnnnnnnnnnnnnnnnnnnnggcgctaagggaaattataggcgctgctgtaagtatttagttgcttcatctgattttacgaaccagtcaagaaatctttcctctgtttttcgtttctgtattgacttaaaattcacaatgggtttcaggtgaagagaaagaaagctgcaacacgctggaatgcttgacattgctaaaacagctaatagaccaatgatacacattggtggctaagctccggtgaacgtaagttctttaatccattgttatgtaactcataaaaattggatactttgtgtcgattcaagggttttgacacttgatctcagtaacaaagtctttgatgcattgatccgtttagtgtaactctgcgttttgattcacgtgactcatcgcgtcatatttctctttacaggttggtgaagttcctggaaaacactacaaggaacatttgagttttatatcttgtaagaatctatctgctgctcccaactctgtgagactggtgacaaacttttttgcaaacaagaacaagaagactgaagagtttctcaaactgtttgttctctgtatacgcaacagccactgtacaggaactcagaatttccacacgaatcttttcagtccaattacttttcttatttatggccaaaaagatcaactataagcttttatttatgttaagaattttaaaatcttaaatttgatagcagcaacaaattcacttgctat

SEQ ID NO: 152083 - DNA, 431 bp, Arabidopsis thaliana landsberg
atgatgcttacagtttctacaactcatacgcccgtgagctcggttttgctatccgcgtcaagtcctcctggactaagcgtaacagcaaggagaaacgtggtgctgtcttgtgttgcaactgccaaggtttcaagctgcttaaagatgctcactcccggagaaaggagacccgcaccggctgccaggccatgattcgccttcgactcatccactttgatcgatggaaagttgatcaagtcaaactcgaccacaaccactcctttgatcctcaacgtgcccacaattccaagtctcacaagaaatcctcctcctcagcttctcctgcaactaagacaaatcccgaaccacctccccatgtccaagtccggactatcaaattgtatcgaacccttgcccttgacacaccacccgctcttggaacttcactctct

SEQ ID NO: 152084 - DNA, 374 bp, Arabidopsis thaliana landsberg
tcttctctgtatcacccaactaaatcctcacgggattagatccaaagtctcaaactttgatccaaaaacacaaactttgttcaaaagacataaactttgagccaaagtcacaagctttcttggtgaacgatggattacaatccaaatcttcctcctttaggaggaggtggtgttagtatgagaagaagcataagtcgaagtgtaagcagagcaagtaggaacattgaagatatcttctcatctggttcaagaagaacacaatcagtcaacgacgatgaagaagctcttaaatgggctgccattgagaagctaccaacttacagtcgtctccgaaccactctcatgaaacgctgtaatcgaagacgatgtttacg

SEQ ID NO: 152085 - DNA, 1319 bp, Arabidopsis thaliana landsberg
aaccgaaccgaacccacccgaagacttcaattgcccaatcctagccaaaccgtagccgccatttccgtgaatgttgtgattagcttattattatcttcgttgcccaaaaacttaaaagatccaaacttcgaacaattttggtgtctgctatacagaatccaaatccaccttctccgattaaaaatcccttctctttcgatcatggatgtgtctaaagttgtcagcttttcccggaatttcgccgtcttggtcaaagtcgaaggccctgtaagccctgatctctctttacccaattcttgttttgagattctatccataaatttatctactttacacatgatcgagtacaaagtgttaatcatacttggtttcaattttaggatccaaagggattgaagatgaggaagcatgcttttcatcaataccagtgagcacaagatgactttttttatatgtattatatgctttagttttgtttctatcatggaacttaatgtggctgtaattttgttattgaagttctggcaatgcaacactttcagcttctgggatcttgcttccaagagatatttttttgagtggtgaggtcgctgctaaggttctgtttgaagctggtcaggacatggccctggttttgaccgttgcatctgttgttgagccattcttaacattaggtcacagaactagtagtagtatctctcaggttagatacacatgctccacttcaatatcaatgatacatgtttttgcttgatgtgctacttcttcaatcttgatgtctgttttttttttgtaaaggatccggtgaagcttattccgggtgctatgattgagattatggtggaggtatacagatagtgtttatgaatagtttatgttgaatggtaagttgtttggagtttttaaggtgtgatctagatgcgtattcttttcagggtcagctaaagtcagaaaaggaagctcctttttgggttcctgcagcaacttctttcgctggtacgaatgcaattcctcttctttcttgctattagaagtgactgttgatacctccctgtggtgatgatttatgaagcctctaaattgagtttacaagatgtgtgatatgcacttcttatggcatatgttgtagctccctttttatggcatataaaattctgttcgctgctgatttttaactaatatgttacaaggttgatgtccctgtatcttctgctgcacttcaatctcttattaaagcttcttctggttcgaaagattctggatggaataaaggttggtctttggtttctgctgctaatggttctcagccttcaatcaat

SEQ ID NO: 152086 - DNA, 1630 bp, Arabidopsis thaliana landsberg
ttctcttgtccgttttgtgtgggggttcgtggtttcgggaatggtcgtgcctcttgttgcttggtgcatcgccccgaagggacccttttttgttactgtctttagccctttaaggctggtggtcgttgcccttataggatcatttgctttagaggaacccctgcatttgggaaggtatatcaaactctatcatgatttttatgggtgatctgtgtgaatcatatttgttttttttttttttttttttggcgaaacttgcagtataatcggtgccatgataatggtgggaggagtatacctagtggtatggtgtaaaatgaaggaaaaaaagagtgcgtctacgacttcggaccatattgaaacaaataagaataacaaagaactggaccttggcaatctttcatcagtaaatagagatgtcccctgaatccccatatgggttacatgatcaaatatagtttgagtctaccatagaagcagaatataaaatagggtcggtaagtgaattaagatccagctgtatgcctcaattggtgttaagtagcctttgaagtatatctttttcaatttttaacgttacttcaatattaaaacacaattacaacttgctacttaattttacctctaaaatgctattttgttattgtctaagtgactaagtggtaaatttgttgtaaaaaaattatgaccgccacaacatttcatctcacattttatagttttgaagtgattaattcatcttcacatatgtggttttcatttaccgtttattactctctttttttggctcgaggtttggaactcaacaaaatgtttgaatgttacatatatattgcttgtgctaagtaactatcatattatcaatggattcatatgtgctctcggtgcgatgtattccgtagattttaactttcatcaaatgtaaatgatgtaattaagtttctcaaaaaaaaaaaaaacttagtgcatgacttaattggcataaccattaatattagtcacaaaaaaaaaaattattagtccaccgtcgaaggaaaaaaacaaaaagcagtagacaattcttgaagtaaaattaaagggatagacagataacgtttacgagaggaatcatgacacgtgaacatggagtatcggtcaaacctggcaactgggacatttctttaaatacccacaaaatatcacttttgaagaagtaggaaaaaacaaaaccaaagaagatctaaagagataaagagaatgatgaagaagcaagtgacgatagtggcggctcttctgattatgatggctttatgttccagcttgaatatggtggccgaggctcaattaggccccggagactgctacgacggttgctccaccgcctgcgtccaacgtgaccgtgagtactctcttctttcttagttttccccaaaggtttctgtctccatttgtataataactccttgtcgatcttctcttttcttcagcgagaaagacgtcccgatgcgatcgcaagtgttccattcgttgtggtccaggtaaacattatgaaaccggatacgtaccgaccggtctgtgatacatttgtctgatttgtaccaacccctgattaacccctctgatccgtaccggaactaatgttgatgtttaa

SEQ ID NO: 152087 - DNA, 1257 bp, Arabidopsis thaliana landsberg
ccacagtcggtgtacaacaaatcgagggtgaacgagttcgagaagagagacgtttgagagaaacccagtacaccaaatgggtacactataatagtacaccaagtgagaacactagaacagtacaccactagtacactagccaagatagaatataatagtagactagaatagtacaccaaatgggtacaccaattagtaaccaagtgaattaaaaacagtacaccactttggtgcactagacagtctactattatactaaaaacatttaggaaatgcaatggaattaaaaactataccctaaaactatacactaaaagacattattgaaatgtagtgaaattcaaaactatacactaaaagacaaagagagaagactaaacccaaggaaaaccatatatcatatggaatgaagtttaaaactataccctaaagccttagattactagaatttagaattccaagtaaataaataaattcctaattcaaaatcataaccctagattattattatgcttcataacacttgaattgaaatatattgtattataatttggattgatactttgacattctagaagtagactagaatagtacaccaaatgggtacactataatagtacaccaagtgagaacactagaacagtacaccagtagtacacaagactagtacactagactagtacaccaaatgcgtacactatgatagtacacaaagtgagaacactagaacagtacaccacttcggtacactagactagtacactagccaagatagaatactaaaaacatttaggaaatgcaatggaattaaaaactataccctaaaatccaagatagattactaaaccccaaggaaatgaagaggtcggagaacatgatgcgatatcggatgaagaggtcgagtgactggctctcccggggatcgacgttgtcgttttgcttccagagcctgacgagtcggtatcgaatgctccatgtagtccgtttgttgtcactttggttcgtcgcgggttcgtagttttgagagatatcttcgagctatccccctacctggcgcgccaactgttgatgcacgaatcacacaagtacgaaaatgggatctctagggaaggaagaagaatctttctattaatgacgagcccgcgacttaggcgaattggacggattacaaaggatgatttcttcaacgagcataaatggagtaagaacgagccgattgtagatgaaagacgagcttgaggccggaagacgatcttg

SEQ ID NO: 152088 - DNA, 1624 bp, Arabidopsis thaliana landsberg
atggtgatctgtgataaaagccaagatcttgaaatggaagatggatttgatggcgaactctttataacaagaataagaagtaagctttctttgttctatataggtgtgtttttatgtaggtatcagggtttatctctcttttatcatgttctttttggtgtatattctgttaggaatatctaggaataaaacaaaagagttaagagaatgtaggaacgttgcaaaatcatgttaggagatttcagtgactgctgaggaatgtgaggaaaccgttgcctgcaaagatcatgaggagagtctttcaaataagccttctcagaaagtgaaaaaaggtaaaaaaaaagactcctttatttgtttccgattcataaattcgtgtcgtttgactttgagctcttgagtttctttaccatacaacccgagccctactgatatcatccttctggaaagcagctcatacatcaaagctaaagagaaagaatgtgtcagatgctagagacgaaggtacaaagtcttgcaatggagcagtcaaaagttttactgagatttctggaaaggagggtgatacagaaagccttggattagcaatcagtgacaaggtttcccatcaaaatctcagcaagagacggaaaagtaagatcgctttgtttttattcccaggttttgagaatacctcccgcaagtgctttactaaattactatctccagaagatgcagcgaagaatggtcaggatatgtcaaaccctactggtaatcctccaagactcgttgaaggaaaaaagtttgtggaaaagtctgcgtgcagtatatcacagaagggccgtaagtgtaagtgtagtgtcatatttctttggtgtttccattacgaaaatatcaggctacttgaatgcatgggccccagattttaacagtcgtgcttttttcatgaagcgtcccaatcctcaattctaaaaagaaagcaccagttggatgaaaaaatctccaatgtaccttcacgtcggaggttatctctctcttccacggattctgaggatgctgttattaaggaagactatgatgttcgaaatgaagagaagcttccctgtcatacatcagataagctgcaaaaaggcaatttcctgcaatttttcagtttgtaccgtccatgggtttatattgttttgctataaatcatttacctcaaatgacatgtatttggttggtttctgtagtaggtccaaataaattgatacgtagaaggaagccattagcaaaacatagaacagaacgttctccaattaaggatttgtcagtggatgatggcaggcctaagccgattgcattaaaaccattggaaaaactgagttcgaaaccaagcaagaaaaagctgttttggtcaatcccaaggtctgaggaatgtgcacgcccatctattaatggtggccatggccaggcatggtcattaaggcccagtcctgaagaaaaagcccgtgtaagggaaggttctggggtccccatccaccatttgggttccaaaggtagtttgacccagaccgttctttctgcaagacctaatagggcaaacctgcgtattcttttagctgctccagatggggctgatgtcgtgaaaatctctcagttgaag

SEQ ID NO: 152089 - DNA, 658 bp, Arabidopsis thaliana landsberg
ctttctatcaaatagtctcagaaaaaatgtctgaatccgaaacggagtcgatcaccacctcttctccgccggcgatctcagaaaccgaaaactccaccacattaccgacagcgtagtcggagaagaatccgaatccggtaaccatttcgctccgaatctggccaccgactcaaaaaactcgcgacgccgtgattaaccgtctgatcgaaacactgtcaaccgaatcaatcctctccaagagattcggatctcttgaatccgaagaagcttcctccgtcgcgaaatcaatcgaagacgaagcttacgccgtcgcttctgccaccgtattcggtgatgacgacgggatcgagattcttaaagcttattctaaagagattagtaaacgtatgcttgaatctgttaaagctaagaataatgtggcttctcctccaccaaaggatggtgatggaattgaatcagctgttgattcgaagattgattcaagtgaagcttgacgaggcttgaatatggtgttgttctcttatctctaactatcgttttatttgttttagattggtatgcgattatctatctcagagttttttgttgttgtataacttgtggatttgggacctgttactaatatgaatttgtggttgatttggttttgacgttttaa

SEQ ID NO: 152090 - DNA, 528 bp, Arabidopsis thaliana landsberg
gctctctcgctgaaactctctctctctctcgttactccaaccactcctaattattcacatcattattggcatgaaaagttaatctttcctatataacaattattaatggcgacagtaggatccctgaaacctctgcaccattcctcatgttcatcgagtttccctcggaatccgatcgtaaaccggaaagcccttcttggttttgtgtttgattctgcccggaaaaaccagattcgatgtgagaatttacgttattcatcggaaagcgatgggaagagaagaaatgcggcggcgaagaagaggaatcaatccccggaaagatgtgcggcggagggagtactgaccggaggaggggggtcggaggcgattgcggaggtgaggacgatgatgcctgagaggattaaggtagtgatattgacggcgtgcatgatgtgtctatgtaacgccgacagagttgttatgtccgtcgcggtggttccactcgccgataagcttggctggtcgagttctttcttaggggtagttcag

SEQ ID NO: 152091 - DNA, 477 bp, Arabidopsis thaliana landsberg
  unsure (1)..(477): unsure at all n locations
ggctcttcgtctcctcctgttgatacgacgatattcttcggtgcaaacgatgcagctctcaaaggaagaaccagtgatagacaacatgtgccggtggaagagtacacagataatgtcagaaagattgttcagcatttcaaggttttgatatgcttctttnnnnnnnnnnnnnnnnnnnnnnnnnnnnnnnnnnnnnnnnnnnnnnnnnaagactaatgactctgttttgtagaaatgttcacctacaatgctaattgtgcttataactccaccaccaattgatgaagctggacgtcaaagttatgcagagtaggctttattatgatccttttcttctttgcatttttgtttctcaaagcatttagtccgacatgtttcttaaatgagccagtgattgtgttacatcagatcaatctacggtgagaaagctatgaaagagcctgagagaacaaacgaaacaacaggggtatatgccaa

SEQ ID NO: 152092 - DNA, 1046 bp, Arabidopsis thaliana landsberg
aagctttgatatttgatctcaatcgatcgagtctattgagaatttgtgtacctgttttctcataaggttaactacggattgtggaatcagaagtgttgtgtttttgtgatcgacgattatggattggggaaacgtaacggttgatgatctcttcgatgctctccgagaagttgactggtcgtctccgccgcgtcctccgtctgagttcttctcaaggttcaccgttcctaaatctgtccctaaatgggatagtcgcctcaagtgcaatctctactagtacgatctctccctctctttcttgttcgccaatttcatatctattcggatctgatgttgtgatcaatctctcgttgagaattaccaatcaaattcgtcccaattgaacatagaattcttagactttggttagaacacagagtcttgatagcttagtttctgtattgagcttaattttgacctgtgatgatgatctgtttatgcagctaccgaacaaactatttcatcatgatcgtcgttatacttggtatgtggtgtgaggaagtggctaagcattatcatctgtgttgtttatcaatgatgtcttgttcacttagaattgtcaaattttacttctcaggattgggagtccttacaaggcctttagcgatcttcgctgcgcttttgacagcattaagtttggcatttctaaatgacaggtttttcttcatcttccttttgtttttaaactctcagagctttgactagtggatatgcttgaatcagtagatccatattgaatattcttgtctacagctttgcaggttcttttagtgagaaggcgacacgaaccgtcagaagattctctccacaggtagctgctaaaatgagacctcctttgacgtatgtttatctctctttgttgcctttcaaactctttgtaactccttgcttataatcatctatgtaatctgtgtttttaagacctgtcactcgtgggcgtccatcatcaaagagagcaatccatgtatgtggtcaaccccgttgggtttttgtcttgacatgctcac

SEQ ID NO: 152093 - DNA, 526 bp, Arabidopsis thaliana landsberg
  unsure (1)..(526): unsure at all n locations
atgttttatcttaccaacagtagttgcagtaaacgagtcgttttgaatcaatccaagagttcttctaaggcaacttggcaaactcagcacaacgctggagttgctgcggatctcgatttctatattggagatgaagctcttgcgaaatcgcggtctagtagtactcataatcttcattatccaattgagcatggtcaagttgaggattgggatgctatggagagatattggcagcagtgtatatttaactatttgagatgtgatcctgaggatcattattttcttcttactgaaagtcctcttactcctcctgaaagtcgagaatatactggagaaattttgtttgagacttttaatgttcctgggctttacattgctgttaattcagttcttgcacttgctgctggctacacaacatcaaaggtatgttacacatttcttttctccaagtatntacgttgtttgctgtgatgaaatgctatgtattagcctacttgctgtgatgaaatgatatgtatttaagttg

SEQ ID NO: 152094 - DNA, 468 bp, Arabidopsis thaliana landsberg
atggagaaaaacgagtattttagtgggagcttagtggagactaagctacagaagaaggatgcagcggatagtaacgcttctcttaagcgttcttcatcctacaatggtgacaggtacatttctgaaaaacactcctgctagtgattgttggatgttgtgttatgttttgatgttaagacagttcttgtgttcttgtgccaaaatcacagcttaaaaaaaaagtctctgcctttagtttcccactaaaattacaacaagctatctttggtttgttagggtcataatatgtgattggaaaggttcttgatttgagtagtatacttagtctctgtgaattcttgaggacacatctcatgtgagttttttcagggcatccaaccaaatgggtgtagcagagaatggagactcaaaaccggatagttctaaaaataatccaagctcaagaaaggcgtcttctatactagggaa

SEQ ID NO: 152095 - DNA, 490 bp, Arabidopsis thaliana landsberg
aacaagtgattgaaaagaagagatgcaagacaattcaacaattcaacacagtagggaaaactttgcggacagaaaatgagtatatcttcggtctaaactctgcccagacgaagaattctgagagagaagtactacaacccaaggattgggacggctttgaatgttatcaacgacgaacagatcgcgcaaattcacctggtaggagagagaacagagcgagatcttttatcttcgcttttttgttgttgttattgttaaacggttttgaacatacagagactacaaaatattcaaagcaactttatatatagaagaattttttaaccgtatgaaatattcaaaaggtcaattctcctgagcctaacaattatataatcctgcagtgtactatacgtatctactacatctgaagatgtgtgtacatacatatactcgtggtccggtttatgtcgatcgggtcgggtcgggttcagtcgttcagataaagtga

SEQ ID NO: 152096 - DNA, 661 bp, Arabidopsis thaliana landsberg
tgcagtactcttaacgcatcctgacgtttctcagggtgttgcattcggtgttcctgatgagaaatatggggaagaggtaaacaaaacctgtgcttaaattgtctctaatttgaatttatgaattggtctcccttatctaccattatgtcctgcagaatcatcaaacatcatgtgaacttacttatcaatgagctgttaataacgctgtgtttccctggtttattggtttatcagattaactgtgcggtgattccaagagaaggaactactgtaaccgaagaggacattaaagcgttttgtaagaagaatttggcagctttcaaggtgccaaagagagtgttcatcactgataacctccccaaaactgcctctggtaagattcagcgccgtatcgtcgcacaacatttccttgagaagccctgaaacacacagaaaacaccatcttgctcgaaaatcatcggtgatgagtcctagttttcacttttcacgcaaatggatatgcgttctctattattggttcttggtttaaaagttactttttatatgtttcatggtggtaaaggttatagattaaatcacaaaagtggaaataaaagtcgataagtgattattgaagtacaacaataaaggagagtttctttttgttggtgttgtctctgcg

SEQ ID NO: 152097 - DNA, 2010 bp, Arabidopsis thaliana landsberg
  unsure (1)..(2010): unsure at all n locations
atgtacgtgcatgtgacggtagccaatgaagcagacgaagagtctatacatgaaaagtgggtttgagcaagagaccgctgagccagcggggcaagctcgatacctcaataggccacaacggctcctcctctggctcgcccttcctacctccccaatcatgtccatgtaattgtaaattttccaatatatccaatatgtcaacctgttcttggcaatcaataaaagctttataactctccacaaaattaattcattagcttaaaggtaaattactaattacaaatatgtgatgtctacatataccaacattctattttactaattgcacagaaaacacttggtttagttagtcccttgtcgtgtataatcaaatcacccataaaaggaactttagttggataagatttgggatgttttctgtattttgtttttccttggtcgtggaaatacaaacgacgacgttttgagtggcctttgtttttcatcctctagaccaagtgtatataaaacagagacgaaaaacgttgcgaaaatacgaaaggcttagaaatggtggtgacgtctttctcttcagcgccgcctatcttcttcttacctggagctgatgctcagttttcttcttccaatggaaggtttgctattccttcctcttctctcgtgtaagtctttctctgaaactctgtttttcaaattacagttctctgttctcttattctggttgaagttttgaattttcggaatgaaaagcgtatgtagtgttctgcctcgtaatttttgtaattcgtgatctgggtttgtgatttttgttgttactcgccaccaaagtctctgtttttcctctgaacttctaaaatcagaatccattttgggtaattgagatttctccaattgtgactttgatttcttctctgttgattgggttaagatgctttctatgagtaatgtttgaaattcaaatcctttattcatcatcgtgtttaagatccaaatgtaatcagtgaactgtttatagtttggaagcggtttagttcctattggatctgtttcatttcacataatcacacttgtgttgtgaatatttgctcttgcgttttggataagtttacttattggtaccgaattgatagttattctatacatgagataagcattcctcttattctgcttctcttctcttacttacttacataccctgtgtttgttccattgccagctttatttcttcttttcttttatgacatttgttaatctaagttggtaataagatcatgaagaagaagcattggttttatccaatttaggagtcattgatcagttgttatcattacgtttgataaatagataacttctcattcattataaacatgtatttttcatcagaaagggactaagaagacaccaagatgcaaagttggtgggcaacagagccagagttggagtagtacgagtcctagcgaacccaaatgtataacattaacctttttttgcagttatagattttgctatcttagtagtgttttcgttcaggacaccaagtcatactcatgtcatgtttgatcttcttgttggttgatatgatatgaccattggtttaaacttactgacatgctgagtgttcttgtaggtatctcctcctcctcctccaggaaaagcaaaggtaaaaaaagaggtaatcatggtagaccctcttgaggctaagcggttagctagtaagcaaatggaagagattaaaggcagagaaaagcaacaggtgaggaaataaaccctctggacgaatgatgataaattgtatacaagatttgtggagatagcacagaagtttattctctcgtttgctttacagagaaggcgtgaaatagaggctattaacggagcatgggcaatcataggactcatgatagggctggtgatcgaagctcaaacggggaagggtattctggctcaggtatggtttacttatacttcctcagtgttgttgataatganaggcttttttactanatcgtgagg

SEQ ID NO: 152098 - DNA, 199 bp, Arabidopsis thaliana landsberg
agttcgagttcgaggtctcctccgctacatatttcccgcgttttatcagttgaaactgttcctttaagcccatcattcacctggaacgatgtttttgagaacagtcgaaaagaatacgtgcctcagaactcctccgatctcaccggatttctcgagaaagtcgaccgctgtaatcgtggattagtaagtccactgaatt

SEQ ID NO: 152099 - DNA, 1172 bp, Arabidopsis thaliana landsberg
atgccgggactgattagtcttaatcaaagggttcatcatggttctgatgtcagcttgcacggagtatcttcaatggagacaagcgtaaccaagcaaggcaaagaaacttcaaggaggagcagcttcattgccacagacgtggaagatccatctcgctttgctttaaataggtactcctttcctctgagttctctttggtctcataggtatgaatgaagctaattagatcttcaaacgagcttaggtcctgtggcctttgaccacgtttcttatgcaattccaaggtagagatcggtcaaaatatttcttcggtatgtgaagtatggaacgggaccttttatttttgagtgagaactaggaaatcagagtactttaacttcactagtgtttgggtaacttatttatcttttcttttcagcatcaggagtgatgatgagtacgacgagtatggtgcataccagactgatattgagacgagtcattctcctcgagctaatgaatattatggtccaatggaatacaatggaatgggcattgatgatgtcccctgtaagcatcttggtggagaaaccgctgaccagaaaagtttaagcggctctccactcattcatcagtgccttgaatctgtgattcgggaaggatcagagcagttccagaagaaaagtgagcatgatggtcgtgacgaatgtgaagcttcttctccagcagatatttcagatgatcaagtggtagaacctgtggatttcgagaacaatggacttttgtgggttccacctgagccagaaaatgaagaagacgagagagaaagtgctttgtttgatgaggaagataacgagggagatgcctcaggtgagtggggatacttacgaccttccactagctttggaagtggagagtaccgtggcgaggatcgaacaactgaagagcacaagaaggctatgaaaaatgttgttgaagggcactttagggctttggtagcacaacttttggaggttgataatctacctatggtcaacgaaggtgatgaagagggctggcttgatataattacatcattatcttgggaggctgcaacgcttctcaagccagatacaagtaaaagtggaggaatggatccaggaggatacgtgaaggttaaatgcatcccttgtggacgtcgcagtgagaggtga

SEQ ID NO: 152100 - DNA, 1899 bp, Arabidopsis thaliana landsberg
atgaacacaacatcatcaaagagcaagaagaagcaagacgatcaggttggtacaaggtttcttggggtgagaagaaggccttggggaagatacgcagctgagattagagacccaactacgaaggagcgtcactggcttggcactttcgatacggcggaagaagctgccttggcctacgatagagctgctcggtccatgcgtggcacacgtgccagaaccaactttgtttactcagacatgcctccttcctcatccgtcacctccattgtttctcctgacgatcctcctcctcctccacctcctcctgctcctcctagcaatgatcctgtcgattacatgatgatgtttaaccaatactcatccactgactcgccaatgcttcagcctcattgtgatcaagtggacagttacatgtttggtggctctcaatcttcgaattcttattgctattctaatgacagtagtaatgagctgcctcctctcccgagcgacttgtcgaattcgtgttatagccaaccacagtggacctggaccggtgacgactactcgtctgagtacgtacatagtccaatgttcagcagaatgcctccggtttctgactctttccctcaaggtttcaactactttggctcctaattctttctcatcgtccatatttaataccttcctcatttgtaccttttccttcttcttcttttttgggtttatctatgtttcgccgtccttgatctctgcctatgtgatcaaagtgactgtttgtcattagtttttcaataacaagttatcatttgtatcttgattaatgaaaacaagaaactgctcttgtgttactttcaaatacatatttaatatatatgggccttggacatcaaaagcccattattcgatgggttattagttggcatgatatactttgtatagcccaaacctctgtgtgtttttcttatggttgaacgagaactatattctaggatggaataacaatttgttattctacttctgtggttttggtatttgcttacgtaatgtaaattatttcatatttgatgggttcttctggtaacttacctgttgaggatggtcaaacgatggtagtaggtttgactggtgaaccatgtctacctatcttaaaagctggtcaccaaacataaaaattaaacaagtacaaaagtgttttagtaacacccaaaatagtaaactaaggtgatatgatgatggggatgaagtttttctctttttacgttgtacttcttctagttgcagctagctcggggatgcggataaatgggcagagcgtttcgtgtctaaaccaacttgctccatgcctaaattacctgaatgggaccaaggaagtacctcaagtttgttgtaatcctctcaaatcagtgataaggaacaatccagagtgcttgtgccgtatgattagtaaccgtgggagttctcaagccgagcgagctggcatcgatgtcaatgatgctcaaatgttgcctgctcgatgtggagaacatgtcaatcccattgcttgcttgactcgtacacactcaaaccttagttctttctttttttttcaatcaaaagatgtttcatgaatattttgtgttcttgcaggttctaaaggaggatctacaaactcagaccgaagttcctccattggcaacaccttttctcagtcctattggatgacaacattagctattgcagccactgttttgtcatattgccatcaactaattagctgaatctctcattgtctatagcagctttgcaatttgcttgttaattaagacgattgattctttttttttttaatgctctatgagttaattatgattattggtcgtcaccaacacattgtatgtaccacttcgtccccataagtagtataaatccatttctatt

SEQ ID NO: 152101 - DNA, 414 bp, Arabidopsis thaliana landsberg
ataatcctaatgtataacacgataaagttgatattaaagacaattgtcaaagctctctaacccatgaaaatatttggacaaagaaataagagaggatttggtgtcttgcaagtttcacagctcctatcttaacttatcactagcttgcttgatcctaaataggatttaaaggcatacagctttcagttataaaactggttcaagctgaagtagttttcattaaactggcctgccccatttctatgcagagcggtcgggccttcaactgcgggtgggtccggctgccaatagccggacactgaactgagttgagccgcagaccggttagctatgggttggaggttgcttgagggatggtgatcaagggtaaaacgtcttggttggtcagaggaagaaacccatgttgttgaattt

SEQ ID NO: 152102 - DNA, 2793 bp, Arabidopsis thaliana landsberg
atggacgatcggaattggtttggatttgagcaacaagaagataaatttggtgtgtggctagacccaaggacaatatggcaagtgaagtgggctttgaggttacctaatcctggttatgggtcactggttacccaaataaaaaatctcacgtcatcaaactgaacatagaagccaacaaaacaaaacataggggttaggcacggcggcgacggtcaaatcgaatctcccggtagttctcaggaacgagaaccacgtgacttcaccaaacttgtgataaaatattcttacaatgaaaagttctctatgttttgtattattattgtgtgtttctcatcacaattcttattgttttgtgtcggccacatcaagtatcatattatctacatcatttaataatccgacacatgttgtagatagtatggtatattaatatttcatattcatattacagactaatcgtttagagaagttgtacttagagaagagcttcatattaagaaatatggcgtatcctgagagagatctcattgttgatcctagaagcggtttctgcaagtcaatctctacattatatagcaagcgaaacccattatgtcgcccgccaaatcagtcgcttgaggtcacaactttcatatcatctcaaccgcaatccggcaccaccgcgttcatcgaggcctccacgggccaccgcttgacattctcggatctctggagagccgttgatcgcgtcgccgactgtctatatcatgaagtcggaatacgaagaggcgacgtcgtcctcatcctttctccaaactccatctacattcccgttgtttgcctctccgtcatgtctctcggcgccgctttcaccaccgcaaacactctcaatacttccggtgaaatctccaaacagattgccgacagtaatccaactctcgtcttcactacgcgccagctggcaccaaaactccccgtcgctatctccgtcgttctcaccgacgacgaagtttaccaggagctcactagcgcaatcagagtcgttgggattttaagcgagatggtgaagaaagaaccgagtgggcaacgagtcagggaccgagtcaaccaggacgacacggcgatgatgctttactcgtcgggaaccacgggaccgagcaaaggagtgatctcgtctcaccggaatttaacagcttacgttgcgaaatacatcgacgataaatggaaacgagacgagatattcgtatgtaccgtgccgatgttccactccttcgggttattggcgttcgcaatgggctccgtagcatcgggttcaacggtggtgattctccggagattcgggctcgacgatatgatgcaagcggtggagaagtacaaagccacgattctgagtttggctccaccggttttggtagctatgattaacggtgcagatcagctcaaggccaagtacgattggacctccctgagaaaggttaggtgtggtggagcaccgttaagcaaggaggtcacggatagcttcctagagaagtatccaacggttgatatttttcaaggatatgcgttgagtgaatcgcacggttcaggagcttcgacggaatctgtggaggagagtctgaaatacggtgcggttgggttgttgtcgtccggtattgaagcgaggattgtggatccggagacgggtcgggtcatgggtgtgaaccaacccggtgagctctggctcaagggtccttctatttctaaaggtaaacaaacacttaacgctaaatatttggcagtaattagattatttgaaatagacattttattattgggaaattatttataaaacaaatattatgatcaagtttttaagcagtaatgggttttggatttggtgtgagtaattgagttttgtatacatctatatgattagtattcgtaacgtagacaccctaaccgaagaatgacttcagttcatttgcaaattaaatgaaacttatttaagtgaactcaatactattgaataacaaaagaaacactcttaaatctgtcttgggacaaaacaaaaacaattttttgcatggcaaagatatagttttgaattaaactaacatttatatgctttaaaggttatttcggaaatgaagaagctacaaatgaaactattaatctagaaggatggctaaaaactggagatctctgctatatcgatgaagatgggtttctatttgttgtggatcgactgaaagaattgatcaaatacaaaggctaccaggttcatcatcgttatgtttactaatagtgtaaattttcttaaaaatgaaaatctagtggttaatatatgataagcaggtgcctccagctgaactagaggctcttttgatcgctcatccacacattcttgatgctgctgttattccgtaaaatatttaacaactaaaacaccatgatttttgtcattcaaatatcgaaaaacatgtagtttgtttcttttgtgcattgtacaggtttccggatagagaagccggacaatatccgatggcttatgtagcccgaaagcccgagagcaatctctccgaaaaagaagttattgacttcatctctaatcaggtacttctataatcacaaaacgtacaacatcttctttatcatatattgttttacttaaaagttaaactatttttgggtggtaaataatttgatgagcaggtggcaccgtataagaaaataagaaaggttgcatttataagttccataccaaagactgcatccggcaaaacacttcgcaaagatctaatcaaactagcaacttctaaactttgaaaggatcta

SEQ ID NO: 152103 - DNA, 400 bp, Arabidopsis thaliana landsberg
gatacggatgacatgtcaagtccgacaaggaaatacatgcacttgtcgtccttctaatcctttgcccttaaacatcgttaaaaacgacaacttctctcttcttcttctctactcttctccattttcttctcttcttctcttctttgtccattttttgacagacatggcgatctggtttgctagatccaaaaaccttgtttctagcttgagacataatctaaatttgtcgacaattctcataaaacgtgattactctcatcgtcccgtcttctatacaacttctcagttatcttcaacggcgtatttgagtcccttcggtagcctccgtcatgagtctacggccgtggagacacaggctgatcatttggttcagcagattgatgaagtcgatgcccaggta

SEQ ID NO: 152104 - DNA, 1273 bp, Arabidopsis thaliana landsberg
atggcggcaaaatcccagaaaaccctcgttctgctagcgaatctaatcaagtttcctccattaaaagctttttctctcttaaattctccaaatttccatgaatttcaacacacacacgaatcaatctcaatccttcttcgtctccttctctctgggaacttattctctcacgctcaatcacttcttctacaagtaatctccggaaaaatccactcccaattcttcacatcttcctctctgttacactatttgacagaatcagaaacgtcaaaaacaaagtttcgtctctacgaggtaatcatcaatttctatgttcaatctcaatccctaaagttatcaatctcttacttcaacgaaatggtcgataatggttttgttcctggatcgaattgcttcaactatctcttaactttcgttgttgggtcatcttctttcaatcaatggtggagtttcttcaacgagaacaaaagcaaagttgttttggacgtgtatagctttgggattgtgattaaaggttgttgtgaagctggtgagattgagaaaagctttgatcttcttattgaattgacagagtttgggttttctccaaatgtagttatctacactactttgattgatgggtgttgcaagaaaggtgagattgagaaggctaaagatttgttttttgagatggggagacttggattagtggctaatgagcgtacttacacggttttgattaatgggttattcaaaaacggggttaagaaacaagggtttgagatgtatgagaagatgcaggaagatggagttttccctaatctctatacttataactgtgtgatgaatcagctttgtaaagatggaagaacaaaagatgcattccaagtgttcgacgaaatgcgtgagagaggggtttcttgtaacattgtcacttataatactttgattggtgggttatgtagagagatgaacttgaatgaggcaaataaagttgtggatcaaatgaagagtgatggaatcaacccgaatctgattacgtataacactttgattgatgggttttgtggtgtgggaaaattagggaaggcgttgagtttatgcagagatttgaagtcaagaggtctgtctccgtctctcgtcacgtataatatcctaatttccgggttctgtagaaaaagagatacttcaggagcagctaagatggttaaggagatggaagagagaaggattaaaccgtcgaaagtaacatacacgatacttatccacacatttgctctttcggataacatgg

SEQ ID NO: 152105 - DNA, 340 bp, Arabidopsis thaliana landsberg
gaaattgtttcacttctgaaaaaaaaaaaaaaaaaatttgtttgctcatcatcttcacaaaccaaacttctcttcttctccgatctcagatttgaatttttatcgattttgagcttcgaagagctcaatctctaactgaaattcgagaaattagagagtttgaaatgggagaggaagtacaaatgagccattacgatgtttccggcgacggaaatagggtttctgaatgggagatggtattaccaagccacgaagatcgagcatctcattgttactctaaaaatccaccgaatttggcgatggcgtttagtatcacaccggagagaagccgtactattca

SEQ ID NO: 152106 - DNA, 777 bp, Arabidopsis thaliana landsberg
atccatctattgattttgattctctgttttatccggaagtctaaattggatggtgataaagggaatgcgtgttggtaagtacgagcttgggaggacactcggagagggaaattccgcaaaagttaaatttgctatagatactcttaccggcgaatcattcgccatcaaaatcatcgagaagtcgtgtatcacacgtcttaacgtctcttttcaggtttccattttcgatctttatttctctttttggttaacggtggattttaactcttacctactcttgatttttttttgtgatttttatagattaagagagagattcgaacactcaaagttttgaagcatccaaacattgtccgattacatgaggtaataatactacttgtaatgcttcattttatgtagaaactcaattactgctcgaggcaatatgaattcgattcaaattttggtatcagatttttgagatatactttgattaaacgataataatgttttgatgaaagaccaaacattaaacctatgaaagtttttttgttagcttgcgtagaacggtagaagtatattaaaaagttaaccgtcattttggtaaattaatatattatttttcgttttgtttttttgtaactagttttattcgtgaccacgcaattgcctcttcacgttgcttattagccctacgtaacgtatacaataattattttcaaatactttgtcctcctgactaattcattggcagtcgacaatagatgtgatgaccatgacctattcaattatgag

SEQ ID NO: 152107 - DNA, 1390 bp, Arabidopsis thaliana landsberg
cagcagccatgttctatggcacagctgtatgggacccttggcttatcgttggccagattatttgcctccaatgctcttactatctcactcttggactcttcaccatggtctttcttggccttcgtgttcctcgccttagtcttgtctacttcttcgattacgctactctcactacttccaccttcaccggttggtctgttattgcctcattcctcttctcttcactcgctgggtattttgctttgccccctagtaatagtatccatccatttatttccctctttattactagtctttccagattccttgtattcattttaattgcgcagggctgtgtacatgatatttttggtggagcgagcacggaaatgcttagatttctctgcaactctctacatcatacatctcttcttttgcatcatgtatggaggatggccttcctctatggcgtggtgggttgttaatggaaccggactcgctgttatggctttgctagctgagtacttgtgcattaaacgcgaacagcgagagatccctatggatcgcttccactcaagtaagatgatcattctttcttgaaatctctctgtgtgaacaagcatatctttaccttttactttctcaagactgacttaacatgaaattaaatttggctgcctatgctgctgctgcaggggtttgaagattggtgaaagaacaagtgatgaagattcttgtgggttagcagcgcgactcgtagagcctagtactcttaacaattgtgatgtacagagatgaaatcagaggagtagaatgggcgaaaggaagttcagctagccaagcaacaatgttggacactggtgcaccaactctgactgcaatttttagtgacttcaaatactaagactttggaatacgtttcaatttgttcttttgtatgaaaaaaacattagactcgaataggttattgatttcatgttgcttcttttttttgtttatactggattttctcttctatcctctacttggtgcagctttgtgtgttttaaaaccagtgtctcattcatcatactcttttaccaccaattgaatccttccaatttactgttttttgggggggaaaattactgtgtactaacaagtaaaaagggccgtccgtcaaaatgtaacatctcctatatacggtgcggtcatgttaaaaaaaggagcaaaaacgcgtgataaaacgacgtcgaattagagatcctactagacccagattcagatccaaatcgccaacgcgcactggaagtgggatcaccaccactgcgcttcttcttcttcgtcatctctgatcccccctgcgatcaggggccatctccgtcgataatccgatctccggttcagacattcgtttggacttgcaaagatg

SEQ ID NO: 152108 - DNA, 335 bp, Arabidopsis thaliana landsberg
ggaaaaaggttcctgcagaattagatgatgctctacaagcagagttcaacagtctaattgacgatgtatatttgctcgttgaggaaataggcaaggaaagagcaaataaaatgtctcttgaggatggtctagaatatggccttcaacggctgagaatgccacatgacaaggtgaacattgacaaatttgggcttctcaattcaagctcaaaaacgggcatcagaggtgcctttatgcaggatgaaagctggacagatgattttttgaatgctttggagcgaagagttatgaattgggatcttgctcacacacatatgggttgtgctgctgtcctc

SEQ ID NO: 152109 - DNA, 599 bp, Arabidopsis thaliana landsberg
ccaaaaaagaaggaaaaggggggggaaaaaaaatggttttaaaggtttggaaagaatgggaaagttgaaaaggccaaaagttctaattgaagaaaggtttaaaccaaagaaaagatgaagagagtagtggaaaattcaagaaggctaaagaaaagaaaaagggcaaaaacgtggactcagaggtaaaagaagataaagatgatgacaaaaagaaagatggaaaaatggtcttcaagaaacatgaagaaggccatggagatctggaggttaaagagagcgatgtgaaagtggaagagcatgagaaggaacacaagaagggcaaagagaagaaacacgaggagttagaagaagaaaaagaaggtaaaaagaagaagaataaaaaagagaaggatgagtcgggtccagaggaaaaaaataagaaggcagataaagagaagaaacatgaggatgtatcacaagaaaaggaagagttagaagaggaagatggtaaaaagaacaagaagaaagagaaagatgaatcaggtacagaggagaaaaagaagaaaccaaaaaaagaaaagaaacaaaaagaagaatctaagagtaatgaagacaaaaag

SEQ ID NO: 152110 - DNA, 639 bp, Arabidopsis thaliana landsberg
atgaagtatttacttgtttatcaatgtggattgcaggaatgggctcagggacacacaaccaataccacaaacatactttggcaactgtatggctcctggtatcgtatcagtcaagaaacacgatttgctaggagaaaaatgcgttttggcggcttcagatgcaatcacagcgagaatcaaagatatgttatcaagcgatctgttgaagacagcaccaagatggggacaaggagtacgtaaatgggtcatgtcccattatccaacctcaattgcaggagctccgaaattgggactgtatgacatggattttggattaggaaagccctgcaaaatggagatcgtgcacatagaaacaggtggttctatcgcattctcagagtccagagacggcagcaatggagttgagattggaatagcactagagaagaagaaaatggatgtgtttgactcaattctacaacaggggatcaagaaattcgcaacgtagcagcccctttctcatccaataacttgtagcaacgaaatgactctatgaaaagcgttgttggaacggatagacttgttgtttaatatccatatccaacctcataaatacgggcaaaacatactctttagtccgaaatataaactcaaaacaag

SEQ ID NO: 152111 - DNA, 372 bp, Arabidopsis thaliana landsberg
ccacctttttactcatttcttctacctttgatggcttggctcgtgcacgggccaaacccgattggaatcaacactgctttggctcagcttgtagtttcgaggccggtttttaggttaccatatgtaccattgccactgtctaagaggcttgagtttgtgaaactggtgaatgagattggacgagagcattttgtgggtgagaaagatgttcaggctcttgatgatgatgattttatccttatcggtcgatattagcatacttttttttttgaatttttggttcctttgtgtttggtgttaatgaagaagagatggttctatcatttggctatatgtagctgatgaatgaatgaaaactcaaggaatgatttc

SEQ ID NO: 152112 - DNA, 270 bp, Arabidopsis thaliana landsberg
cttaaagtgtttcaactggtacatttactcatgaaagagaacataccattcactacagctttgtctggatgatttggcaagagagagcttctgatgatggtgaagatgttgatgatgctgtaataaaagatgttgatgatgatgcttgtccatgaagcagaattatgttcaagaacaagagaaagaagaagaagatggttatggctaggttttttctcaggcagttttccaaaaccagagagagagagagagatgatgatgatggaaatg

SEQ ID NO: 152113 - DNA, 6294 bp, Arabidopsis thaliana landsberg
tgtgatgctaacaatcaagatgtgatcagaagtcactaagtcaagccaagcataacaggttttggtgtgttccagcagtcctaagtgaacatgcagaaaacagaaaatcaaacagaaacagtaaaacactcgaccaacacagctctttgtagagctctgggtgaggtcgagtgacaggtcgagtaacagacaggaaatgaaacagggatactcgactgcacagtctgttgccagacaactgggtggtcgagtatcaggtcgactaacagtaaagatttgcagaaactaaacaacagatgacaggatgtagtaaacagtagtagagtaaacaataaaatcaattagataaagaattcctaaggatgggataattgagtagtttcgtttcctcagtttacaggtgattgacatgctcaataaattaaccctagacaacaagttcattaactaaatctaagtgccaccgcaacagagactctcaagctaacctagtcccagactcaatcaccattgacgagagctaacctaacaagcattacgaatcaacaagttaaagccaaaacgctccctgcaaccaataccttggtacagggtcacaaatctatggaattagtggttcagacatttcatcgaataccttttgggcgcggaaatgtctgggctcaaattccagttgatcagaaagcaataggcattaagaacaactaatccagaagggatctatcaatcaatactcaatcacctagcatactgagaattctacactactctaacccatcctcaggaacctattcactactcatacatcataatagaaagcataaacgttgaacaggttgaagacatgataacaacagtgtaacagtagtgtgataacaaaatgaacaacagtaaacgaaaatcaagaaccaaaactgaatactgaatagataaagagaaatccggattacaaaaagtctagaacacaaggtctgcggaaataaaactaggtaaaaacttcttttttcgaaaatgagaagtacatgctacttatagccaaatatcccgaaaccctaatactcaaaacgacgaagtatttggacgggttaagaactgtactcgacccaggtggtcgagtgagaggtcgagtgaatagctggagtcttcttttcttccttgtgctcgagtgtctggttgagtgcagaatgaagaaggctctgaagcttgtcatcgagtatgcagtcgagtggtgtgatggagatactcgacctctaggtagagtgagtaggtcgagtggttgtctgatgatggaggtgaagacactcgacctcatggtcgagtgaagtgatcgagtggcggtctggtgatggagacgagggcactcggcctcggggtcgagtggtgaggtgaagtggtgatgtcctctactcgacctggcggtcgagtgatctcttgagatcttgaagctcctactcgacctctgggtcgagtgatttatcatgatcaggtccgcttcttccagatagctcgtcaacagctccaaatcaccttaaatcaacgcaaatatgcaacatgcatgcaaaactatcctaaacatgcaaagtgatgacaaatgatgtgaaatggtatgaaacaatgatgatatgatgctaaagtgatgacaaatggatgctcaaaacatgcaaaatacacacttatcaccaagtgattaccttctttgcaaactcttcctccactctcttgcgagcagagaaacatcatggttgcgtcaactagaactaggttcactaaccaattggactgatacaaagaatcactacttcgatgaatccgtgacagaggcacttcgtttgcaaatttcttcattcactcaagctccacccgaatcccttagagcagcttggctccgtatcagatcttattagcgtgaatgtccccaacatggttttcaagagagccaactcattaatatattctacagaggggtagccaagccataccggactcaacttgatgcagcgagctactgtaacttcatgacaagaactactagtgaagcattactcctcattaccaatgctttaactagtctttcgacacaggaagttgacacaaaacaaagaatttcagctgagaatgccaccgcaagcaaagagactcttgtttcagtaatttctgctcctatccaagcccccccctccaccttccttagacagcagacttgattccatgcttgcccagattttcgcgtgccaaacaaagctcgaggataagtttgatagcaaatatgattctctctatacagatctaaatagcacgattgacaatctacgctctcatataacggaaccctcacctacatcagcctctatcaatgcagtcacattacgcaatggaaagcaactgaatccaatacttcagcgcgaacgttcagctcagccttcatctttaccagttgcagaaaaagactcagttcgattgacaccaatcactcttgacgactctgttttgcctttgtcgagtgaaatcgacaatttcgtggaggaggaggaaattattcccgatggtgtcgatcgacacccagctcgttcagacaatgtgcaaattcaagctaaaaccaagtcagcaaatcggcaaattcctttccccaagagtcctaaaaaaacaagataagccttagatgatgtcagatgcaaggctatgattgataaggttattattgagatggctctagttgaagctattcatctctctcccacaataagaaggtatgtcaagacaatggtcactaagaatttaacgaaagaatacagtgttatgatgttttcagagcatggaagcgatatcatttaggaacgaattccaagaaagctacctgaccctggaacctttgtactaagtgtcaccatccaaccacgattccttcccaagagccttatgtgatctcggttctagtgtgaatctgatgcctcgttcagttgctacctttatcactcttgtgttggtagatcgttctacccggattccagatggaattcttattgatgttcccgggatgattggaaagagcatgattcctatagacttcgtagtcttgccttatgagaaggaacctaaggatccattaatctttgggagatccttcttgcacactgctggagcaatcatagatgttcgacaaggcaggatagggctgaatgttggcaatcttactatgcagttcaatatgaacactttggtcaagaaacggatcatagaagggaaaaccttcttgatagattctttcacttcatcagcttcagatagtatttcagagatggaattagaagacccactagagcgagttttggtctcttccatagtggatagtgcagatttggacagtgaaacttctacatatactaagctgcaagatgagaccgaacatgtgatgcaacttacggttgaagaagctcttccatctgtgattccaacaccgactattaattcagattgggatccagcaaaggctcctcaaatcgatttgaaaccacttccagcagggctaaggtacgcttttcttggtgaaaattctacttatcatgttattgtgaatgtttctcttaatcccgcagagctcaccttattgctaagcaagctgcgcaatcatcgcaaagctcttggctattctcttgatgacattgcaggtatatctccagatgtatgcatgcataggattcaccttgaggatgagtctaagtcttcgttgaacatcagagaaggctgaatccgaatctgaaagaagtggttaagaaagagattatgaagctgttggaagcagggattattaatccgatttcagatagcagttgggttagtccagtttatgtagttcctaagaaaggagctgttggaagcagggattatctattcgatctttgttatgctccttcaacatttcagagaggtatgatgtctatcttcacagacatgattgaggatatcatggaggtcttcatggatgatttttcagtttatggatcatcgtttgaggattgcttagagaatctctgcaaagtattagcaagatgtgaggcaaaacatctggttttgaattgggagaaatgtcactttatgatgtaggatgagatagttctcggtcatagaatttttgagcatggtatagaagtcgatagagctaagatcgaagttatgacaagtcttcgagcgcccgataatgttaaagcaatgaggagtttccttggacatgctcgtttctataggagattcatcaaaggttttaggaaaattgcaagaccattgaccgctttactctgtaaagaagttaaattcgaattttacataagagtgtcattgttggacatgggcattgccccttcaatgttaggaggcccaaaacagatatcaacaaagaagagggccttttgccattaaaaaggcccattaggtcgagaagggcaaaatcataatttgcaagggagacagaacggaatttagggttcagattccctataaatagagagaaacactattgggagcaagatccgatccacaggttattagctgagagacaaagagaatcgttgccttgcccgaaatcgttgcctagcccgacctcgttgcctagcccgacatcggtgcctcgcccatttctgtactttgtctttctgcttttacgatgaagttctcggctcggcaggatagtctataaccggcgagacaaaactagtttgctgtaatctctcgatctttgttatcgttaataaaatggaccaactccgttcagcccccaaaatctcgtatattattattattattgcatccccaatacaaataattgacgcccactgtggggccgttgatcgaagctatccttttttgacgagcctatgcatcctgaccctcacaagattcgcggtgatatgatagatacttccagcgatcgagaaactgatactggcatacctcaagcgcccgacgcgctgggcttacctccgctcaacccagcagccatccgtgccgagcatgatccctcgcgccgaatcttgttcacaccagacacaggaggagaaacagatcatgttcaggtcgcacgacctcctgccgcgcctacccccctcgcagtagctccagccgacgaagcgaccgcagctgcagcagcagcagcaaaaggcgccgctcaaagacgtaccacaacagcagaacgaggcacccatttagacgacctcgttcaaaccattcttgatcgactcgacggacaggaagcacgaactaccgaacggattgacgcctttgtggcagcacaagtcacttcccagagtcagatcgagcggcttcgacgccgaaaacacacctcccaacctcatgacaatcacgatggacagcagtctccgcgaactccagtcaccgagcgctcagagacccatcgccgtagaccagcgtcagttatcgtaggattcatcgacgagcattctcgcggtagcccacaagatgaccacaacctacagaacgaccacaatatgcagagcggccccaacctgccgagcggtcacaacctgcagaacaaacacaaccagcagagcggccacaacgtgaaaaacggccacaaccagcagaatggccacaacaagcagagcggctccaacctgcggaacgtgcacaacatgttgcctaacaccaactatccgcagagtaatcataatctgaacgaccacgatctcgcgagaggtcaaaatctgccaagcgaccagtattttccgaataaccaaactctcgagtgcaggcggatcttttcggatcgacctatcgaagttgaaaaccgatcccgcgatctggaacttgcacggttgaacgcggtaacaagagatatgtcttccaaaatgaattgggccaccaccgcggcccccgaactagagagggtgttggaagaaacacaacgctcgcccttcacggcgcgtctctcggcagtacgcgtttgtcatgttaataaagtcaagctaataccatacaacggtcttaccgaccccaagatcttccttaaatcaatgtgcattgccatcaatggtgcacattttttctgctaaagaaagtgatgctagaagttgccaaatgttcttggaaaacctgactgcagacgcactcaactggttctcgcgaatcggagccaattcaatcgatagctaccgaaaacttacatctttattcctgcagcaccactcggttttcatgattaaggaggccacaaacgccgacttgtggaccatgtctcagaaggaaagcgaaccacttagaactgtcattgaaagattcaagaag

SEQ ID NO: 152114 - DNA, 753 bp, Arabidopsis thaliana landsberg
ctcaaaagtatatacttttactagttttagacttaataaatgcgatcgccctttttttagtatgttgaacctcattgctttcctccgccgtcgtctccgccgtccccggaaagccagaatctccgtcaaccaccaccacctctcagttgattcttctcctgagactcatcatcatcaaaatggcttttcatcggcagccgccatccacccaaacccggacaaaaccatcacagtggccacctttaacgctgctatgttctccatggctcccgccgtccctagcaacaagggcttgccattccggtccaagtctacggttgaccgccccaagagcattctcaagcccatgaacgccgccgcatctcctactcacgactctagaaagcaacagaggtttgccaaatccaggcctaggagagtctccatcaatctccccgacaacgagatcagccgccagctcagcttccgggaggatccacagcactctcccctcaggcccggcgagatcggtctccggagcaccagaacggctctggaagttctgagtgagctagacgcagacgtgctggctcttcaagacgtcaaggcggacgaggctgaccaaatgagaccgctctccgatctcgctgcggcgctggggatgaattacgtcttcgccgagagctgggcgccggagtacggcaacgccattctctctaagtggcccatcaaaagctccaatgttctaagaatcttcgaccacactgatttcag

SEQ ID NO: 152115 - DNA, 1152 bp, Arabidopsis thaliana landsberg
atggtcccgagtgatcctaattatggcagtggagaggtagtttatgcacctttcgtactagatggttgattattttcttgccaaagtacttgcacaaaactgtttctgttgtccatctgctgttcagatgatgtagaaaatttatccattgtgtgttactttttagagatcatcagtctcagctctctttgtgtttttttttgttttataggaaccattcgagcttgttggtgcaactctgtcagacccattagatgattacaagaaagctgcagcttccatcattaacgaatacttcagcaccggtgatgttgatgtggcagcagctgacctcattgaacttggttcaagtgaatatcatccctacttcatcaagcggcttgtctcggtagcgatggacaggcatgacaaagagaaggaaatggcctcggttttgctttccgcattgtatgctgatgtcattaacccgaaccagataagagatggatttgtcctgctgctcgagtcagccgatgactttgtggtggatatacctgatgctgtcaatgttcttgctttgttccttgcacgtgctgtcgtggatgacatacttcctccagcttttcttcctagggctgccaaggcacttccaataacttctaaaggttaccaggttgtccaaactgcagagaaaagctatctatcagctgcacaccatgctgagctagtagaaagaaggtggggtggacagactcgaaccactgttgaggaagtcaagaagaagattgctgacattttgaatgaatatgtggagactggagagacttatgaggcatgtcgttgcgtaagagagttgggtgtttctttctttcaccatgaggttgtgaagagggccttagttactgccttggaaaaccacgcagcagaagcacctgtattgaaactgctaaatgaagcagcttcagaaaacctgataagctctagtcaaatggtgaagggattttcaagattaagagaaagccttgatgatcttgctcttgacattccttcagctagaaccaaatttggtttgattgtgccaaaagctgtctcaggtggttggcttgatgcttcgtttggttatccctctggtgaatgtggacgacaacagaacgaggatgagaaactaaagcg

SEQ ID NO: 152116 - DNA, 483 bp, Arabidopsis thaliana landsberg
tagatggatctttatgtgctttttagtttcagtggccacctttcgtgatgggttctctcattttggtgattcttcaagtgatgaaacatgtggtatgagccttgttcttttccagagttaccagggaaacaggactttcctttattaatgtgataataaggtcatgttttttcatggcagggaaaagccaaaaaggaacttcagttcttacgagcagcagcgccactctccgggattgtgctcggtacaaccattgcaaaagtgtttcatccgccttccatctctatggtcagaaattaaattcatggtagttgccttgttgagctacataacggtaaagtgtttaagtaatagcaaaattcagtatgttttcaggtgggagatatacctcagggccttccaacattttctttcccaagaagttttgatcatgcaaaaacgttgcttccaacatcagctctcattactggtgttgccatcttg

SEQ ID NO: 152117 - DNA, 11355 bp, Arabidopsis thaliana landsberg
  unsure (1)..(11355): unsure at all n locations
ataacaaaaaacaaatttgaaacgatatggaataattcatcacgcgaatggatgtacaatcgaatcgatatatttactaataatatctcgacggattatttggcgggtgtggaagatttcattgaatttgcaagctctcatgttcaagacaaaaaatgtcggttattgtccttggtggttgcaaattctaaacgtatgaaagtgcaccatttcagtatttgcttagtagaggtttatggccaatattatgtctggatgaacatgggaagattacaatgatactgggagggaactagtacttatcaagaatatgttgaaaacatcgatttactagtggattcatgatgaacctataggatttgatgggaataatgtatatgttgggatggttaatcatgcatttcatggttctgtaccatataacgagtatcatgaacatgaaagtggaaatgatcaagttcatgaagaacctacccaagaagcgaaacggttttatgatatgttagttgctgcaaacacgccgctttacgatgtttgtcaagaaggtcattcgcaattatcgttggcagatcggttcatgaaccataaagtcgaccacaatttgtcagaaaattgcatggacggatgggcggaaacgtttacgaagtatttacctgagggtaataaggcgaccggttcctactacgagatagagactttgatgcaaaagctaggattgccgtaccatacatttgatgtatgtatagacaattgtatgctcttttggaaagatgatgagaagttagagcattgcaagttctgcggaaaaccaaggtattagaaaagtgatggaagaacaagaataccatttagtaagatgtggtatttaccaattggagatagattgaagagaatgtatctatcttagaagactgcagcttcgatgagatggcatgctgagcatgaatcagaggagggattaatgtgtcatccatcagatgcagctgagtggaagaattttcagcaatggcagccgtcatttgcatcagaactgtgtatcttaggttatgtactgacggtttcaatccttttggcatgtccaaaaatcattcgttgtggccagtaattttgactccatacaacttgcctactgatatgtacatgaatagtgagtatttgtttctaacgattttgaattcgggaccaaatcatccacgagctagtctagatgttttctccaaccacttatcgaggagttaaaagatttatggatgaatggagttaaggcatacgatgtgtccttagatcaaaacttcaaccttaaagtagttcttatgtggacttattcagtcagtaagttttcggaaatgaaaagccacgactgtcatgtctttatggaacgattgcttccatttgtgttcgcagaactcctaccgcgtaacgtgcatcttgcagtatcaggtaattatgtcatatatacctatgttaaaataaattatttatgtaataatttactaatcatctcataaatatttctatcgtagaatttggagcattttttcataacttaagtagccgatcattggagcaaagtcgcgtcaaacttttgaaggagaatattgtcatgattctgtgcaatttggaaaaaaatgtttccaccttctttctttgatgtgatggactgaaccgggctgcgggttgtcagaacgtcctgtcgtcggctcaagggctgtcgggcttgcggaccgtcatgcttgtgagttattgggcttgctgagttgaatcttatgaaaatattctcaggatagtcacaaatattctcaagatatgagagtctcagaatattctcaggataccctcaaaatatgtcatgcttattctaagaatattctgcaaaatcctatctctctctactatatagagagacccaacctctcattatttctcaagctctcaaacacaaaacactctaaattctaaagtctctcctctcgctctattgcttcttaaaagtaagttcttagtttagtagttttgttgataagcttgaagttagcttaaggaataagctaaccaaatcctaagaaattaggattagattgtatttaggagttatctacatacaatatttagtagttatctaatgtttttaggagttatctaatagctagagttttcatataaatagagatgccaagttgtggtaatcctattgagaagtttagagtttgagagtttgagagctttggtgagagctttaggttttgagtaagtttcctaaagattaataaagagtgagtctttatatacaccattttcttgttctataaatcgatagtttcgagagtatatcgtagatctagttcgcttgtgtctaatacttgtgtgcttgggtattagttcgtgatcagttgtatcctgggattcaaaaattatgatgtccgaaaagcacttatgggcgatttattgaagtaaggaaaaagatatcatatcttgcctccgtgatttactttttgtccttaattactgttattgtaattttattgttatcgttatcttaatagaattcgtacttgtttctcaattcggtttttgggctattacaatcttaattcaataaatccgcttttagcttatcgctctagaaggattgagaatttttcgaattttttaaaacgattttaaaatcttctaaaaattgtttctgctatcatctttgggtgcttacgcggaaggtttatagaagaacgttattacttctttctttctcctctttctaaattgcttcgcaaacgctatgtagcgattgttatggacagtttcttatataaacttctctagtttccacgaacgctcatacttgagtgagtttgtgaaacgcgaaacaagtttttgcgaacgcttcttaagcgagtttgcaaaactaattcggtgtaatttagttacctgaattttttggttaatatactaatcaaatctgtttttctgtgaacagaatgactgatattaacaccaacaacgagatcgttggcaacaccacagttgctgagaccccggatgaggaagctttgcgccttgcgaaagagcttgaaaagacacagatcaccgattctgatatggataatgttcgccgaaatctgttcggtaatggttcaaccaacactaccataccagcctctgtttcccaagggatgatgtcacacttgtttgatggtaaatctgggttcaaaacgtggcaagaaaagatgcgctactatttggtcagcataaacatggaaaggtacctcacagaggatccaccaatagttccgcaaggtaccacatatgtgtatacggttggaggtatggatacctgggctcaaggtgactattgttgcaaaggtctgatcctgaaccgtttggtgaacgatctgtttgacctctacagcaaggccaagtcttccaaaacactgtggctaactttagagaacaagtataagactgatgagtctggaatgcaaagattctcaactgcaaagtttctgaatttcaagatggtggactccaaaccaatcatggaacaggtggaggctcttcaacgtatctctcaagagatagagttggaagggatgtcgatctgcaacgtcttcaagacgaattgcttgatcgagaagctaccaccgggctggttagatttcaagaattaccttaactccaaacgtaaggcaatgacttttgatgatctcgtcctaaggttgatgattgaaggcaacaatcatggggctcacgcgggtgctcataatcaagggcatgatgttcatgtatctgagcataaggccaagctgaaaggcaagggaaaagggttctctaatcctcataagaacttgaaggtttcatcgacaacaaacttcaagaagagcaatcctgagcggaagttcaaaggaaagtgtcatcattgtggcaagattggacacaaggctgatgtttgcaagagcaaagccaaagatgtcaagagccaggcaaacctaactgaagaggatatggttgcagtggtcactgaatgtaacatggtggacgacaaccaagtggagtggtactacgacattggtgcaaccacacacatctgcacagattggaccatgttctccacctatgtgaagaacaagtcaaatgaacaattcttcatgggcaacacggcgatgtctaagattgaaggtaagggcaaagtggttctgaagctgacttcgggacgtgagcttactctccaaaacgtgaagcatgtacctgacatgcggaagaatctcatctctggaacggtgctaagtaacaatgactttgccgttaactttgagtctgataagctagttcttaagaaatatggggtgtatctaggaaatgattttgttaaaggtggagtggtcaaaatgtctgtaatgacagtctttccgaaaaatgtagtttctgcttctgttgttgaaatgaatgaaaatcctattgcttacttggttgagtcgtttactacttggcatgaacgtttaggacatgtcaattataaaataatgcgaaaaatgcaaaacatgaatttaattccgaaattcaaaactaaccaagaaaaatgtgaagtatgcgtacatgcaaaactcactaaaactccctcaccacgagttgaaagaacaactgaacctatgaatttaattccgaaattcaaaactaaccaagaaaaatgtgaactatgtgtacatgcaaaactcactaaaactccctcaccacgagttgaaagaacaactgaacctctaggtttaatttacacagacttatgtgatttgaaatatgtgcaaactagaggtggtaagaaattttttgttaccttcatagatgattgcccaagatattattatgtatatctattacatagcaaggatgaagctctggtaaaattcaaagaatttacactcgaagtagaaaatcaacttcagagaactataaaaatagttcgaagtgatagaggatgagaatataatgagccattcaatgcattttgcggaacgaaagaatcgaactctaaaagaaatgatgaatgcactgttgcaggaatctgggttagccaatgataactgtgtattttgcatattttgagcatccatttgtcatcactttagcaccatatcatcattgttttataccatttctcatcatttgtcatcactttgtatgtttaggatagttctgcatgcatgtggcatatttgtgttgttttcaagtgattcggagctgttgacgggctaactagaagaagcggacctgatcatgccaaaccactcgacctccaggtcgagtagacgcttcacgacctcaacacaccactcgaccacctggtcgagtataggacttcaccacttcacctcatcactcgacccccttgccaagtacccccacgagagtcactcgatcacttcactcgacccccatgtcgagtgtcttcacctcaaccaccttaccatcactcgatcacaccactctacctggaagtcgagtatcaccatcaccaccactcgactacatacgcgatgtcgagcttcagaatcttctccattccgcactcaaccagatactcgagcacaaggatgaaaagaagattccagcttatcactcgacctctcactcgaccacctgggtcgagtacagttcttaatccgtcccaatactgcgtcgttttgagtattagggtttcagaatattttgctataagtagcatgtactttacattttcgagaacaagtttttatctagttttattccgcagacactgtgttcttgaccttttgtaatccggatttctctttatctatttagtattcaatattcagtatttgttcttgattttgtttactgttgttcatcctgttatcattttgctattactctgttgttatcatgttttcaacctgttcaacgtttatgttctctacaatgatgtcttagtagagaataggtttctgaggatgggttaaagtagttttgaattctcagaatgctaggtggttgagtttaattgatagatcccttctgaattagttattcttaatgtttattgttttctgatcaactggaatttgagcctagacatttccgcgcccaaaaggtgttcgatgaaatgtctgaaccactaattccagagattcgtggccatgtaccaaggtattggttgcagggagcgttttgtctttaacttgttgattcataatgcttgttaggttagctctcgtcaatagtgattgagtttgggactaggttaacttgagggtctctcttgcggtggcacgtagatttggttaataattttgttgtctatggataatttattgagcatgtcaatcttctgtaaaccgaggaaatgaaactactcaattaccccatcctcgggaattctttatctgattgattttattgtttactttgctgttgtttactgcatcttgttacctgttgcttagtttttgcatttctctcctgttactcgacctgatactcgaccacccagttgtcttgcaacagactgtgcagtcgagtatccctgttatatcttctgtctgttactcgacatgtcactcgaccacacccagtgctctgcaacgagctgtgttggttgagtgttttacaccttttgcttgattttctgtttcctaaatgttcacttaggactgctagaacacccaaaaacttgttattgtttggcttgacttagtgacttctgatcacatcttgattgttagcatcacacccatttggattgacaacctaaaatactacaacgacatgattggtgttttaggataattaactgaaaaacctattatcaatttggcgctgttgccgatttggtgtttgtttgttatatttaagatttcagacttgcttagatcaagttctttttcaaatttcaattcagttactaactgtgtgtttttcttgttgtcttcttgatccacgcacacctctgctataaacaaaatcgatcaacaggcaaccagaacctccttttcaacgatttcatttaccgcacagcccgcgaaatcagaaaaaggagaaccacagtcaacactgtacctcagcaaccactcgaaatggctgaagaacagaatcaacaaaatggccctgccaacattggtgctggagatgcaccacgtgatcaccgtcagaggaagggaattgcacctcctgctatccagaacaacaacttcgagattaagagtggtctcatctcgatgattcaggggaacaaattccatggtctgccaatggaggatccactcgaccaccttgatgaattcgataggctctgcaacctaacaaagatcaatggtgtcagtgaagacggattcaagctccgtttgtttccattctccttgggagacaaagcacacatctgggagaagaatctgtcccatgactcaatcaccacctgggatgattgtaagaaggcttttctgtcaaagttcttctccaatgccagaactgcaagactcagaaatgagatttctggtttctcacagaagaatggtgaaagcttctgtgaagcatgggagcgtttcaagggttacaccaaccaatgccctcatcatggcttcaagaaagcctctctacttagcactctatacagaggagttttaccacgcatcagaatgcttctggataccgccagcaatggaaatttccagaacaaagatgttgaagaaggatgggaattggttgagaaccttgctcaatcagatgataattacaacgagaactgcgataggaccgtcagaggcacagctgactctgatgacaaacacaggaaggagatcaaagcgctgaatgacaagctggacaggattcttcttagccagcagaagcatgtgcacttccttgttgatgacgagcagtttcaagtccaagatggggagggtaaccagttggaagaagtcagcaacatcaacaacaaccagggtggctacaaacaatgcaacaacttcaaaaccaacaatcccaacctcttctaccgcagcaccaacgttgctaatcctcaggatcaggtgtatcctccacagcaacaacaaggccagaacaaaccttttgttccctacaaccaaggttttgttcctaagcagcaattccaggggaactaccagccgccaccaccacctgggtttgcacctcagcaaaaccaaggtcctgctactcctgatgatgaaatgaaacaaatgctacaacaactgcttcacggccaagcctctggctccatggagatggcaaagaagatatatgagttacataacaagttggactgtagctacaatgatctcaatgtcaagatggaatcactgaataccaaagtccgttacttagagggacattctgcatcttcttcagctccaaaacagacaggccaactaccaggcaaagcaattcagaatccaaaagaatatgctcatgctatcaccttgcgtagtggaaaagcacttccaactagggaggaacccaacacggtcactgaggacagtgaagatcaagatggggaggatttaagtctcgagaaagatcaagctgacaaaccactcgaccagccactcgagcaaccactcgaccagccacccgagcaatcactcgaccagtcactcgagcaacctctcgagcggccactcgacaacgttactcgaccgaccactcgacctgtcatcccagcagcatcaccaactgctccaaggccagttgctgtcaaaaacaaagaaaaggtctttgtccctcctccctacaaaccgcagcttccatttcctggccgtcacaagaaagcgttggcagacaaatatagagctatgtttgccaagaacattaaggaggttgagttgcggatacctcttgttgacgccctagcgctaatcccagactctcacaagtttctgaaagacttgattgtggagagaattcaagaagtgcaagggatggtggtattgagtcatgaatgcagcgctatcatacagaagaagatcattcctaagaagcttagtgatcctggttcgttcactctaccgtgctctttaggtccattggctttcaatagatgcctatgcgatttaggagcatcagtcagtctcatgccgctctctgtcgccaaaagattggggttcactcaatacaagtcctggaatatatccctcatcctagctgacagatcagtagggatccctcatggtttgctcgaaaacctcccaattaggatcggtgttgtggagataccaactgactttgtagtcctggagatggatgaagagcccacggaccctttgattctagggagacctttcttagacactgcaggagctatgattgatgtcaagaaagggaagattgatctaaaccttggcaaagcctttaggatgacctttgatgtcaaagacgcgatgaagaagcctaccatagaagggcaactcttttggatcgaagaaatggatcagttagctgatgaattactagaagagctggcagaagaagatcatcttaacagtgctttaaccaaaagtggtgaagatgggtttctgcatttggaaacattgggataccagaagctgttagactcccataaagcgatggaagaatcagaaccctttaaggaattgagtggaccagcaacggaggtaatggtaatgagcaaagaagggtcaacacgagttcaacctgcactctcgaggacatactcgaccaaccactcgaccttgtctgccaacgaatctggggagccgatcattccaacttcagatgactggtctgaactaaaagcaccgaaggttgatctcaaaccactttctaaaggtctaaggtacgcattccttggtccaaactctacttaccctgtgatcattaatgctgagttaaatagtgatgaagtgaacctgctattatctgagcttagaaagtataggagagcgattggttattcattatccgacattaagggaattttacctagtctatgcaaccataggatccatcttgaaaacgaatcctattctagcattgaaccacagaggaggttaaatcccaatttgaaagaagtagtgaaaaaagaaattttgaaactgcttgatgctggtgtcatctaccctatctctgatagtacatgggtttctccagtgcattgcgtccctaaaaagggtggaatgactgttgtcaaaaatgaaaaggatgaactaattcctactagaactataacaggacatagaatgtgcattgattataggaaactaaatgctgcaactagaaacgaccattttcccgtgccattcattgatcaaatgttagaaaggctagctaaccatgtttattactgttttcttgatggctatagtggtttctttcaaattgtaattcacgctaatgatcaagaaaaaaccacttttacctgcctctatggaacctttgcttataagagaatgccttttggtttatgtaatgctcctgggacnnnnnnnnnnnnnnnnnnnnnnnnnnnnntggattttattgaggagataatggaggtattcatggacgattttttagtctgtggatcctttttctcctcatttttgttagatttgtgcaaggttctagaaaggtgcgaagagactaatcttgttctcaattgggagaagtgtcacttcatggtgaaggaaggcatagtgctagggcataagatatcagagaagggtatagaggttaagaagggaaaaatcaaagtgatgatgcagctgcaacccccaaagacagttaaggatattaggagctttctttggtcatgctgagttctacaggatgttcataaaagatttttcaaagatagacaggtcgttaactagattgttgtgcaaggaaactgagttcaactttgatgaagattgtctcaaagctttccatttgataaaggaagcattggtgtccgcccctatcgttcaagcacccaactgggaccacccatttgaaatcatgtgtgacgcatccgattatgcagttggagctgtcctaggccagaaaatagacaagaagcttcacgttatatattacgccaactggacgttggatgaagctcaaggaagatatgcaacaactgagaaggagcttctatctgttgtattcacatttgagaagttcagaagctatttgattggatccaaggtcattgtctatacagaccatgcagctttaaagcatctgtatgccaagaaggatactaaaccaagactgttgaggtgcatacttctgctacaagagtttgaaatggaaatagtatataagaaagggattgaaaatggtgcagctgaccatctgtcaattgaagaacctattttgatagacgacttaatgccaaaagagcaactcatg

SEQ ID NO: 152118 - DNA, 1113 bp, Arabidopsis thaliana landsberg
atgggttacaaagcagtttaccgatctctcacggaattgtttccacaggtaagctcatatctttatctgttttcactaaacttgacttgtagctgacattttcacaaaactaagggtttcataaacttgagtaagacgctagttttctgttgagtaatggtagattttacgagatgcttgtgtcgatatgtttctgaggttttagtataaattttcctctatgaaatgcgatgattgattatgtaatctcacattccagtgtagtctcacactccagttgctgtttagcctgttttggaaccaacttatattgttattaaatctatacaataaaattttctacagattgatgcaaggcttttaaaagctgttgctattgagcacccaaaggatgttaatgaagctgcagctgtagttgtttcagagattgttcctttcttttaccctaatttggctgatagttctactcaacctgagaacaagacacccggaaatgtgcctaccgaaggtacttattctttgcaatgataatattatatttttctgttctgctactaggacattttttttgtacatttgaagtttgagggtatgttctgatgaaatgccagttgaaaatgcagttgaacgtgatatgtcattcagtgtgttgtctggttcagagatgggtggttcatattcaggatctgcctctatggcttttgaatatcatgaaacaagggccccagttactgaatcggtttctaagaggaatcagttgacacatgttatgccaaatgttgttgttgatattccgagaaaaggtaagatcgggttgagcggatcggatgagtctggagtagtttcctcagaaccccctgtctcctgtcaggcaggagccaaatcgactggcgatgattggcaaggtgatgagtttcacagtacagggaatcaagcagaagctagcacaagcgcagattcagaagatgctgtgcataagctggtttatcctgcagacaatttggcaattacacagaactcacatcctcttcaaattagatttgggagtatcgatgatgtgaaaaagacatcaagtggttcattggctgttgaaaatagtgatgccgagttgag

SEQ ID NO: 152119 - DNA, 152 bp, Arabidopsis thaliana landsberg
attagtttctctctctcttttcctttgtctccagagccgatgataaacgatgttggttttcaccggaactgagggaaattaagctggtaaacatggcgggtgaagatgtttcaagcagtttccgagctttggtggagaacgcagaccggaaa

SEQ ID NO: 152120 - DNA, 302 bp, Arabidopsis thaliana landsberg
  unsure (1)..(302): unsure at all n locations
cttttggaatgagaatcagagagagagagcgtctcattctgagaggggaatctttatcatggncaccacaagtagaaacagaggttcttgaagaacagagctcagattcagtcacattactcttcctagtagtaaacgactgcttacaatgctcgatcgctccttcaatggagttatcactcgcgttgctgcttctcatcagtgtctgcagatccaacgacccgtttgatccaaaactgaacgaagaagacaacgaagacgcagaggaagaagaagaagaagatgttgaacactttgcttga

SEQ ID NO: 152121 - DNA, 706 bp, Arabidopsis thaliana landsberg
  unsure (1)..(706): unsure at all n locations
gatgggtgctgttcatagctggtcagtttctccctaacctttcacttaatcaaaatccattagtatatatgtgcctcttatgatttatcgtctgataatatagcaggtgtgaagcgttctcgacttacccgaggacttacgatttactccacgcttaggacatcatatctgatatcaagaagagaggttgtagcgcagaagatttgctgttggagatggatcgtatacttcgtccaagcggtttcatactcataagggacaaacaatccgtagnnnnnnnnnnnnnnnnnnnnnnnnnnnnnnnnnnnnnnnnnnnnnnnnnnnccaagacagcctcggaatcagaccaagactcggacaatgtgatactcattgtccagaagaaactgtggttgacaagtgaaagcctcagagatttggagtgattacgatgatgatgatgatgaggccaaaaactgcctccaacatgaaaaaacaaaacaacattcacaagagatttctttcttgggagaatctaatcgaaaacatacaacgaagaaaattcgttttatagcggcaatttaacgttcttttctcttaaatctttctttctttacatattcatataatgtttgtatggttcgttagagaggactaaagtttcttatcaatttaaactctttttgttgcaatttatgtattaaatcattgtttaatagattgatga

SEQ ID NO: 152122 - DNA, 1247 bp, Arabidopsis thaliana landsberg; identical to SEQ ID NO: 4811

SEQ ID NO: 152123 - DNA, 586 bp, Arabidopsis thaliana landsberg
agaaaacctaaaggttgagtagagattaggccaaaacaaaattctcgatccccaaatttcgaaaacttgttcttagggcgattcttctctttggtcatttggcgaatttgatttatatccatcggtgatcggatttttttcagtcttctccgtctcgtcgttaccggcgtttgatcggatcatcgttttgtttcaggcgaaatatggtggtgatctccctgaagattttgaattcaaaatttcttcggttgcttcctcttgactttatcgcgatttcgattacgtgtagactttcttcttggctttgtcttcgaatcaattaggattgtgaataatcgtgtctgtgtatataagactggtgattgattattagggcatcggttggcaggagaatagattgtttttttttttggtgtgtgttggatctttagatctttgactgaggaatatgtatatcaaagaactgacggaaacggatgaggagaagagggagagatcggttgaggataacgttgatgatggagataaggcggtattggtgagcagaggaaacaagaatgtgttgactacaaagagggcactcgtt

SEQ ID NO: 152124 - DNA, 271 bp, Arabidopsis thaliana landsberg
tcaaaagggactacaggcaatcatgttgccaaagttcgatccaacagaccaaaaagcttgtctgtctcttcttgaggatgtgactaccaacgtaaagcagattcaagattctgtcttggaagcaatactttcacgtaatgctcataccgagtatcttactggcttcctcaacggtcaagctgataagaaaagcttgaagaagaatgtacccgttgtaacctacgaagatattaagccttatattgatcgtatcgccaatggagagccgtct

SEQ ID NO: 152125 - DNA, 543 bp, Arabidopsis thaliana landsberg
aaaattttctacaaaacccatagaaaagcaatcactttttccaccacaataaaatcgaaaacaaacattttgtatgtatatgtaaaagttaatgcaaacattaatttaaaactatatggaaagctccattaatttatttttaatctcccaactaattcactacaccaattttgtatgagagtaggcgacgaaaccacaagtacctatatcagagaatcagagaccaacgtcacttatttacacacttctgttttcttttttttggttgcttcttctctgatctttctttcattttttttttttgaaagaatcaatttccctctcaaatcagaaatctaaaaatgggaacaacgatcttggttctctccaagatcctaactttcttactaacaacaatgctgattggatccagtgtgatccagtgtagtagtgtaacctacgataagaaagctatcgtcatcaatggccaccgtagaatcctcctctgtggttctattcactacccaagaagcactcctgaggtaagaaaaatcgaatctttat

SEQ ID NO: 152126 - DNA, 908 bp, Arabidopsis thaliana landsberg
acgattatgcaaaacggacatactattattgctccaacctcaaagacacagttatcatcagagtaaaagtaatcttccgtacgagtaagttttattttctagttttgattgtgtatttgtgttgtgttcaaagagattagcatgaattgaatattctaactctgcttttacaaacaaaaaaaaaactctgtttttgcagctttggttccttttttggtccttctcagactgttattgcttcaagagtcttacaagaaagcaagcctcttttagaaaacgagacatcagcagctaaaatgttaaactctattcaaaacgtatgtctcatcagatccttctttttcacatttttgacgttgcaagtgtttttttttcttactcttttaaaactgttttgtgtcttgtgtacagagaaaagttctgttctaatgaatgatgcttcagggactaagaatgcgaatgaggtcaaacgaaaagctgagaaacttaaggatggaagagactactcattccttttctctgatgatgctcagcttcctgtttccatcaaggaaccacctacttctagaccaagttccacagagagccaaatgcagccaagaccaggttcatcaaataatgtacaagctcacacgagggaggattcggcaattaactctcaaaagcggaaatcaatgaacaagaagggccaaccaagttccaaattaggccatcagagaccactgtcctcaacaaagccattgagacatgattctaaacaacaaagggtagaacagagaaatgtttccttggaactcacaaggtcgtaactgcctcctgcgaaacaccagttgattagcaaaccaccattgaagcgagtgaagaaaaagcctgtgaaaatgtcagaagatgatttggccttgctaatg

SEQ ID NO: 152127 - DNA, 8416 bp, Arabidopsis thaliana landsberg
  unsure (1)..(8416): unsure at all n locations
taaattcaaaaatcaagtatgtggagagtcaattcgcatcaacctctgctctgaagcatcctcagcaactaccaaggaaagcagtttagaaacctaaggactatgctactactaatgctaacaccatccagcaagaagatgagtcttgaccaaatcatcagccccacaatactaaggacatcatggttcaagaagggggggggatttaactcaaattgttgcacctgccatccagcaattcatctggactatagagcacacacctttgctgaatactcaccattctgaaaaaaattcaaaattgaaaaactcaagaaggatcagaatcaagagatgattagtactgccatcacccaagaaacttacaagaagaaagttatccaagaaaagcttgatgatcctggttcattccctctgccatgctccctaggaccattgacattcaataggtgcctttgtgatttgggagcatctgttagccttatgcctctctctacagctaaaaggctagggatcatggaatacaagttctgcaacctagctttactcttagctgatgattctgttgcacatcctcatggtctaatagaaaatctgcctgtcaagatcggaaatgttgagatacctacatattttatggtattggacgtagatgaagaaggcaaggatcccctgatcctaggcagaccattcttagcttcagttggaacagtcatagatgtcaggaatggaaaaattaatctgaaccttgaaaaaggcatcaagatgaagtttgacatcaaaaaagcttcaaagaaatcaacaacaggaggtcagagttttggaattcaagatatggatgttgatgaagaaacagaagctgaaaccccaccaaaagtcaactatacttctcaactcaacaagctgaagagaacttttgaccacaagaagagagaaacagaaaggctatctcagactgaagatcctgaagaagatgactggtatgagatgagaaaaaaattaaaatggcaaagcagagtcatagacggattgtcttcaagggtgatgaagctgaaagatcaactttggatgtttgaaaaaagagttaaaaagttttcagatggtattgatccagagaagatggaaactgcactagctatcaagaaggacgaaaatttcgcaacagaatggtttgcaccagaagatcaaaaaggagttcacttagaggaaagaaggccatggaacaagttgttgagtaaggaggaaactcctattccaacttattctccaggagcgcctaaacagcccaccaactcctctacggaagaagaacacttgacacttgattctgttactgaagaacttctggaactaaggatagaatacaaagctcaagaggataccattgggtagctaacttacaaaatggaaggactgaaccatgcaatcttgtaacttcaagaaatggttaaaggctaccccagttttgaatttgaggattggtcaaaggagcctggttcacaagaagaaaactactctgctgatcagaaagaagcttattttgaagaaaaatcaaattagtactcatccttccatatgtcaagagaggatgcagactatgcttcaggaactgaaaatccaaccactgaagatgaggacttctttgttcctctcttcaacattttttctgactaagctctgtaagagtcaagcttagtgacttaaaacaggctgacttgggaagaagtcccatgcttatccatgtatataactttctatttttcttgttatttttgatgtttttgcttaagtgtttcaggtttatttcattgaccatgaggaagtcaacgatggagtaaattcaaatcaagtcaaggaaacatctcaaccgttgatcgagtaaaatgaggaagagtgctttaagttgttggattgaatgaccaaatgagagaagcatcaccactgtttgatcgagtgacttcttgaggtctattctggtccgtttgatcgagtgatcaagaacaaggaactctccaccgttcgatcgagtgttgcgaaattcaagaagatgctcgatcctttactcgtgctcgcattatttggagaccaaagcataactcgcgtgactccacttgttcccccaacacttctgtacccgatggacaaagcaattacccataccctcactatttccaactcgcttttctatcctttcaaaagaaaccaaagaccattctcctccacccattgaattcgacaaaccctcattgaaactctctccttcatcatctcattttcgcaattctctatctctcacaaatctttgaagtcttcattccaaactctccctatcactcttcgagaattcgttctgcacttcaccatacctcaccaaagttactcgatcattcccaattccatcctcaaatctttaaccggttcttaagctgaaattccatcaccaaaaaccgaatcctatccactttaagagttgtttttgattaccttgttgaagctcacgactactctccatggattcaagaagcaagagttcatctcgggctagaagatcctgtattaataaagaagaagttgagtcgtttgacttgagtggcatgaatgaacgccaaattcgccaagctcgccatgctcaaagatcaagcctcattcaagggggaggttcaagccgttcaaacatgcaaagagaagaggtagcttggggaaagagggttgttgaggctggggaagaacgccatgaagaggcnnnnnnnnnnnnnnnnnnnnnnnnnnnnnnnnnnnngatcatcagggatgatacaccaacccttgttaggagaagaaactggccaaggaggaagagagagccaaccccgagcgagtactatcaatacttgaaggagttgaagtttgagggaactagataccctcataaggaaacgatgcaagagcttggtatttgtggtgatgtggaatacttgatggaattagccaatcttgcaacgttcatgagctgccaatgtgggggatttaaagaggagagctgccaactccttgcaaccctcaaagttcacttttgtgttgatgattcggagaaagaagagagaggaggtcttggttacataactttcaaggttaggggtgtcgagtatactcttgatatatgccatcttgataccattttcgggttccctagcggagaaggaatccgccaagactatgatcaagaaaagctgaaatgcctttagaaaacaatagtcggtccgaaacccttcttaccaaccaagagcaagagttcttcaattcgtaatcccgtgattagatacctccaccaatgcatcgccaacaccctctttcaaaagaaggccaccggatttgttagtgaagaagagctatgcatgatagaccaatctttggtcttcattttgagggagacaagagatgggaggaagatggcgggggatagagcggacacttcgttgagtgttgttctcttggatcacttattaagttacaaggagtatgctgcaaccatccatcactcaggaattcgtgggagtctttgtgttggtagtctattaacgctaatactaggagccgtgggtatagaacttggagcccctgacgtgttgcccaagttcattgacctcgactatctcaaggggaaggattttcttgagaaaacaactccggaggatcgctatctcttcaagttcgaaccatctggagcttggaccttctctgttacccctaccatgcgagaaccggacttcggtgaagacaaggcgcaacataaatttcatgccatctgcctctgccttgaacatcgacattggaggagctcgagaagatgaacaagaatatagtcaagctgactatgtgcgacaggagtattttactcaagctgactatgagcagcaaatcgagtttgagcagcatattgatcaaccgaagcaagggaccagcgaacaagagcaagctcattatgaagaaggtgctgactaaggaggagatgagatagctgaagttcacaacaagctcggtgcgcttgaagagcttgggaaccttcatagcaagacaatgaagggtttcaagaagaagatgagaacaatgaagaaatcgctcaagagtatagctgctcaactcaaggacttccagagcaagccaaggccaccatctccaaccgccgaagtaagaaggaccggttcaacgagctcagctgcaaggagagctgaaaggatcgatcaaccccgagcttcatcttttgagcctcgggaagtgatctccgagttgagagagccaaggagtaggcagagacgagcttccacacgctcgaccggacagaacgagcaacaccctcccgcctcaacttcagcccctgccaatacccaagagagtatggatgactatgtctccatctacttcacttgaaaactgaggtaacaccacctctccatagtatataccatagcatctttttatttttctttgtgtgttttgtgctttcgtcttgaattctctttcagatttttattacacaagggactgtgtaatttaagtttgggggagggttcaagacatgtttaacattgtgttctcttttcttatttcaaattttgcatcatctaaggcatagaaaaaccataaaaatttgaaaatttttcaaaaaatgatttcataaaaaaagagtgtcatgtagattgcatatcgttttaggattgtatatagagtgtttgcatttaggattgctcatttgcataggggatgatgatgatttcaaaccgataagcatgttttgattcaatgaagtaagttcaatgcccgggttgttagttctttgttgcataaccgattgtatctctgaagtaagaccttaccctgctttgaatttgtaacttgactatactactttgatcgaaactcgcttatctgatgccattccatatctattagaacctgaactgaaattgcaattatcatgtctatgcattgtttgtgaactcatggctaccatgtacatacttggatcatcttattcatttcatcaccctctgttaatccaagtagttgtctctcatttttagagcagtttctcatacccttagcctagccttatttcaagccaaagatcatttgtgtgtgattgtgaggtcttttttgattgagcttggtataacgtgttaggtatgagccgacaagagaagtctttcatgtagacatagcccacactttttgggttagctagaactaggtggatacttgtatttagaattgggattgtgtatggattgaatgggaaaaagaatgagaatgaaaagtgaaagaaaaaaaaaaagaaaagagagtcagagttttgagttcttaagggggatacaaaaaagtgttaatctagtaaagggttcagaactcaacgagagttaggcattttgatttaaataaaagggtaaaacgccctctatgctaagaatagaagaaaagcctttagtttgtcaaagtatatgataagtgtgcattttacatgttttgagcatccatttgttatcactattgcatcatatcatcactgtttaatattatttctcatcatttgtcatcactttgcatgtttaggatagttttgcatgcatgttgcatatttgtgttgttttcaggtgatttggagctgtttacgagctatctggaagaagtggacctgatcatgacaaaccactcgacctagaggtcgagtaggagcttcaagatctcaagagaccactcgacccccaagtcgagtagaagacaccgccactctaccacaacgctcgacccccaggtcgagtgtcttcatctccatctcttgaccaccactcgatcacatcactcgacccccaggtcgagtgacttcatctccatcttctgaccaccactcgatcacgtcactcgacccccaggtcgagtgacttcatcccattgccagacctctactcgacctcatcactccacctggatgtcgagtatcaccatcaccaccactcgacttcatactcgatgacaagcttcagagctttcttcattccgcactcaagcagacactcgagcacaaggaagaaaagaagactccagctattcactcgacctctcactcgaccacatgggtcgagtacagttcttaacccgtcccaatactgcgtcgttttgagtattagggtttcagaacatttcgctataagtagcttgtactttatattttcgagaaaaaagttttcttccgtagacactgtgtgttcttgatattttgtaatccagatttctcttaatttattcagtatttgctttcattttgtttactaagttgttcatcctgttatcatcttgctattactctgttgctatcatgttttcattcttaccatcgtttatgctttctgcaatgatgtctgattagtgactaggtttctgaggatgggttagagtagtttagaattctcagtatgctaggtggttgagtttgatttatagatcccttctacattagttgttcttaatgcttattgctttctgatccactggaatttgagcccagccatttccgcacccaaaaggtgttagatgaaatgtctgaaccactaattccagagatttgtggctatgtaccaaggtattggttacatggcgcgttttccctttaactttttgattcgtaatgcctgttaaattagctctcgtcaatggtgattgattctgggaatactttaacttgaggatctctgttgcggtggcacttagatttggttatcaaacttgttgtctagggatattttattgagcatgtcaatcacctgtagactgaggaaactaactattctattaccccatcctcgggaatttctcatctaattgatttctctgtttactctgccattgcttactcctcgcttagcttttgcatttcaaagatgttatcattcatatactcgaccacacccaattgtcgtgtaacagactgtgcagtcgagtatctttgttactgtctgtgctatttactcgncttgttgctcgnccccccctagtgcttggcaacaagctgtgttggtcgagtgttttactgtttctgcttgaatttcagtttcctgcatgttcacttaggactgctagaaactccaaaacctgttattgcttggcttgactctgtgaactctgattgcatcttgattgttagcatcacacccatttggattgacaacctaaaatactacaacgacatgatagtgctttaagtttaattgactaaaaacctattatcaatttggcgtctttgccaacacagcttgggggagttgataagtgtgcattttacatgttttaagcatccatttattatcactattgcatcatatcaccactgttttataccatttcttatcatttctcatcactttgcatgtttaggatagttttgcatgcatgttgcatatttgtgttgttttcaggtgatttggagttgttgacgagctaattggaagaagcggacctgatcatgtcaaaccactcgaccccttggccgagtagatgcttcacgacctcaagacaccactcgaccccctagtcgagtaccaccatgagagtcactcgatcacttcactcgaccaccaagtcgagtatcatcacctccaccacctgaccatcactcgatcataccactctaccaagaggttgagtatcaccatcaccatcactcgactacatactcgattgccagcttcagagtcttctccattccgcactcaaccagacactggagcacaaggaagaaaagaagactccagctaatcactcgaccactcactcgattacctgggtaaagtatagttcttaatccgtcccaatactgcgtcgttttgagtattagggtttcagaatattttgttataagtagcatgtactttacattttcgaccagaagtttttatctaagttttattccgtagacactgtgttcttaaccttttgtaatccggatttctctttatctattcagtattcagtattcagtatttgttcttgattttgtttactgttattcatcctgttatcatcttgctattacactgttgttatcatgtttttattttgttcaacgtttatgttttctacaatgatgtctgggtagtgaataggtttctgaggatgggttagaatagtatagaattctcagtatgctaggtggttgagtttgattgatagatcccttctagattagttgttcttaatacctattgctttcagagcaactggaatttgagcccagacatttctgcgtccaaaaggtgttcgatgtaatgtctgaaccactaattccaaagattcgtggacaagtaccaaggtattggttgcagggagcgttttggctttaacttgttgattcgtaatgcctggtaggttagctctcgtcaatggtgat

SEQ ID NO: 152128 - DNA, 368 bp, Arabidopsis thaliana landsberg
aagaaagagatagtaaagtagctgcttaaaccttgatgttggagatgaaaacaggagattccaaaaacgaagtcggactcaacccaggaggaatcgtgatatcagtcgacctcgagatcggaagcttggccggtgacatcagcttatacctagcacctccacctccgtttcctccagctgaatcgtgctttgccgtgagatctcccgtcgccgaacaatctccctgaaactccttccggtcattagcttgagggttcatttcagagattcgcaagggtagaacaaaaatgaaggaaaaaagaagctaagggaaagtagaagaagctctcagctatggcgaaatgagagagattttggtctctgcgtta

SEQ ID NO: 152129 - DNA, 1327 bp, Arabidopsis thaliana landsberg
cttctactttcatgcatttgcactcataagctctctctatataaacccaaccttcattaccattcttcattatccaatccaatccattacttactaagtaaaaagagaaaaaaaaaaaaataagatatggagggactcttgaagttgtcaactttggtgattgtgtgcatgttagtgaccgctccaatggcgtccgaggcagcaatctcgtgcggcgcagtcaccggcagcttaggtcaatgctataactacttgacccgaggcggtttcattcctagagggtgttgctctggcgttcagaggctcaacagcttggctcgtaccacccgtgaccgccaacaagcttgtcgttgtatccagggagcagcgagagccttgggttctcgacttaacgctggtcgtgctgctcgtctccctggtgcttgccgtgttaggatctcgtaccccatcagtgccagaaccaactgtaacacgtacgttatcttctatctcactctatatttattacatttttacttgaggtcctaatatttaatggagtggtagtaaccatatgattgatgtatttggttggttgcagcgtcaggtgatcaaaagaagatagacgttgaagggttttcatataatcgatgagagagtattaaaaataattaagatgtcacactatatacacactagtgtatccttttactgttattattgttgtgtttctagattttgtgttttcatgtctttctttgtatatgacggtccatttaattggtcgtctgtgttatgtactcctctaatgatatattgaatttacgattatgtattatcttcaaactcttgccattaactttggtcacgttctgcttttggatgcatcctattccttcttcttctccacagtccgtacacaattctcttaacacgattattatcggttgacttgtgtagatgtaaatagaataagttataatcaaatattaattaagatagtccaataatggactaatttgtaaaaagaaagaaagtaaaactatgtttcgattccctaatacatgtggaaccaacaaactatagaatatcactgaaataaggtttgatttcattaattcatcctcaaatatcctcaaaattcactctaaaatatcctcaagagtgtactcatcactctttgttaaccaatccttatctacttcttcacactctcacaacttgctcatttacacttctcactctatcattcgtaatattttcgtcggtgagtgtgtaatatgtcgatcgaccctacatgcagttgctaaagacaccttaccttttttctttctcttgtaagcgttac

SEQ ID NO: 152130 - DNA, 645 bp, Arabidopsis thaliana landsberg
gtagagtactatcttcctcttaaaccaaccattcaaaatgttgcgtactatcttcctcttatctcttctctttgctctatccaatgcctctgttcaagatttctgtgtcgcaaacctgaaacgcgctgaaaccctgcgggttacccttgcattcgtcccattcatgtcaaagctacagactttgtcttctctggcttaggcactcctggaaacactacaaacatcatcaacgccgctgtcacaccacgtttcgcagctcagttcccgggtctgaacggtctaggcctctctacagctagacttgacttagctcctaaaggtgtgatcccaatgcacactcaccctggtgcctctgaggttctctttgtccttactggctccattaccgctgggtttgtctcctcggcaaacgctgtctacgtgcagacactcaaaccaggacaggtcatggttttcccacagggcttgcttcatttccagatcaacgcgggaaaatcctctgcttcagccgttgtcactttcaacagcgctaatccgggtctgcagattctcgacttcgcactctttgctaacagtcttcccactgaactcgtcgtgggtactactttccttgacgccactacagtcaagaagctaaaggagtgt

SEQ ID NO: 152131 - DNA, 543 bp, Arabidopsis thaliana landsberg
ggagtcagagaaaagaagttctcacttgataaatcccaacttggtctaaagaacgaaatcgatgtaccgtatcagaatgatacagctatctctgtacttgaaaaaatggcttctacgcttgaggaacttcatgcatcaacaacatcaaactctgcatttggcacaaaattacttgaagaaggagaagagaacattggacacttcctttacttagaagggattgaatatcgaatgtggaacacttatgatgttcatttctatgcatcttttgcactggtgatgctgtttccaaaactggaacttagtatccaaagagactttgctgctgcagtgatgctacacgatcctactaaagtgaaaactcttagtgagggacaatgggttcagaggaaggttcttggtgcagttcctcatgacttaggcatcaatgacccttggtttgaagttaatggatatactcttcataatacggatcgttggaaagatttgaaccccaaatttgtcctccaggtgtaccgggatgctcgttgccacaggcgataa

SEQ ID NO: 152132 - DNA, 1274 bp, Arabidopsis thaliana landsberg
atgcaacatctccggcttctccattattttccagagcagatatcggaattaaaagattggtaccaagtggtccgaacaatgcaacatctccggcctctccatcattttccagagcagatatcggaacaaaaagattggtaccaagcggtccgaacaatgcaacatctccggcctctccatcattttccagaaaagatatcggaacaaaaagattggtaccaagcggtccgaacaatgcaatatctccggcctctccatcattttccagagcatatattaacaccaacatggattagaataggacgatggtccgaatccgttaagtgtaattaaggtagtactcaagatatgaaacacatgttagtgtggggataaaagattgaaagaagcatcattgaaccttatccatgcatctatgtattatcataaatcaaagatatatcttccgacgttctcctgattttgaaatcaatggtattaaatgatatacgtttggaaagaccaacgagataaaatttcatacactacgactacgttacgatatattatcatcatgctattattatgtgtgaatgcaacggagaacaaaaagatactactattttttttatgtgtgtaaatgtgattgttgacaaaagcaaatgtgattactgatgacatctacagcagttgactactaaattaaatactgttaaagtcaaagaaggacaactagtggcaatatcgaaaatatctcaatttcaaagcctataactcacaaactattccataaaaccaaagaactcgaaagcgttacgttttagagtaaaaagataaaaactaacgcataaatatgtcagaggagctgcaactacaaaaattgaatcgtctttcttagttatttagggttctttagagaagcaagaaggagaaggagaagatgggattacagttggagagtttgatggagacgataaagtcaaaggtgagtttgctaaggaagaagaagaaaacttacatcaaaatggacaaaagctccagcgtcagagtcgccatccgtcgtaagaagactagagatctcatcgataagaccttaaaggtcgctgatcgtcctggcaaacgaactcttttctaataatacttcttcttcttcttttttttctctcatattttgccatcattttttgttgttcttcgttcagtgatttggtgtttttgattcaggagatcatgtttgtgataatatgtatagtttctggaaataaataaaagaaaaacattatagaaacatcaaa

SEQ ID NO: 152133 - DNA, 714 bp, Arabidopsis thaliana landsberg
cagtttggttcttgagaaatgatggcggctcgtactcattgtatcaacctcatccccaaagtatgtcttccaaaatccttcagaactggagaatcagtgactaatctcagatttgattgcgtctctaagtcatcgaagctttctctcaagacatcatgtggaaggtcaagaacgcatcaccggaggcaaaatctcagcatccggtccgtgtttactggaatcgtggaagaaatgggtgaagtaaaggacttgggaatggccgatcacggaagattcgacctcaaaatcggagcgaaagtggtgttaaaggacgtgaagctcggtgacagtatcgccgtgaacgggacttgtttaacggtgacggggtttaacgcagaggagttcacagtggggttagcaccggagacgctgagaaaaacatcgttggaggagttaaagaaaggatctccggtgaatctggagcgtgcgttgcagccagtgagcaggatgggtggacacgtggttcagggacacgtggatgggacgggagtgattgaatcaatggaggtagagggtgattctttgtgggtgaaggtgaaagctgacaagggtttgttgaaatacattgtgcctaaaggatttgtggctgttgatgggactagcttgacggttgttgatgtgtttgatgaagagagctgtttcaatttcatgatgattgcttatacgcaacagaat

SEQ ID NO: 152134 - DNA, 2788 bp, Arabidopsis thaliana landsberg
caaaaccagtttctgtccgtttaactccgttccaaccaccgtcgtgttcttatgtccctgatataacgacgtcatattcgcagcagaaaaacgctgatcaccgtagtaacctctcacctctaactgatcatagtgtatccaagacgttgattaggattacgtatcgaaaagttcaacgagatattgtaatgaaggttatggcttattggatcgaactcaaatcgcgttaaatcagcttccgtaacttggatttcacgacgtttggtcggaggataaaccagaggattaaagcaacgactccaaggcaaacgagtacaccgatgaggatgttgcagatgatgtttacgagacaacctccgcaacaaaggagacagctggagaaacaaccacagataccgcaacctacgtcggagccgcgtcggccatgactgtagtaagttttcaccggtggcttgattggtggaccgtaactggcgccgtttaatccgttcgccatggcttcgagaatgtcgtagagagaaggaggagagatgtagattggcacggcaacgaattatgtgaagaggtagagtccgatatatagagtagatatatacaaataatatgtgtgataatgcaataggattttaacagtgtaaacaattttggaaaacaaaaaaagcttaatgcaataggattttaacagtgtaaacaattttggaagatttttatatatagttgtttgttatacaaaatcgaattgtttacaaatgtagaaattattcgattggaactttatgatattggactattgggccgaacatgaatacatgtatagcccaagcatatttttatcgttttaccaaaaaacccattaaatgatatttacgtgattggtggtattgtcggggggatatggctgtgactctgagattaacgaattctttagcattttccagtcatcctctaacgtcgtccgtactgttccgaggaagcaaatcgatcggtactattactaagatagcatcaacaatcaggacggtaaaaatggcggcttttgctgggtctgactcagaaacaacgtcgtctacctcgagagttatcgattctcatctccacatttgggcttctcctcaagaggtcgcactcttacactttgttaattcgattgtggaattttttggatcactaagttaagcagtcaagcaattaaggcaaatgcacttaagattgatcctagttagatgataaggactgattaagtgatctaatgaatctccaaatatacgtgtttttcaggccgagacatatccttattttcctggccaagaacctactttgactggtgatgtcaatttcttgcttaaggtttaaacttagctctgacactattatgggttgttgagaaaaaatggaaaaaagtttcttctttgatacttgttgtgttattcctctgttttgatgttgtttgttcgtcttattttagaacatggaagaggcaagagtagatggagctctcattgtgcaacccatcaatcacaagtttgaccattctttagtaacaaggtctcgtcctttttaatacttcaatctgcatttttctaaaaagatgtttttgtatttcttaacagaagatactatagttctttcacaatttatgctcctctcattttattttagtcatggtaaatctgtttcgctgcctttttgttagtatatgactatgggatgcattactggggcataggttggtcttggttctgcgagaaattcaaagttttcaagtgattctccaatcaagtctgcaatatcagcgatttaattcaagttacttttgaagatgatttttgagtttcttattgacagtgttctgaagagatacccatcaaagtttgtcggttgttgccttgctaatcctgcagaagatggcagtggaattacgcaccttgagaatcttgttttagaggtcttccctttcactgttactcaaagcatctccaaatattatatatgcatctcatttctgagagtacttaaatctttttttgtagagtaattatcgtgctgttcggtttaatccctacttgtggccatcgggtcagaaggtaacagtttaaccattccaatgaccttagatcaagtttccaccgtattctgttgattgtcaatgactcaacacagatgacaaatgctgttggtaaagccttgttctctaaagcaggggagctttgtgtgcctgttggcttcatgtgcatgaaggtctggtagtattttcacctttgtggtctccaaagttgtgtggtttacgcgaagttctttcgttaagaatcttgttttctttattcagggtctagatcttcacattgcagaaattgaggaactttgcgcagaatttccaaagacaactgttttactagatcacgctggattctgcaaagtaccagagtgagctgttctttgctttttgtgaaaaataatcccgtcccctgaaattcctatagaatgtagtactaatattcatggtttcaacaacctgcagaaatggtgaggcaaagcttgcttattctcaactcatgaagctgtctagatttccacaggtgaaaaagaaaaaaaaattacttttagaatctgaattctcatagattatagattatacgagtctgagggaagaatattgtaacaagcaggtatatgtgaaattcagtgctctattcaggatctcaagaaccggcttcccgtatcaggacctatcgcctctcctatctcaacttgtgtcccattttggggcaaatcgtgtcatgtggggcag

SEQ ID NO: 152135 - DNA, 329 bp, Arabidopsis thaliana landsberg; identical to SEQ ID NO: 66693

SEQ ID NO: 152136 - DNA, 288 bp, Arabidopsis thaliana landsberg
  unsure (1)..(288): unsure at all n locations
atttagattatgcagtccctanatccgcaccaatactcgagatgctcagcatccgcgtaagtcttaactatatcgaatgttgtgacagtaccaatatcttttctctttggctgatcttgcccttttccggtgaaacaaccaggacctgacatctcctcgttcaacacctactgcaaagtccttgaaggaactacgttcagtagaatctccggattgcgttacaacaatgctcaaagtcctgcagatcaggaactttaagccaaacaggctacagatatcagtgttgag

SEQ ID NO: 152137 - DNA, 2518 bp, Arabidopsis thaliana landsberg
atgtctctctcagaatttctccgaatgcattacatcaccatcagttataatttatctccctttcaacaaccaaaggtaattcatctagttggttaatcttattacatctgattatttcttatgtgacgtatctatagtttttaataatagtagataaacataggcagccttcaacgaagaaaacaatggtatgcttaagagagtttgaatacgatcggactaatctacaaaactaattaaataattgaagctaattggtagaattgtttatccttttggttcaacctccctatcttgttcaacaggagactcttctgttagttgtctcctctcacacgtaaccctctccatgattctaaggatttcttcttcagacaaactttcccaataacgaagaatctgaactagtaaaccttgagaaggtcttgattattcttaaataatactccagttaaaaaaggatcggatatattattgaaattgaaatttacctaattctggtcaacaaactcattagctacctcaactatactccaacgaacccgttccatattatctatgtcacactcatagcttaattagctcacgaatatcatcaatccattaattacgtacttgcttttatgtccgatatacagtatgatgtgatgtagtagacatatcaatccaataattttcatttatttgaaattatattttgtggtattttatcctttaatcaacatatatagtcaccaaaaaaagctatcattaattaatctctaactaattagcattcaatatcgcctcacaaaattttattactatattttacactctcaaatacaaaaaaaaaaactctatttagaaagtgatagtccaagtaaatttctattcctaaaaaaaaaaaaaaaaaaaatctttgtaagctctcatttttttaaaaagatcatgttttttctgtttgtttaattcctctagttgcttgatttactttttgtttgccttcttttttggtgtgtgtaaaagaagccgaatctattacaatatttggtcagtaaatctttgccatccaattagcacgaacttctaaacattggtcatatgtatgaaatatccacgtagtcacatacatgatacggtgatcataaatcgaattgaatcgtgtagttaattgtcgtattatataacaagtaaggaactattacaaatgtattcttaaaccggtaaaaattcagttcacccgacgaaccaacttccaagtagtagtccaaatcatagattcttttgaggttttaaatgtaccctcacgtcagaatctacttaactctttcccctttttctgtctctctttcaccttttcttctccatcgatcttacctccacggaacttcttatttaaatcaaaaaaattcagaatcttttaatctcacgcaggcaaatgtctcgtaatttaatctatagaaggaacagagctctctgttttgttttaatcttgttctgcttcccttaccggtttggcgctagaaacacgccggaggcggaacaatccacagcaaaagcaactcaaataatacacgtcagcaattccacgtggcatgatttctctcgtcttgtagatgtccaaataggtagccacgtcagcggcgtatcagagctcaaaagatacctccaccgattcggttacgtcaatgatggctccgaaatattttcgcgacgtgttcgtatggtcctctggaatcggcaatctctgtgtatcaagaaaatctcgggttacgcaataaccggaagactcgacacgagtacagttactctcatgtcgttaccgcgatgtggcgttagcgatacgcacatgaccatcaacaacgatgtcctccacacaacggcgcattatacgtatttcaacggtaaaccgaaatggaaccgtgacacgctaacctacgctatctccaaaactcacaaactcgattacttgacgtcagaagacgtcaaaaccgttttccggcgagctttttcacagtggtcaagcgtgattccggtgagtttcgaggaagtcgacgatttcacgacggctgatttaaagatcggattctacgctggtgatcacggtgacgggcttccgtttgacggtgtacttggaactttagcacacgcttttgcgccggagaacgggaggcttcacctcgacgcggcggagacgtggatcgtcgacgatgacttgaaaggatcttcagaggtggccgttgacttggagtctgtggcgactcacgagatcggtcacttgttgggattaggacatagctcgcaggagtcggcggttatgtatccgagtctccgaccgaggaccaagaaagttgaccttacggttgatgacgtggcaggtgtacttaagctatatggtccgaatcctaaactacggttggattcactaacgcagtcggaagattctattaaaaacggcaccgtatcacatagattcttgtcggggaattttatcggttatgttctgttggttgttggtttgattcttttcctatag

SEQ ID NO: 152138 - DNA, 3229 bp, Arabidopsis thaliana landsberg
aaacagcccgcccctcacgaaggctcagacatgagaggacatttattaaagtatccagtggaagttgatcgaaaaggaaaagtccgaccacttcccgggagtgagacgttcccggacgtcggaggtaacattgtcggatcattcatagccatacaagagaatctaaccatttgataataaggaaggatccagtggcacacttttgacattttttttgtgtggatattatatcttgagagttgataataagagggtgggagatttgattaatttgataaacttttcacattattaatcgtgtataaagtggtggcttataaaaatgaataaagttgttaatagtttggctgatatattatcactctaaattttcctaccatgtttgtttgtgttcctcaagtattcgtataatacgatgcaacatgtacatcgtaatgcattccacaataagccacaatctcatcttaatagcaaaaatgatggaaaggtttggccttttaatagcattccaaggagtaatagagagcaaatgccgcaggatcgtctatcttcactctggctatcttagatctccgattgcattgaatttttttgatctccagagcccatctctaatcaggtatagagatgggtttggaggaacaaggaagggcgagagaagacacacctcttcttggtaaaggaagaccattgtcgagcaagttcaagactttcgctaatgtcttcattgctatcgttggtgctggtgtccttggtcttccttacgccttcaaacgaaccggatggctcatgggtttgcttacgctcttttccgtcgctgctttgatcaaccattgcatgatgcttcttgttcatatccgtcgcaagcttggtgtctccaatatcggctcttttggggaccttggtttcgctgcctgcggcaatctcgggaggttcgtcgtcgacattcttattattttgtctcaggctgggttttgtgttggataccttatcttcatcggtaatactttagctaatctctctaagccaaccaagagtacgactttgatgagtctgaggcatttaatgggtgtgtctcctaagagtctctacatatggggatgttttccgtttcagctgggtttgaattctattaagacactcactcacttggctcctctgagcatatttgctgatgtggtcgatttgggtgcaatggcggtggtgattgtggaggacatcaagattacggtggtgcaaaggcctcaagttgtcgcctttggtggcatgtctgtgttcttctatggtatgggagtggctgtttacgcctttgaaggggttggaatggttttgcctcttgaatccgagaataaggataaggacaagtttggcaaagtgttggcactcagcatgctattcattgcagtgatgtatggatcttttggtgtgttaggctacatggcttttggggatgatacaatggatataatcacagctaacttaggggcaggagtggtgagcagtcttgtgcagctggggctctgtatcaaccttttcttcacctttcccttgatgatgaaccctgtgtttgagattgtggagagacgtttctggagtggaatgtactgcgtctggctcagatggctgctcgtcttggcagtgactttggtggctctcttggtgccaaactttgctgattttttgtcattggttggcagcagcgtctgttgtgcgttgggctttgtgttgccttctttgtttcatctgatggtcttcaaagacgaaatggagtggaagcaacgagctttagacgtggggatcctgctgctgggtgtcattcttggtgtctcaggtacttggagttctctgactgagatcttccaagagtaggtaggtgaaagaaattggacacattgtttcttttgttggaattaaggggaatgttataggccgttgcagcaacctttgtatgcaacacctccatgtgtcatctcctaaagtcaagaaaacattaaaaaaaacaaggaaactagcaaaatgagaacaaacttgtaccaattttcagatgttcagaaaatattcaactcactttgatttcttcaggggctcagctgaatctagttttcaatgtttgtagaacaaaatgaaaatgaaatttttagtatctcaaaatccattctattttttttttggtgacattaatcaatgatttcaaaataaccaaaaacctcagaataaaactcaattgcatcttaaaaccacccaactttcagaactgaagaatgacgaagaattaataatagaggaggagaggaggagctacatcaacactatttctattttttcagccaatcagcgcactccggacttcgcccactcgcaccaacctcgcgccacgcgctccattccatgcccactcgcaccaacctcgcgttgagcgcgtgtcgtcgatttctgtaggggtaattggtaaacccacaaaatcatgcctattttatatatactcgctttatttccaaaacagcctcgcgtgactccgaaagcctttttttttttttttttttttttttcaaaactgtattagttatttcaatttaaaccgaaccaaaatcaaatttcatttcaaaaccatgtgaaccaaacataaatcacttgtaatttcaaaacctatgtacgccgaaccgaaatcaattgtcatttcatcaaatccatgtaaaaagcttctaggattgttttaatttgcaactgaaaataagaatcctaattccgtgagagagacaaaaactattactccacctatgtatatgaagaattcggtttagacttgaccatacaccaacaattttttttttatctttatgcacttgcaggaatgctacaacagccaacaaacagctctagcacaatgaatttagagcatctgaatccggtcgcaacccaacagtttatcccaaatgtgatgcctcctggtgcctttcccggttccataccgcttaacgcttctgttccaccaccaacccaaccacctgctggtgagaagccgcctccttatcctctctttcctcctggtttgatccctgggatagtcagaaagatgcagatcggtagtcgtgtgccttactctttagtggtgtgtcttacagctgatcccaacgaaccaactcagtacgataatgtttatacgtcttacaggaaatacagaagtacgaattatcacacatccatgagtgcaagagctacaaccagatga

SEQ ID NO: 152139 - DNA, 348 bp, Arabidopsis thaliana landsberg
gcttctctagaacctctccatcgttctcactatcactcccccccccccccgcccaaatataaaccctaattttcacaatcacagtaccaaaaaaaaatggcagccgccgcaccgccaccgccaccaacagcagcaccggaaccaaacatggtagcaccactaatttcaccaatcggccacccaatgttctcccggatccgtctggcaacaccgtccgatgtcccattcatccacaaactaattcaccaaatggcagtcttcgaacgtctcacgcatctcttttccgccaccgaatcaggtctcgcttcaacactcttcacctgttggactttccaatcattcacagtc

SEQ ID NO: 152140 - DNA, 970 bp, Arabidopsis thaliana landsberg
  unsure (1)..(970): unsure at all n locations
ttgttcttctcattcgggattataagaaagaaaaaagaattagaggtttggttntagattgtgtctctgtctttttattaaaagatgctttagtctgaataaaatttgaagcagaagaagtgttacttcattggcttatttacttctttgttttccattggagtattatcttttggttctgtcaattgtttacttctttgtttccattggctttagctcccaagtcagaaaaccagacaatggataagtttttgtgaattcctaaatatttcagagaatcagaggaccagttatgttttctgacgacatctttgtgtacaagatcgatgcagagatattgggactttcgagaaaagtcatatggttcctttcacgcattacagtttgggttgggctttgagctaggtttgggtaggacagtctcaggatatgacatcaactaatttggattcatataagataggtaaaaatattaatgtagagactataaaaataacaataatcttttattattacataaaaacgtgaaattatacaaacaaattttcctagaaagtatacaaaacaattttctttaacattttaaagcttatttttatggtcatctaaataaattatgacattttactttctttttttttaataccaaaaacctattatcaaacacaaagaaaaatatcgattataattctaaaatatattgaaaaatttttactctaggaagacaaaccggtcacctaaagatagatgtataaccgatcgtataaggcttaggcttggtactaatttcaaaaaatacatatattgatattacacattcgaaattgactatccgttaataacgtggctacaatattatgtgcgtcaacatttatttcaccatatatcaacccgtcaactgtatattgtgtcaccaactcacctttaaatgtgcatggttatgttctaacttgtattgttgtgtcatcat

SEQ ID NO: 152141 - DNA, 1336 bp, Arabidopsis thaliana landsberg; identical to SEQ ID NO: 59343

SEQ ID NO: 152142 - DNA, 848 bp, Arabidopsis thaliana landsberg
actatctctctctcttttgtgagctcagatctgaccagagagaaagaaacaaccggagaagaagaagatgactgaccgagtcttcccagcttccaaaccaccaaccgccactaatggagctccaccagttggttccataccacctcctccagctccggcgactgtaaccagcaacggaacaacaaacggaatggctaatcagaaacctcaagtctacattccagctaaccgtccggtttaccgtccacagccttacagtcgccgtcatcaccaccaatctcgaccaagctgccgacgaatttgctgttgttgctgtttctggtcgattctgataattctgatcttagctctcatgactgcaatcgccgccaccgcgatgtacgtgatctaccaccctcgtccgccgtcgttcttcgtcccgtcaataagaatcatccgcgtgaacctaacaacctcctctgattcctccgtctctcatctctcttccttcttcaacttcactctaatctcagagaatccaaaccaacacctctctttctcttacgatcctttcaccgtcaccgttaattcagctaaatccggtacgatgctcggtaacggaactgttcctgctttcttcagcgataacggtaacaaaacttcgtttcacggcgtgatcgctacgtctacagcggcgcgtgagttagatccggatgaagctaagcatctgagatcagatctgacgcgcgcgcgtgtaggatatgagatcgagatgagaactaaagtgaagatgataatggggaagctgaagagtgaaggagtagagatcaaagtgacatgtgaaggatttgaaggaactataccaaaag

SEQ ID NO: 152143 - DNA, 570 bp, Arabidopsis thaliana landsberg
aaatgtgatgcaacccctcagtcaccttcaatactttaaacacccggtgatctccaacgctgtgttgaagccattcgtcttgtttccaaagtggtgacgtctaaccgtttcttaaactacacgcagtgtgacaagcaaaacgtacacaagatgcttagcttaagcgtcaaggcaaacatcaatctaaggccaaagcaactgaacgataccaaatcaatggctcagttctgcaaagacactgttgtcacaatctggcactaccatggtggatgtcttgtgggtaaagttgtgagccctaaccgcaaagttcttggcgtcgacaggctcagagttattgatggttcaacgtttgacgagtctccaggaaccaacccgcaagctactatgatgatgatgggaaggtaaatcaaaatcattaccaacataatgaattggaggttttctttttagttcaatatataaacagaggatttgtcaatctttgcagatacatgggagtcaagattcttcgggagagacttggaaacaaagctggtgtttagtttgcagattgagcttttatggtagaca

SEQ ID NO: 152144 - DNA, 1185 bp, Arabidopsis thaliana landsberg
cattcaactggaagtagaatagtctcaaagagccatggttgactgatcaactttcgccttcttcatccttttctttattttctaaattagtcatttaattcattcattatatatacttctctctaatttcttaatcatctcttcttatagtttttaccctaaagaaaatggcaaccgtcgatgtcatcaatggtgattcaatctcaactcttcattctgacataatccaaacccaaatcttgacccgactcgatggtccgacgctagcctccaccgcaacaacctcttcttacctccaaactctatgcacggaagagaaactctggcaagaactctccatcgacacgtggccttcgatcaatgatccacgtgttgtccaagctatctcctctttcccttccggttaccgttctttctttgctgactcgtacccgttcactgaacacacgtggcagtctgaaaaacatgatccaccgacgggattaatctcagcccgtgatttatactacagaggagagattatatacttcgaggtacaagagatggaaacagagaaaggtaaatcaggatgttcttgtcatcaccgtttcggtcgatatactcgacccgaaagagtcggtccaaacccggattcgatatccgggtggggactacgaagcgtgggtgaaagatatggaagagagcatgaaacttaattggatactaatcgatccgatcaagaaacgagcggcgaatatatctagtcgaaaggcggtgtcggcgcggcggaactggctaacgggggatttagaaatacggttttcaacggtagtgacggcggaggcggcggaagtggcggcggttgtgtcatgcgggtcagcggaagcgtggaaagaggtggatgaggaagtgggaggagaaatacacgtgagggacgtgaggctacaagttgaggacattgaaggaaaatgtatgaaaggtagggatagtttggtaattttacaagggttgttagatggaaagagatcgtgtaaagatgatgaagagagaagagctaaagaaaggtatgaagaatacgtgcgaatgaagatacaatggagagagaataaagagaggagagaaaaagctcaagacacaatttgtatgatctttgggttctctttgtttgtgcttttgtggagttttattttgttaaggtaaataact

SEQ ID NO: 152145 - DNA, 1608 bp, Arabidopsis thaliana landsberg
cttcatctctcaggattgctttaagtaacttgtatccagatagtagtttcttccaagaggtaaaagaatttgattactggttttaaatgtttatcctaatacagtgtaaaccttcatttcattaattagcctaatcctgggcgtcatatggtggacaggctcagatgaacgatgcttcagaagtactggctgtgatctttgactgccttcatcgctcatttgctcaaagttcaagcgtgtctgatgtggattcctcagacagcaactgtactggttcatgggactgtgccaaccgcacatgtattgcccattctttgtttggaatggatatttttgagcaactgaattgctacagctgtgggctggagtccaggcatttgaagtacacttcctttttccataacatcaacgctagtgccctacgcaccatgaaggtatcgtatgagtgttcatttgattgcgttttcacatatataatctgattattcactgtggttttgtcccactttacgcctaataggttacatgcgctgaaaattcatttgatgaacttcttaaccttgtcgagatgaaccatcaactagcctgtgatcccgaaaccggtgggtgtgggaaactcaaccatatccaccatattctcactactccaccacatgtatttactacaggtaaaacttatttttaggattttgatgaatggaaattttttcagactgctgatattcgcgtcttgtcactaattattttggggctggcagttttagggtggcaaaacacatgtgagactgtagaagacatagcagctactcttgcagccttgaataccgagatagacatcagcatcatgtaccgtggtctggaccctaagagcacatatagcttagtttctgtggtacgcatttcttcctcttcttccctatgatattatcagaagagtcgttaaaacaccagctatgtgctgtgttttccttgtgtgctttcaccctaaaaacctcaaggtaacaaattgttcttttgctatttctgcaactccaggtttgttattatggacagcattatcattgatttgcacatagtcgtgagcacgatcagtggatcatgtacgatgacaaaaccgtcaaggtaagattatcaatgcaatgggttttgcgggcagcagatacactcgtggacattatcacccagtttttgtaatatctttcaggtgatcggtagctggatcgatgttctttcaatgtgtgaaagaggacacttgcagccacaggttcttctctacgagagacgttaaaataaaaaagaagcaaaacaaatgcagaccaagtagagttctgttgctacaatttaggagatctcgtaagtacatactacaaaggaagtaagtacgtttttttgacaagcagaagtaaactcgagaggaaagaatgtgattttacactcatctcagtggttctaacttctaagaggatggggaagacgattttgtctttaaaatttaagcaaaagtgttttcagtggaagaggtcatagaagaagatatcatgtagttttcttggttaaatccttgtcacattaaggattatatgttcatataaatctatttcatcggtc

SEQ ID NO: 152146 - DNA, 6503 bp, Arabidopsis thaliana landsberg
atggagatggccaagaagatatctgagttacacaataagctggactgtagctacaatgatctaaatgtcaaagtggaatcactaaataccaaagtccgttacttggagggacattctgcatctacttccgctcaaaaacagataagccaacttctaggaaaagcaattcagaatccaaacgaatatgctcatgatatcactctacgcagtggaaaagcacttccaaccagggaggaacctaaaatagtcaatgaggacagtgtagatcaaaatggggaggatttcagtctcagtgaagatcaagctgacaaacaactcgagcagtcactcgaccatgttactcgaccaccattcccagaaacatcaccaattgctctgaaaccagttgctgtcaaaaacaaagaaaaggtctttgtccctcctccctacaaaccacaacttacatttcctggccgtcacaaaaaagcgttggcagataaatatagagctatgtttgacaagaatattaaggagtttgagttgcggatacctcttgttgacgctctagcgctaatcccagactctcacaagtttctgaaagacttgatcgttgagagaattcaagaagtgcaagggatggtggtattgagtcatgaatgcagtgctatcatacagaagaagatcattcctaagaagcttagtgatcctggttcattcactctaccatgctctttaggtccattggctttcaatagatgcatatgcgatttaggagcattagtcagtctcatgccgctctctgtcgccaaaagattggggttcactcaatacaaagcctgcaatatatcccttagccttgctaataggtcagtaaggatccctcatggtctactcgaaaacctaccaatcaggattggagccgtagagataccaactgactttgtagtcttggaaatggatgaggagcctaaggaccctttgattctggggagacctttcttagcaactgcaggagctatgattgacgtcaagaaagggaagactgatctaaaccttggcaaagactttagaatgacctttgatgtcaaagacgcgatgaagaagcctaccatagaaaggcaactcttttggatcaaagaaatggatcagttagccgatgagttactagaagagcttgtagaagaagatcatctcaatagtgctttaaccaaaagtggttaagatgggtttctacatttggaaattttgggataccagaagctgttagactcccataaagcgatggaggaattgaatggaccagcaacggaggtaatggtaatgagcgaagaagggtcaacaagagttcaacctgcactctcgaggacatactcgaccagccactcgaccttgtctgccaacgaatctggggagccgatcattccaacttcagatgactggtctgaactcaaggcaccgaaggttgatctcaaaccacttcctagaggtctaaggtacgcagtccttggtccaaactctacttacctgtgatcattaatgctgagttaaataatgatgaagtgaacctgctattatctgagcttagaaagtacaggccagcgattggttattcattatccgacattaaaggaatttcacctagtttatacaaccataggatccatcttgaaaacgaatcctattctagcattgaaccacagaggaggttaaatcccaatttgaaagaagtagtgaaaaaagaaattttgaaactgcttgatgctggtgtcatctaccctatctctgatagtacatgggtttctccagtgcattgcgtccctaaaaagggtggaatgactgttgtcaaaaatgaaaaggatgaactgattcctactagaactataactggtcatagaatgtgcattgattataggaagttgaatgctgcatctaggaaagatcatttttctttaccattcattgaccaaatgcttgaacgtttagctaatcatccatattattgctttcttgatggatacagtggtttctttcaaataccaattcaccttaatgatcaagaaaaaatcactttcacatgtcctgatggaacttttgcctataagagaatgccatttggtttatgcaatgctcctgcaacatttcagaggtgtatgacctctatatttacagacttaatctaggagatggtggaggttttcatggacgatttttcggtctatggcccctctttctcctcatgtttgttgaatcttggcagggtattgaccaggtgcgaagagacgaatcttgttctcaattgggaaaagtgtcatttcatggtgaaggaaggcatagtgttgggtcacaagatatcagagaagggtatagaggttgacaaaggaaaagttgaaatgatgatgcagttgcagccaccaaaaacggtgaaggacatcagaagtttccttggtcatgttgggttctacagaagatttattaaagacttctccaagatagtcagaccgttaaccagactattgtgcaaggaaaccgaatttgaatttgacgaggactgcctcaaatcctttcaaaccatcaaggatgctttggtatctgctcctgttgttcgagcgcctaattgggactatccatttgagatcatgtgtgatgcatcaaactacgcagtatgagctgttttaggccagaaaatagacaagaagcttcatgtcatatattacgtcagccgaacgttggatgaagctcagggaagatatgcaacaactaagaaggagcttctagctgttgtattcgcatttgagaagttcataagctatttggttggatcaaaggtaactgtctatacagaccatgcaactttgaggcatctgtatgccaagaaggatactaaaccaagactgttaagatggatacttttattgcaagagtttgacatggagatagtagataagaaaggcattgaaaatggtgcagcggaccatctgtcaaggatgagaattgaagaaccccttccgatagacgattcaatgccagaagagcagctcatggttgtagagttcttcggaaagagctagtgggaaagagttccaccaactgaatgctgttgaaggagaatctccatggtatgctgatcacgtcaattacttggcgtgcggagtagagcctcccaacctgacaagttatgaaaggaagaagtttttcagagacatacaccattactactgggatgagccttatctttacactctctgtaaagataagatctacaagagatgtgtctcagaagatgaagtggaaggtatcctgctgcattgccatggctcagcatatggtggtcacttcgcgacgttcaatgataagtgtgtattttgtatgttttgagcatctatttgtcatcattttagcatcatatcatcactgttttataccatttcacatcatttgtcatcactttgcatgtttaggatagttttgcatgcatgttgcatatttgcgttgatttcaggtgatttggagctgttgacgagctatctggaagaagcggacctgatcatgacaaaccactcgaccaagaggtcgagtaggagcttcaagatctcaagagaccactcgacccctaggttgagcagaggacatcaccacttcacttcaccactcgaccacgaggtcgagtgccctcatctccatcaccagaccatcactcgatcacatcactcgaccatgaggtcgagtgtcttcacctccatcatcagaccaccactcgacctcatcactcaacctggaagtcgagtatcttctgacaccactcgatcatataactcgacccccaggccgagtgacttcatcccattgccaaacctctactcgagctcatcactctacctggatgtcgagtatcaccatcaccaccacttgactgcatactcgatgaaaagcttcagagccttcttcattccgcacttaaccagacactcgagcacaaggaagaaaagaagactccagctattcacttgacctctcactcgaccacgtgggtcgagtacagttcttaacccgtcccaatacttcgtcgttttgagtattatggtttcgggatatttggctataagtagcatgtacttcacattttcgcagacaagaagtttttatctagttttatttccgcagaacttgtgttctagactttttgtaatccggatttctctttaccccatccttattgagcatgtcaatcacctgtaaactgaggaaacgaaactactcaattaccccatccttagaaattctttatctgattgattttactgtttactctactgctgattactgcatcctgacacatgttgcttagtttctgcaattctttactgttactcgacctgatactcgaccacccagttgtctggcaacacactgtgcagtcgagtatctatgtttcattttctgactgttactcgacctgtcactcgacctcacccagggctctgcaaagagctgcgttggtcgagtgttttactgtatctgcacgattttctgtatcctgcttgtgcacttaggattgctagaacacaccaaaacctgttattgcttggcttgacttagtgacttctgatcacatcttgattgttagcatcacacccatttggattgacaacctaaaatactacaacgacatgattggtgttttaggataattgactgaaaaacctattatcattccactccaaattttatggttttgaaatgaatctcaaagacttgtccatggcgtgtttatgcacctaaggtagatttttctgacagctttcaagtgcgaaaggcaaatcagagacacacatgaaagattgatcaaaggcgtagataccaccatttagcaacaactcaagtcataggcgaacttatgcaatctcgttttcttggtattaaacgttgtccaaatgttgctgtgattaggaagttcttgcttgacaactatcattttagtatatcctactagaaagcttggtgggctagagaggtgataatggagaagtctttgggatctacggcaggcaatggcaggcaactatgcactgattccagcttacgctggactcctttagcaagcaacccatgtagtttgtgctttacagagtatgatgatgagccaaatggtccacgccgtttcaaatactaattcatcgccttcgcatcctccattaaagggtatgcctatatgcgcaaggtcattgttgttgatggaacatctatgaagagtagatacggtggttgtctcatatcagcatgttgccaagatgggaatttttagatcttcccaattgcttttggtatcattaacagtgagaatgatagcacttatgaacggttttttcagcggctcagcattatagctccagacaatccttatttaatgtttatatctgaccgacatgctagcatatacacgggcttgagtaaggtgagaaacaacattgctttgaagcattgtgttatatagtataccgctagatatgtacttattctacatatagaatctggttcacaattgacaagtacagtttgattttttgtctttggcatcaggtctatacgtaagccaaccactctgcttgtactgttcacctttggcggaatgtcagacatctctacaagccaaaaaacctctgctgactaatgtctgaagctgcacaagcgtttcatgtcactgatttcaattggatttttctcaagatacaaatattaaacccaggatgtgctgcctatttagttgatttgggtacgtttgtttttcagcttacatatattgttattaacgtggctgagatgaagtttactccataacctctgtactttgtaattcgtatagggttttcagagtggagaagagtgcattccaaaagccggcgttttaatatcatggatagtaacatatgtgagtcttggaacaacgttatcagagaggcccgcgagtacccgcttatctgcatgatggagtacataagaacgacgttgatggattggtttgcaactagaagggctcaagccgaagactgccctacaacattagctccgagagtgcaggaaagagttgaggaaaactatcaatcagctatgtcaatgtctgttaagcctatctgcaactttgaattccaagtacaagaaaggacaggggaatgttttattgtcaaattggacgagtccacttgctcctgtttggaatttcaggggttagggatcccttgtgctcacgcaatagccgctgctgcaaggcttggcgttccaacagactcgttagcagcaaatggatattttaatgagttagtgaagcttagttatgaggagaaaatctatcctattcactttgttggtggagaggtcgcaccagaaattgctgcaggaactacaggagagctgcagccaccattggttcgctggccaccagggagaccaaggaagatcagaatcttgtctcgtggtgaattcaaggcaagtacctattagtaaacattacaatgtacttcttatctgtt

SEQ ID NO: 152147 - DNA, 889 bp, Arabidopsis thaliana landsberg
agagaaatctataaacaagatggtaagaaaatgtctttttctttgatttctgtggtcatatatgtgaagctatctgatgggaaaatacagggctttggaggagtaagaaatgccacaacaccatcgattatcagtgaagtaccatatgcagaagaagttgcatgtggtggctaccacacatgtgtagttacaagtaatactctcttattatatcgttctttctttgatattgagtttgcttgtatactgcaaatgcctgtcctgctcaaatttctttttgttattctttatagaggcccaaaactgctctttagtttctgctaaatttatgaacatattgtgtttgtaagatggtcgataacaactcatcgtttgatgtttccttcgtttttggaaggaggtggggagctttacacctggggctcaaacgaaaatgggtgccttggaacagagtaagttacataccccgaaaaaatagaatgtttccccataagatgaaaacaaggttcttgaactgtacctatactcttatttcaaaaaattcagttcaacgtatgtctcacactcccctgtgagagttgaaggtcctttcttggagtctactgtatctcaggtatcttgtgggtggaagcacactgcagctatttcaggtagcatctcttttgagtaaaacatatttgtttcctctctcattgtataagttaattcaactcaatttctgaaacttgtttgcagataacaatgtcttcacctggggctggggaggatctcacggcacattctctgttgatggacattcctctggtggacaattggtttgtttcatcatcttatcttattgatcaaatctctgaaacaacattttcaagtgtcgaagagaataaatatg

SEQ ID NO: 152148 - DNA, 820 bp, Arabidopsis thaliana landsberg
agaatactattattttactcaccggaggctccgagtcttctccgtccgtcgtaacatcttcgctctctcgttcggcgtttgtatcaccagagacgcgacgcgataatgcttcggaagtatgtttcctgaaccctaagtttattatctcaatccatcttgttgaattttggcttctcttgttccatcaatctcgttgcgtagctttcgggtctgattttattgattcctctaaattgagagctatttgtgactttgattctcttgtgaatcataccgaatgtggtttatgttgttgctcttttgcttaggtcggttctcgagctgtcttctcgtttgtcaataaagagattcccgaggaatttgggagctcaggtgagttatgaatttagttgtgattcttagttagcgtcttgtgagtactctcttggattgattgtgttatgttatgcatcagaggtttcatttgagctcttcgagaaatgcatctacatctggtaaaaatggtctccctggagctaaacccgttgggaaaccagatgcctcaaaagttgatcctccaaaagtgactcctcctcctcctcctactaaaggaaattcttcgaaagtggttataggaggtgttgcaatcgctggggcttttctggtagcgtatcagactggctatttggatcaatatctggggaaagaacagcagaaattaagtgagcgaattcattctgatgctctaactgaaaagctggaggaggctcatcatttgaatgtaccttccggtgttgaagattctactgaaaaagatggaaaagttgaaacgcaacctcaa

SEQ ID NO: 152149 - DNA, 309 bp, Arabidopsis thaliana landsberg
aagagtattccggcattcgaagggaagtagactactcaagaatttgacatttttttctgtcgtaatttttaattcactaaagaatttaaatagaaatcaaagaagaattaattgaatcaatgaaatgttggttggtttgcactgagaacttgagtaaggcgtagattctttttgggtttttcactttattttataaaatgaaatttgaaagcgagacccctttctttatttggtataactacttgagccggatgagaggaaactttcatgtccggttttgaggggggagatggtatagtggaccctatc

SEQ ID NO: 152150 - DNA, 152 bp, Arabidopsis thaliana landsberg
cattaaccagttagcagatcgacacgaaatgtggaggctgcgaattggagctgaggcaagacaagaccctcacttgttcaccacgaacaactttgccggaagacagatctgggagtttgatgccacgggggctctcctgaggaactcgccga

SEQ ID NO: 152151 - DNA, 144 bp, Arabidopsis thaliana landsberg
aaaaaaagtcactgaagatttattagactctcttcttcttcttcctccttggcgcaatttcgcaatttcgcaatcgcatcagtcaattatcgaatcgtcctcccagagataccggagaaaatgaggattgatagaacaagtgtc

SEQ ID NO: 152152 - DNA, 210 bp, Arabidopsis thaliana landsberg
ctcacacatctcaatctctccaactacaataatcatcaaattcttatttagcatttacacaatatggcttcaaagaatatgacaacaatcatggctctcttcctcaccttcaaactcgtcttcttgggtttcacctcagcccaacctgtgtgttctcttaaccgatctgacttggggatttgcgtcaacgtacttggtctcatctccctc

SEQ ID NO: 152153 - DNA, 79 bp, Arabidopsis thaliana landsberg
gagaaaccagcatagttgtaatcttgaggatcagctatttttctgaaggatatttggcctaatttcgaaactcaaggta

SEQ ID NO: 152154 - DNA, 372 bp, Arabidopsis thaliana landsberg
tggttcacctgtgttatatatagaatataatgctctcctttttcccacagatcagattcaatccttttgaaacatttcaatggaccaaggagtccaagaaccagattagggttttaggtattcaagatttttttaaagaaaacatagaaccggacaaccatcaacatcatagttaaggcgagtagaacatcataagccttctttgaaggacggtaccagatcatctctggcagaatgttaccgacttggtttgttttgtttctcatttcttcagagcttttacatgaaatcgtcttcaagttcttgaagcgatttgttgcttgaagcaatgtctttgttggatgtcattttatcagttaccattagtccctt

SEQ ID NO: 152155 - DNA, 138 bp, Arabidopsis thaliana landsberg
agatacataaatctggctggttcgctggaaggcttgtctccaaaagttccattatacaaaatcactgagggaaatgaaccgtgcttcttcaccacttatttttcatgggattctactaaagctactgtaaggttttct

SEQ ID NO: 152156 - DNA, 140 bp, Arabidopsis thaliana landsberg
aatagcacacttttaagttttttgaaaaaaatagcattaaaaagttttttagacataaatagcactcaaataattatttgagaaattcttaaaagtaacacaaaaacaagttttatggacaataataataccataatttt

SEQ ID NO: 152157 - DNA, 92 bp, Arabidopsis thaliana landsberg
gcgccgataaatgcttcgtggtgatgcttcttttaccaagttcttatgtccttgtgtacttttaagagattatatgatgcttcgagttcttc

SEQ ID NO: 152158 - DNA, 261 bp, Arabidopsis thaliana landsberg
gcaaaacccatcaatgtggagaaatattaggcaaagacgacatgggataatgcattgaccaatcaacctacgtggttctcttacaatgcttatatcgtcgttgctgacaaatatcggtcagtttttaaataaaactttgcttcacaatttggattgaattattttaagctacaagaaacacatttataatagcgatccactttgttgttaattcgttgtaaatagggtttacatcaatatagcaacaaaaattaatttgtc

SEQ ID NO: 152159 - DNA, 1160 bp, Arabidopsis thaliana landsberg
aaacctgcaaaactctttgcgtttcctcattttgttttcttttctcgcacaactaaaaaaaaagaacattggaagcttcttcttcctattcttcttctgccaaacaggaatcggtccttctttgcgcacaagcaaaaatccaagagacatcgagatatgagagagatctcgatctcgacgattactctttcatggtcgcatcttctactctgcgcttcgatttgtctccacttcttcttaggttcgtcttcttcagatctgtgatttcaatttcacaaacctgattctcttaggtagaatcattaggttttgtaagatttggtagtgattccgctagatttagcttgacttggctctttctcgatttcccaagaaaacattgtttgattctctgttcctacgatttcaaaagcatcacaatttgatttgtcaatctagacaagtaatttcaagttaaacatgtcgtcttagtgcaaattcagttgtgttttctgggctttggtcaaaagtttgtctttttgagtcactttttgatctcttgattatctgtagattaaatggtaaatgataacaatttggtatactgatttcttactagcattatgatatacttgtatgaatcaccagcaatgttgtatcttgattctgtgtatcagtgtatgtatgactaatgaaactgttctttcgattccttgcttttggagttgtacatttgctttctcttctatgttttattgagcatatgcttgtagcaattgatcatattcccttgcgataggcaacagattctatactctttcgaggatagatcgtgtagcttcttcaggactattgatattcgctgcaacaaaatttacgattaagctgattttgtttcatgctaacatagcgtcatcttctaggcttcttgaaatccttagcagctttgtgttgattctattgcttatgatactttcaggtatatctggtgatcccaatagttcaagtactggagcaaaggctgaatctcatacttcttccagcaaaacaggcacgaaagtgatctttatactgctcgggtttggtgctgtagcgggactttcgttcttcttgtacaaactgtggcaaaagaagaaaagagatgagcagtatgctcggctattgaaactgtttgaggaaga

SEQ ID NO: 152160 - DNA, 385 bp, Arabidopsis thaliana landsberg
agcacttaaactgaattgtaacaaattgaaaccactacagcaacgtagttcttgtaatttccttcaacaatgacaatgatagaactcggtatgataagaagactctatctagccgatccacggaagttgtgaagatctcaataacctcaacaagatcccaaaaaaaaagagcttacttcgcacaaatacgatgattccgaacatcacagatgacataacaaaggggacactacaaaaaatggcattaaagctcatgtaagattcaaaagcacatatgagagaaaagtaagggcatgtcatgtccactctcttcttcacttattactgtcccatttggccaaagtatctgccggcgatggtgatgagcatatttgccatggtgata

SEQ ID NO: 152161 - DNA, 532 bp, Arabidopsis thaliana landsberg
agatagaagaacccaccatgaggaggcatggcaccaggaggagcaacaccatgaattccgggataaccattagccataggctggaaaggtctcataccaggctgcggttgatactgaggcatagatcctggaggaggaactccagagctagggttttgaaaattcgcaacgggagtgaactgcataccgggacggaatggtggtggcggcgggagattggtggggagaagcgagctaggaatctgagccggaggagcataaggcggaccaggtggaaccagaggagcgactggtggttgcgaatgttgttgaggcggcggtggtgttagtgaaggattgggatttggattgggaattgaaatcggagtagtggattctggtttctgtgaattgggatcccccgtggccggagaagaagattcgtcggccatgggagttttggttacaagctttggcaatgaagtaatgaatgacttcaccgaatctaaagattttgtgccctagaaatcagaaactccaattttaattactc

SEQ ID NO: 152162 - DNA, 457 bp, Arabidopsis thaliana landsberg
tggagtcgaagaagagacaaaagagagcggttaaatcggagtctactgtttctccggttgtttcagcgacgacgactacgacgggagagaagaagttccgaggagtgagacagcgtccatggggaaaatgggcggcggagataagagatccgttgaaacgtgtacggctctggttaggtacttacaacacggcggaagaagctgctatggtttacgataacgccgctattcagcttcgtggtcccgacgctctgactaatttctcagtcactccgacaacagcgacggagaagaaagccccaccaccgtctccggtgaagaagaagaagaagaaaaacaacaaaagcaaaaaatccgttactgcttcttcctccatcagcagaagcagcagcaacgattgtctctgctctccggtgtctgttctccgatctcctttcgccgtcgacgaattctccgg

SEQ ID NO: 152163 - DNA, 116 bp, Arabidopsis thaliana landsberg
  unsure (1)..(116): unsure at all n locations
aaaaaaaaaaagtacatcaacccaaaataatggagttgatgaatttggcttcaaaagaaacaagctattggatgattgcactgcctgccggttttggatccaaaantacatgatgt

SEQ ID NO: 152164 - DNA, 608 bp, Arabidopsis thaliana landsberg
aattaacagatatcactttcctacgggcgtagcctacgaaaatgttcgcccacgtcatccttctaagattcgagaccgtccgatctggtttcactctttgtttcctttcttcggtgatgatcctagggtttctcctcagaagaataaaatctcgcttctattgattttgattctcgctattgctagcttgatctcagtttatgggattattaatcacttggtaagtctcttccttcgatctaggaattgagatcttcaaggctctatgttctaactgttgaatcgatttgggaaagtatttagttttgttttgagtaaagggttttgtttatttaggtggatatggattgacattgttctcagactaagattgcttctatgtctatcttctgcagaatgctccttatttatgtaaaaaagatgggattgtgctaaactgtcctcatgtaagtgtttgaaaactttggttatgtgtttttttgaatgcataagctttgaatcctgtaaatttaattgcgtgttggtttgcatttgtaaggcaaaagagtcaccttctccttgggagaatcctttatctgcaacaacttcttggaagccttgtgctgagc

SEQ ID NO: 152165 - DNA, 515 bp, Arabidopsis thaliana landsberg
ctttcttcggtcatatctttaatggggtctgaagagagaatgatgataagttcttcttcagttctagacgaagagtatgaatatacagatgatgggtttcattacgagacaaggcaaaacagtttgtctagattatctatctgcacaaactccttccacgaagacgaccaagatcatccttcagaattgggtaatttcttctctacgttgtcgttagagagcttcaacgacgacgtcggagccgaagctgacgtagaaatctccgatgacggtggcgaatcggattccgacaaagactcttccggattttactctctaccgacgatcacatctcgccggagaagaaaactcacagtttccggcggtttagaaacgagcaaagagagtgagacgaaagtcgatgggagtaagtgtaatatagttagtcaacggagggtattaagggaaaagagtaaaagagggaatcagtacggtcactggtttaacggcgtggagagagacagtgacggcggagg

SEQ ID NO: 152166 - DNA, 106 bp, Arabidopsis thaliana landsberg
ggaagttccaaagacagaagacgagaacattattagaagtattttgttttctatagagacaatctaacatgtttattgtataaaattcgatcatctcttccagtgt

SEQ ID NO: 152167 - DNA, 200 bp, Arabidopsis thaliana landsberg
ttaaaactgagtctatcagatgctcatgttctttcatataagccaaatgtttactggaaagacgagggattcgaggaagggctttacacagttgatggtgatgagagcagaggtggggttggtgttgttatcgtaaacggggaagaacctaaaggagggtcttcagtaatctcaggatgtgaatggagtgtcaaggatac

SEQ ID NO: 152168 - DNA, 211 bp, Arabidopsis thaliana landsberg
tttgaactatctccatatcaaattaccaattattcattacagttacagaagggaaataaaatccattattacatgaatttaaaaaaatcatgattctgtctttattttgattaaaacgagtctaattccagactacattataacaaatggacgaaaggagagtgaaagatttgacgaacatgattaatcttcgtcactgtcatcaatcacg

SEQ ID NO: 152169 - DNA, 321 bp, Arabidopsis thaliana landsberg
ccccaattatgacaacaaacctcacgcgtagtgtcttcttcatcttgttctccttcatctaccatgattgctcttctctttcttcttacccttttcctcatcctcctaaacccaatctcagccattgatttcatcttcaacggcttcaatgactcttcatctaatgtctccctcttcgggatcgcaacaatggagtcaaaaatcctaactttaacaaaccaaacatcgtttgctactggtcgtgctctatacagcaaaattatccgtacaaaagatccagtcccatcctctgttttacctttctctacttctttcatcttc

SEQ ID NO: 152170 - DNA, 426 bp, Arabidopsis thaliana landsberg
aaaagcaaaaacattgtattatatcaaattaaattttgctcaaaaagctctctatcactctgacaaaaaaatgagagagtaaacatctaatcgcacactttacttataagccaaaataacatagagagagagagaatttgttctttacgagaaaagattagtcccttctttacgcaaaaccccacgaaccggtaaaccaccggtctgattttggttactgttggaattactatccttagattcttgttcagactcgcgagtacaattgttaagatccagcaaggcagccattgatccatctccaagccgtactctgtgaaacttagaagttttcttacgttgctgtttgcttcctgttgaagaagaatccgttcctactacttgtgatttgcctttgtctgatctataggtattcttatcctttga

SEQ ID NO: 152171 - DNA, 474 bp, Arabidopsis thaliana landsberg
tacgtgatgtgctagcttatcagaataccgaaacaacaaacctcacaaacaagcttgacagggtatatagctattgtttcctttactcatgaacttcagtatacactgacacttaggaagataagaagacataatacatttttcttttgcaggaaattcatgcgttgagagctcaattagaagcttcaaaatacgaagtcatcaaatattgcataggtacacttgtgtcgatttcagcagtgggactcgccgtccttcgtatcatgatttaaagtacgatcccaacactcaacactgctctctgcttacaggcttaaaagccaaattgataacttgtcatttttatttgaatcccatcaatatgccatattatttttttctggcgatcagagaatattattgtttctgtgatctattttgccatcatcctttctaggtgtcagggtttgaaaatttgcaccgagaattatgtta

SEQ ID NO: 152172 - DNA, 624 bp, Arabidopsis thaliana landsberg
ccctaactaaaatctcaagataaacctatagttgtcttgtcaaacaatcaaaccctttttagatatagaaaatgggaatcaaattcagccaaggtccttcgaatacaaccattcacaacagaagtcatcaagatggtgaggatcaaaggaacgagacggcgacgaagatcaatcatgacaagcctcaaaatcaatcaagtagctttcagattccacttcattatccaaagtatacaaagagtgattatgagaaaatgccagagtggcaattggatcggcttctgagagagtacggcttgccggttatcggagattcttacgagaagaggaaatttgccatcggagcatttctctggtcgtcggagaacgagcactagatcatatgttatcgtaatagacgtcatcgtttcatatggtactgtttgaataaagataagttggtgaaagcgtgaagaagaaacatgtttgcatgtatatattatcctggacatgtatgttttatataatatatatgtattaatgtatttgtatatatcgtgtgtttctctactctccatgtatgttacctcatgggcacgacatttgtaataactatactaagcttaataattttctagcgttttc

SEQ ID NO: 152173 - DNA, 704 bp, Arabidopsis thaliana landsberg
cacagaaacattttgatgttaagtttttgaaaaaatcgcgagtttctggatctgtatactttcttagaggagattttgatagcatcgtttacaggagtaagatccgggaatggcaatggaggttggggagatgtctcagccggaggcgacggcgagtcttctctctctcgcttccgccactcagcaaccgtacgtctccgagctcctctctttcactcttgatcgtctccacaaggttcatctctctctctctctctaactctcttttgaaatctctgcgctcatggatttttgtgaatcttatattggttactgaatttgaaggaaccggagctgcttcgagtggatgcggagcggattcagaggcaaatgcaagaggtggctgttggaaattaccgcgcgtttatcaccgctgctgatgctttgcttgcgatccgtcaggaagtttcttccattgataagcatctcgagtctctggtaaattatatttttactttcaatttgtaaattgagttctactgcttcacttgattagttctgaaccctggccgataaaattacgattagtcacagtgcaagtatcattgctaagatcctaaaactagttgaggtttataaaagtttaagtttgtgaattttgagttctttgatctttgttatgaacgaaaaagataccgaaccttttgtttgttgtactttttata

SEQ ID NO: 152174 - DNA, 174 bp, Arabidopsis thaliana landsberg
tcaagaaaaaattcgcattaatttatttatttaagagatgattacctaaaatggtgtgtataaattgcaaaattagctctgttgttctgctaggagagttaatggagaaagagggtgttaccattaccagtacaactatagttgcagagttcaggggttccttggagtagcatt

SEQ ID NO: 152175 - DNA, 126 bp, Arabidopsis thaliana landsberg
tgtatatatagatgttataaatagtgttacaaattttcttatgttacaaaattacaaaagatacataaaagtttagtaaatactatttggtacaagctctgttttctacgagagtaagaatatttc

SEQ ID NO: 152176 - DNA, 207 bp, Arabidopsis thaliana landsberg
acatctgaaaacacccacccctatatagctttatagccctatttccctcttggcaccaacatacattgaaatgtctgaggagacaccggttccaaaaaaaaatcaaatacttggacccggtcgatcaccacccgacactccgcacggaatcctgaggcccggtcgatcacgttcggggcctggtagccgtatcctgggcgccggtcg

SEQ ID NO: 152177 - DNA, 305 bp, Arabidopsis thaliana landsberg
aaaatccgttctaaagctttcttcttcttctctctttcccttcgtatcttcttcttcttcttcaacctctcgatctcactgatttttctcttcaacaactcgatcttcccttcctatttttcaattggggtcttgcaaacgaatatctgctttgaaattgaacgaaattatttagttttggtggtttttcttcgacttcacccatctgttgaactcaaggagaatatatgagataacatcactcttcatttctgtgagtttctataatggatcagctcgtgaacttcatcattagacatccaagg

SEQ ID NO: 152178 - DNA, 117 bp, Arabidopsis thaliana landsberg
gaaagaagccgagacatgtcaagtacgaagacgataacagttcacgcgtcactacaatcaaatccgaagccgaagctccttcaaaaagtcaagttccgttcagtaatcaactaaaga

SEQ ID NO: 152179 - DNA, 91 bp, Arabidopsis thaliana landsberg
tttttttttttttttttttttttttttttttttttttgtttttttttttttttttgttttttttttttttttttttttttttgtttttttt

SEQ ID NO: 152180 - DNA, 120 bp, Arabidopsis thaliana landsberg
atataaacacatatgacatatattaatattaatacaatcaaacatagattaatgtataatttgaacacccaaactcagcgttctcactcggtttcaaagcctcgaatacacaataataaa

SEQ ID NO: 152181 - DNA, 245 bp, Arabidopsis thaliana landsberg
cttcaacgattttgaaagctccttttaaaacaaaaggcaaagaaaaagtgttgttaatacggcttgattgaacttcactgtaaaccgaagcacgtcctttcgcagaagcattctctgaagatccaacggcggtaagatctcgtgtaacggcgagagcaggggccattgctctgtgggtgttgtttcgcttttcacctaactagtttactttcgtttcaaacctaacttttttcttccctcctttc

SEQ ID NO: 152182 - DNA, 373 bp, Arabidopsis thaliana landsberg
tgaattctcttttgtctagcgatgaaagctcaatcttttgtcataaattgctcgttgctcattccatcttctggtttcttaactctcaccactactttcttgtcggagtcacaaaccctcatatgcttctccgacacatacctcttcatgtttttctcaccattggtactctccagcggcttaaccgcctcaaacgctttgtgcgattggcttctcccgaaactaaccctcttccctccactcggcttctttagttgttctgttttcgtagcgtaaactacgggtttcttcttctcactcttgtgaagaaattcttggtaaagatcgttgcttgcagcttctgttgctgtctttgaaggctcgtgactcgagc

SEQ ID NO: 152183 - DNA, 279 bp, Arabidopsis thaliana landsberg
  unsure (1)..(279): unsure at all n locations
gtgaaaggcataattctgcttctaagtggtctccatggaaagaaaaaaaaaatattcactttgtataaccanaaagaaaaagaagatatggacagaagtgaagacatattttgattggttcaattatcgctctctagtctcattgttctattcccaactacacatatcaatacgatttgtttcatttcctgtcctctaaaaagaaagcaaggacgaatcattggccgatgatagtactgatcaagatatgagtaatccaccggtttaagtagacgtaaa

SEQ ID NO: 152184 - DNA, 436 bp, Arabidopsis thaliana landsberg
gaggctttgtcggaagtcgcctcgcaaattcctcggaccgctttcatttggggagacagattagcatcaccatttttgtttatgtaggcaacgactcctatggcaactccaactattaagaggatggaggccaccgagaccacaacttttccaatcattttttatgattttttgtttttgtttttgtatatttttgtttttattttttgctctccctccggttttatttaaggtttatcggagagggaggggctttattagataaaagccaagttgttgaatgacttgggccagtatctattgtgatggatgctggaggtttatatagaagctttttggtttctaaaattaggaccgtgcatggattttgcatggagagggagagatttgcggtcgacgaatggctgagagtattcggtcaagaaagctataatta

SEQ ID NO: 152185 - DNA, 176 bp, Arabidopsis thaliana landsberg
attcttacgattagattagacactaaactaagcaaaaacacagagataagttaaaacagaaacaatgtccattttcatcatcttcctccttcttctatctacttctgtatccgtctccggccaaaaaaagcgaagtgtctaccaggttctcgaaaactacaccttaccacgaggct

SEQ ID NO: 152186 - DNA, 404 bp, Arabidopsis thaliana landsberg
gatttagtggtgaaagcgatattcactctggcttcaagatctcatcgaggtctttctatgtggacaaggaatatttcggatacgttacactcttacagacacagatagagagaaagagaaaaagagagataatgagcttggttttcgccattaatggacaaaggttcgagcttgagctctcctctgttgacccttcaagaactttgttggagttcttcgttatcagacttctttcaagagcgttaagctcagctgcggtgaaggtgattgcttttttttttttttttttaaatcctttcttctaactgtttatggttgtttgtctgatattgttgttgttgttttggttcaggaggatgtggtgcttgtgttgttcttctctccaagtacgatcctttttttct

SEQ ID NO: 152187 - DNA, 322 bp, Arabidopsis thaliana landsberg
attatgaactagaatgtactattacattacctactactactagaataaagtatcttacaataacgttgcttatgccttatgttatggaaacaatgataggctaataggatctggaacattacaaagatacaaagaatttttccatagcttaaccaaattgtttttgattcactgatttgggttgagagaaggaaatgctggaatagaccgtagtatcagcttccggccattacctcttctccttaggattgagcctgactccgaggagccgggttgagggggagagactctcttgctgttgggagagatggccttgatgtta

SEQ ID NO: 152188 - DNA, 422 bp, Arabidopsis thaliana landsberg
tttcgaaataacggtccaggaatatttgatttcaattgtaaagaaactaaattgcttctgaaagaattacattatctggaggatatggagaagagccgaacggttgagcggtcatacgaatgcatatatggtaaaagctcaaagcgaggcgtaagttctgcggtcacgtctgtgatggaaaggtccatttggtctgcaagtgtcaagaacacattaaaagtgtctacattgcggatcacagatgcgatataagccaccgcgggactgtgttcttcttgtgtcgtgtctctgtcttcagtctcgagagagccatttcctcttttgggtgggttctttaaaagggctactagcacccgaagtagatgagggagacatgacggatcatagattacatctgcgcctagactgttaaaacgcaaggg

SEQ ID NO: 152189 - DNA, 334 bp, Arabidopsis thaliana landsberg
gacggacgtgtctctatcaaactaaaatagaagatcgaaagtaagggtcgggttttaaaggtaagaccactatccggacactatccactactgcgaagtgcgaaccatggttttagatagaccaatagttatttcaatcttttttgttttgaacatagatttctttaattatgtatgttgaacttactaattaatatgaactttctcatatttatatgttactattccctcttttcaaaataatagtagatttttgaatgatttaagtaaatgacaagttttcggagagaaattacagactaggcatgtgattatggggtattccgctttttcg

SEQ ID NO: 152190 - DNA, 89 bp, Arabidopsis thaliana landsberg
cagtaggaaaattctcatcggagaacagatgttcagattcgtttctatatgcaaagtgatgatattctagctattcaaacggaaaagat

SEQ ID NO: 152191 - DNA, 446 bp, Arabidopsis thaliana landsberg
  unsure (1)..(446): unsure at all n locations
ggtaaaaaaattgtatttatggccaaaaagataaatgtaagcttaatgcagatagagcggggcacatacaaatgatgatcttctttttaaccaaacccgcaaaaaagggtaacaaaacatgtttatacatgatcatcagaactcaggatgggnngggtatgtatgaaaaatttctatccaagctgattcctgagaatacctgtgatgattccctttttcttctcaaaattggggattcaattgatggctatgatgagaaaaccgactgacacatacatgaggaagacggggtatagagcgagtgcttttcttcttgggttaaccgctgagctcataaaagggtaagcagcccatgagctccaggcaagggttacagacacaaccaccatcttcagtatcacattgtctttcaacatgcagatcacggctccaacgtctagcggaaa

SEQ ID NO: 152192 - DNA, 241 bp, Arabidopsis thaliana landsberg
ctcagatcgttccattcgctataaaaaagtggttcaattagtatcatttcagtaattgattttgtgacctggtttcccaacttgtccctgacctctcgctctcttccatttctccacattgatcatcctagccaagattttcctaatcaaagtcaacttccgcgattgctgtgaaatgacgttaacggtcgacgagctttggctaagtatgatcccatacccatcttgaaaattatcaatt

SEQ ID NO: 152193 - DNA, 215 bp, Arabidopsis thaliana landsberg
gatgcagcgagagatgctatattgcagcgagctccaattgaaacctttgcactcaagactgttcaacactttatacaacctcaggtaactctttcgaatcaactaacaatttcttcactcctttagtcttacttattggctttattggaaaaattgacagaaacaaacaaagttggctcaagatgaaaaccaaatgcttgaaaacatgctccgga

SEQ ID NO: 152194 - DNA, 92 bp, Arabidopsis thaliana landsberg
  unsure (1)..(92): unsure at all n locations
gtttttgttancaatcattttgttcaagtcctgtaataaactaagaagcatgacataatcagaccaaatcaacaaggtaataataacgtatc

SEQ ID NO: 152195 - DNA, 165 bp, Arabidopsis thaliana landsberg
tgataacccaactccttaagaaagctcacttctttttcccctgattccctttgtgtcatcatctttcatcatcttcttcttctaagaatcaacaacaatgcagagcagcttcaaaaccgttcctttcactcctgatttctactctcagtcttcttacttcttcag

SEQ ID NO: 152196 - DNA, 531 bp, Arabidopsis thaliana landsberg
ggtgtagaaagaagaattttcacatattactgaaggaaaaacgaacaattcacacaggatgattcacagattaatgaagctgagtttgtcgaagcttaaagaattcaacaaatacagataacaaagctttggtagaatcaaatgacccagaaccaagcaatgacagatccagaggccaaaccaacaaccaagaacatcacagtgacgattcctgcagtctccgagtgtctcagtggaaccgattttggagccagaatcatcaagacgcttgtcaagtacccgttggtaagtcccaataagcatgtcagtatagttacaggaatctcagtcctgagaaacatcggaccgtgcaagcaaccccagaagagagggtaaaacaagagcctagcaatggaaccaccaacagcgattttctcatcctccagcatgaatacagcagtcagacacttaccaaccaagtcaaacacattgtacgctgcaataagcagaatagggtaccaatctgtaagaagctctgaatgaacatcctca

SEQ ID NO: 152197 - DNA, 174 bp, Arabidopsis thaliana landsberg
gcgaccacaccaccagcacttcctccaaaacccttaccgccaccgttgtctcctccgcaaaccacaccacctcctccaccagctattacaccaccacctccaccagctattacacctccactatcacctcctccaccagctattacaccaacacctccactagcgaccacacca

SEQ ID NO: 152198 - DNA, 78 bp, Arabidopsis thaliana landsberg
tgtttccatgtgcttcgcaagagcgatcctccgtttgtcccatcaacaacattcatcaaaaaaggaaattcatcattt

SEQ ID NO: 152199 - DNA, 237 bp, Arabidopsis thaliana landsberg
cttttgaatctctcaaaatacccctaattcccaaaattacccctctcatggagacgaacgcatcatcggagcattttctcccggagacgacaagaccaagcgcgatcatcaacaaacaacaaccggagtttcctgcgtcacgattcacgttcatgtccctcgtgctctggttcgaccagtctaatttcggtacggctctgctttcgtggtccgttttcttccttctcgtcgtcatcg

SEQ ID NO: 152200 - DNA, 453 bp, Arabidopsis thaliana landsberg
gtcagggttgtgagcgataacaatggcgtaatcaccagaagctctagcgaggacaccacgatcaccgacgtgatgctcgacgttgcagacaacagctccttcaggaatagatctaagagggagaacatttccaacgacgagagtagctttcttaccgcagtacaagaactgaccggtgtacataccttcggcggcgacgaagagctccttttgtttcttgaaacggaaaggatgacggaaagtgacgcgagcaagaggagcaccacgaccaggatcgtggatgatctccgtcacgacgcccttgaggtaaccatttctctcgccgaaatcgaggctacggaacttagccggacctttgcggtggtgagtgtgggatttgaagacggaacccgcacccttacgttgagctctgatgacacgacccatggatgctctcgacggcgaagtttagat

SEQ ID NO: 152201 - DNA, 873 bp, Arabidopsis thaliana landsberg
aaaaacccacaaaatgaatctaagatagtttgctttacaattcaaaaaccagagattattcaatccctaaatccagagatcgaactctcgatcatgttatcgaatcatctccagaacgggatcgaatccgataacctaatgtggtctcgtgtacctgaatccgatgatacttccaccgacgatattactctactcaactctcaccgtgacggtgacggaggtgtcaatagtctcgattacgaagtcatcgagaattacgcttatagagaagaacaagctcatcgaggaaagctttatgttggttactacgttgctgtcaaatggttcttctctttactcatcgggatcggtacttgttcttgttcttcttcgattattattggttggttacttcttcgtagatatttccagaatcagatcttgttttttgattcttcgtaggaactggattagctgctgtgttcatcaatctctctgttgagaatttcgctggatggaaatttgctcttacttttgctattattcagaagtcgtatttcgctgggtttattgtttatcttctcatcaatttagtcttagtgttttcttctgcgtatattattactcaattcgctcctgctgctgctggttctggcattcctgagatcaagggttatctcaatggtacatcaaactttcttacttcacattttttgttttgttttgtttgaatttttgttatccacagtcttctttggattatgcaggaattgatattcctggcaccttgctctttagaactctcattggaaaggtgagttaaaacttttgaggaattgatggtgtttaggaagatttcgtttcatttctattttgaagacagtgttttatagt

SEQ ID NO: 152202 - DNA, 540 bp, Arabidopsis thaliana landsberg
ttacaatgagttttacacacaaatttaaattagacagacataaaaccacttcacagacaatcatttggtaaaattattcagacatgtaaaaaaaaaaagactttatggtaagaaaaaaacagaggactatactcttaacatattggaatgggagctccgttccactcgttgagacattccatcatcggatcaatgattttaccttcacaaatcgccgtgaaaaccttgtcgaactcttctccaggcgacgtcactttctctccggtcaaaagctctgttccaagctcttccctcacgaatctatacaatggatacgacctacattccttgatcctgttcgggatagccgatgttccgttatcgtaggctgctcttgctgcttccacttctttcggtagcactgccttaagctcctcctcgaaagctccaatcttatggaagattgaagtcactgcattcttctcactctcaccattgatcaaagcatggtcaacaataacttgtctcagcttctgaatcaacgggtacgttgcgctacaa

SEQ ID NO: 152203 - DNA, 244 bp, Arabidopsis thaliana landsberg
gtcctttccgttgcgtgctctcagtgaatatgaagaaagatgaaaagattggtttgacggggagaaccatttacaccagatccctagcagcttcaattcctgcctcagttgaacaagaaacccctggtttgaggaggtcaagccgggggacaccatctacgaaggtaataactccagcttctgctactagaaagtcagagagactggctccctcacctgcttcagtttcaaaaaagtccggtgg

SEQ ID NO: 152204 - DNA, 816 bp, Arabidopsis thaliana landsberg
ccgctctaatataaggagaatctgtgtgctttaacagtccatgcatctgcttcactgtaagtttcatggtaaagaatttgtagagaagacaatacgctgttgaaggaccacggcaattcccacccatcccgggctccacatgatcaacttggttgtagatttcatcaattacctcatgataagtctttaatccatagagctctttaaaatagtcagaagaaagaatgttcattgaaagatccttttccaataatgactcatatgcccttccatttggctgtatctccgccatgttttatgtaattgaaaaatgctgagagatacagaaagagcctacgagcccgggaaacctgaaagaggaattaagctcattaggaaaagcaacaagctaaagcttgatactttttgtccatagatacagaaacaataacaaatcctcaatgcccgcttaaaccagctattaatcataaattgaatcgcaaccctagaaatagcggagcaaaatctatggggtctccctcaaaattaaaccggaaaggaactaaatttcgtccatcccagataagaaaaggtgaaaatcgatatcaatttcggaagacactggtgaaaaaaaaacgatcaagctagaaacaaagtcgaatctatgtatcagccggttaaaaacaatttctataagcaaacaaacttaattctcgagaagtttatcaaaatcgtaaggagtaaaagagagaaacctgaaatttgacgaactgtgttagcgattacaggattcaagcgcgagaggtagagggacaccaaaagagccctagaaacggc

SEQ ID NO: 152205 - DNA, 374 bp, Arabidopsis thaliana landsberg
tgcaaaccaaccaagaagaagaaaagaaacacaaaatcaacaacaatggcggtgaagaagaaagtttcatggagatcactaatcgttggatgtttaggagatccagaaaccctaatggcatcttcaaagaaacctaaaagaaaaaatgacgtcatcaagaaacagagctcttttcaaagactatcgatacttgatatgagcaatccaagttccaacactttgtcagaagatctatcgatttctttggccggatcagatcttcatgtgtttaccctagcagagcttaaagtcattacacaaagcttttcatcgaccaattttctcggtgaaggagggtttggtcctgttcataagggtttcattataataagcta

SEQ ID NO: 152206 - DNA, 819 bp, Arabidopsis thaliana landsberg
cgcaggttagcttcttctaccattattgctttcgcattccttctgggttcgtttctttacctaaaagtttccgccttttcttaagttattgtcgatcttaaagtacagagattgataaactctagttgttatctttcaatgtcgaatcatttaacctagattactcagctcttctacggaattagtcactagcttagtttacacagcctaagaatcgggtccagagtttttaggattcatgcatgttccttaaacgctatgttctgatgaaaatcttgtgtatatacttgttctttatcccctttagatactgagtttagtcactgatctaaatcaatttcctggtttcaatctctgtgaaaagattgatatttctgaatgttgttgttaaatggtttctttctgctcacttaatgtcagggtaagggtttcatcatcaactttcgccaatgcaaagcttgtaactttgagaaaccacactgttaatttgcacatatattactgttccatggctggtactgataaccgccgctctcgccacgacgacgaaagccctaaaaatcccaacaagaagaagaaaggaaaccgtaatccagaaaagagtctccttatcaatcttcattcatgttccaagagaaaggatctctcagctgcattggctctttatgatgcagctatcacttccagtgacattcgcctcaaccagcaacacttccaatcccttctttacctctgctccgcgttcattagtgacccatctcttcaaaccgttgccattgaccgtggctttcaaatttttgaccgtatggttagttctgg

SEQ ID NO: 152207 - DNA, 207 bp, Arabidopsis thaliana landsberg
gttaaatataataataaacgaatttttttattaacgttcttcttttttgaagaatcatataatcatccaacaaagaaaaatcaaaattataaaaccaataaacggtcgccacgtgccacttcaacaacctcgcacttcaccgtcaaccccttatccattccaccaccggcggccaccgttctcctcttcttcggagctccgttctcg

SEQ ID NO: 152208 - DNA, 84 bp, Arabidopsis thaliana landsberg
agttatatcccagtgaccagcttgtccttctcggtggaaagtgacatacgcttcatgcttcttttacatgttcttcataaacag

SEQ ID NO: 152209 - DNA, 172 bp, Arabidopsis thaliana landsberg
acataaaccaaaagtcttatttagcatcctttgattgttacaaacccaaatattttgctttgtgtgactagaaaattagaaattgttactttaggaactgcacttaatccaaagtcagaaactttgagattaccctttgaatctagtaacaagttttgtggctgcaaaaagc

SEQ ID NO: 152210 - DNA, 944 bp, Arabidopsis thaliana landsberg
gaagcaaacccaaaagaaaaacacacacaagacttggcttacaaaacaaacaagtcttcaagaaacttggaaagctaagagctatggctatggagttagagcttgatgatgatgtcttctttgcagacataagcaaacagatctctcttctcatcatggatgaagatgaacacttaaaccctgtttctctctcttcctcctcctcctctctctcattccaggtttgttcctctgtccacacacttcctctctatctctctctgtatgcctatttatctctcgacctccatgtctaacagtgtttcttgaatcttttgtggaaacagggtttgttcagaggaggttaccaaacggctccatatatgtatcaacaagaacagagcaaagggactggtgtgttcatccctaaatcgtctcagcctagaagaagacctcatcatcatcagaagcaaggtaggtatagttccttcaacgccaagcaacaacactctcttcatcaaaacagacaagagtatcagcagagtcatgagaactcaagaagtactctcaccactcacaacaataacaacaacaagagcaacatgaacagcactagtgttcatgcttctatcccaagaagaagctacagagatgcatcatctatctacacttgattaattttaacaaatattcttctgtgtgatcaattcatataatttaaattagatgcataagatttatttgttttgtaaattcagcgaacaataaaagggttgtataaggaaggtattggagatgtgtccaacttccaagtttgttcttgcttttatgtaactctttcttgtcattttagagatgcactaactttttcctccatttgtaatcttttaaggattgaatgaaaatcaaatttgttggttgatgacaacaagattgatagaggaatgtgtaaagacaagccccat

SEQ ID NO: 152211 - DNA, 871 bp, Arabidopsis thaliana landsberg; identical to SEQ ID NO: 16473

SEQ ID NO: 152212 - DNA, 110 bp, Arabidopsis thaliana landsberg
cactcaataccgaatccaatctcccgtaatctccctcctccatggccatcttcgcatcttcaagacctgagatcaacgaatcgtaattctcgacgcaaacactcatcgcc

SEQ ID NO: 152213 - DNA, 89 bp, Arabidopsis thaliana landsberg
tatttagttgttcttcgtcatcgacctacgctgcgattatctctccctctcaaaattccttatctcgtcgattaatttctctcaggtaa

SEQ ID NO: 152214 - DNA, 1262 bp, Arabidopsis thaliana landsberg
actacactcatcaaagctcacaaaaagagaagagaagagacgaggatcaatcaccattctcatggcttcagcttctttctctgcggtttcttcgctctcgtatcaattccgttcaaaagaagcgatcttttcatcgaaagcttcctgttttagctcgacggctttatcaggaaggagagtgtttggatctatcaaagcagctcaagtgacaagccatgagaatcctagaagacgaactcagaacgtcgaaggagatatatttgttggtaaataaagtctggttactttttattgcaaattgaaaacaaagagagatcattaacgccctctctctgtctatctttcaatggatttttttgcagacaatacttgtattgattgtgatacatgtcgttggatggttccggtaagcttttcttctctgaaatctgtaaagctcctaaatttttctgctctttcccctgtcttgtggacccttttggtggtcctttgaaattgatgaattgatttaagcattttgggtctattggttggtagggtaaagtagttggggggttttcattttgggtattgggaagttgatgccttaggattgatctcgaagaaggatatactaacattagaatataatctgatttgatcacagtcattatatgagaacaagaagttagaatgttcatgttatagttgtttgttagcaggccaatgcagctgtgagagcaggattttactttccctttacatttttttcagccaattcgtaaacagcttttctctgatttatcttcacaggatttattcactcgagtggacaacatgtctgcggttacaaagcaaccaacttgtaaggaggaaagactgaatgctcttcaggtgccttaactacgtcgattttagttttctttctatttaatatctgatgacatttcattgaggatgtttttgaatctccttgtttttttgtctttgatagcttttattgttaccttataaaacagatagacaaattttgtggaaatgtctgctaggatgtcatagactgagaaatttcttatgaagaaaaatattttagtgagtaaaatttctgaggttgtcctgattactcatggtttcttgattctttcaggccttactatcttgtccgacgggctctattcgcactcaaactccacctgctgacataggggaagctcaagagaccttttcacttgtagtggacaaagacacacttcctgtactttttaatcccttaagctttcatt

SEQ ID NO: 152215 - DNA, 197 bp, Arabidopsis thaliana landsberg
acgcattcatcatcacctctcaattcattttcacgtctcctcttaattttcaactctttaagctcaccatatatacaaaactctgtttttgattttctctttgatcaatatataaaaacgccgatcacaagttcacaacatgccgggaaattctcaccgccggggatccgacgtcatattcaccgtgatgatgatcg

SEQ ID NO: 152216 - DNA, 206 bp, Arabidopsis thaliana landsberg; identical to SEQ ID NO: 71579

SEQ ID NO: 152217 - DNA, 838 bp, Arabidopsis thaliana landsberg
gaaacgcagtcaaaatagagagagagagagagagtcacacatgtaataaaccttggtcgacaatctcgccctttccatgtgatttctccacttcctctctctctctactgcaacttcctcctcctgcttcaacttcattcgggtaatgatgaactagcgtagagatttggatcttcttcttcgtcctctcaccaactcttcaccggttagatctctttttttcccgctaacgaatgaggagcgttgccgccgccgccgctgctgctgctgctgcttctaagccttctaatcctctcgtcgcctttgagcacaagaggtttcgcgtttttccccctttcccctgtacatttctgcttcctcttttttggtttgaacttgcgcttcttctctctttagctttttgctagactcgctgagcgaaatgttgtatctccgattacgagagttttaatccgtcttgttgttagcgtaattttgcattttcttaacaatttagttgggattttgatgattattggtcttgatttgaagtacatcctagtgatttggatttgaatgctgatttttgtccagtggtgactattgttctcaatgtggcataatcgttagtgaaggtagtctttgatagcaaattcgagttgtttctgttgttcaatttcttgaaaacaaactgatgagagatgcaattttgtcattggatatagtaaggtttcgtctgagctctggatgggcttttaatatatcagtgggaactcatatcgccttttttctttgtcaacagggatgcatacggatttcctgtcagacctcaacatgtgcagagatacagagaatatgc

SEQ ID NO: 152218 - DNA, 284 bp, Arabidopsis thaliana landsberg
actgaaacttctcaatatgagcggagtcctttaaattccaaaggcattaatgtggtgaatggaacatcagttaataatgggggaaaaccgttgggaattaagataggttcaagtgagatgctaatagaaggtgaagatgttcgtgtctcctccactgatgcaaatgaacgggctgttaatatctcttcacttctaggaatatctacacatacagttaataaggataaaagttttgaaaagcttataatcgatctcgactcctactgaaattcaggggtatccta

SEQ ID NO: 152219 - DNA, 294 bp, Arabidopsis thaliana landsberg
agattcaacaaaagactattattgcatttgataacgtaaactttactttattgatttgctttgctaaatcaaagtctctcccgaaatggaaccgaagaagaagttacacaactagataaaaataaggtatctttctaattcaaacttcagacttttctcttaagcttctgcttcatcctctcaattgcaccacgcaacgtctcttcgtctttacagaacgcaaacctaaccaaattcttcccttcttctggattcagataaaagacgctcgttgggatcgcaacgaccccaact

SEQ ID NO: 152220 - DNA, 419 bp, Arabidopsis thaliana landsberg
cttgcaatgatgatgtgtgatgagttagccagaggaacaatgaagctacagtttatgtacaaaactctaccttttaaagcctttcttctttagaaaaacttaggaacgaaaaccctcttaattttgtttctgagtttcttggagagtttttgtttgttttcagcctattaagtaagacatgttgtattggttggacgagtaactgatgtttggtataatttatcagcttgcaaagaggacttttgatgatgtctacgcgtacccaatgcgagattgttgattgcgagagaaggtttaagagtatttaggcaaagaataattgttgtactgttcaaacacaaatcatctctttgtctttagttttcatatcaaagacaaatgtccaaaatcttttgaatcaaatctctatgatttctatt

SEQ ID NO: 152221 - DNA, 327 bp, Arabidopsis thaliana landsberg
ttttattgtccaaaaaatataattcagatttggtatttagattctatgcattacaacgtggaaacgagatacgtaaatacccacatacaaagatacattatattgttgtagcttgaacatcatcatcaaatctaatcgggtaaataaacatcggatttgaagtgaggaagaagatatgaaaagaagagctataaagaaacgaaatttggctaacgattgaacgcaaccgaaagagcaacaccaaggacaagccatgctccaatgaagtatccaaaatcctcgttggtcctacatcttccggttcctgtcgattctcccaaacatttt

SEQ ID NO: 152222 - DNA, 556 bp, Arabidopsis thaliana landsberg
ctggcctcctctctcttgagaacttcaaagcagcactttcaagtatgcaaaggcaaccaaagttggaagccgttagaggtataataagctgcggtgttgcataatacattttccttgggaatatctattgacactatctttgttgagcagattgttccgtactggagctttatcttctggtctgtatgaggaggttagaagtgaaggagcaaagctcatacaccttcatcagtgtgatgaaaggtaatctgtaaatttggtttaaaccatggcaccactatgaaaatgacttgagattccatgtgtattccagagtataaggcgatacacgattcttttcatacctcagactactacgcacaaaatgtctgcctaagggtatgtttatagctctcatgagatgccatggtttaaaggtggtggtctaaatggttgacatgacaggcatttgagcgcgtgagagagcgacaagttatatactatgcccagccccgaggacagtctcagacaggaggatacaaaatgcagaagcttttgatatcaccctctgagcttc

SEQ ID NO: 152223 - DNA, 177 bp, Arabidopsis thaliana landsberg
aaagcgaaaatttgttactattagcaactaggtatattcacaaagatacaacaagcattagtcattcctttgttcaataaatgtggaagttacagggagtatacaaacaatacatgtcaaacaacctcgttgttctaggcactgcgttccacggttgaagatgatgatgctattggt

SEQ ID NO: 152224 - DNA, 378 bp, Arabidopsis thaliana landsberg
tgactttgtttttgctttatttcagactattggttatttgttttgaaacttgttgcacttattttcctatgctttgttggaactatggatgtgtgttttagtgatttaacagtctaactggaggatccatgtgaaaacactaaccaaggctctacaacaatgagcagaatttgcaaagctaagcaaaatgaccagagtgtcgatcgacaccaacatggtatcgatcgacaccactctcaggtggcaactcacattttctaactttttaacttttgattatttctctttcgattcctctatcttaataactctggggacagtgttatctaagtttgggggagtcagttactaacttcatcttttcttttcttatgagtc

SEQ ID NO: 152225 - DNA, 492 bp, Arabidopsis thaliana landsberg
aaggtaagaaatcatgaaataaagtgttctttactttcttttgaattttaatcacatattctccacacacgaaaacaacccccaataccaaaacaaagcaaaaacacaaccacatcttgagatttcaaaattacataataaataacaaactaaattaattaattaaaatttgtttcccccaaataacaaaataacattttttttgcttcttccttggatttggatttcaaagatcagaccttttattgagttttgaacctgtagagcactttcttcttcttggaagtctggttgtcgattgtgatcacaatctttcccggttcacccaccttaaaagaatcggttatcaccggttcatcggttgatccaatcttccgtgtcttagagacgatcacagcatagcttccttcggtggttggctcaaactgagctccgtagctcacatcagcacccaaaaccctaagctcccatgaaagcgtgcaagcctaccac

SEQ ID NO: 152226 - DNA, 1035 bp, Arabidopsis thaliana landsberg
aatcgttcctcctcctcctcatcttcctcacagctctcgcttctgatctcttacttgcacagaaatcgaaaattttctaaagcttttgttctattctcttcgttttcctctggtaattgaatcgtggaatttgaaacttgattttcccgtgtgtatttttttgatgatttgtgatcgtttctaaaaattatagtttgatcttttcatgatccgttgatgattatgacggctaggtatatctcttttctcttttcttttttttttgattaggctttacaattctacaattttagaaagcttgattaggtgatactgagtttgtacttttcggatcattgctcttttgtcttctgcacttgtatgagagtgtgtctctctcatctatcttcatatcacggattttatcttcagggtttttaacattagggttttcacaagaggcttgtgatgtggctttactagtttatatgataaattatttccagagaatttcttgtatgctagtcttctttgcatcaaaactaatattttgcttgttttttttttctgcagagtttattaactttcactgatgggtttcggttctgtttatcgatctctaacggaaatatttcctcaggtaaaaaactgatctcttatttgattactccaactttagcagtgaaattgtgaaagtatccaccatgcttgtgctcagaatgcattttgacaccattttttttatatattttttggctgaatcatctgttcttttgtgttttcttaaagaatttctgtcttttgtagtcttattgaaaccgcattatatacagtattatgttccattgcagattgatgcacgaattttgagggctgttgcaatagaacacccaaaggatgctgatgaagctgctgctgtggttctttcagagattattccttccttttcctcaaatttgttccataattttactcaatcttcgtacaagtaatctgaaagcatttcagagcgcgaaggtacaactttatagcccttggaaaataaccaatttgtag

SEQ ID NO: 152227 - DNA, 291 bp, Arabidopsis thaliana landsberg
tgtgttttatgcataggtgtatggaccggcggctgagccagagagcaagctaggttcttcccgggaatagcagatgccattgcgatgaacgcatcagagggaataattgagcacgagatatggagagtcgcaagagcgattcagagagcaagcaaagctcttaaaggaggtttcacatgagaaaatctgaaagagttctcttttgtgtatatattgtgactatagattgtagaagaataacgtcttatgaactaattttcagaaccatttatgaactaaacactataatct

SEQ ID NO: 152228 - DNA, 139 bp, Arabidopsis thaliana landsberg
gttttgcctgcgttgagggagaagcatgatgagtttatgctgcgggagctatttaaaagatggtcaaaccataaagtaatggtcagatggctatcccgcttcttctactaccttgaccgttacttcattgctcggagat

SEQ ID NO: 152229 - DNA, 261 bp, Arabidopsis thaliana landsberg
ccacaacatcaaaattccagaaaacacaaggcaagaacacaataagcaaaacaccacatgaagcaagaaaacaacttacctgtcaagcgacgtcgtatgcgcttccctatctcaagaagatcattaatgtcttcaagaaggagtttatgacccatcggaggtggtgcttgggtaggctgcgtgggtggcggatcgttgacaaagacacccggttcgtcagagagagtatcacgaggacgagagcgcacatcacgctgaaag

SEQ ID NO: 152230 - DNA, 297 bp, Arabidopsis thaliana landsberg
tttagccggcaaaatattatattaaaaagtccataagacaagtacagtaaggaaaagcccaataacaagtacatgcgagaagaacggcccataaaaactataattctagcttctgacacgtgttggagacgtgtaccctacctatccacgcgtcaggaatcgagcgatgccgtcttcacgttgctaaacaccgccgtctccgatcaaccgccgccgatcagtgcgatgggtagactgttccttcctgccgatctccactccaatcaaaagaagcatcgaaatcatttaccggattaa

SEQ ID NO: 152231 - DNA, 262 bp, Arabidopsis thaliana landsberg
aaaaggtgaatcatataataagcaaaagccaagaatgattctgattctgattcaagagtgttacaaaaataaaaacaacggtcataagagttttggcacttgggaaactctgatgccgagtcttgttctaaaaagatcaaaaaacattttcaactgtgtttcaccaaaacggtagatattttgttttattccattcataaaattttttaaagatatgaaaatgtgcaaataaaaaaagaaaaatttgcggcaagggagaggc

SEQ ID NO: 152232 - DNA, 1048 bp, Arabidopsis thaliana landsberg
tcctcactcccctcttccctctctttatctctctcaagatttgctctgtccagagctccaaatttcaagaacataaacactacacacaaaacactgaatacgatgttgcttggaaagagacaacgaccaccgatcaacagaaccacaagtctatcggagataaagttcgatctaaaccttcccagcgagtcagagccatcaaatcaacagaagccaaccgttgcgagcccgtacggttccaacggtcaagctgtaacagcagccgttgatcaaaaccgtgggttcttagatcaacggctcttatccatggtcacaccgagaggtaacctgaggagacactcaggcgatttctccgacgctggacatttcttgagatcttgcgcactttgtgaacgccttcttgttcctggccgcgacatctatatgtataggtattatatataatcaagttttgatcatagtaaaaaaatttagaccttacgtaactttcatattttgatgatgaaccacttttttaatgatttaattgtttcttgaaagtcggatttggcttatttgaatgatttatgatagttacttaatttgtagtttgtagttggagtattattggatgattagtgatgaattttgtgtgattaaaatggcaggggagataaggctttttgtagctcagagtgcaggcaagagcaaatggcacaagatgagaggaaagagaaaggtaaatcggcggcaccggcgaaagaaccggcggtgacagctcccgcgagagcgaaacccggcaaagggagagctgcagccgccgtgtaatccccattttcatatacattttagctatatatatgtgtggtttgctatgtgtttgtatatgattatgatgggtaatacatatataaagcattaagcgttaattaaccgtgattaactgtgttaatcaccctcgtgttgtggtgaaattagatgattttcgagggttaaattttacaagttttgatctatttgaaataaaatcaaatgtattatatatatgtaagacttgtgtttgttaagt

SEQ ID NO: 152233 - DNA, 240 bp, Arabidopsis thaliana landsberg
ttaacagaaacaaaccattcattgcataaacaaacaacaaagtacaactttatttgtaatttacagttttgatattaagccacatgatggcgtcctcaccgcaaccgcctccatttgcaccttactgttcaccacattttcgcattctctactaggtcaccaccacaactaccagattatgctgctttcaccatgtttccgcattcaccactacagccaccgccgcaaccgctgcctttt

SEQ ID NO: 152234 - DNA, 536 bp, Arabidopsis thaliana landsberg
ccgatacaatcaaataatataaataccataaattgaacttctaattggggttccttctacaaatttatttatttgatttattggaaaaaataataataatatcgggatgtcaaaaagtatcaaggttattgtatctcttgctctcatactatttttggcccttgcagcaaccaaggttgaagccacaagatacataagttatcgtggtatgaatcatggagatcatgctatacattgtgacaaagcccaccctaacacctgcaagaagcaagtagcaaatccttacaggagaggatgcggaacaatcgaacgttgccgtcgtgatacaggtagaaaatgaatcaaccaacccacccaagagcataaaatattacatcaacacctttggttaagaatgtgttaacatgtttctcattggaataccttcgttatctgtatacacacttcacatcctcatattcatttgtttttggctttgtaattgattgtaattatattatgttatgatcaatcatatttaaatatattatatccaa

SEQ ID NO: 152235 - DNA, 110 bp, Arabidopsis thaliana landsberg; identical to SEQ ID NO: 19249

SEQ ID NO: 152236 - DNA, 552 bp, Arabidopsis thaliana landsberg
cgaagctttgatttcatctccgatatctcccgccggatttcacacaatacttgaatcagatgagaacgaagactgcgaggagtttacaggattttccgttaatactccgtcacctttaacggcgaaattgttaacggatcgaaacgtggacgttaagctctctccggaatcggctatcgttgcgtcgggtaaaggctacgagacttactccgtcgtcatgaaggtgaaatcgccaccgtttccgacggcgcgtggatttgcgcgtagagtgccggtggatttggttgctgttttagacgtaagcgggagaaattccggtgggaaattggagatgttgaaacaaacgatgaggattgtgctttcgaatctccgggagatggatcgtttatcgattattgcgttttcgtccagctcgaaacggttatcgccgttacggaggatgacggcgaacgggaggagatcggcgcgaagaatcgtagatatcatcaccgttcctggttctgtctccggcgccggaattgatttctacggtgaagggatgagtgtgaaaga

SEQ ID NO: 152237 - DNA, 1030 bp, Arabidopsis thaliana landsberg
  unsure (1)..(1030): unsure at all n locations
ccttgataatccacccaatcgctgtcattctcccatcaatctagctgctttcacaaaccattgtactgagatcgtatctttaaggtaaatttcaaatcggagtcggcgagatcgaaataggaacctggaagtcggagaatttgtgtaaattcggttttttttttttaattctccgatggatagtttaagtgatatcgatggtgatttcgatggaagaaatgaaggaggatcgtcatcggattatcgattgttgggtcggcagattacggttcatcagttcatgggtggtggcaaaggcgagttcttttttccagaatttgtgttttttcatcattttggtagtttgtgatgagaattttctcggatttacagaacagaaaattcaaattggggatgatagttggaatagttagggtttctgattttggttggttgtgaaaatcgtcatgtgtgtaagtacatttagcattttgggtatagtagaaaatggaaaacttggcaggtgaaagttaggtttaggtttgattttgaatgagaaattgattgattcaaatctctggatacgcatgatgagttcataggtccagcaaaaagctactgtttgtgatttttgtatggctttgttctttgatgtagctgctgacttgctcttatggaggaggcgacatctttctttgggggttatcattatatcaactgtagcctggcttatattcaagttttccgggttgcctttcttatctgtttcttcggatgtcttactcatcgtgatcatgatatcattcgttcatgcccgggtttctgcttttaggaataggtgcgctctacttttcactagtcttctttttcttaattctttgctgttatgtgactgattagtgatgatttctacctgttatctctttataagcagacagttgcattcgttgccagagcttgttctatcagaggaaatnnnnnnnnnnnnnnnnnnnnntttccgtataaaactcaatcacttgcttgtaatggctcatgatgtcacagttgg

SEQ ID NO: 152238 - DNA, 474 bp, Arabidopsis thaliana landsberg
gtatttcgaagtattcattcatagtggagatatggagtttagtattaattcatgtttagagtttccatggcatattcagactaatcgtgctttgaattgaaataaactttcgatatattgatactgacgagttggatgggggggggggggggggctttgggaaatgtcaggttatattggatgaggctataaccaaacttaaaccggatttcttctggttgggtggtggagaaatcgatctgaagctcggtgtcagaacatccgaattccttgaatttgtgaaaccattcattgttccttgcagttgaaatcaggaatatgtataacactatttttatcaccctgttatgaaatgttaggcttagctttaagattttagcttcaatgaaggtttttatctctcatacacattggtattctttgtaatgatacttttgttacgtgctacttggagctaaaatggcggcaaagaga

SEQ ID NO: 152239 - DNA, 419 bp, Arabidopsis thaliana landsberg
atgacagatcgagcgccccaaaggattgccgtgtatcaggatggctaggtgacatagatatggagactgagacaatgccccttcttacagaattcagttacgacttagacaggtccaatgcacagacattcgacattgcagactctgctcactcaggacttgtcaacactgtcaggctagacttcaattccaaccatggaagctcttcacacacttgcatctaccgcttcagggttcatggccgtgaactagactcagtctctgttgctcatgcttgatctgaaagtccacgtcaaacttttcttctctttgtaacattccctctaatagatatctctcttctttttttgtgttagtttatgtggtgggaaagcttctcttagtctgtaatcagaatcatttggttgtattcgtgatta

SEQ ID NO: 152240 - DNA, 420 bp, Arabidopsis thaliana landsberg
atttgaggatttttttcttaattgcaggctccagcaccagcggcacatgagttttctagagagggtggcaacacaggtaattttgcctgttccttttatgaattacttccctctttatggtgagaacaacttacgaataataactcttactgcagctaaaaagacactacctacgccattaccttctcaagtggagaagcaaaacaatgagacaagcagatcaagtagttcaagcagctcttccagttccagctcgtctagtggtacatgcgtctctctgagttatctaacattatatctgatacatattgcttttgtgatttttgttatctaaacccctctgtgttgggcgtgcagattcagacagcgacagctcttcatcatctggatcagatcagacctagaggctagtgtacaaga

SEQ ID NO: 152241 - DNA, 713 bp, Arabidopsis thaliana landsberg
cttcttcttctctgcagtctctcttctctctgttttgccttgctctgttctctcttcctctcatcgtctcctccatcggcatcaactatggccaggtcgctaacaaccttcctccccctaaaaacgtcatccctctcctcaagtctgtgggagctacaaaagtcaagctctatgacgccgatccacaagccctacgtgccttctccggctccggcttcgagctcaccgtggccctcggtaacgagtacctggctcagatgagcgaccctattaaagcccaaggctgggtgaaggagaacgtccaagcttacctcccaaacaccaagatcgtggccatcgtagtgggaaacgaagtcctcacctcaaaccagtcagccctcacggcagccctcttcccggctatgcaaagcatccacggtgctctggtggattgtggcctaaacaagcagatctttgtgacgacggctcactcactagccatcttggatgtatcctaccctccctcggccacttccttccgccgcgacctcctcggctccctcactcccatcttggacttccacgtcaagactggctcaccaatcctcatcaacgcctaccctttcttcgcctacgaagaaaaccccaaacacgtttctctcgacttcgtactcttccaaccaaatcaaggcttcaccgatcctggctctaatttccactacgacaacatgctc

SEQ ID NO: 152242 - DNA, 242 bp, Arabidopsis thaliana landsberg
acgtgagctgttttctctttctctatctttaactcccttcacacctctccctctctcttcttcatatctctctctgtcacaatagtgtgatgatgcaatgagaatggagttgatttcagtgattttcttcttcttttgctctgttttgagttcctctgcctctcaactctgatgggttggttttgatgaagtttaaatcctctgttcttgttgatcctctgtctttattacagacatgggat

SEQ ID NO: 152243 - DNA, 91 bp, Arabidopsis thaliana landsberg
attcaacgtcttcttctctcaatctcttccgttgtcaacaatcgaaaccgcgaaccctttgatttgaccagatgagatcaacatcgaagca

SEQ ID NO: 152244 - DNA, 379 bp, Arabidopsis thaliana landsberg
taaacgacctgaagaaactggtgactattggcttacatttgctgagaagaccattttaacagattttggctacaagatcactttagcaaaacatttccctcaaaagttacaccagcgaagttcagcaaaagcatgaatacgccaagtggttcttctttgatatatagggagatatgtaattagcgggaagaccggatgtccctgagatctcggctggaacgagaacttgaggcttgcctaaagctatcctttttccaactgtgttggcgtaaaacagaccgggaatggctggtacaaatacatcactccttgaacttatgtagaagtcaataacattttcatattcagaattctctaactcaaggtacttcgatttctt

SEQ ID NO: 152245 - DNA, 749 bp, Arabidopsis thaliana landsberg
cgtttcaaaggtttcaacatttgtctcttgaaatcgatcgccgtttttctccatcctccgttcataattccggcaccgtttatccaaaatctacacttggctgaaaacatgaggtagctgttcgatttctaggtttttttgaaaaagtataatctcgaattcgatttgtgtgtatgtttgcttaactcacaaaaaggttttgcgtgatttgtgagctgagtttgacttcctcgtcacattttctctaaccagactatataaagcccttacctttaagttgttttactaaaggggttttcattagttatatagccttatagagagtagtgttctttgtgatgatgagagacttgtttgcacagatcttacaacttttctttacttgtgatgatgattggcttcagcagcattcatgtttacaatctatataagcattggcttttgttttacttgtgaagttcaaaattgagaatctttgtgattgatataacaagttagtcgtaatcttctgttacggttgtgtgattgaggtagtatgttgcacaaagtccgctgagtagagtaacatcgtattatattgttgtttcaccttgtgtgcagtcgtaatccggaggttctttgggctcagcgttctgataaggtttacctaactgtcgccttacctgatgcgaaggacatttcggtgaagtgtgagcctcagggtctattcagtttctctgctcttggtgcccaaggcgagcgcttggatt

SEQ ID NO: 152246 - DNA, 293 bp, Arabidopsis thaliana landsberg
gaataacataatcaacactgcatttgcaaaatattattgtgacatctttcatctaatacaatccaaattatttttttatgaaagcgactgaaagttacatgaacgtagcaaaaataaatttggcttagatattttggaatacatattgtgtcatcatccgaatcattttgacaaaaaataactcttctatatgttttatctatttatgatattttggtaatttccaggaaaaagatattctaaaaacacgagttagttttggaacataattttggaatattttctgtaacttc

SEQ ID NO: 152247 - DNA, 459 bp, Arabidopsis thaliana landsberg
tcaggtttctgggttcatgaaaactagtcaagtagagcgattacatataatacgcacaaacaaacaagaagagaagaagaaagctccctgtacaagaaatacaaagctccacgagaagaagaaaccaaaacaaaagacttctttttctgggaaactgttaaaaacccatcatcacaatgaaaaccctcagattctctgtttcttccttcttcttcaacctattcgtcatcttcatcaagttgaacaatctgagcccgtctctgagcagctttccttctgatgaagaagccccatctcatggctgctttgatctttagccatcctacaacagccttgcccgagtttgaacggtcttcttcgtaatcagccattgacgtctgaccaaaagaatggaacccaaaactatcttctcccatgttcaatggagtttgctggtcaccaccattcatgctaaacagt

SEQ ID NO: 152248 - DNA, 262 bp, Arabidopsis thaliana landsberg
ttcaccttcttcttcttcttcttcttcaatggcgttgatacatggttcggttcctggtacgtctgcggttcgattggttttttcaacctcagcgtcaccgtcgagattttgtctcaatgttccggtggtgaagcagggttggaagaattcgtgccggagaagggttttaagagcaatggtgcaggaaacagttcaaggatctcctttggtttacgccagagaaatggagcgcctttctgctaaggaatcgctacttctcgct

SEQ ID NO: 152249 - DNA, 555 bp, Arabidopsis thaliana landsberg
tcaaatccttaaaatttagcaaaaagtaattcactactccttattagagctgtatgatacatgtatccttatgattagctttgtagtgtaaaccatcagtattgaaataggtaatcggtcatcatacatttttaggtgaggttaagcttgtgattgttatgcagggaaccgcatttacggccatcgtttacacagctgatgcaaagtttgaagcggcttcagggtctaaacataagcaacagagcgaatacgagtgaaagtttgatgtaagataagttagacagaagatgttaccttacctggtctggttcaaagagccaacgggtggggattgccattcttctttgttttttttttttgtttttgttattacggtcagacgagaggagacaaacaaaaaaagattgatgggttggggaaaagcttgtggagttcaatcgaagtgggagctcaacaagaaaagaaaaagccctattcttaaccctttgtaactattattattatcatcaaagttgttgctacttgtaacgataaaattaggtgaatgaacaaaaa

SEQ ID NO: 152250 - DNA, 383 bp, Arabidopsis thaliana landsberg
aaagagagataagtaaaaaatcaattgaaaggacaataaagagagaaagatagttcagagaaaagaagaagaagcgtttagttacaaacctgtcttgatgagtattttttgaagttacttcctaaaaaaaccacattacacttataaattctccaagaacccctaacaaagataataattgtagtagtaatataacacacgacgattataaaatataaattacattcaccaccaccaaacctaaacgtagagttaaaacactcagagaatgatctctggcccaagaagttcttgtactgtcttggattcaaagtcagtgtatagaatctatgttctggcttagctcttccagcttcttcattctcatcttttcgctttctccc

SEQ ID NO: 152251 - DNA, 361 bp, Arabidopsis thaliana landsberg
ctttgatacagatatttgagatacgagcgcacgttagctaagaccaccgcgtaagccaccgtctcgtcttgaaacgcaccgtattcatgacttcgtcggagccactcgacctggttgtcaccgtcgtctctgccaagcacctgaagaatgtcaactggcgtaacggtgacctgaaaccctacgttgttctgtatcttgaccaagaccaccctttctccacccgctccgatgattcctccttcatcaaaccggtgtggaacaagcggatactctttctttcacccgatctgtccacgaatcggacctcaacatccagggttttcattccaattctttcgatctggccaaaccctactcgatc

SEQ ID NO: 152252 - DNA, 392 bp, Arabidopsis thaliana landsberg
aaaatcgtaatcagcagcgatcgagattttcgccgctgaaatctggagactgattattacacacttgttcgtcgtgttcttcatcggagagacactagatcggaaaattttacctcgatttgattgccgttgccgtaacatttgactgttgttttgtggtggggaattctagggttcttgcttgatgaagaagaactgaagcgaaaatgaccattaaaatctcccatgagatgattgtgtccgttttctctcttatatcggacaacggaatcgaatgatcgtcatattctgtaagagagaaggttagatcttcaccgaatctggaactcgagatccatcgttttgttcgattttctattctttcgcacaaggattggtctgagaagaacaag

SEQ ID NO: 152253 - DNA, 215 bp, Arabidopsis thaliana landsberg
atttatcaatcaatttatttcataaaataatcaagtattatatactaatacaattttaatgcaatattgtaaaaccaatcagaataaaactattttgtgcaaaatctggattttacatatatcttgacaaaacttttatttagggtaatatgaattcgtgcaagatttaggtaaaataatttcgtgcaaaattagggcaaaaccatgaacaattt

SEQ ID NO: 152254 - DNA, 375 bp, Arabidopsis thaliana landsberg
tatacattaaagaaaatagaacatcttgaaacctctaaataaatacaccgtgcttaaaaaaattcacgagatattcaattgatttttttttgtctagaatattaaataatcaatactccattagatgtcatttacccaaaaaaaaaaaactccattagatgttattattgtagattgtacaataaactctgatatataagtccaacaaaactccattagcagtagtgttggtaagctccccatattcttgggctttagtttcaaaagatttcatgttatccgacggcttagtttctggaattatcttgttaatcgccacctttatataatttcatatataatctatcttttagtgcaaaaaaagtaaaaaaaata

SEQ ID NO: 152255 - DNA, 418 bp, Arabidopsis thaliana landsberg
ctcggtattaataatcagggactcccaagcgcacaaattctctaagtagatttttgttagcttgttatgaaacagtataacatgacttatatagccatgtcaaccaatgtaaaatggataagatccttttagtttagattcataaaaaattttttgtaatcgatgaaataaattagaagcgaatccacatacatagaaatagaattgctctaggaatattttttccaaatcatatgaatacgattgaatacgatccgtagtgggttgcccgggactcgaacccggaactagtcggatggagtagataatctccttgttaaaatgaaaaaaaaaggtaaaaaacccctccccaaaccgtgcttgcatttttcattgcacacagctttctctatgtatacatagaaaactcaatttcttt

SEQ ID NO: 152256 - DNA, 260 bp, Arabidopsis thaliana landsberg
cagtttggcactttagctcgtatgcttcagtcagccccacctccaaaatttgttatagtcaccatgtctaagagggttcctttggctggggaagagttaattgcatatgagtaagagcaaaacagactgaaaagggaagaagctttgcgagctagcctcgtttatagaggaggaaacaaaagcttcccatggatccgatgataattcaagtgaacctatgatcatacataccaagactactcacgatggtaaattttttc

SEQ ID NO: 152257 - DNA, 196 bp, Arabidopsis thaliana landsberg
gacttttttcagcttcattgctctcttaaaatctgtggtaatctctcttccattgttattcttcaagtaaataatgccctttgctcctctctcaacaccatttatcttataaaccctagacaatccgccgaatttttacccttctccactggtcatccgcgttttttttccgggtctaaggtcaccggacaaatgg

SEQ ID NO: 152258 - DNA, 422 bp, Arabidopsis thaliana landsberg
  unsure (1)..(422): unsure at all n locations
cgcagcctcaaactcaaatgtacacaaacgtacaagacttgggtgagaaagacgctaattctggacttttgatctaaaaaaacgttataggagtggtccacgatcatttcatctagacatggacattgacgggccagctaagaactccgttaagattcatctagagaagcagagacttccacctggaaaatcaaggagaaagagttacttgaaggtcaagaaatatgtagcctgcaggactgataaagatgctcagataaagttgagcctgtacgacccttacgagttccatcttgtgaaccctaaccggcagtcttagttaaggaacttggncggttacaagctcttacctagtggtaatgcttgaagtttactcgataatgatgatcccgcacatattataggggctttcacaaacaatc

SEQ ID NO: 152259 - DNA, 333 bp, Arabidopsis thaliana landsberg
tcgaatcagagtagtcgggtggatggggcaaagactaggaagaataatcagtctccgggtcgggttagattagatccggataaaaacgggttggatcagcaacagcctcagaattacggttataccacagaggaattgttagagaacccgccttgtttcgttagagtgtttcatatttctttgaaaaagaagaatttcgatgggattaatattttatcattttcacgttggatttataattcgtaaagttacttacttaattacgttacctctgtaattcatttgtgttgtatttttgtgctgattaaaagttataattcggttgaatgatgt

SEQ ID NO: 152260 - DNA, 180 bp, Arabidopsis thaliana landsberg
agttaagaagcctgagatgaaaggtcctgaaatgtatatctctgaggaaattagaaccgagtttagagaatccttgcttgctagagtaggagtaatgggtgtgatctatctgaaaacgatgccacccaaaggctctgaagaagagaaagaaactgagttctcattccgtgttgagggtac

SEQ ID NO: 152261 - DNA, 206 bp, Arabidopsis thaliana landsberg
agattggtgatattttatggaatgaaacacataatttcttctgaagtatttgctttaatcacatggttctaattttaggatcctcatctctatttttttttttgggttttccaaattaactcgcttagattatcgtgagataaatcagtaataattttatttattttccctctttaatttacaattaatgatggggttgttttata

SEQ ID NO: 152262 - DNA, 564 bp, Arabidopsis thaliana landsberg
tcccaaagcaacttacagttcccgcctcaacttctcccctgtcctttgaaccatctcttctacatagtcaaagactattatagttctattactactactactcgtgtgatcgtttttttttagagagaaacagagtgactgctggccgtaggatggaaacagtaagaaaagtacatccgaatcaacggctattgcgttctctcctcttccttcttgtgatgtggatttgtgtgtgtgtgatgtgtcggtgagtgtgttatagaagtcactatagccatcttcaaaggggagatagagctaggagtagtatttggtggtgtcacgtcgtttgttttttctatataatttttgtcactatgtctttctattatgggacatggcataatatatcatatgaataatttatcactatgtctttctattgtgggacattacataataatgtatgatatgaatattatgtacactacttcagagagagcattggtattctaccagaaccttcagagtatctcttcttgtttcgtctcctcaaaacccaagaaatataaaatatactacgaa

SEQ ID NO: 152263 - DNA, 529 bp, Arabidopsis thaliana landsberg
gtttttgaatgagtctgctccggagagacggtcggagccgtagtttgtgaagttcttgccgctgtaagcggcgaagttgacgtcatcgccgtgtttttccagggaatgagcggcgagctcagggaagcagaagagtttcgcggcggagcagaaatcagagtgatgcgtgttaagcgcgtgattagaagcgagtgaggcgaaacgcgtggagtccacggcggttagaggagaggcctttgagaggaaaaaagaaggttttggtgaatcgccattgatatgattgttccaataacgaatcaaagaagcttttggtgtgaatggattctccgatgacgtgatgttgccggcggtttgtttagctccggcgaaatgcaccttcaaaaaaacgcaaatggttatgtatctatcaaaatgttaatgaaactaaaagattgaatatttcgtacattagaagatgagaagatgcagaagaagcagaggaatagagttgcttcaatattgttcatcttcttggtgagagagatttgtt

SEQ ID NO: 152264 - DNA, 410 bp, Arabidopsis thaliana landsberg
catatgcacatcgcaacaaagaagttccttggggtatgtgtacttttccagttttcctatcgtccatcttactgtctttcatttcgtgatcttcagctttgataatgctgtttagttgtctctcctaaaaaccttaagagatcatcaaagattatctctgtaatatccgtaatgggtcggtttctgaatcagtttctgaatctgacgctttctatttgccattctcaggtccggatggtctgtttgaggtgaagcacaacaaagagcactgagtcttgcgtggtcataataacgtcttcttggtttatttgaaaggctaaaatgttttaccgtatttgttctcaccgtttgtcaacgatttgccactcccctctcttttcttttgttgggaaataaaagttaataaattg

SEQ ID NO: 152265 - DNA, 208 bp, Arabidopsis thaliana landsberg
tctccaggaacagaggtccacatcacggtttcaatgatctgtttgtacattccactatttagaaatctctccccttactcagaattaagaaattttaaagcacacaaatccatattcctagagaaaaagtgggaataagcagaatggctcaaattagcacaagaggaggaaaaagaagatgcagaagcaagcaatgaacaaaactatc

SEQ ID NO: 152266 - DNA, 222 bp, Arabidopsis thaliana landsberg
tgggctaaattaatttttacatatattgcaatatgataaattacttttacaacttattacaatgcatcttatcataatttaacaaattatacattgatattttggcctaaaaacccaattgatattaagcttattcgataccatgtctatgagaccacacttattgcatattacaagcttcaacgattaaactccaaagtaccatttaaattcattttgaca

SEQ ID NO: 152267 - DNA, 1081 bp, Arabidopsis thaliana landsberg
ctatctttctgttattttcttcttcttcttcctctttttattttctaaatttatttgtttgtgtttaatcctttttatcgatctcaagcgacctctttgtcaaacctgacaatcccaaatgatgaagaattctgacgtcgctatttattaaaaccaaaacaatctcttcttatatactttagtttcagacaggaacccaacaaaaaaatcaaaactcttttctcttttctttttttttgcaaaaaaaataaaaatggggaattgtcaagcggccgaagcagcgacggttttgattcatcacccggcggagaacaaggtggagaggatttactggtcagtgacagcgagtgacatcatgaaatccaatcctggtcattacgttgcggtggtggtgacgtcacctacgatgaagaacgagaaaggtttgccactgaagcagcttaaactccttcgtcctgacgacactttactcatcggacatgtctatcgtctcgtcagcttcgaaggtatatatatatacactcttaactccatttctctgtttctgataaataaaatgatctataaagctgttgacaattttatactatcatgcagaggttttgaacgagtttgcgacgaagaaatgtgtgaagcttggcaagttattgaaagaaggaggagggcttgacttgacgaagaagaagacgaaacacaggaagaagaagctggatcaggaaacgggcaaagtcaacccgaattcggatccgaatccgaaccaagatagcgctgataatgcggtaagtgcatgttaatactctcatcgtccaatttttttctttttaacatataaaatggatccttaattttagttctagttgtgacatgatgaataagatatttatagatgactgtcctggtcacattactctgatcgctttatccttttatcatttatgtacgaatgcttaatttaattcgaccgatcttataggtcgccggagaaaacgggggagatgggtttatgaggaggagccacggtggaggaagaggtggtggtgggtggaggccagctttacacagcattccggaatttggatcc

SEQ ID NO: 152268 - DNA, 232 bp, Arabidopsis thaliana landsberg
ctcaaattgtcataacatttttaaaagcataattgaacacactttaaatctgagtaaaactaaagcgttcgaggtcataatgtaaataatgaaaaatagcaggatacaaagtgaaattctaagaagttatactaaaaggaaacaaagccacgacctagtccggtccatctcattcatcacgtgccgtttacggaactaggttgagcttttaaagcttcattaaaggccactg

SEQ ID NO: 152269 - DNA, 387 bp, Arabidopsis thaliana landsberg
ctgacaggtcggcctctgccacgtcttctcagcaaaggatgagcaacccgaagaagtgcaagtttatgggatgtgttaaaggagctagaggagcttcggggctctgcattggccatggaggtggccagagatgccaaaagctaggttgcaacaaaggtgctgagagcaaaactactttctgcaaagcccatggcggaggaaagagatgccaacacttgggatgcacaaagagtgctgaaggcaaaaccgatctctgcatatcacatggtggtggaagacggtgtggattccctgagggatgtgctaaggctgcacgtggcaaatctgggctctgcatcaagcacggtggtggtaaaaggtgtaggattgaaagctgtacacgaagtc

SEQ ID NO: 152270 - DNA, 247 bp, Arabidopsis thaliana landsberg
gaaaattgcattgttttctataatatatcaaccgttacaaagttttaattacataaagctataacgttttgtctgaattcgaaaaaaatggtgaagttgttttagccaccaccggatttatagatggcggcgtggaagtcatggattgtggcggagaaagcacgaagatgtttaaggacgatgttctttgtggcagcaatgacggcgtctctgttagcttcttcattaccggttctgatcacggtgg

SEQ ID NO: 152271 - DNA, 316 bp, Arabidopsis thaliana landsberg
aaagtctctcaataaccatgtgtgctccgcagccctccaacgagtttccgctgatttttcgcaagggtaagatctgtaatcggatctcgatatatttaatcgcaataattgtttaatcattgtccgttgggtagatggtaagacatgtgtgttttgggatgtggaggattacccaatcccagctggtctccatcctcgttcgatccggcggagaatcgtaaaggatgtgaagaaatatggttgtgatgcggaggtgtcgattcatgcttatgctaatgataatacggtctcggtagctgttgcgcggcaatttcgg

SEQ ID NO: 152272 - DNA, 378 bp, Arabidopsis thaliana landsberg
cccggaagagctcaggacgccaccggtaagtctggtggctctcttcggatacgcggagctacacgcgtccattactaagtatctccactcccagcagcctcccatcaacgctctggccttccccgacttctctcaaatctctctcctccttgctcatgatgatcagatcagccgaacctcctccttcagagatcctctcagcgtctccgattctgcttctcccattccttccagatgcggcggtattttgaaacgggactggttgcttaagcatcgcaccaaggtccctgcacttgtcgccgccttctttccctcacatcacatcttcggcgatccaactcaatggctacaggtctgctccgatctcgacagcctcaa

SEQ ID NO: 152273 - DNA, 308 bp, Arabidopsis thaliana landsberg
tatcattatcggtgagaaaaaaagaagaattcgtaatcggttgtggttccggcaacgtattttgattcactggatttggaatctctgcatgcggtgaaggatgtgaaataaacacgtgtcctcaacttatccccatcgatgagacacgttcttgagtttatcctttcttgagcctcttgtttgggcttcgttgaaagttgtctttgatgtttatgtaattgggtttgatgttatgtattattatttcaataaaacggcagtttcagaggaaaaaaaaaaaaaaaaacaagtatgaaagactttcaacg

SEQ ID NO: 152274 - DNA, 145 bp, Arabidopsis thaliana landsberg
ttatcctttggtagcttctactcgaaaacattacaagaacagtttgcttttgtttagatttttagttgtcgttggcactgaggaatcatcattgtcagaagattcactagatgaatctctttctcgacctctcactagtgatgag

SEQ ID NO: 152275 - DNA, 216 bp, Arabidopsis thaliana landsberg
aattcttttaaaataccttgtaagtctttcgttatgcgacttacatatactttaaacgattgtaaatcaagttaaacatttttacaagcttttaacttgaatcttttaaaatatcttgtaagtcgtttactaaaattactatcaaactttacaagtaattttaatagtaattccaataatttatctttttaaaatattttgtaaaagcctgtttaa

SEQ ID NO: 152276 - DNA, 468 bp, Arabidopsis thaliana landsberg
gtctatttgaatttctctcaacttctttttttttgcttcacatcgttcacatcaattagtttctatcagctccagcaaatggttagtgtgttcatcagctaaaatcattaaggattgcgttacttcttcttcaggttggattatattttgggtttaataattttagattcatgaaatatgtgtgtttgtttgtgttgcttacgtttgtattattctctaggaaggactagaaatgagaaagaattgattactccgtattgagtgtgaagatgacgaggtggtctatgtctatgcactgcacattgttcttgctatttctgttgaggattaaatgtgtattctcagattccgattatttgatcggtcttggaagctatgacataacgggacctgcagctgatgttaacatgatgggatatgctaacatggaacaagtagcatctggtgttcacttcaggctcagagctc

SEQ ID NO: 152277 - DNA, 708 bp, Arabidopsis thaliana landsberg
ccctcttctgccccttctgtaaattcccaatccaacccttctctccttcctcctccgtctttgccccttcccccaatttcttcttcccgattctctcctttccctttttctttttacccgccaaaatcacatgcaccttcactaacggctccttccccaatttccatttcccatttcattcatactcgaaaccctagatttctaattcctggatcggtgcttggatcttcttcagtttcctcgtgttttggttgatacccagaatttgattcaagtgagtttctcgatctgaagttaaagtttcgatttttatttggatttcttttccttcctcttgttacgaattcttcatttgtacttagttgttttttgttcagctcagatcttcgagtaaactttattatcctgataaggatttcgtttttaactcacaacttttttttgaatttcgaatttggtttttagtgttaaatctgatagtgtcgatatgagattcggacaacgcgaaaaagtcgtcatttccttaattttctcgtctctatcagattttgttcactcactttatttttcttactctgcttttgtagctccaaattctccgttttttctcaaagagtaagttactgtttttcgctgaggaattcactgtccagtgaaattgacgatgcacaagattaagctagacgaccgtgcgttttctgtttctct

SEQ ID NO: 152278 - DNA, 129 bp, Arabidopsis thaliana landsberg
aggaaaagccaatggtttgcaaaaaaaaacccaccagaaaaaaactaggttagaactttggctgttgtcagacaaaaaaagttgatttgtaatttacaggaaagataaaagaccttgtttcttctctgt

SEQ ID NO: 152279 - DNA, 184 bp, Arabidopsis thaliana landsberg
aatctctggggggctttgttgatactaggaagcgccattggcaaagctgcaaagcataagattttcaagaaatacattgagattgaactccacttgggaaacatagatagatgtagaaagctgtatgcgcggtatcttgaatggtctcctgagagttgctatgcttggaccaagtttgctgagt

SEQ ID NO: 152280 - DNA, 362 bp, Arabidopsis thaliana landsberg
acctgtaagaaggcattggccaattcttcctcaaacaaatatcattcaacgtttgtctcgtaaacggctgatgcccattcttcttgttcccattctcattctcgccttgatcctctcccgcattaccgttgttgatatgcttctcctttgattctgctatttctttctctttcaaagctgcaagtgcgttcctcgcagctagcttttgagccattttcttctgcgggttttgcgctactccaacttgaacaccgtcgatgaaaacttccacagtcgctgtgttaccactcctactcgctttgtattctaacccttctgcttgttgctggcaccgctcttgtagctctcgcaccggatgcatt

SEQ ID NO: 152281 - DNA, 430 bp, Arabidopsis thaliana landsberg
tttacttagttggttcacttcagcacatgatcctcgtccctctttctttctctctctctcaatcacaagtttcagttacacagctgaaccaaagtacctcccattctgatctaatcagaacactgttttgtctgtgtaacaaaaacaaacgatcctgtttttatggaaaaattaatgaaacagtgacgattcttctacacttctttataatgacaaacatttcatagtaccaaaatacacaaataccttttctttattcttctcctttctctgtttctttatcattcatggctccaaattcagtagcagtgacaatggagaagccagacaacttctctttactagagatcaacggctcagatccatcctcattccccgacaaacgtaaatccatcagtccaaaacaattctcatggttcctccttctcaa

SEQ ID NO: 152282 - DNA, 265 bp, Arabidopsis thaliana landsberg
taaaggttataacttctcaaagtcaaaagatattaaacctattatagccatgaatgtaagttcacttacttctccaatgtgaagatcactcaggccaaaaggatcaccgtgtgttgtaaaattcctatgaacatcccacttctcttaaaactctacaagagaaccccaatcaaaataaaaggaaaaaaaacaaaaaaaaaacgtgtcaagaactcataaagattgatgagattcaataagcaacgcattgagcatgacatgatca

SEQ ID NO: 152283 - DNA, 377 bp, Arabidopsis thaliana landsberg
attgaatggaccgaaggaacccagctggcggaagttgatgagtttgagtacaagttgaaagagttagaaggtatttgcaacccaatcatctcaaagatgtatcagggtggtgctgctgctgtaggtatgccgacagatggtgatttcagtagctcaggtgctgctggaggtcccaagatcgaagaggtggattagagcgtgtttagtgtgttaagccgaaagagtggctttggaccattagcgagtcttttctttgtattgtgtcaaatagtgttgtgtactcataggtgttttgctagtgaccgatagttgtatgctttacatatttcagatgtttcagttgtttcgagtaataaagtgatatacttttttctcaa

SEQ ID NO: 152284 - DNA, 473 bp, Arabidopsis thaliana landsberg
aaattatatacccaacatattctttgtatgtatattttttaacataagtagtgagcattaatgttggcgacgaaaattacattgttaggtaggggccataatgatatggaagtgatcttctgcttaataaattgtagatataaagtccatgaccagggcttttcattgcgaaataaattcctctccaatataaatctagttttagatttttgtttaccatttttttatttgaatttccatcaaccgaaagagcttttctttgggttagatttatttcttttttcatgctctttcaaccggcaaagtaacgtctctagtgtctttgtctacttcagttaacagtcttctactctctctctttcttttatcttttctattggagttagaacctcttgccttgaggaacaaagtgttgagacataaattaagagatgcaatttgtaagaagttatacacacaaaagataatagtcg

SEQ ID NO: 152285 - DNA, 504 bp, Arabidopsis thaliana landsberg
caaatacgtgcatagcaagtgcatccatatcagcccttaaagcaacaaaaggagcatgaccagttccaacatacccaacaacaccagtaacagcaactgggtacttataagaaacacccatcttctccaactctgctctaacaagcttagatgtctctacttcctcataacctaactctggattctcatggattctccttctgattccaaccatccaatcgaaaaaatcattccttttagccaaagtaagaaactttgaaggtatttgagataacccattagaggaacatgaaatcagagtcggattaagcaagtgaaggatcaaaacaaaagaaacccatttgaagaaactcatgacttatctcggattcgattgattgatacttgaatcaatcgaatcgtgtagagaaaaagaagagatcgaagaagttaagagaggtgtgcgtgatgatgaagcaggggtacaagaagcaaaaaagtggtatttaaatcccaagtagccaa

SEQ ID NO: 152286 - DNA, 183 bp, Arabidopsis thaliana landsberg
ttattattatggcttcataacttactcataactttttgattttgattaaaaagaacattcagattttaaaggacattaatgttagtattatgatcaaaaaagaagggtttacataaatggatttgatacaacaaaatttcagcatagctgcttctcttcatttcaagagtcttctactgtttt

SEQ ID NO: 152287 - DNA, 133 bp, Arabidopsis thaliana landsberg
gcaacatagaaagttataaggtcaacatcttatattgattggggtgcgtttgttaatttgttttgtatttgtacatcttttcattgaaaggctttctcttagctttatgaattggtaagtacaataatacata

SEQ ID NO: 152288 - DNA, 335 bp, Arabidopsis thaliana landsberg
cattaataaccaaacgattgaagaagcatgaaagtcaatacaagtgaaagtttggagtagctttatagagccaaaaaaaaaaacaattgagaataatatccgataaggtagatgataaaactcatcttcctttgttttacctaagctcttgcttctctttctaatcaatcaatcgttggcaactccgtctgattttgattctgctctgacatacgtgagactacgagcattgttgggagctacattgttgttgtttcctgtgtcagctgaatcacgcttccattgcatactcctgcctccacctcaaacaaaagaacgacccctaactgcaccac

SEQ ID NO: 152289 - DNA, 213 bp, Arabidopsis thaliana landsberg
ggcggagttgctagagagagggtttattttgaatactgtggggaatcggttgttctacgcggctttgccgttgatgctttggatatttggaccggtgcttgtgtttttgtgctcggtcgtgatggttcctctactttacaacctcgatttcttcttcttcggtaaagaaagaagaaaacttgatcaaaagtctagttttggatctgtgtaaaa

SEQ ID NO: 152290 - DNA, 270 bp, Arabidopsis thaliana landsberg
ttggatccagctggtacaggctcattatacaatgaaggagaagcagatattgtggttaatcacgtcatttctttgatatacgcaggtgagccatctattttcagttgaatgaccgggatataacacaaaaaatttaccggagcttgaagaatctaaacttcatgcatattaattgtgttcctgaatataagctcgataccctaataaaaaacttgttggacatgattgtaggtgttagtccaatggctattgctgttcaatccccatatg

SEQ ID NO: 152291 - DNA, 825 bp, Arabidopsis thaliana landsberg
tccgttgaaagttgtggtaataagcttcatcttcatcaatcatcatcacttgtttctttctcacacagatccttccttttctccttcatcttccccttcttccttttccctcatggcccaggaagacatccgatctgcacccttttagttcgattctcacaattaatatatagggtttgcgaggaccccccctctctattcaaaaaaagagagcagattttctctataatcccctttggtcagtttcttctctacctttttttcccctttgtattccagaggaatcgagtgatgagtttatagaattatcgcattttgaagtaatttgggtccttttgtagagcttgattgacatttctggagacatttgtatgtttcagagctctttttttgttgctgttgttgttctagcaagttgattgcgaaattgtcaacattctgggaatacgtcaattgtttttttagtattgcggtcatttagtctggaaccacttttgattccgcagtttgacgatctttcatacttttaggtttctgtaccaatttgattgtcgaacattgtctttctgttatgatggtgaattttagaaagtatttcaattcatgttggagaatttgtataggcagtctgattctgcaacacatttcacggtagcagtgttatagcaatagttcttcagtgtcggtcttgtttgattctttgggatttgagcttcaaatttcatttgtgaatctgattctgtatgtgacttacaggtttcaagtggtgttaatggatcgtgtagctgcttttataatgacctctagcacgacaggagatcgaag

SEQ ID NO: 152292 - DNA, 1295 bp, Arabidopsis thaliana landsberg
taagaagtgaaaatcagatcgctggcggagaagcggcgatggatcgacgtcggagaggctaatgttaccgccgtggaaggattgcgaaacatcttccactgagaaaggaatgctgaaacatgcattgagagtaattagggagagaaactgagaagaaagcgagaattttgttttttgcgtaccttgaatcgacgtctagcaagaaagaagggtaagtcatgttcgctgaatcttccgtcattagtttcctcatctgattgatcacctattatcggcacaaatcgttggatcatgagcccaatcttagttttgtgtaatttggatacaatcctggttcatggtgtttgaagagaatttctggagttagttaggttgatccattacttacctcgggggagagtccttgagttccgtatttgtcgtcccaaaacatagtcccgattcgatatacttgtggaatgcttagtacctgagcaacaaatcaacaaatcaggggacagtgactggaagtagaaatgtaggatggtttagttatgccatcttgtcattctctagatgcttttactttcataagatcgttcacccgtttgctcatgtatccaactgtatagtgtttcaggagtaaccactaatagataattgtgtcatattaagatccttctatatgctctgcagaaatttttggtttaaggtctttaccgggcatatctcttttgcgatttcgtccaatgatttctgtgtcttttgatgtgagacctgtagagtgatagtgtatatcaaatatcgaattttgttcactagttttgtactttaaccaacagatatggttcgatgctataccagaaacatcactgcttgccttatgtgttgaagttcatcccatggtgatcgtgttgcctgtaggagacaaaaaagaacagaattatgtaagttaatctcttttgtcttatttttcatctttgcatgatttggttattaatgctttatagcctacctcgtcatctgcctttaggcaccattgctctaattcatgcaagcccatttttaggtattctccattgctaactgaacaacactctcggcgaagcaacaaactgccagaagataaactttacaagtcaagctacgtcataaccaaacataggtacttgtgtcctatgcgatatatttttgtacctattaaagagctgcacattgatgtacgagaaaacctgatggaagagttttcttgtgatcatagatgggacctggagatcattaaggctcagtcaagaaacaggaaaagacaaatttaa

SEQ ID NO: 152293 - DNA, 211 bp, Arabidopsis thaliana landsberg
ttatttttcttatgtatctcaaaagatctgtaacactgttttattacaaaacgtaaggtaaaatttggttttacattaagaagacgacaaaaaaaaaccagaattttaagaaaattttgacaatatataaagcaaatgccaaaaaaatatggggttctacaatccatcatctaatggctcatccgcgtcgtgcaagttgttcaatggagtg

SEQ ID NO: 152294 - DNA, 1023 bp, Arabidopsis thaliana landsberg
aaaaatatcaaggataaggtggttctcatcacaggtacaacaggcacaggcaagtcacgcctctcagtcgatcttgccacccgtttttttcccgccgagatcataaactcggacaaaatgcaaatctacaagggattcgagattgtcacaaatctaatcccactgcatgagcaaggaggagtcccgcaccatcttctaggtcagttccacccacaagacggtgaactcacccctgcagagttccgttctttggcgacactgtccatctctaaactagtttctagcaagaaactcccgattgtagttggtggatccaactccttcaatcacgctctactcgccgagcgttttgacccggatattgatccattctctcccggatcgagtctttcaacgatctgctctgacctaaggtacaaatgttgcatcttatgggttgatgttttagagccggttctgttccaacacttgtgcaatcgtgtcgaccaaatgatcgagtcgggattggtcgagcagcttgccgaattgtacgaccctgttgtagattcgggtcgacgactaggggttcggaagactataggagtagaggagttcgaccgatactttagagtataccctaaggagatggacaagggaatttgggacttagcgagaaaggcggcgtacgaggaggcagtgaaggggatgaaagagaggacatgtcggttggtgaagaagcagaaagagaagatcatgaagctgataagaggtggttgggagattaagaggcttgacgctacggcggcaattatggctgagctgaatcaaagtacggcaaagggagaaggaaagaatgggagagagatttgggaaaaacacattgtggatgaaagtgtcgagattgtcaagaagtttttgttggaagtttagtctgtttttcccagttatacaacaacaaatgtacgtgtgtgtgtttgtcttttaaatcatgtttgatgtctagatttgagaataaaagtcatacaagagcatatcttcctcctg

SEQ ID NO: 152295 - DNA, 370 bp, Arabidopsis thaliana landsberg
gattgtcacgagtgtttacacgacaaccttgacaaactggcttccaaatcatgaaaagttggttaatgtcatcatcagttacatcattagcctcgtgaattttcctgcaaaaagaacacattttttaaacaaaaagatgctagctttgtgaaaagctaatattcaagaaggtgggtttttgtttatcgtaccggagaatctgagaagaagaatcaacagcgtctggtctttgtctcttgtttttgtttcgggtgttaggtctactcattgtgtcaccaccaccagaaatttccccagtaacaatcgaaaaccctagaaataacgaaaacacagcaacattgttaacacaattttgattccgattaacgaa

SEQ ID NO: 152296 - DNA, 311 bp, Arabidopsis thaliana landsberg
tggtaactaatcaattcaaactttattcaataataatacattggattgttacatgtgacatgtgcatataaataaatttaacaatgtaatagtgatgacaaacttttacaagacctatatatctttaagaacaagtactagaccgttatgtaagctagctatattatcttttaattccgaagtgtatgtaatataaagggaatgtaatccaatttcaaccaataaattaaaattatttttccttagtgacctttatcccatattttttctttaagcatagctgcacatcccataggcgcacgatctccctt

SEQ ID NO: 152297 - DNA, 274 bp, Arabidopsis thaliana landsberg
aagactccaagattaggagtagagggaccagtgtatcaagttgatgaggagagaggacacactcaggtttcaaacagaaccaacaccatctcaggaaatttacagcgcttgctaccaccatcgtgctcagtctccgatcaggtggctaatgtgaaacagggcattgtagatagtctgaacactgtgagacaatgtcggactgagcttgagacaagtgaacaaaatctgcaagcctctttgctagcaattgacgccttaggtttgttctagaatc

SEQ ID NO: 152298 - DNA, 85 bp, Arabidopsis thaliana landsberg
gacaacccaagagaaggtcatcaacatatccccaatcgccgacttcaacacacccatcatcttcgtcttcgtcttcttctctttg

SEQ ID NO: 152299 - DNA, 218 bp, Arabidopsis thaliana landsberg
aaaactctgactaacattcttcttcactgatctcccatctttctcgcttcgataataataaacatggatctcaccgacgtaatcatatgcttgttcgctctctatttcatcaacctatggtggcgccggtacttttccgccggaagcagccagtgtagcttgaacattcaccggggccaaaaggatggccactagtcgggaccgtctccaagccatat

SEQ ID NO: 152300 - DNA, 450 bp, Arabidopsis thaliana landsberg
ctgtcccgctccatcgcacccgctttgcttaccacatccatcattcattcatttcctttctttctttcttcttcttccgtttcttttgcctctttcttttgtcttcttccttctatttttttgtggctttaaatttattgggttttgttcttcttcttcttctatagccgtttcatcttcacaatagcatcttcttctttttttccctgtcaagatcctgaatcatcggtttgtctctctcgatttcttaacctcttttttttctttctacaaaaataataattatgggctatataaaaaagtatttctttcttttagttgatgatgatttttgttttcctaatatatatatgcaggatctagaaggaaactagagtttgtgaaatcagattaaatcttgtgagaaatctctgaaaaaggtataatttttattttcctcttcttcttctt

SEQ ID NO: 152301 - DNA, 358 bp, Arabidopsis thaliana landsberg
catatgtaggaaaaatatatatttattttcctaaatatataggacgactcattttcgattacttttaatattattttttgttaagattacttttagtcatttgggcaacatatgcataatcaaatcttgtaagaccactttagagatctgggctttgaggaagacaacaatgagaaagcttctttttctaatgtctatgtctttgaaatgttacaaggagcaattaaaatagtgggtaaaaagtttcattacatcagtggggctgtgtgttcaatgttagctactctgacacggctcatggtagatttattgaatagttgaagagagcacaccaattcttattggacatatttgacag

SEQ ID NO: 152302 - DNA, 65 bp, Arabidopsis thaliana landsberg
gtcggaaagtgatatccttttttttgtttgtaaatattttgttttatgatttcgttaatctaatc

SEQ ID NO: 152303 - DNA, 523 bp, Arabidopsis thaliana landsberg
aagagtttgatggctgaagttaagggaaagaactttgttgatcacttgaacaacaatgagcctacaccgggaagtgggattaaacgaggatttcttttcggaaactcgatatgtggcgaaggaagcacctctcaagattgcaatgttggcaaggacaacaaggtgttagaggttagacctgtcaaggttaggagaacaatgattgatcttcaacttcccgcagatgagtatctccatacagagggtgataatacgacttgtcctccttatgagcagtcaaaagaagttggtgaaaacatcttctttgaatctcatcggaacgattcttctggatcttctttgcttatgaagaactcaaatggatttactgacttgaacgagccagtccaatgccaagattcagtacctgtttcttcttcttccagggacttatattctctttatggagcaaacatttcacacgtgcaaggccagtgggtggaaaaaaatactagtcaaaatggatggatggttctagaagcaa

SEQ ID NO: 152304 - DNA, 137 bp, Arabidopsis thaliana landsberg
aaaagcaccaatttcaatcctatttttttctcttggtttccggcaagatttgggaaaattttgtgttctgaattggtggtttgaatatcaactatggaacaacggaagaaaggttgtaagatcaggaagagaggtgg

SEQ ID NO: 152305 - DNA, 319 bp, Arabidopsis thaliana landsberg
tctggatctaaaaaaataacaccagagagacccagcattagaaagtatgatgtgccaaggtcacgtgtcaaaggagaggatcatgttcaattttggttctcatctgttgattcatgatcggtcagataaatgtttgttgtggtatttatgtctcttgtcggaagcaattctgatggggtaccaaggcaacagagaagagaagaaagctttaattgaaatgttcatatgccttactaatccccagaattaaatgtggtggagaaaccaaattcattaagtatgacaaacagagaccacattaaacagttacttgacgtct

SEQ ID NO: 152306 - DNA, 355 bp, Arabidopsis thaliana landsberg
gaaattttgcagtgaagttgatgaatcagaagatgagtttcatcatggaagtggaaaaagctgtatgtgcacaatcatgtgacccattggaagttaaaaattgtttgcagacaaagggcttttcatatagttgatgtagctgctctcttatcatgtgcacctttgttattatatatagaaagagagagggagaaggatttgcaaaagattggataagaagaagaggaacttttggatgtgtacttttgtagccacttgatttgtcaattttgtgctgtattttagattattctttgtattacatctctatgctactctgtcctgtaatgataaaatccacaccacaacttttgga

SEQ ID NO: 152307 - DNA, 115 bp, Arabidopsis thaliana landsberg
agacatttttggcatctgatcttagctcatcaagttgtgattttttaaatagtttcctttgcattgaatacaaactaaaactaaagctgaatcaaagtgacttttactatgttag

SEQ ID NO: 152308 - DNA, 246 bp, Arabidopsis thaliana landsberg
cacatatggctttcgatagaaacggtgtcaatagtagtattacatcacaccacagaaaaagggacgatctattacagcgtttcaaaattgtggtttctttgatattaagcttcagactgaacgtttctggtcttgagaccgaagagattcttaagcaaatccgcagtgtttggaggaatctttgctggtcgtggagccatgaagttgacaatcttctcatgaacatatatacctgttacggttttt

SEQ ID NO: 152309 - DNA, 149 bp, Arabidopsis thaliana landsberg
aacatcaaattatcgtttaaactccattattatcatacgctaattacacagttgtctctaacatagtttaccattatttataaattcaaaaaattagtagattacagaactacgcttgcgttattgtacattttaaactccttcctgac

SEQ ID NO: 152310 - DNA, 186 bp, Arabidopsis thaliana landsberg
attaccgtcaccggtgagattcctccaaaatcgggactttttctcaggacgtttgagatgcattcgcgctccgccttgctctaccgattcctccgcccggcgttgagatgcttctcctcgtcgagctcggctgtaacttccgtcactgtaacgcaatctcccaagagtcttgaggctcttcgagct

SEQ ID NO: 152311 - DNA, 387 bp, Arabidopsis thaliana landsberg
catcttcttcctttctctgactaagtttcctctacgcgttctctggtgatattcttctaaacgcgtctctgatttgtttgaatcgatcatcgttccttcttctggattttccattgatatttgatttttctagggtttgtttctaaattgcatcgatggctttttatgttcatgcgatttacttttccttctgttattctagattgttgttcgatgatttgatcgttcagtgatggatttgatggatcttatgttttcacggggcttctctatgctgctacgtcttcagggggtgttcttcttccttacgcgtctctgatttttgttttcccctctacgcctcttattcgtctcgtctcgcagtaaatttggaaaaaaattatgatc

SEQ ID NO: 152312 - DNA, 385 bp, Arabidopsis thaliana landsberg
aaatgataatataagcactacctctcacaactttgttggtgcccttgatggtataagagtccagctccttccttcccgtcttaattttggaggcgacaccaggtcgagttttcgccatggaagctagggtttttcgaaaactggttaagccggaataaaaaaaaagctaggttttttgttcccggaatgtataaggattggggcttctaagaagatcaggatgtgtagatcgatgggtagagaaaaaaggagaagaaaaggaaaatcccagtggggaagaagcgaagagaggaagacgaagagtaaatctggaaccctagattctctccaggtgaagaagatgagtcatttgcaaatttgggagttttactgttcacaaagccca

SEQ ID NO: 152313 - DNA, 96 bp, Arabidopsis thaliana landsberg
gtttcaggtgtcaaaactgcgcgattagtttctcagaaagccaaaggaatgcctcgcataaatgttcctttaacaaagatggtggaatcatctgct

SEQ ID NO: 152314 - DNA, 1143 bp, Arabidopsis thaliana landsberg
aaagtggatacaagttcgttgggttcaaaggaagtttgggctggtactacttactctgttgcagcttgtatgattcaagaagggcatagagaaaaagggtttcagacagcaagtggaatctacgaggctatttggtctgatcgttgtctcaggtataagaaacatagctcactttctgcttcattatacaaaacaaaagtttcaaaaatcttattttctgtgagtgcagttgctcgtttcaaacaccagaagcgtggaacatgaatgatgaatacagatctctgtgttatatgagacctcttgctatatgggctatacaatgggcattgacacgaacacaatcttttggagaagagaagcaaaagttagtggcaggagatgaagaagaagaaagtaatttgttgttaagacaacacaaagggttcaaagatgtggctcgttttgtgaaaatagtaccaacgagcaatgtacatagaagccgtctccaacacacgtacgagaccgttctcaagactctccgcttgtaagcacaggatgcaacaattatatacatcataagttattatttgtcttgtgtatcattagcgtttcttgttaagtgaggaacaaaatctaaaattctgatagtaagacgtcacaagtcacactattatctctggttttgggaagacaaatcttttgaagcatgaacaacgaaaataaatataatagcttaactatcagcaacagttcaacagcttaaggtcaacagcgattacaatgaagcattcaaggagaaagagtcagattaagatccaccttttcataagaactgtcttaccctccaactgcgtgagtgcagcaggtctagcaactttgcaacatttgatgattctcttaacgtggagttgcgtaaacctggcttgcatcgtattgagcatacgcggactggggtgattgggttttcactggtgcggtccctggagcagtcgcatacactgcagcttgagttgcaggctgttgctcatatcctgtttgagtaggtgctgcttgtgaataagcggcttggcttcctggttccgcaccatatcgttagttaggatcttgagagcttgtgttgtatccatagttatgggtctgagatataccataagcaggctgtga

SEQ ID NO: 152315 - DNA, 366 bp, Arabidopsis thaliana landsberg
ctctttctctttcttctctcaaaattcgatttttttgaattttcttctgcaaaccaaaatcgcagaagtcgttgtgtgtccgcgttgcatcgaaccccttgttcgattctctttcgtcatcctctcttatatcatcagcaccaacaacccttgtttcaaatttcttcatttccgccggatttataatcgcagattgattctgatctatatagatagggttattcaaggacagacctcggttgacttcaattgtcttcctgattcgatagataagatttagggttagcttgccgttgacgttgatataggggaatggagacggacaatgggaaggggttgatcctacctgcagcgtcaagtgttttc

SEQ ID NO: 152316 - DNA, 294 bp, Arabidopsis thaliana landsberg
gttaaacaatttattcaacacccccattactcatagtaaggtaaaatcattttttttttccttaaaactttagtcaaggtcataagatcgaatgtaattaaatcacatctcagcaacctcttaattttgtagatcaaacaacgacacattttactaaacgaaatattaatagactaccattttattatcttggttttaaacaaaatctgtctcaccgaacataagtctctaatttatttaaagttattagataaaagtcgaatcccatttatacattaacttaaaggttccatc

SEQ ID NO: 152317 - DNA, 72 bp, Arabidopsis thaliana landsberg
aaaaaatggctcctccctttgtattccctcaaattctacgagccctaaaagaagatccgggagataatcacc

SEQ ID NO: 152318 - DNA, 574 bp, Arabidopsis thaliana landsberg
tgcatccaatagaaagaaaaaaaaacagaggaagagaaaacaaacctttaactgaagaaagagtttgagtatggcagcgtcgaccataggtagaggttcatcggaggataagccggggaaaagaacatctccggtgactggcaagcccacaagattccccaactgaatcatcgataccgccggtatagcaacgtatgtaatcccggcgatgtcatggatctttatactcccgttgcaatttgcggtgttgcatgaactccaagaatcggtaaataaaggagtcgatatcattaccgaagcttgcaactcactcgtctcgaatcgacaatcgtccatgattggatatcgagtagagagttgcacaacgatgatgtttatgaagttgtaaatatattacaagcaaaaagaaattatctatgtatcttcttggcttgctcctatgtaatttcttggttttggtctttgctaagacgtcttcttcaaagtctcttactttaacatcataatttagtaaaattgtactggttttataaaataataataaagaaatgctgtgaaaggtaggtccattctc

SEQ ID NO: 152319 - DNA, 241 bp, Arabidopsis thaliana landsberg
cgccgtcttcttcaaacgccgattcaatctccgggaagtctccggcgacgagagcgtcgatatcttctagaaccaaacactttgctaacggaaaccgctcgattctccgagataactcgtcgattagctccgatccctttagattcctctgagaccgaatcgggtaatggcaaacccaaggtttcaaatttatgtgtggctttaagatatcggcgaggatttcgtctactaagtggaagag

SEQ ID NO: 152320 - DNA, 383 bp, Arabidopsis thaliana landsberg
ttttcctgcgactgtgatgatggtgaagtgagtttttttcttttctattattattacattttggaagagagtaaaagtaattaccggaaaaaaaaagaaaaaaaaaacagatctcaatctgtataatataacgccttcttgttttttgcctcttatcgatgaagctttacacaaatatacaagtcctgtggaaatttttagtataagaacgttcttgaatttgtgtattgtatttgtggtttttcgttaaacatattaacatcggacatggtttcgtgctttcgttccagtaaaatatatggatggttcgttggtagtacataaaaggatcgatcatagatgattcaagaatgctaataaacagaagtgatcataaaataatt

SEQ ID NO: 152321 - DNA, 395 bp, Arabidopsis thaliana landsberg
gttcctcgtgccactgctgctgcaactaagaggaaagctgttgatgcgaagcccaaggctaaggctagaccagccaaggcagccaaaacggccaaggttacatctccggctaagaaagctgttgctgccacgaagaaagttgctacggtggccacaaagaagaagactccggttaagaaggttgtgaagccaaagacggttaagtctccagcaaagagggcttcttctagggttaagaagtgaagttagggtttgtaggtagaagaatggttaacgatagtttagacttgtataattcaatcatctttatgcgactttgtttgcttttcttctttcagtgttcttgttattcacagttcctttggactaccccttaaatcatatatagatttcat

SEQ ID NO: 152322 - DNA, 294 bp, Arabidopsis thaliana landsberg
tcgcgagacaatcgtttattaagtataccggaatagggatacatcggttagagaagaaggagaaggagctacggtggtggcggcgacaccaagagccgttaggcattttgattagggtaaagaaagagagcttatgaaaaaaatgtctcaaaatgtcttttgttaatagtttcattcgtgtggcgagagttgttgtgtgtgtaagctcaaagtgtgtgtctgcgtttgtcaaatctttggtgtgtgactttatttgcctatggtatgggattttgtgatcatcaaatatgaaaa

SEQ ID NO: 152323 - DNA, 254 bp, Arabidopsis thaliana landsberg
acggttgagaaactgaggaagaagacgtaaacacgtttgaccataaggtaaacttggacttattatcactaggtccagaatctgaaactaaaggggatttatcatgcgtatcactcttgcttgatgaagaacattgttgaggaacaaatctatcacataaagccttcattacctagacatgaagcaccaactgcaacgtgtccttctcatagaagcaacctaaatcctgagaaccttatctgaaataataagca

SEQ ID NO: 152324 - DNA, 158 bp, Arabidopsis thaliana landsberg
gttggtatggcactagcaggacaagaagggatgttctagttctagaagactgtctagaactaacaaagtgggctctttttaaaattgagggcttaattagttatgagttataacaaataatatagagttataacctataatatgtatgcttattattg

SEQ ID NO: 152325 - DNA, 116 bp, Arabidopsis thaliana landsberg
aggtgatgtttgtagcacgagatcacagggtcgggatttttgcaaccaacgaatagaagctagcgaagagctttctatgactattgatatggaccagaccaagcaccagtgtgggc

SEQ ID NO: 152326 - DNA, 236 bp, Arabidopsis thaliana landsberg
gttttgagatttgggtacatctttttgccccctttacataccaactaagtacattcttttgtacgtcatgggtagattaaggtgtatttcttttcaagttcttgtttcgtttctgttgaatttataggttccttttcatgtcttcggtcaatgtaaatataatttctaagtgttagcggtcaatgttcccggtaatttggttctaaactataaactattacttattgtttgggact

SEQ ID NO: 152327 - DNA, 613 bp, Arabidopsis thaliana landsberg
  unsure (1)..(613): unsure at all n locations
ctcacaagcagcaagcttcttcgattttgctttgacaccaccaatcggtgttttcgaatctttcaggtttgtctcgatttcaatctagatcggagtcaagtaataaaagtgattaacctaagtattcccgctctctcgaaagagttgggatttatcagctgatcggaaatcggatttacgtttttgttaaagatgatggttacgtaatggacatagtctggattcatgctctagttgattctcnnnnnnnnnnnnnnnnnnnnnnnnnnntttgtttcaaaggatcacagaatttgatttaaaatttgacaaaattccatcaatttctcatattagggtttatatttcttctagtaactcgaacttgttggaactctgtatactctgtgctatgtagataaagtcttaacattttggtcaactttgtttgatctctaaactagtttgggctctctgttttaaagttttgtgctttcactattacacaggtctcatacaagactacagtctcaagaagcataatatcgtcgactctgttttgagtttctcaacagtggttgaagcttaaggaggttcttatgtgcgttttgatatcatgattgaggttaagcga

SEQ ID NO: 152328 - DNA, 459 bp, Arabidopsis thaliana landsberg
ttgaaacagcttatgttgtcaagctgcatagtgtagcaaagcttgctccttccggggctgtgagtctctctctgtctccagcattttctaatagcttaaagtgttctctttaaatacatttatgcaagtcttgtcgatctgaccatctcaggatttttggtttggtcttaaataggttttcacatttactcatccaaacttctcaacgaaaggggggagcaacgctataagaagcttcagttcagtctaccaagcgatgctggctcagctttggtgcatgggacctgcttttttctagcccttttttgtttgttaatgtcaattttacatctccatttccgtaatctgaaactgaatctactgcgatcataataggattcgctggctattttgattccgtcctttataaagatgttcatcttgggatcgagcctacaacagcaacaccaaacatgttca

SEQ ID NO: 152329 - DNA, 174 bp, Arabidopsis thaliana landsberg; identical to SEQ ID NO: 64134

SEQ ID NO: 152330 - DNA, 96 bp, Arabidopsis thaliana landsberg
agtgtcctagctatgtatgtatcatcttttctcggacattgacaaggattatatgatgtttttgtgtaaacggcttatgttttacacttctacttc

SEQ ID NO: 152331 - DNA, 2260 bp, Arabidopsis thaliana landsberg
tgaaatggtcatagaagagtgtagtagaaaggttggaatttgtgctcaaaatcggtcagagaagtcaaagtttgctacttttccagtctctagaatgatgtcaacaagatcactcatttccatggagtcaacttgaagaagagctttttcgatcaaatccttgaattcgattgatgggtatcctcggctgcgacgcccatggcgatttgaacgatgcagagttcagcaaacccttaccttcgattggtatctacgttgccgtagcttcactcatctgtggtctagccatggccgccgatcttatacacggcttccgacaccgcaaattctggtttccctgtaagttcttctctctcaacgccacttctctgactttcatcgctgtcggaatcaaactctctgtggatctcaacacttccatgccgagtcgtcaggatcagttagctaaactcagcagcaccgtctttgtatgtactgtgatgggtaattcgatgccttctctgggtattatggacaacaatgatctcctcatgaatcttatggctttagggattcttgtcatcactgatgttgttaacatctgtattcagttgggtactggtgcgatttatgttttctctgaggaacattttctggtcgtacttctcatgcttcttatgcttatgatcttgtgtttctcggccaccacagttcccactacgaaaagaatcttggagagtaagtacaataagaggtacgacgttgctatgaagtgtcctttggctacagagagaacagttgctaagaaaattcagcaagatttgtcaaagttttggatgatggctcatactagtagccctcaattcgtgatggctcgttctgtcacgtgcactgcttctggtttcttctgtctcctgagtgccattacgcttggtgaagctatggttaggagttactttttaagaccaaggtcacttgggttctgccatggagattctgattacaaatggtcaacttctctggttcttgtttgccagactactactgtagctatagggaccattgctcctgcgatcagatggttcacggctgtgaacttcaggtgtccgattagaggaaagaagtattatagagatgagtttagaatagagagttactggacacattggttctcagagaagaagcaacatcccttaagcctttggatcctcaaagaacgcagatacaggaagactgcacacaatgcaaaacgctggatattggatgtatgtattgtgatacagtatgtgattgtgtttggtagcaaaattatccgttacatctcggtatcctgtgtgggtaagatcttgttgtgctgtcatttcgccttaaggaccagtaatactatcacacacagtgagtcagaaaaatccgattcaaatccaagctcgagacaggacctagcgagttttgtcctgcaccttgaaggagaggacccgctggtggatgtgatggtgcggagcaaccgggaagcgacagatcattggatagagaagggcagaaagaaacaaccagtgaatctgatagagcttttggaagcaacaacacccatttcaaaaggatttgaagggattgcagagttcgacagcaacaaggtggcttctctggcccacggagaaccgcccaattgttgggctctcccgcttgtaacactcacaagtattgctgttgcacttcccgacatcaagccctcctccctcaagaagttactcaatgctgtcaacgaggcactggaatatgtcaacaagtttgaatgcgtcctggataccggaggagagtcagttaacctcaggaaagctgctgaggtcgtttggctaggtgttgatctctatcacaagtggtttgatgtggatcttcggaaactatcaaagcaacaaagaaatccagaagaaacccttcgggagctgatggaaatcgcgaagaaagagttctcagagtcatggcagatgaacctgatggtatgcatgaagcacaagccctctcactggcccatcaagactctagcagccaactccatgtaccgaatctgtcaaacaattctactaacttacgaatcaagagactatggaacaggggaagctctgttgagaaagctggaaagcacaatatcagacatagtgtcaggttgcttttgcaacgtagcacaagtgatatccgtcaagtgtttggtgtcagctgtagaagtaagggaagaatcagtaagaggagcagctctgcatctgggaagaacagagaagattct

SEQ ID NO: 152332 - DNA, 546 bp, Arabidopsis thaliana landsberg
gtctctcctccacgcatcgacgttacgccaccatctaatctctttaaacctccgtcagctggtttatctcgccggcctcgtttacttcaaacaaggtaaggtctttcatctttgttaaggttttaggaactgaaactgttattggttttgaattggaatgaatactcaggagaactagaatagttagccaatccatagcaactctataatttgtatgtttctgttcacttttcaagaaaaagttcataatttttttgattcagggtttagggtttaatataccactttctaccaatgcaaagcttgtaactttgaggtatacatggctacttctgatcaacaccggtctcgccatcacgacgaaagctcttcaagacccaacaagaagaagaagttaagcagaaacccagaaacaaatctcctcttcaatctcaattcatgctccaagtccaaggacctctcagctgcattagcactttatgatgcagccatcacttccagtgaagtacgtctcagccagcaacattatcaaacgattctgtacct

SEQ ID NO: 152333 - DNA, 357 bp, Arabidopsis thaliana landsberg
gactaggttagcttgagagtctctgttgcggtggcacttagatttggttaacgaacttgttgtctagggttaatttgttgagcatgtcaatcacctgtaaactgaggaaacgaaactactcaattaccccatccttaggaattctttgtctgattgattttattgtttactctactgctgtgtactgcatcctgtcatatgttgcttagtttctgcaattctttactgttactcgacctggtactcgaccacccagttgtctggcaacagactgtgtagtcgagtatagctgtttcatatcctgtctgttactcgacctgtcactcgacctcacccagtgctctggcatcagcctgt

SEQ ID NO: 152334 - DNA, 65 bp, Arabidopsis thaliana landsberg
ggaaggaaggaagagtgagagatgatggggatggcgaggaagataagcaaagagaatgttgtaga

SEQ ID NO: 152335 - DNA, 404 bp, Arabidopsis thaliana landsberg
atgttgcagggaaagaacttgaatttacccgtagagtactttcacttgatgccaaacattatcatgcttggtcacataggcaggtttgtgatctcaaaccttgtgaaagcattcattatagcatatctttttgtttgataatatggaaacaatctgcagtggacactacgggcattaggaggatgtcaaaataagctcgattcctgtcacgagctccttgaagctgatcgtctttaccaattccgcctgaaatcaggtaacttgatcgttcatacacatactaatctgtatctctaatctatcaattgccgattctgtcacctatttgtataacctcattcccttaataaaacagaggtattatgtcatcacccaatctcctttgttgggaggccgaaagccat

SEQ ID NO: 152336 - DNA, 1403 bp, Arabidopsis thaliana landsberg
tcaataaccaaaaagcccatcattgggtaaatcttcacatcgggacatggacggcgaaggggaagggagcggaatacgcctgacgcaagagattcgccggcgggaaggtcaccggcggtagcttagaagtcgattacaagaccaaatccggtaccgattggagccactctttcctgaatcagaagccatggcatcctcttttttatcccaatcagcaccgcaaatggatcgccgagcagactcatgcccaacacgatcgaagagcggaagaggtggctcgcgaggtacttcatcgcacatcgtctccaatttcattgtgttattgattcaattcgtgttttccttactccttttttcgtggatttgcagtttgcgcaagagcaggaatttttcaagcaagcagctcttatctcgaagaaagaaagagagaaggttagtttttctgagtaagattagggtttatgttattcagatcttgttaggagttcagtttcgaggataactttgttcacaagtgccctaatgcatcagattaggtttctgtagtctggtgatgatagttttgaattcttaggctgaattgtaatatccacttgttgctgactcttaccaatcagaatccatttgagctatgtcttaactcttttgatccttagttagatgtcaaaacctatacaattattgaaatttggtgaaactagtgattttacttagttttgtgttacatgatgttgattcctgagattaatgcgcagatcgaaacgatgaaagctgtgagctttatgtatgttcgtccacctggctatgatcctgaaagtgccaaagcagcagaatacaaggatgagaaacacaagggtcagggttcttcaactcaggatccagtggcggacgacaatgttggttctaggtatgttgacagaaacagatatttggtttgacaaattattgctaggacgatattaagttaaatccttgtggttgaaatttgacaatattctctctttgacgcaatgcagaccagaagaatcacaaggtgggggagaacgcacacaggaaaggaagaaaccacgacccaaagatgtgtttggtcgtgctcttcctactgaagaagaatttgaggttcttaaaaatgcaccaaggtatgccatattcttttttactctttcaaatatgctaattgttaagtgctccagtgtcattgtgaaattttgcaacatgcaaatgaaaattttctcatcacatactatgattggaattgtgcaggatggagactggtattcctgggagagtaaagccatttgcagttgaagtgcgtaatgtgaaatgtctgagatgtggaaactttgggcaccaaagcggtgatcgtgactgcccattaaaggatgcagtaatgccaaatgaag

SEQ ID NO: 152337 - DNA, 214 bp, Arabidopsis thaliana landsberg
cgctgacagtgctttctcacacactaatcgccattgttctgcattgccgacactgattcgttcgattccagcattttgctcttccgcagcgatgcctcgtcgatctggagattgcatgagatgtctggtgattttcgcggttgtatcagctttagttgtgtgtggacctgctctttattggaaattcaacaagggtttcgttggatccacaggt

SEQ ID NO: 152338 - DNA, 126 bp, Arabidopsis thaliana landsberg
ttctttgtacttctctatctttaatattatcgaagttaagttttatctttggcttttaaagttcagtatttggacatttgatacatcacatgagattaaataagatggttgacccaataaaaccat

SEQ ID NO: 152339 - DNA, 86 bp, Arabidopsis thaliana landsberg
tctctctctctctctctctctctctctctctctctctctctctctctctctctctctctctctctctctctctctctctctctccc

SEQ ID NO: 152340 - DNA, 256 bp, Arabidopsis thaliana landsberg
agaggatattcgggtttgaaggaactaaccagggaaaataaattgtgaccaatgttttgttgaggctttcctatctctgatttgatgagcctcaccatctttgcaaaccactactctatggtccccaatactcgctatagctagcttctctccgttcaccaccataaccgaagcggctgagccaccggttctctcttcctcaacgtacgctcttcaaatagtaaacttacactttctcataatcccgagctaaaat

SEQ ID NO: 152341 - DNA, 249 bp, Arabidopsis thaliana landsberg
cgtgacctttggactgattatcaccaccattgagagcagatgaagaaaccctaagacgatgccaactcctagaattgggtaatctgaaaaccctttttctacattccaattttatgggagatttatggcggggaggcgatacaggagagccacacaatttaacaatctccagccaagaagaagccatttttgttcctctaaacagtaccggaaagaatcatgatcaaggcgtcgccgatgaatatatag

SEQ ID NO: 152342 - DNA, 718 bp, Arabidopsis thaliana landsberg
gccaccagaggcatgggccgtgaaatcgcgattcacctccactctcttggtgcaagagtcaccatcaattatgtctcgagctcatcaaaagctgaactcttggtttcagaactaaacgactcatctcaaccaaagtcagcgatcgcagttaaagcagatgtgtcagacccggaccagatcaacaacttgtttgatcaaacagaacaagagttcggatctaaagttcacatcgtcgtgaactgtgcaggtgttttggatccaaagtatccatctttatccgagacaacagtagaagatttcgataacacattcacaataaacacaagagggtctttcttgtgttgcaaggaagcagctaaaagggttatgagaggaggtggtggaagaatcattatgatgtctacatcaatggttggtggtctcgccccgggttatggagtttacgcagcatcaaaggccgccgttgagacaatggtgaaagtgttggcgaaggagcttaagggaagccggataaccgcgaattgcgtggcgccagggccggttgcgacggagatgttttatgctggaaagagtgatgaaacggtgaagatgcttgcaggggcttgtcctatggggaggatcggtgagtcaaaggatataaccgagattgtagggtttttggccggtgatggtggtgaatggattaacggtcaagttattagagccaatggaggctttg

SEQ ID NO: 152343 - DNA, 151 bp, Arabidopsis thaliana landsberg
  unsure (1)..(151): unsure at all n locations
gaaaaaacaccggggcgttgagtttgntttcattatgtttgatttctctgtcattttttttaatgtgtctagcgagtctgcctttggcccaatggtttagtatctgcatgtatccacggatctctatttgtcgacgaatgttatttacaat

SEQ ID NO: 152344 - DNA, 129 bp, Arabidopsis thaliana landsberg
gtaaaatactgggagaaagacagagagagagagaagagtgattgcaatttaacaaaggagaaagaaaacaagtgttactggatttgccagcaacaggactgtgacacatgatttggccataggaaaaag

SEQ ID NO: 152345 - DNA, 952 bp, Arabidopsis thaliana landsberg
caaacactgtcttgttgtcctggtgggcaggaactataatggaggaaggaaaacacctgtgaacaggcaagttgcaatgaaagagcttcttaatgtggtacaatccttaaacatgaactgcaatctcaagatatgaatccagtcaccatttgaagttcttgtaatcttccagtagttacagcggttttatcaccattgttgcagattaagtcggtgaaaccggataaatttacaccgcggattgtggagaagaaggatgactacgttcatgtggaatatgaaagtccaatcttgggggtaagttaagtaagctttatgttgctctctcaacctccatacctcaatatattggacaagaccctttggtttttgacagttagtagacgatgttgaattcttgttcactcctgggaagaactcgaaagtggaatatcgatctgcatcccgtaaagggaacttcgactttgatgtcaatagaaagcgaataaaggtaacaactcggatactcaagtgatatatctctgttattgccactggctaatagataatatgctcacacttttcttcattttttacctatggaggcattgcgacaagagctagagaagaagggatgggtatcagagaacagcttctgaagaaaagagtttccagattctattcttgtctattaaatatcttaatgtgatctatgtaaaaacattgccataaatagtgagagaaacattgatttaagacaaggattcgagtgattctcatacataaggaaacagttttggagaaacttcaaacacgagtcatgattttaactgtaaaatatcaaacccagtagcatttcatacgagttctacaactcaggaagctcgatgttgaagtgaaataacaaaccgataaggttggctaaatgcactaaaggagcttagtctttcctcaggtccatgagttcggtctt

SEQ ID NO: 152346 - DNA, 546 bp, Arabidopsis thaliana landsberg
agtcgatcttgaatcttgataaacagatacatacacggatctaactttcctaatacataatgttacaagcaaccaaatctaacatcgattcatttattgtttttacagataatatgaaacagaggagttgtttaaacttcatagccagggttcacagtctgctgcacatctccatagctctctagctcagcaacatcctctaagctcccaagaaacagaggcaatctttggtgaagcttcacgggttgtatcgaaagtatccctctttttccatcagaggatttgccaccagcttgctccacgagaaaagccaaagggttaccttcatagactaaacgaagatggtctcttggattcatagccactccaccgtataagagagtcctgtgaagatcagctactagagaacaaatataacgggcagagtattttttcgggttttgacctttgccttgtctcactgtgtcaatgtacttccttaaaccttctggccaatcaaagtacctcgcatcgttcactgagtagatttgtcctattgttgatcat

SEQ ID NO: 152347 - DNA, 291 bp, Arabidopsis thaliana landsberg
aagaagtttaggttccttgatctctagaatgcaagtagtgcgtttacataatccatcaaaaactgcttaattaaactaatcttgatattcgagtaaaacgatgttctgctttaaactaaagaggtaaacacaaaggagaaacatcagaagtgaaatctacagttcgtccttggtgttctcttcttgttgctcaacgggttcggcttcaatgtttagaccaccagccaagtcatctgatttcgtctcagttgcctcactggtctctggttcctctgctgcctcgacttcctc

SEQ ID NO: 152348 - DNA, 195 bp, Arabidopsis thaliana landsberg
tccttctcacctaaatctttgaagatgatgtccacctctttcacaacttcagcatcgccatctgatgccatgtgcttcatcacattgagctgtcctttcaactgctcaacttctagctcaatcgcttgtttctgatctctctgtctttctagtcttatgattttctcatgaagctcctccttttgcctctgttag

SEQ ID NO: 152349 - DNA, 345 bp, Arabidopsis thaliana landsberg
acaaaagtctctttgttcaaacactcgtttacgcgtagccgaaataaattttccaaaaacccatatccgaaaaagtcgatatatttattgaatttttggaaccaaggagacgaagaatttacacggtttttgaagaagaagaagaagatgaagtataagcgtaagctaagtctctctgttgtcttcctctttgtcttctatctcgctgcggtgacttcagatctagagtctgaccggagagctttactcgctgttcgtatatgagatcgtggccgtcctttgctatggaacatgagtgcttcttctccttgtaattggctcggagtccactgcaatgggggtcgg

SEQ ID NO: 152350 - DNA, 348 bp, Arabidopsis thaliana landsberg
cactctaagcccaaagctctttggccagaatctagaaggaggttagtatataaaaataccaatctcttagtgctggattcttctagaatcttagttacatattattgcatgtagagatctaagaagagtttgttgttagagaggaattggttgctaattagtttggaattagatatcaaagagttaaagactatggtttatgtctatgcgtattaatatgcgttattaatagcagtataaacatgttgtttaatttctgataagaaactggtttatgcgtgtgtatgcagatcttcccatcgcaaggagaaagtcactgcaacgttttctcgagaagcgcaaggagag

SEQ ID NO: 152351 - DNA, 97 bp, Arabidopsis thaliana landsberg
tttttttttttttttttttttttttttttttttgtttttgttttgttttttttttttttttttttttttttttattttttttttttttttttttttt

SEQ ID NO: 152352 - DNA, 156 bp, Arabidopsis thaliana landsberg
atagctaaaaagctcatatttcgaattctgttcgaaatgatatataacttccagtctcctaacgaatttaacataaaacagaaagaaaagtcaaagaaaatttgttgtaacttatagtaacttacacaagtcttggccaaaagaaagtttgaagat

SEQ ID NO: 152353 - DNA, 194 bp, Arabidopsis thaliana landsberg
tgtctttcattttgaacttgttctctgcaatttctttcgccctcgtcgcctcgtctttgttgcactccatgcctgtcgtgtatccttatcattcaatttttctaatgaccaaagtctcaatgccgacgaaattctccgaatttgagcaatccccagcgtctgggctatgttttgcttcaaggatggctactttc

SEQ ID NO: 152354 - DNA, 114 bp, Arabidopsis thaliana landsberg
aaaacaaaagaagagagagagagagagacgaagaaacagagagattctctcgaaaatggccaccattagagtaccaaacgaagttccttcttcagctcaggattctgaaactct

SEQ ID NO: 152355 - DNA, 280 bp, Arabidopsis thaliana landsberg
atgtcatcttctagtgaacctctgtaacctaatttcagtaccggtcgctccagatccttgtcgttgacaatgcttgatctagaatgtggaataatggtcgatttcgctgagtaaccaatcgagttttgacggtcttctttttcttcaactatttcacactttccggcaaatgaacccataacattaaagctcagtcacacagcatcttagtaaccgcggaaatgcgagtaatctaaaccggtagatacatctttttatcccacacgcacctgaaattata

SEQ ID NO: 152356 - DNA, 288 bp, Arabidopsis thaliana landsberg
ctccatcttctacttctgcaatctgaagaaaaatcaaatgaagaagttagcgagaaaatggcggagaactcgtcgtgacgaagatgatgataagttcgtccttcctacttctgaagacgtcgattctcggcctattgatacgcaaggtttattttgtttctctcatcctctggaatttttggcagattttgaaaagcaagttcgtaatagtttattgctatcactgtcgttttacagagcaggaggagtacgttcggtatcttgaggaagctcatgctcagcaaagtc

SEQ ID NO: 152357 - DNA, 402 bp, Arabidopsis thaliana landsberg
tttgccattaattctgatgattttcgttttagccaaatggaaactttattgaagtttctaatacgaaattttgatttctacgtataggtaaaatggatttgtccggtcgcaccaacacgtcccgttacttcctggggtggaattgcaaccactgcttgtaagatatagttggctttaaacacttttttttgttaaagaacagactattaatattgtcttctaaaattattaattatatatatatttttaaattattaattattaacatttgtatttaaaatcattttgatgaattagggtgcgatgtcacaggaatttctgagaacatggaagatgatttggtttccataaactcaataactgcatttgtatttagccttttgcttgacgaaccacaaaatg

SEQ ID NO: 152358 - DNA, 397 bp, Arabidopsis thaliana landsberg
ctccaagtcgctcgcggctcaatcgcgcaaagatctgagctctccgatgcaaattccgcgacgggatcttttagagagcctggtcatatacagaagcttcaagactcaatgcacttgagcctacactgatgattctcgccagcttaatgacctatacaattttccaacccctatggcctttttcgctgattgaattcagtgggtttattcatatagtagtaatgtaaatggtatagagatgagcaaaagctatattatatattatattcattagaggggtcatagcttttttccttacaagagatttgtaagctggcttaatagaagttgttaagaagcctcactttatgtgaataaattattttgttagctaatcataaacaatcagaagtttcct

SEQ ID NO: 152359 - DNA, 230 bp, Arabidopsis thaliana landsberg
tttggagttgttctggctgctgatgctttgttcgttggggctcagcaactaggccattatattcaggagttaagaggccattaggatctctctttaaccacgctccaagtggctatatttctcttcaacaaaaaaaaattgaaaagttttggaaggtagagtagttgaaatagatcaaaaatacatctttgaatcctgaaattccaatggcaaacttaccctttgcttta

SEQ ID NO: 152360 - DNA, 388 bp, Arabidopsis thaliana landsberg
agtgtatggttttagtcttttagacaacaggcgccaagtcccaaacttgataaatcacacatttcacacaaaaaaacacacaaaagaactatcactctcgcatgtttggttagacatggtataggtcgtaggttgggtttagtttcagacttgggtcagagaatttagtctagttttatatcaaaagagcagcctcctacgcagcgagtcggacctgttaagaaaagccaactggcgtatggtctcgccgatgagatctttgaatatgaggcgttcgacgtcaagaactgcttctgacatctccacctgaaaatctcgccatcggtcctccgacaaatctcttccgaggaccccgcacacgtatcccacaaggtcatcttcctccgtg

SEQ ID NO: 152361 - DNA, 661 bp, Arabidopsis thaliana landsberg
cgaaaagcaaaagaattctcaaactcctgagaaaaattcgagctccgtgtgattaattaggtaacgtattgctcgatcttcagatgaatttggaattttgctttcttcaaagcttatacaattgtgcgagattttcgaagaaatgataaatttattgatgtttttgagtttcttcctgatctcgatgtgttcgaatgtaattagatttgagttgcgatattgtgagatctctgttgtttgaattttgaatttggatcttcctgatgtggttttgcttcttcaacgatggggtttatcgttgctttcccaatattttgctgagttcttaagcttactcgtaaagtgattatctgctaggtgttcttctgcaattgcttttgattcaatgtcctctttgatgtaaagtaatgcttaatcaattcatattttgcagtttgtgttggtaaacttcaatcagatgagtttgatgatgaaagtttagaagagtgtttttgcttccaaagcaaaataaaaaccaatggagcgttttgtgtacattaacgatgatgaagcttcaaaagagctttgttgtgataaccgtatatctaacagaaagtatacgttatggaattttcttccgaaaaacttgtgggagcaattcaggtaacgatgatccacttca

SEQ ID NO: 152362 - DNA, 91 bp, Arabidopsis thaliana landsberg
aaggaaaaagtatctcacagcttcacattcgtgttttattcactacaagatcaagccaggctgcctgaaaaatcacacaaacaaaacccag

SEQ ID NO: 152363 - DNA, 210 bp, Arabidopsis thaliana landsberg
caaagttcatataataagaaaaacagagagaaacacacagagagctagaggagagtgagtgtcatgggttgtgttcgctgcaaatcatcagatccatggcaaacatctgccaatgcctttgaatccgacgatgaatccggaatcaacgaagcctgggttgagatctccagccgcagatcatttgtcgccggcgaagagatagtcggaagg

SEQ ID NO: 152364 - DNA, 100 bp, Arabidopsis thaliana landsberg
caaaaaactttatctttccttcctttgaaatctcccggagaaaaactatagagattctccgtttcccgctttaagacagtgccccaattcgagcgacaca

SEQ ID NO: 152365 - DNA, 261 bp, Arabidopsis thaliana landsberg
attattattaccttgaatttatctctgctttggcagctcgtttagcttgttgtttctgtttcacttgtttgtaaaattcatcttctgatccaccatcattatcaaccatgtcattgttatcaccatcgttatcatcctcatcatctgatgcaaatgccccatttttattcctgccatctccctctgatgacttcacaccagctccagccaaaactctgagctcaaactttctacgccgttctccaatatcatctctttgcg

SEQ ID NO: 152366 - DNA, 114 bp, Arabidopsis thaliana landsberg
agtcaggattcgggtcaagcgagacgagctgactcaaggaggtatcaagcagttttatgtcaatgtagacaaggaggagtggaaactcgagacactatgcgatctctacgagac

SEQ ID NO: 152367 - DNA, 436 bp, Arabidopsis thaliana landsberg
ccccaaccttcaagcttagcaacagggcaaccacatctagatcggaaaagtaaaacagcacgaccattatgcggagccatccttctaagctcagccctcaaacactcgtaatcaggattgctctcactacctcctttccatggcaatcgatcgatctccttagtagctccagatttaacacattcctccgtctgcaattgcaaatcaaactccatcgctttcttcaaacctttacacttgggattccgacacttcctcgatctgggtccacaacaaaggtcgagaaacgcaattgaagcggcgaagaagacggcgaaggcgaagaagtaggaagcgggagggatcgaggagagatcttcatcgtcggagaagatcaaggaggagagggaagggaagtgagaggagaggagagaaaaggagtggaagagataggagg

SEQ ID NO: 152368 - DNA, 348 bp, Arabidopsis thaliana landsberg
cgtcctttttcttcttactgcagttgttttaagagaaacgttgcatagcgaagcgagaaagttgctaggagttgttactatgagcatattgcatcgaagcttttggatcatgtctgtgatatttgatttcctgagatgataatgagttatatgatggtactagattatctggtgaaagtagatgaataacacatgttaagatactctgtcttcttatgttattttggcaaatcatcagtgcattgccttttaagcagaagtgtgagatagtgatgagttgttattacattcgttattttgggtatggaacaatgagtgaaaatgtatctttggctctacaagttgtga

SEQ ID NO: 152369 - DNA, 334 bp, Arabidopsis thaliana landsberg
gagaaattacgccatagatcggagcgattttggagcatcgccgaagctaaagaggaattggaggtttctgtaaatcggaaaacacttgttgttctctctctcgattcatcccaaagcaagattcttggatctgcctcttaagatcgatcggtgcctttgtatcctcaggtatgtgttgatacttgatcggacctatctagagagattaataatcctcaattgcttccgttttttatcgtatcgaaatctgatttggtagatttggaattgggaatcgagtggtttaaaaatggaggaagataaagagaatgcaaagagagcagtgtctgtgact

SEQ ID NO: 152370 - DNA, 180 bp, Arabidopsis thaliana landsberg
gaagagaaactgacctccattgagccaaaggacgagaggacgacgagaagagttttgttgagcttcgaagaaccaatagaaaagtgccttttgcttctgttcaggccccagattcacgtaaccggcgtagtgtttgaagttaaccggtggttggccgggcaaaccggttacaaggtcatc

SEQ ID NO: 152371 - DNA, 146 bp, Arabidopsis thaliana landsberg
aacaaacacaatctcaaaacctacttttgaagagagctcgttgtagacttccaccagctgtggtgtaaaccgctgacacggtccacaccaagcagctgaaaaatacaatccaatcttcttccctatcaagctgtcaactttcacct

SEQ ID NO: 152372 - DNA, 603 bp, Arabidopsis thaliana landsberg; identical to SEQ ID NO: 71793

SEQ ID NO: 152373 - DNA, 82 bp, Arabidopsis thaliana landsberg
cttacattttcttcatgagtctctggtagacttggagctctagcttttccaagacaagatacacacccgacctcaagaacct

SEQ ID NO: 152374 - DNA, 323 bp, Arabidopsis thaliana landsberg
aggaagctttgaaaacgaagaagtttctgaatcaatggctcaagcagcgagattaagcctgagaatgcagaaagaactaaagcttctcctctccgatccacctcacggcgcttcgtttccacatctctcttccgccgccaatggctccggcgatttctccactttctccaccatcgatgctcgttagcttttcttcagatcctcttaattttcaaattcaaatctgttttgatttttattacttttttatttttgtccagaaatcgaaggtcctgaagatactgtatatgctaatggaatcttcaatgtgaaaattcaaatcc

SEQ ID NO: 152375 - DNA, 261 bp, Arabidopsis thaliana landsberg
cagagcaagtgatccaagctattgatcccaaaaaggttgaaatcatacagaggtatagttactaaccgtataaataaatttcacccagttgaattttagtaaaaccttactagtaagaggaaagtccaccagagtttgttgtagcgaagttgggaaaattctaaaacttttttcttgctaaccttatatactggccaggtacttccaatggttgattgaggaaagagactacactgacccgcagctgaatacatcgtaggc

SEQ ID NO: 152376 - DNA, 147 bp, Arabidopsis thaliana landsberg
tggcaatctaaatattgccaaaacaaaaaaatgtgtctcggattggccctaactacaacgtctgctcaaagacggaagatgacatcaaaatgtggttacaagccctatgcctacttcttctgcgagttcgttccatacaggcaggag

SEQ ID NO: 152377 - DNA, 263 bp, Arabidopsis thaliana landsberg
cctaaacaacttaactggtcaaaatttaatatcttcattggcattacttgtcagttgatatcttctatgccactgaagtgatcaatgaagtagttgtatggaaccaaagtgatcaattaaatagctgtttcaccaaaacaaaaagttatgttatgtcattttcaaatttttctttgaattcctaaaatacttgtaaaggttgtaggttaggttatttgaaattcaaaatgtaagtggattagtatgttaaaatcaaaaaaaaa

SEQ ID NO: 152378 - DNA, 429 bp, Arabidopsis thaliana landsberg
tctaacctttaaggcaagagaagatcctagtctaacagcaagaagcctggggcccccccagcgagaggaacacataagagcagcttcaaatccagatttcttatccaaaccgatatagaacagagcataaatcaaggcgaatataaacccaacgttaaatcgcaaaacgccgtcgagggtcaacgattgagaaaaccctaattgagaggggtcgaaaattggggtcgacgagtggaggagaagtaaaactgagaagaagattggccaaacgaagatgatgtggattagaatgttgatcggattgctatggtaagcaccgtagaaggcgaagtgtttctcgagatcgaacaatcccattatgcgactcatggataaaaaattcgttgaggaagaggtgtttttatgaggagaagatcggtggaaaatgga

SEQ ID NO: 152379 - DNA, 339 bp, Arabidopsis thaliana landsberg
ttgctgcaatgatgtttcctcaaagtcttcatcagcctttttcctctgtaaatgggtacattctggatttgacactttccttctttttcttcttctttgtattctgaatttttttgttcttttaagggagtgtagtttttcatttacatgcctaacgatgctaactagagagagggaacagagagagttggggaaaagtaaaaaaaaaagaatggctcaagtcatgtaaaactgttttagggattctgtgagatgatgaaaccgatatctaatttcaatttgtgagttcgcaaatgtgtgttacgttctctacccttttatgatcatggttgacacaat

SEQ ID NO: 152380 - DNA, 143 bp, Arabidopsis thaliana landsberg
aaaaaccaaattttataacgcagagacttggatatatgtaaaagaatggtataccgtttgcaactaagatacaaccatcatatacctatataaaaaaaacagagataatcatcgcagtatcattcacttttatacgtttaaag

SEQ ID NO: 152381 - DNA, 460 bp, Arabidopsis thaliana landsberg
tccaaatgttggaaccgagttgcatttctctcagtgacctttacagtgaggctctttaaattctctttatcggaccatcttttgaagctatagcagaaacattattacaaaagaactgaaaaagaatatatctatcatcttctgatctccggagtttaaataaacagaaaattcaaaccaaaagaaagctctgttcactatcgagaatcaatccctagggggcagaaggctcacgttcctccttagccatgaaccataataatcttagatcccagttgtaaccattatcttgagctgattcacggatcgatcgggtgatcaagattctatagttacttgcgggtatcaaccacttgacgaatatcacaacttttgatatattataatacctcggcttaagcacaatctgcaaccttcttcgtgaactcttcaaatatgttagggcaatcatcccaacttt

SEQ ID NO: 152382 - DNA, 390 bp, Arabidopsis thaliana landsberg
tttgcatcatttgcaggatagcatatgaaccttcgtatttggacattggtgatggtgtcatctacaaaatccccccaagttatgacaaactggaggcatcattaaacttaccgagcttttcagacattcatgtggaagaattttacttgaaaggaactctggatctgagatcattagcagaactgatggcaagtgataaaaggtctggagtaagaagccgtaatggaatgggtgagcctcgacctcaatatgaatctcttcaagctagaatgaaggccctgtcaccttcaaactccaccccaaattttagcctcaaggtgtcagaagctgcaatgaattctgccattccagaaggatctgctggaagtactgcacggacaattctgtctg

SEQ ID NO: 152383 - DNA, 69 bp, Arabidopsis thaliana landsberg
aatccttctctgcggctctattcctcccgatatcggttatgtttcaaggatgctggttcttgaacatgg

SEQ ID NO: 152384 - DNA, 289 bp, Arabidopsis thaliana landsberg
ctcattttataataattttctccatcttcttccttcctcttcaagcttatagaacctccaagaaccataaaactctctctgcaacaatctatactttcttcattacttttataaaaaatgggaagacattcttgttgttttaagcagaagctaagaaaaggcctttggtctcctgaagaagatgagaaacttctcaattacatcactagacatggtcatggctgttggagttctgtccctaaactcgcaggtttggtctctatgtgcgtctataatatatatagcttaa

SEQ ID NO: 152385 - DNA, 295 bp, Arabidopsis thaliana landsberg
cctcaacttcttcttcttctcctctcaagaaacaataactagcaatggcggttaagagatcttcaaagctaacacaaaccgcaatgctgaagcaaatcctcaagagatgctcgagcttggccaagaatcaatgctatgatgaggatggtctgcctgtagacgtaccaaagggtcatttcccggtctatgtaggcgaaaagaggagccggtacatcgtacccatatccttcttgactcatcctaagtacaagagctttgcttcaacaggcagaagaagagttcgggttcaatcatg

SEQ ID NO: 152386 - DNA, 430 bp, Arabidopsis thaliana landsberg
aaagcagatttgaggacatggcttacaagtcttgggtacagagtttggggagtgatgggtgaccaatggagtagctttgcaggctgtcctcttcccaggagaaccttcaagctccctaactccatctactatgtcgcctgatcaaatcttatttactaacaaaacaataagatcagagtttcattctgattcttgagtcttttttgtctctctccctcttttcatttctggtttatataaccaattcaaatgcttatgatccatgcatgaaccatgatcatctttgtgtttctttttcttctgtattaccattttgggcctttgtgaaattgattttgggcttttgttatataatctcctctttctctttctctacctgattggattcaagaacatagccagatttggtaaagtttataagatacaaaat

SEQ ID NO: 152387 - DNA, 122 bp, Arabidopsis thaliana landsberg
agagttaaatgccacgtggcggcatataagatgataataaccccaattattgttcaaaatacatcatagcccctaaagtttctagattttatgtttataaccctacactattgttctgcccc

SEQ ID NO: 152388 - DNA, 2096 bp, Arabidopsis thaliana landsberg
atgcccttatcctttgaaaggtttcaaggggagggggtgtttggtttatcttcttcttctttctattcagattctcagaaaatctggtccaatcaagacaaaaccgaagcaaaacaagaagatcttggttatgttgtcggtggttttttaccggagccgacgtctgttctcgacgctctaagaagtcctagtcctctcgcttcttattcttctaccaccaccacgctgtcttcctctcacggcggcggtggtaccaccgtcaccaacaccaccgtaaccgccggtgatgataacaataacaataaatgtagtcagatgggtttggatgatcttgacggtgttctctctgcttcttctcctggtcaagagcagagtatcttgagacttatcatggacccgggttctgccttcggtgttttcgacccgggtttcggattcgggtctggttccgggcctgtgtctgctccggtgagtgataattcgaatcttctgtgtaacttcccgtttcaagagattacgaatccagcagaagctttgatcaatccttcaaatcattgcctgttctataatcctccgttatctccaccggctaaacggtttaattccggatctcttcatcaacccgttttccctttatcggatccggatccgggtcacgacccggttcgtcgtcaacatcagtttcagtttccgttttatcacaacaaccagcaacaacaattcccgtcgtcttcttcttccacggcggtggctatggttccggttccgtcgccgggaatggccggcgatgaccagtcagtcatcatcgagcagctgttcaacgcggcggagctaatcggaaccaccggaaacaacaacggcgaccacaccgttctcgcgcaagggatattggcgcggctcaatcaccatctcaacactagtagtaaccacaagtctccgtttcaaagagcagcttctcacatcgctgaagctctcctctcactcatccacaacgaatcatcattatcgttaatcacgccggagaatctgattctccgaatcgcagcttacagagctttctcagaaacgtcaccgtttcttcaattcgtcaacttcacagcaaaccaaacgattctcgagtcctgcaacgaatcagggtttgatcggatccacattgtcgatttcgatatcggttacggaggtcaatgggcgtctctgattcaagagctcgccgggagttggaggaaacagatcttcatcccctccgtcgctaaagattaacagtctttcgcttctcctccaactgtctccgacgaaatcgagctccgattcactgaagaaaatctcagaagcttcgccggagaaacaggtgtctcgtttgaaatcgagctcttgaacatggagcttcttctaaacccaacttattggccactctctctacgttcatcggagaaagaagcaatcgctgtgaatctcccaatcagctccatggtctccggttatctcccattgatacttcgtttcctcaagcaaatctcaccaaacgtcgtcgtttgctcagacagaagctgcgaccgtaacaacgacgcgcctttccctaacggtgtgattaacgcgcttcagtactacacatctctgctcgagtctctcgactctgggaatctgaataatgcggaagctgctacgagtattgagaggttttgtgtgcaaccgtcgatacagaaactgttgacgaatcgttaccgttggatggagagatcaccgccgtggagaagcttatttgggcaatgtgggttttctcctgtgacgctgagtcagacggcggagacacaagcggagtatttgttgcagaggaatccaatgagagggtttcacgttgagaagagacagtcttcacttgtcttgtgttggcaaaggaaagaacttgttactgtctcagcttggaaatgttaagacgaagaagaaaccacaaatctctctctcgcttagctaatttctctgtttttctttgtcagattttaaaatgttgttatgttgttcaatgatgttcttagtttcgagactgttgtgttttaacattttaaggaagtcagaatatataatcaaaatctcctttt

SEQ ID NO: 152389 - DNA, 373 bp, Arabidopsis thaliana landsberg
aaagatcgatgtctgatagattcggagagcggattgagaaacggatgatggttcaagagaatgtagcgtctaaggattgttatgaagagttaaggaaagtgattagagagagttttcttaggcagaatcttgtttcacaaacaactactatagagactaagaaacgagttgttagaagtgattttgcttcctcttctggagctgtgtcgtcgtcaactagctcgagccaatcttcaatggtttctggctctactaagtcctctgcttcgtctgatgttccacagagagctccaagtttgattgctaggcttatgggtttggatgtatcaactcaagaaccgaggaaaagctcggtgaatcatatcgataagcc

SEQ ID NO: 152390 - DNA, 263 bp, Arabidopsis thaliana landsberg
gggcgttgtcatatttactgcgcggtaaaagctctagtggtgggagtaaaaatcagagcaatagtaattattatcactatgtgggcaaaagctacgcgagtcgcaaacgcgtttaaggctgtctcacgctttttttttcttatacgattttagggttaaaacttcaacaaaatatagagggcgtgtatatgatctgtgttagagtatgtatacgatagaatattcaacgattttgtatatggaagtgatactagtatatattg

SEQ ID NO: 152391 - DNA, 467 bp, Arabidopsis thaliana landsberg
atcagcggtggagcaagtagagcaagtggtgggatatgtgaagttgggatacccatttggcctaatggcctcgattctctttgggcgacaccacaaggacattctctcatcccctaaacccaaactcttcgtaatgggaacacaagacgggttcactagcgttacgcagctaaagaagaagctgaaatctgcagtcggacgcactgaaacacacctcattgaaggcgttagtcatttccagatggaaggacctgaatatgattctcaggtgaccgatattatatgtaaatttatttcatccctgtaaaataccacatgaaaagatagaccttaggggattattacatcctcgtcgaactacgttggtgtatgtccggaaattacttggataaatctttactagcacgataggagtttgatgtccctgtacactacgcactaaaagacttgttttcatatgttgagtt

SEQ ID NO: 152392 - DNA, 389 bp, Arabidopsis thaliana landsberg
agaaaacattgactaacgaactctaaatcgagttaatcgttgtcatatcaaattaagaaagaaaaataacaggaaaataaacaacaattttcttaccccatttgcttattgactctcttaaacaaacaaatcttaaaaagcaagagaagaggatatttattacaaacacatctctgcaacgagctcatccaagttcttgtaagagctcccaccttctttaatggcctccatagctttctccctcagcttcatcaacgtaactctctccggcaagtcctctctcgccgactcagccaaaatcctagcgagcttgtccgagtcaggaaccgagtctctgttctctccaactcgcactgcggctcttagtttatcaacgatgagcgtcgtgt

SEQ ID NO: 152393 - DNA, 98 bp, Arabidopsis thaliana landsberg
gtttcatccttcttgtataggaacaacaatagaggaagataaaaagccagataacttctactgcgaagagtgttccccacaacaggagaatttgcaca

SEQ ID NO: 152394 - DNA, 549 bp, Arabidopsis thaliana landsberg
acatagctcatttttactcagacaaaggaaaccaacttgtctcccttggctccaaggacattgcgggcatagccatgggcattgaaattgaatcgcatgagtttgacccagttggttcaaagcttgtttgggagcaagtcttaaagcctttgtatggtatgaccacagacaaaaccgttgttgaagaagaagaggctaagctagccaaggtcctcgatgtttacgaacacaggcttggtgagtccaagtatttggcttctgataaattcactttggtcgatcttcacactatccctgtgattcagtacttgcttggtacaccaactaagaaactctttgacgagcgtccacatgtcagtgcttgggtcgctgacatcacttccaggccttctgctaagaaggttctttaagtgactcacaaactgttaatcagaagattgaataaagtggcgatgacctcattgccctaattctcataaacaataaaagtggcgatgacctaattgccaaattctcatacactctgtgttttttttgtgtgtgtgtcct

SEQ ID NO: 152395 - DNA, 96 bp, Arabidopsis thaliana landsberg
  unsure (1)..(96): unsure at all n locations
tcaacttttgctttctggtatcttctctagttaaatacctcatatattcctnctaaagttgcttcattattctctaacccttagttctttaaactc

SEQ ID NO: 152396 - DNA, 238 bp, Arabidopsis thaliana landsberg
tttatgttgttttggatttgtgaaaataattaaaattagcaagcaaaacctaacaagtttgtttattacatgagcaaaacctctgttctagaaaaagggtttcgttaaaagcttcaagatacatcaacactacaaagtacaaacaaagttttcaaagagaaaaaaaaaatatcctctctctctctctgtgtgacactgctctctctctctatatcaatctcaccccagtggaattaat

SEQ ID NO: 152397 - DNA, 348 bp, Arabidopsis thaliana landsberg
gaaatttttgactcaaatgagttgatgggtcaaatgagttgatgagtcaattggtttgatgagtaaaatgagttgggttgtaatggttaatggtttcaatggtttacccaattaacccatcaagttttgtaaaaattgaattaaaccaactaaaatttctaaaccaatgccaatttaagtctaaccaacacatttaaaccaatttaataaaatcaatatttttccaaatttcttaaatatataagggatgaaattgaaaaaaaagtaaactcgtaatttttccaccaaaaaacataaacccgtgattttcccgccaaaaacgtaaagctgtgattttaccgccaaaaa

SEQ ID NO: 152398 - DNA, 554 bp, Arabidopsis thaliana landsberg
tgttcatatctttccagattttttgttcttcttttctatttcaagatcaaattataaatagactgagatttggtaggaaagaagacgcagctgaatccaaaagtcaaattcaataagctccaatgcattttgagcataagataactctcatgaactacaaagaaggtcgtgagccaattgctaactccagtacatgatataagagtaaactgtagtagtgtcgaaatgacaaaacttaaaatctcaaagcaactaaagcaatagaacatatgaaacttaaaatgaaaggagacaactaatcgaacaagccgaaaccaagatctccatcactctcttctgcgggttcgtcctacaaacaattaaacaacatagagagtatcaataagcaaacctagctaaaagatataacaatataatgtttttgtttctttaaatttgtaccttcttctcctccttagcaggggcagcagcagcagctcctccagcagcagcaggtgcggcagcagacactggggcaccgcctccaccaccaccagcaccaacattcatgataa

SEQ ID NO: 152399 - DNA, 419 bp, Arabidopsis thaliana landsberg
ggatggatggaaacctgatttagtttctcaactgttgaatacaagtgccaaggaaaatgaaaagataaccaacattgtaaatacagtggactcatttcgcatcatggttgggaaatgtctctaatagaccatgagaaggttttgatcatctacctctcttgggagtgtcttcttggctctctgtcaccataactatgactacttcctcctgggtttgtcttctgaccttcttccacattctcactgttgtcgtgtcgtctctttccttctcctaactgtttttcacaaggactttccatttttctcttccggctaggcattgttgaagaaacatcatctatcatttcaccttcctcggtattgaccaccaagttgtttccatcaagaatctcgccatgttccgtacccatggagctttt

SEQ ID NO: 152400 - DNA, 226 bp, Arabidopsis thaliana landsberg
ttcaatctctatcgtcaaatagaaataggtataaagaccctatttcattattcataaagaagatcaatattcttctagtgtacaaatcttcttctaaagtcttgatgtattgtaacctatttcaatattcataaagtatgaccaaaaaggaaacgaatcacataacatatgttgaacggcaaaatatgtggtctccgcagctaaaaacaaatatggagtacaaaag

SEQ ID NO: 152401 - DNA, 446 bp, Arabidopsis thaliana landsberg
acttatgttttgcttacagatatgttttcaagttcaatggtttcgattagaagatgtggcggttttagttaggagctctgaatctgggtttagagtttagtttcaaatggaatttgggtttgtaagataaaggtatatcgtaaattgattcaaaatctggaaattgtcattcaatcaaagctcattgggttgtgatgtttacaagttgtgtatctctgattctttttttgcaggagcttgagtttacactctctgcctttaggtgggattaagtcttctagtttcagaggtcaggttctgtatatttttccaactttgatgcaattctttacggtctcattgttgctgttcttccacaattagactcattcttgattagctaattgtattttttttttctctatatgacagggaccttcaaagtcaaatctcaaaggacaggagat

SEQ ID NO: 152402 - DNA, 952 bp, Arabidopsis thaliana landsberg
cgaagacgttaaccccatctcgttgaaagagagaagatgctaagatctcaaaacagagtataacaacaccttgacctcgttgaagaagcctttgagattgtctcggggatctgaaaaatgtcaatccttcaagtctctacttagtctctttcttcttctactcttctctccatatctcgcagaaaatctctctcatctaccaagtcatgccgtttagtttgatgttccgtcgagggtacttatttctaactctcaattttgattcatttcgatgaagtttttggtgagttaatatctgggtagttataaagttgtgaattttccacaaagtttctctctttttggcaaataggaaacgaattgggtgtttcgtgtagtacttgaattgattgctttggttaatctgttatggattcaatagatgggtacaatggtaatatgaagaaactttcagtttctcttgtaccaataatctctctggtagaaatttaggatttttcgagtttgttctgcagaagctatatgatcttctcgtgcttcttcgaagtaaagtatattgcttaattctagaattggaacgtttctatggggtttcatttgttttccctgaattgagtttgatcatggaatgtgcaaaagcttacgagtcttaatctttatgcttaatgggattcaaattctttgtttaggaactactgtaaccgagagaaaagtctcggcaaccagcgagccacttcttctgagagctgttaaaggtgaagttgttgatagacctccggtttggcttatgaggcaagctgggaggtacatgaaggcaagcttgcttccatttattttgtttactaactcacattttgcttgttcctatttctttcgaattcgtgtgacctgagtgtttattaatgtgatgaacagagttatcaaactctctgtgagaaagatccttctttca

SEQ ID NO: 152403 - DNA, 391 bp, Arabidopsis thaliana landsberg
gaccagtgttaagaagcaagggcaggtttcaaaacctggacttgaaggaggaaacaaaagggttagtagtgaaggtggttcgaagaaagatgatggcgatggtggtaataaggccaaagttagtaccttgactaatggtcattccaatgggaatcatcaaatggaagatgattctcaggagactaatgatcttgctaacgggaaagaaaacacgagttctaatgttgctgttgatttaagtaaacttcagaaacttagaagttaaggaatcagaagtagaggaggtgtaaggaaaactgacagtataggtaataagaggttccaagtagcggaaccagcccaaaaagcgaccaaagaaaaacacgggttggggatgatgccggctcccaaa

SEQ ID NO: 152404 - DNA, 381 bp, Arabidopsis thaliana landsberg
aggagaaaaaaagcttttattgctcctttctttaaagacgatcgagtagaaggtcaagcaacaaagaccgatcctcaaattggacggatgtagcaataatgatattcccattggcttgagataaacgaaatgttgattgcttataacccaagtcacaggcgtgtaaaaaggcctagtttttttttcttctctttctcaacttataatgtattgatcaccattattcaaaccctttttatcatttcacaagctgttgacttctccttcacgtcaattcgtatagctcaatccgaatttccctttgtaagattgtgaaaagcttcataaacagaatgaccaagatcgaaagacccattataatactcactataccattacaat

SEQ ID NO: 152405 - DNA, 176 bp, Arabidopsis thaliana landsberg
ggaacagtcatcacctgcttaggtaaattttatcatctcagataaatttcatctttgctcaggtttttgtgttttttcaacgatgaatgatgtctttagttgaaattagtgttttagccattgatactacacttcaagtcaaagtgtatcagactctgtaacatgctccatcaata

SEQ ID NO: 152406 - DNA, 926 bp, Arabidopsis thaliana landsberg
  unsure (1)..(926): unsure at all n locations
gttttgaattttgaaattgttcatttccttctctctaccattccccctctctcttcccaaatcccaaactcattcaacaacggccattgattctctctagagctgacaaatccagaatcggatctcaggagacttgaagctcgctcccacgatgaatcagtaccacatctacgaagctattggacatggcaaatgctcggtaattttgaatctgataacttttttcctttctcaagtgttttgtttagtaattttattgttcaaatcggttcgtagactgtgtataaaggaaggaagaagaagacgatcgagtattttgcctgcaagagtgtcgataagtcgcggaagaacaaggttcttcaagaggtaatttaatcaggcaagagtgtcgattaatgcttgcgttttgcttgaattgctttatttaaaggaattgacctcttgattatgacggattcactttagatttgtcaaatcgatgctctgaagtttctatttctgggtgatgtttgcgaattgatttttcaccatctgtggtttttgaagtgacatggatactgaaaatttggtaattatgcacttccttttcaggtcaggatccttcactcgctaaatcatccaaacgtactcaagttctatgcttggtaaaacttactagctattatctaacaacaattatttggctccatatatttgtttctaattgtcgccttcttgttgtggtcccaggtatgaaacttctgctcacatgtggttagttctggaatattgcgttggcggtgatctcaggacatnnnnnnnnnnnnnnnnnnnngtagtttggctatgtcttttgataatatatggtcacaggttttctgaaattcactcgttctgcaggactgtaaactgccagaagaatctatctatggtcttgcttatgatct

SEQ ID NO: 152407 - DNA, 419 bp, Arabidopsis thaliana landsberg
tttttcttcttcttaattgagaagcaacaaaaagaggaatagcgtaaattcaaaactcttctcatcatccaaaaccagaaactttgaccggaaaagaatcagagaagtaaagaaaaacagaacaaaattaaaacagaatttcttctctaatccattacgccggcgatttcggcggcgtaggagatgaaagttcgtaggaaacttggtggtggttgcggcggaaacgtcgttgtttcatggcggacgttcttttggttcgtgattctgtttgtcttctccttcgttctcttctccaccatgtttatttttaaggggaagtttcgtccggtggttcgttcgacgataagcttctcaacggctgttacggcaagggcggttttccgtaagtctatatcgtcttctccggcggttacgattcg

SEQ ID NO: 152408 - DNA, 185 bp, Arabidopsis thaliana landsberg
  unsure (1)..(185): unsure at all n locations
ttctttctccgatcgatctgctagacgatgacgatgagtttccttctataaaaccagtaactacgagatttgatttataacaatcatgaaactctggtcatgtttgaaaatccagcttcaaatagtcctcatcttcgtaaatctagtagcanatctgtcttcattgatcctggtaaatcccaatt

SEQ ID NO: 152409 - DNA, 92 bp, Arabidopsis thaliana landsberg
gaaaacgaccaagaggatcttgaattgcttctgtctcttgacgatagggttctcgaaactcctcctggttctccttctgctgcacccggtga

SEQ ID NO: 152410 - DNA, 251 bp, Arabidopsis thaliana landsberg
cctgattacattgactttgaatacttttagcaactgactatataaatgactaaaattcttcaaacaatttatgtataccctttttgttgttgtctttacatttctagagaattttatttgatcataactggttttattcgaccttttaattagagctcgatatgaagtgtataattttgagggaattttttttttataaatcatgatttcatttccactatttgtaaaaaaaaaaaatctataaagtaaaa

SEQ ID NO: 152411 - DNA, 516 bp, Arabidopsis thaliana landsberg
accagctatgctctccgtcgcaagacggctcggttcggcgacgccgtcgcttcaaaacggagcttccttactccggttcatgagaacggaggcaagtcagccaagacgacggaacaaatctccctctctatcgccactcgagaagaaagaggagaaatcagagtggtggatcgtcgacggagagatgcacgagatcggagatcacgtccctctgcgtgagcgtttcacaatcccgagagacaatatcccaaataagcgccggaaacagcttcgtgaacagttcatgcgacgaactcgtctcgttcttaaagaatcggtcagtgtcttttcacaatgtatgggttttgaggattgaatttgaatttgtagtttttgattactgactagactagagtagaaatattaggagcatgagccatggtgtaagaagtacatggagttgtataatgaggttagagaaaactgggagagactttattgggatgaaggttattttaagctaattgcgagagatca

SEQ ID NO: 152412 - DNA, 491 bp, Arabidopsis thaliana landsberg
tacttgctatagtgcagttcgtgtgattgctaatgatacaccagaagaattggctgaaagggttcttcatgaggtactactaaagaatatctttgaacattacatttcactgttcagaagatttcattttcttcttttcttttttccattttggactcaggaacacacactgtatgtcgaggtggtgggtgcgatttgcgaagagcggattaatatggagagaagacggtgtacctctcattcaaaacaaacaaaaccctgacgagtactattagattctcaacaaatgaagttattcattggatgttagattagtcacattttcaaaacaaagtgtttcaacataggttatgtagaagtttttttgcccaaagtatagattgagaaatgtttctgatgctaaattttgtttcggttgggtcagaatcatatggaaggagatgaaattcgagtcaggagacagcattttaatgcttgtgttgtataatacc

SEQ ID NO: 152413 - DNA, 102 bp, Arabidopsis thaliana landsberg
gctaagatacaaaaatacaactcaaatgaatatatctttccctccaatacgatcaaaagcttttataaacatatacaattggtacctagtcacatagccgca

SEQ ID NO: 152414 - DNA, 87 bp, Arabidopsis thaliana landsberg
gctggtttagtccttaattttgctgttgatgctaaggaacaacacaggaagtatgagcttgttcagagatggttggctctagacatg

SEQ ID NO: 152415 - DNA, 199 bp, Arabidopsis thaliana landsberg
  unsure (1)..(199): unsure at all n locations
ctatcaaaatttcatcaaagaataatatgaaacaataaataacacacattttccatggaatcgcacctacacacatatacttncaaatgtctntgatttgaggatgaagccaanaaaacaaaacacacgtatttcaaactatgtatatatatacctttctttcttcacccccaagcattatcanacgcagctgaagtaa

SEQ ID NO: 152416 - DNA, 640 bp, Arabidopsis thaliana landsberg
gctattgacagagcagctggagtggatggctcagacggttacttacactctcatcaaacatcgattgggagatcttttctaccgcttagtgtaagcaaatcttctactgatgaagctgttttctcggttagattttgtttagaaaagaaatcaagatctaaacttagagttttggttattttaggtttcagaagtttgaagatccagctgagggagaagatacacttgtagccaaattcaagaaactgtaataatgatctgacttctggagaacgcgccttggaagatggaactcgagaagcaagcagttttcagaaatcggaagtattcgagcatcgagcatcatcacagtggggtaatgatgagtccatgaatccaggttttgagcccgaaagaaataagtggttgttgtgatatatgttctcgcttcctctcttcatgatttcatttatttgttggtgtacagacaaaaggaatattaactcttacgacaaggttcaaaaaggttaaatattctcacaatttttttaaagaagttgagaaatgcagaagaaatattccaagaaaatgtgtctttgacattacagatttgcgatcacatcattcaaaagctaaagggactaaacataacagacatcca

SEQ ID NO: 152417 - DNA, 628 bp, Arabidopsis thaliana landsberg
tctcaaatgaccctttttttttacgattatacccttctccttcccagttctcttattttcctcctaacatttcttctctagatctgagaaatcaccatgggagtcgctgttcttcatcctcatgattctttaatcaatcatttctccacaaacacgtcccctcctctccgtcataaaaaaccgatcaccaatcgccgtcgccggagtccgtcacgtcaccaatcccagatctctcatcctcctccgtctcctcataaccacaccaatcatgtacgaattctgaagcgtggcgaagatatcaacgttaagataccgattgaaaaaccagatctgaaatctaatcgtcagatcggatcagatccgatgaaaatttcgactccgatcagaatttcaaatcggaaatccatgccggctttgttttacgctggtccagtcacatcaacatctccgccgccgagtgaagtccctttaccggctttcttcgctaataaaaccgtcgccggattcgaaccgaccgatgcaaccaacgatctgatcaaaatcctgcgattagatatcgcatgattcatttctttctccgatcatccaaatccaccttaaaccggtccgatctcgcattctctccgat

SEQ ID NO: 152418 - DNA, 256 bp, Arabidopsis thaliana landsberg
tcgactattaggcgttattattgtaagtaaaactttgttatattaaatgttatcaaaaatgtaacttgacacatcttttatacaaagcatcaaaactccagacacagataaagaaaagtaaactttaaacaagaaaactcaattcaacatccttcttacttaagctgtgtagagttttggatcggacaaccttggaacaggaatagccacaagtggagacttcaacttaagaacaagaccaaacttctcttcaacc

SEQ ID NO: 152419 - DNA, 432 bp, Arabidopsis thaliana landsberg
tcaatctctttccaatcctggcctttctcagccagaacttcctctctaggtcttgcgttcccaaaaggattagcacctttaggtttctccacaatgaccaagaccggactctccggcttcacgacctccacaacggccacgggaagtgtacgtggctgtaacaccaatcttgggcgtgaaccaccgctcggtggtggcgagccattagcagcactgctttcttctcttcttctcccccaggtatccgattcagaaccaccaccaccaccgtattgagaatcccggtttctagacaaggattcaaaacttccccttttctcaaatctgtcaccgccgccgccgttgctagaaacgaatctccggggctccgatggcttagcggagacccagctatcgacttcatcagccttagactgagactgagattcgaag

SEQ ID NO: 152420 - DNA, 321 bp, Arabidopsis thaliana landsberg
ggggagtttcgacatgttgcgattcagttgtagtggttttgatatctcaagttgttttattcatcttgctgaatggcatcctttggaataacgaagcttaccgggctttgaagcccctctttttgcagagtaatgatttggtttcgttttgatctttagggaagtagatttggtactcttgagtttggattttgattattggttcaatgtttcttgtaggtttcgttattgttagcttgtggtctacttgagaaattcataaattttggagtagataatgttttgtgatagttttgcatttgcccaagcgatgagttgctt

SEQ ID NO: 152421 - DNA, 381 bp, Arabidopsis thaliana landsberg
tcttaaaaatctgcagccatttggatagactaaacgttcctgtgagctggctggggttaacaaaacttgtgagttggttctactctgatgagttgccaaagcctccatcgggttgcaagtggaacaacatggacactgaggcaaagctggatgagcttcaagcttacgtggagatatactcgctttctgaatggtggattatggaagaacttcaaaacgattgcgctcatgtgattctctcttgcttggaatccgctagagagttatctatcaaaacaatcgaattagctgcgagtttctcgatgtggaaactggtggaagctgctgctaatcatgcagctcctatttatcatcagcttcgtgactcaggtgagctcgatg

SEQ ID NO: 152422 - DNA, 247 bp, Arabidopsis thaliana landsberg
tctcaccgtctagtcaacaggaactggtcaaaagccgtcaacaacccatgcaccttctttgccacggcttgttgtcaaagcatccacctcatcaaagaagatcacacatggcgaacatgtccgggcacgctgaaacaatgtccgaatagcaagctcgctctctccaacgtacttgtttagaagttctgcacccttgatgtgcatgaaattagctcctgcctcgttagcaactgcctttgcaatcaat

SEQ ID NO: 152423 - DNA, 142 bp, Arabidopsis thaliana landsberg
ggagccgaagtgttgttttcttatagaaggattttgatttcttctgcaaaattcgatcgatagtgacgagaaagaacactaagatggcaaccgcaagcgagagttcttcatctaagagatggcttccacatatgaatctaac

SEQ ID NO: 152424 - DNA, 518 bp, Arabidopsis thaliana landsberg
tatattacccaatacaatcaaagtatgagacatttctcataagacgagagcatactcttaaaattccccaatacaaacacctatacccaaaaaatttaatcccctgcataatcttattaaggaagactgataatctcagaaacgcacaaaaccggagacttttcatgtattaggatagtatccatatgggtaactaacagaatgagatctgtagtgaagattctgttgagtattattattcatttgatctccagactctataggcttcggcttaggcttagccacacgcttgctgctctgttcttggaccgctccaaagactatctcattagacttttcactgtcctgctcataataagtatgcgggatcgatgagtaatgccttcgatgctgctgctgctgttgttgctgatgctgatgcttctggtgctgcttttgctgctgttgctgctggttagggaactcagcgtcccagctactgtagaatgcacggctctgacgtagctgctgcattttct

SEQ ID NO: 152425 - DNA, 374 bp, Arabidopsis thaliana landsberg
aataaaaatgctcgttagtccctattcggtcgcacaatatttactagagaaacacttaataaatttcacaaaattttaaaatgttgcacaatcgtcgcaatttagtcacaaaacagttacacaaacgttgcaacgtgcgactgtgttctgctgtcgtcgcaaaaaagttgcacaaagcgactgttttatgacattttggaatagggcacaagacaaacttttgaaatccacatagttcgatccattctatagataagcattactgaaaaacaaccattttattacatcaagaactttaggtatacaaatgattggtttcaaacttatttgagaacttgtttgaaaagatcaatcatgaaaatggattcacatga

SEQ ID NO: 152426 - DNA, 441 bp, Arabidopsis thaliana landsberg
gccatagtgtcattaataatcttctctcgctttctctctttactttaattctgaagaaggatgatgttaccagaagcatgcgtggcgactatcctctcatttacaactccggctgacacaatctcgtcggcggctgtctcatcagttttccgagtcgccggagactctgactttgtgtgggagaagtttttaccgaccgattactgccacgtcatctctagatcgactgatcctcaccgaattttctcttctaaaaaggagctttatcgatgtctctgtgaatcaattctcatcgataatggcagaaaggtctgtgatctttatctctgtctctgcatgtgaaccaattcttggtttaatgttaaaattcatttcagattttcaagatcgagaagctttcagggaaaatatcgtatattttgtcgtcaagagatctttcca

SEQ ID NO: 152427 - DNA, 83 bp, Arabidopsis thaliana landsberg
aaaaaaaaaaaaaaaaaaaaaaaaaaaaaaagaaaaaaaaaaaaaaaaagaaaaaaaaaaaaaaaaaaaaaaaaaaaaaaaat

SEQ ID NO: 152428 - DNA, 213 bp, Arabidopsis thaliana landsberg
gatgatatctacgcggtgtttgaagaaatgaatctcggtgaagcccatgatagagaaatggagaaatctgttgcttacagtccaatcagccacgattctaaagttcacacggtaagtctagatgccaatatgatgaacaagaaagggagacactcagatgcttatactcaccagaatggagacattgaagaagatgatatgcggttgggaaac

SEQ ID NO: 152429 - DNA, 290 bp, Arabidopsis thaliana landsberg
agttttctttatgaatgcaaaaagatatcgagtcagaatgctcgatcacacaattatacaaaacactgaataaaattcaaagattcactagaaacctcggtttacaaacactttaatcacacaattatacaaaatcaacgaaatttaaataatacaacacttacagaactaagacacatacaagtcaacttcgacagattataccaaataaaaaaacaaaaacatcatcaatttgtattaccttgagagaaacaacgaaacaaagagagtgactcaacggattttcttgt

SEQ ID NO: 152430 - DNA, 497 bp, Arabidopsis thaliana landsberg
agccaaataattactttaccaaaaggttcgattttttcaaaatgttcgactaaattggcttttgtaaaaagcttatggcctactaggctgcataaactccgaaatcacaaacttggatattcataaagaggttccactttattcaacttcttaattagaaaaatcttatagagacgatcgaaccctcttatataatttaaaggttctagtgttaggcactagtttgcttaaggagatactcatctatctctttgaagttcttgacagcaaagtccttgatgacgtgtgggtcatcaatctcatgggcggtcttctcaaactcaccagaccatttcagaaggctgccaccgttcttaggaataacggtgatggttcctttgaacgttttgtagtactccaacatttcgccgccaatgatgctgtatgacatgcttttgttctccaaatccactgcttcgatcctctccgccgatatcttcaccagtggagatcctata

SEQ ID NO: 152431 - DNA, 332 bp, Arabidopsis thaliana landsberg
cacttctctctctctctctaaccacaaagcttccatggcgtcagatcagagcacgaatccaccgatcatggaggcaaagacaagacatcctcttcaccagatcgcagatacaccaacacacaagcttctcctgaaacaatggttaaaagaagaagagctaattctaagccgtgtctctcacaaagaatctcagatcgattctgttcgaagagaaatcactcagctctacatcttcttctttctcttccactccatttctctgctacttctcttccacgctgtctcatcctcatcttcctctgcttcttccagtgcttgtaaaagatcatgga

SEQ ID NO: 152432 - DNA, 358 bp, Arabidopsis thaliana landsberg
  unsure (1)..(358): unsure at all n locations
ttgtgagactagattgcactcatgttgggatgagtgactccaaacaaattggtgtaaaactaatggtataataaactgtaaatggttcacttgtcatatattgtctgtcagattctctagaattgatnnnnnnnnnnnnnnnnnnnnnnnnnncaggagatggttccatgtgttcccatattgttcaaagatgagcagatcactactctggagagggaagaggactggtgaagaagagcttgttactctatgaatctttgatcaagaatcatgatcatgtgagtgatgtgacctgaaccaatccaaactgtaggccaaaatttcttcatcgatacaacagatatgaaagttcacatgt

SEQ ID NO: 152433 - DNA, 216 bp, Arabidopsis thaliana landsberg
ccgactcaaagaacccaaagctcttggaggaggtgatcttctcttctcagatcatcttctactcttgagtatacccttcctttgaagataattcctagtttgggacttatccttacttctccgggatttcactttaatccaccgaagagttttgacatctgaattgtattgttttgggtgtgatcccgatagaattcgagggtaggaatctgaaag

SEQ ID NO: 152434 - DNA, 374 bp, Arabidopsis thaliana landsberg
gcaaagagaagaagatctcgttgacgccccaaaaaataaccagaggtaatggttccgcttccatgggagctagaggaagatatactgtctcggcttgcagcccaatctcttgttcgattcagatccgtttgcaaacgatggaattatcttttcgatgaaaagagtttcatcaaaaaccacttcgctcgtgcttgtcctcagttcatcttcatgaccgattccaatatttattcgatagagatcatcggtctcgacggcgttgatccaacgattaagttacgtgtgctagactcctctggtatccctaaccgtgactggaaatttgcttacataaccatcactgcttgcgatgggttcttgttttgactcttggc

SEQ ID NO: 152435 - DNA, 292 bp, Arabidopsis thaliana landsberg
catccgatgacacagtagctgtgaatgggaagccatacattccaaaggacgagactacaaatgggacatttggcattggccatgatgcagaacaacagcattctcatgaaacggagaagaggtaaagactcatgttttcatgtcttaaggcgaagccaaacaaacaaagaggaattgagatttgaataagacgaggagtaatcttagtactcgggccttgtagtccctctgcaacagatttcgaagtttacagatcttaagagtgggaaacattagtcttcagggtttagaa

SEQ ID NO: 152436 - DNA, 490 bp, Arabidopsis thaliana landsberg
  unsure (1)..(490): unsure at all n locations
gacaatcttcgtctccggcacaacaaaattgttcttcttcggcaagattcctcgattttctccgtgttctgtaatttccgatagattttgacaactctctttgattgtttccctttagctttttatttttatctgccttgttttttttttttttgttgttccggttctattcgtttccttttgttaccttgtttttggttttgatctcaaatcctgctctgctctactatcttcaattcgattcttcatccgaacgaagaagacacaaattggagcttcactggtacatattcttgacgctttatctctgatttgctatttagggcttttcaatgaatgaatttagtttttctgctatgttcattgggaagtaagttcaatcgtatgtgtgatgatttttcaggacgttgatgataaagcatgaatcacggagggaacactcangccgtagcaccaatggaccctaattccattgaggtaattaacaatc

SEQ ID NO: 152437 - DNA, 517 bp, Arabidopsis thaliana landsberg
gtattgtgcttctggaggactccaattgccattatcgctaagcaacttgttcaaccgtttggtgagtagtttacttttactcaggttaaagctcgcttttggtatataacacataggaaaaaaatgaatgtggtgtgtttcacagggactttgttatcttggggaacaggaggtcacatgacaggccatgtaatggtaagttccttcttctcaatccatttatttgggcttgttcttgattgagagtgttggttgggtaaaaatgcaggtcgggatcataccgtggctcatactctcaaacagagtgagcaaatatgtgtgtaggttcgtggagttctaaatcacatccctgaaaagagtgaagattggatggtttttgagttcaaagttgtagccttttaggagacacttgtggcagaaattgtgcttctctttttgttcctaatcttccttaacaatgtatatttatatgactctttttctctggttgtttgttggattttaccaataacaagta

SEQ ID NO: 152438 - DNA, 308 bp, Arabidopsis thaliana landsberg
ccaactccggttaacgtgcgcatgcgtcgagtacaacacagtcacaccatcctcctccatcctcctcaatattgccatcgccgcttccactttccccgccctacacgcgccgagcacaagcgcgtcgtagctacgcgaatccggcgaattcccgtcttcttcaatcttacgcatcacctcgctagccgattccaattcgccgtcgtaacaatgcgaagtaaggaagtaattgtacgccgtcacatccatcgaaaccgatttggatctcatcgattcaacaactctccaagcttcttcgattttgtact

SEQ ID NO: 152439 - DNA, 108 bp, Arabidopsis thaliana landsberg
gcgcgtctattgctggttgaaaactatttccaaaccccctcctaggcctaagcttgtctagggccttcgagaatttctggaagggctcccttcggggtaaagccctac

SEQ ID NO: 152440 - DNA, 160 bp, Arabidopsis thaliana landsberg
tatcttaagaagtgtggagagtcctacttgacattgttgttgtatgtagatgatatgttgatagtgggagcagacttgcatgagattagcaagttaaaggtaaaactcttatcagtttgcgataaaaggcctagggaaataagattaatataagcaaagg

SEQ ID NO: 152441 - DNA, 138 bp, Arabidopsis thaliana landsberg
tgtgatgcaaacagatgagatgtgatcagaagtcactaagtcaagccaaacaataacagatttagggtttctagcagtcctaagtgaacatgcagaaaacagaaacaataacagacttactaaaatcactcgaccaca

SEQ ID NO: 152442 - DNA, 161 bp, Arabidopsis thaliana landsberg
atataaagttttcagatcttgattttaaaaaccggtccaaccacaaaatatcatgtatatacaaattacataaaacattattcgtgagaaactttaaaacttagccgagtgttaattataaaagatgggatgttaagtccggttaatttttgacgtattta

SEQ ID NO: 152443 - DNA, 224 bp, Arabidopsis thaliana landsberg
tggcaaacacttgaattaaaactgtttttttactacttgtagtaaaaccatgaagcgatcatccttggtcgattcttgttcatattcgagaatatttcgcagtattttctgtctcttatccttttgtatcttcttcttgacaacgaccaatgctcaggtaatgcatagacggctctggccttggccattgtggccacggccgaatccacagccgagggcaatga

SEQ ID NO: 152444 - DNA, 93 bp, Arabidopsis thaliana landsberg
taaaaagtaaaacatcatatagatgatctataaaaatggaacgagacggatcacatgcataccatataattaaactatctgccaaacacttaa

SEQ ID NO: 152445 - DNA, 578 bp, Arabidopsis thaliana landsberg
tctacttctctctgtgtacaatattcggaaagtgaggaagatacactgaagcaaaagagcaagtcatggcggcgacatcttcctctgcttttctccttaatccgttgacttctcgccaccgtcctttcaaatactcgccagagctctcttctctctccttatcctctcgaaaggctgctgctttcgatgtttcctcagctgctttcacgctcaagagacagagccggagtgatgttgtgtgcaaggctgtatctatcaagccagaagctggtgttgaagggctcaatatcgccgataacgccgctcaggttagattgtgtttcgtttgcatttggatagagacagaggaaatctaaattggtgatcaattttgtcaatttaggggaagatataaactaactgagtattattagtcttgtaaatttgacttctttgaattttgatttcgtttctaatttttttttattctttctgaatgttatgaattgattcagcttattgggaaaacctcgatggtgtacttgacaatgtagtcagggctgtgctgcagtgttgctgctaagcttgagatcatggac

SEQ ID NO: 152446 - DNA, 720 bp, Arabidopsis thaliana landsberg
ttctcctcctccgcctccgcctccaccgccaccgccaccgccgccgccgacgacttttctcacttactcaacaccagaggtctctctctcactgtttcttcttctcctttctttcgatttcgtttggtagatttttagatctgatttttttctggtctctgtagctttacttgaagttgactctgtttctcgttatagatcttgatctgtttatgatttcgaataagaacagcttcaagcataattttatattcgaataaaaattagatgcaatgtgtttatttcgcgtgttccaactacacgagttttttttttttttttggattaggagttataacaatctcattgatcttattgttttgattttagatcttggtttagtgtataatggaaggtgttggactaagagctgtaggatcacactgttctttatctgagatggatgatcttgatttgactcgagctttggataaaccaagattgaagatcgaaaggaagagatcgtttgatgaaagatcgatgagtgagctatcgactggttacagtagacatgtcggtatacacgattcgccgcgaggtagatcggtgctcgatacgcctctttcttctgctagaaactcctttgagcctcatcctatgatggcccccgccccccaggctttaagaaggtcaatggtctataattcaaaggtcaccctgttggtactcttgccgcggttg

SEQ ID NO: 152447 - DNA, 314 bp, Arabidopsis thaliana landsberg
tgttttttcctcttctatcaatttattttcatcgtttctggtgtaaaacgtaaacccagtttcagaacagtcctttgtgctccatcagctcataactccgtcttcttctcctaattccctttttttggggggttcctgattattattattattattccgataacagataaaataaaaacatgggctcgatcaatagacacgagctttgggagggaaagtgtcgatctcatcgtcgagagtgtccatgtgaacaggcctataatccaatctcactttctcatcttcccaatatcccaatgtatgcttcatccatt

SEQ ID NO: 152448 - DNA, 537 bp, Arabidopsis thaliana landsberg
gctgaaactctcttgctcttgcttctaaaaatctgttctttgagactttgatcacacagttatcaaaatcataatctcttctttcctggattttttttttttcttcttcttcttcccgtttcacggtacgtttactctgttcgatcaccgagtgtatgataaaatgtttctgtgaaatcaaataacatatcactttcttataaacatcaaaatttctccttttttacagaaacaagaagtttttttgggaaagccgtggacttgattttttttttggggtgttgtgtgggagcttatagtatggtaccataagtgggagcttatagtatggtaccataagtgggagcttatagtttggggtgttgtgtgggagcttatagtatgaggaaaaatgttagatttgaagaatgcttcactgattttttaccataagtatgtcaactggattaagcttaagtagtaatggtttttactatgttcatgtggggatttctcttcctctctgtttacttcattccgagatgacttgagattttt

SEQ ID NO: 152449 - DNA, 342 bp, Arabidopsis thaliana landsberg
  unsure (1)..(342): unsure at all n locations
caaaaataagggagagggcaaaagcgtaaataacaaaagtcgatgacgagagccaaagccccaatggaaggtgttaagctaaactctcttcttgtctgatatttcttctactctcaagtctcaaccacataaccaataaaaaatgctactaatcccaatttcttcttcttcgtcttcgtctatgtaagtttcctcctttntaacattcaaattctcatctcttaaccatattactaacatcgtctttgntgtagtagccctccttctaattcatatccatcgaatcatcactctctgttttcttcaatctcacattcccagttcaacatggtacttatcctt

SEQ ID NO: 152450 - DNA, 128 bp, Arabidopsis thaliana landsberg
tttgtgatccgaggaaactataggcatcaccaacctcagcctggtcatcttcctcttcttctttgaagaaagataacaacaagacactgatgatgcagtttggtataccaataccagtaatatgtgac

SEQ ID NO: 152451 - DNA, 339 bp, Arabidopsis thaliana landsberg
accggcgatggatgaaggagatcctaattacgacgaggaacaggtgaagaagagtggtgatgacgtgccggttgagcttgtgaaaggagaggttgaggtggctaaggaggctccggctggtgttgctagggttgaggttgatcctcgcttggtcggtcgttgagagtttgatagaggaggaagaaaaatgttggggcgaatgtgagaaagagggagaaatgtggggttggatttttaatttcgagttaatgttttagtgtaaaatgacttttcactatttctgtaaaaaataataattgatctgctagcattgaaagtcaccattcggtggtctttttt

SEQ ID NO: 152452 - DNA, 153 bp, Arabidopsis thaliana landsberg
ctcaccggagatttcagcagctgagaataccgattcgagatccgtcagagatagaacaagtttccggaagaatgtagcagaaatcgaaacaattagggtttggcgagaagaagaatgtaaaattgggagcgatgatttttttttgtttgattg

SEQ ID NO: 152453 - DNA, 97 bp, Arabidopsis thaliana landsberg
ttttttttttttttttgttttttttttttttttttttttttttttttttttttttttttgttttttttttttttttttttttttttttttttttttt

SEQ ID NO: 152454 - DNA, 86 bp, Arabidopsis thaliana landsberg
aaaaacaaaaaaaaaaaaagaaaaaaaaaaaaaaaaaaaaaaaaaaaaaaaaaaaaaaaaaagaaaaaaagaaaaaaaaaaaaaaa

SEQ ID NO: 152455 - DNA, 221 bp, Arabidopsis thaliana landsberg
cagattcgtggatggaaaaagtgggagcaagagacattatctaatgactatgagttttctattggtactttgttcatcagattctgttttgtacccctgaactgaagtgttgttcttttacagacttacttctgttctgtggtgcagatcattcaagacttaggctcactcatgagacttcttttgtgagagaacatcaagtttcggacaacaactcttag

SEQ ID NO: 152456 - DNA, 371 bp, Arabidopsis thaliana landsberg
gcaaatcaaagatgagatgtcggtaaaaaaaacgctattagaagaacacacgccactagttgtggataaagttgtctacttttgtctcgttgtgattattatattgcacaattattaacattcatactctcatatgggtattgtttttggtctccgttagatctcaaatctttaactttgcatacccaaaataggaagaaagaagagtcaagtcactaaaataactttcacagtctttgattcgaagatctttgtcgccgagagatatccactctgatttgagttctggtaaaaagtttccagcttttgatttttgtttctctcaattgaatttctcatgcttgctctgttaaaaggattaggagtaaatc

SEQ ID NO: 152457 - DNA, 84 bp, Arabidopsis thaliana landsberg
attctgtggagacgaaccccgaaaaatccatctgtcttttccaccgtctttacctgatgcttatcttgccctcggcagatccga

SEQ ID NO: 152458 - DNA, 522 bp, Arabidopsis thaliana landsberg
acttcttaaggtctctgttttcctgatctgaggtccttttggggaaatttgtttatggcgttgaagcagcagaagctttagctatacttgtcggaagattgtgacacttattgaatcccagattagggtctacttatattaccattgagtggaatatttgaaagactgttcttccgaaggtgaaattcatggctgataagtacaccgtcgaggaagcagaggctttggccaagagagctttggtacaattctttccccagctatatacttgtctgacttctcgtactctttcataaagtttagatttttacttgttgggtttcgtaaaattgtgtcctttcctcagcattcaccaattgcacaagcgacgccgatctacgagcagcttttgtcactttatcccacttctgtaagtttcccatgactttgcttccacgtattttaagagtttcctgatgtttttggttaattgtgagctcctttgtactctgtaggcgagattttggaagcaatatgtggagt

SEQ ID NO: 152459 - DNA, 256 bp, Arabidopsis thaliana landsberg
gaacagcaatacagcataatattatagtagtaaaatactttaaaatccttttttttcgtttgacaaagcgctatactaaaaaatatagcaaactcaagtatacactaaaataaaattagtacatttgctagtcttcacctctagaagacaagagtatgtcgttttcttgacaaagacgatttggttttggtgagttattatagtaaataaatataatactaataaaaatgtatttaaatatatactatggattagg

SEQ ID NO: 152460 - DNA, 256 bp, Arabidopsis thaliana landsberg
  unsure (1)..(256): unsure at all n locations
tggtggtaggacttgcagcaatcgcgagtttagtcccagggtttggtacatgtgcatctcctgttggaagtactttgtgcgcactcatntcntttgtgttgcnggttctntctcacctcacgaaaatcggtccatcactaaatgtatggaacaaatccatcgacgtattcattgtgatttgcgggttgatctttgctgtttatggtacgtacaacacaatcgtcggagtgtgaaaagggatagcatgtgatctgtg

SEQ ID NO: 152461 - DNA, 280 bp, Arabidopsis thaliana landsberg
tacgattttgtttttgtggtctaagccccaaagtgtaaaatattttccagaattactgtaattgtaactacaatgcttctgttactctctatggaaatgtctttttaacacttcaactcaggatttttacatggatgattatgaatcttatgctaaggctaaggccaaccaccccatttctggtcttcgtctgggcgacaccactcagcatctacttgcttctctttgccattttcttgttgagtcgtgagaggccataagtctccccaaaaggatttct

SEQ ID NO: 152462 - DNA, 96 bp, Arabidopsis thaliana landsberg
ttttttttttttttttttttttttttttttttttttttttttttttttttatttttttttttttttttttttttttttttatgtcttttttttttt

SEQ ID NO: 152463 - DNA, 648 bp, Arabidopsis thaliana landsberg
atttacttctaatcatgaacagaaggacagattatttataaaaactaaaaagaagatctaagcaggggtctttttcctgtaaaatttacacaacttttttttaccccacaaataaacgaattgtatagaaaagccaaaaaaaactagacctaaaatgccagttcatccactagaacaagaaacagaatttgagccatagctaatagcttgcaagctcgaatgagtcatatttgtcatccatctccttggaactccgtttgattcaccagccagattatatgcataagatctccacttgtttccaccatctttacaagaactcataaaccctaaccttctcgctttctgtgtcctctcaagaacaatgagactagagaaagtcgaaaagctattaccaacaaaaacatccgctcttaaacacacctcgtaatctatagccgattgtatcaaatatgaatacttcccatatatctcctctttaaccccaagcttcttcttctcaaatggtattaaaccgtctctccaaccacttaaaaccgatgaatcttcttctttttcttctaagagagtatctgctactgcaaggtaaagaactgttggagtctttaaacctgaaatgttccctactctgtccaaaatctctctttt

SEQ ID NO: 152464 - DNA, 82 bp, Arabidopsis thaliana landsberg
gtgaggaagaggaagaactctaagaagcgacctggttctattatactcttcctttgattaccggagagaagaaccgttgaat

SEQ ID NO: 152465 - DNA, 119 bp, Arabidopsis thaliana landsberg
cgcttttttattttgtaatttaatttcggttgctttttaaatatctaactcagagaaatttaagggattgctatctattttttttttatttggggattggttaaagtttctcggttagt

SEQ ID NO: 152466 - DNA, 191 bp, Arabidopsis thaliana landsberg
tttttcaggtgctacaatggatgaaaaaccaatggccggtcaagaacataggaccgatgattccatcaatgtacttagacaaacgattagcaggtgacaaagactacggaatcaacctcttcaatgcacaagttaacgaatgccttgattggcttgactcaaaaccgcccggcccagtgatctacgtgtct

SEQ ID NO: 152467 - DNA, 124 bp, Arabidopsis thaliana landsberg
aaaagttgcccgaaagtgctctatgtttttcaccggttcaggtgggagttattggactatggaacaagctgagtgtaagtctactttgaaagatcttttaagatatatatatgaatgttactta

SEQ ID NO: 152468 - DNA, 248 bp, Arabidopsis thaliana landsberg
ttttcttgatttttgaaagaagaatttctattattatgacttttcttttctagtttacacttcactaacgctaaggttaggttatttgttcttgctatgataaataagaacaaaagattatgaataataaatgcccccaaaacaaaaaaaaaaaatcagaaagaaatttcttctctctatctatctaaaagatatgtcattgttgtttctgttgttgttgttggtctcggagttggtacagtctttgt

SEQ ID NO: 152469 - DNA, 553 bp, Arabidopsis thaliana landsberg
agttgtacagctggcgtcaataaatatccaaaacagtcgtctttttcatatcgaagaagaaaaagttgaaaaaattgtaaagtcagtctctccgattcttccttccttccgtgttcaccattgctacacgttctccacgaactttccgatgcccagtcgtcggagacatagctacaccgtcggatctcctgcaaccacatcttccaattacagtaacactactttcaccgatcgttccttcccgacaacccctgcccgtacatccaccgacacaaccacctccatcgctcgtcgcatctccggtatcttcatcaactgcttcactcctcccgattccgtttcctccaaatacatcgacaattcaaagtcctcttccggtatagtttgatcagtaattcttagattttagacttttagtggaaacagttgatgatgattttatttggtctctgtgtgagcagacaataatatccgtagtagacgtagctcaacaggaagtagtagtgtacagaggagttatggaaatgcaaacgcaacagagcatacaagattc

SEQ ID NO: 152470 - DNA, 533 bp, Arabidopsis thaliana landsberg
gtagttttcctgtaatccaaacggcgcactgtttttaaattcacagcagagagacaaaaaaacaaaacaaagacgagtcttgatttttatcttcgtcgtctccgatgctaagctccatcatcgacgacaaacctgcctcctccacttggctcaaccgcctccgattaaacagaggcctcacaaccgacgatgacgatgcttctggcaatccacttactctcgacgactttctccgccgcaaccaccacacggaaatcgccgccactagttccgcttccgattcacctccatctgctccaattccttcagatccagaattagctgaaagtccatcggaggagccagttcctggagaatggtacggcgtgatgagcgatgttctcttcgagctattcaatttcagcggctcctctaaatcttccacaattcccgggaagaagaagttaccaaggaaacaatcaaaccctaggcattgctctttagagactcctgaagacgttgttgttccgttggtaaatcagaaaagcgacgac

SEQ ID NO: 152471 - DNA, 735 bp, Arabidopsis thaliana landsberg
catattattaggaacaatgaaatatctgtaaattaaccaagattatttgtgtttggttgtagcgtgagaaaagcaaaggctaataacagttgagagaagggtgtgtttgtatgggctgctctgtatcgaagaagaagaagaagaatgcaatgcgaccaccgggatatgaggatcccgagcttcttgcatccgtcacgccatgttagtttttagtttaaaatcttattagtaagataatctttaaatgttacaatagcatgttgtagagtttggtaaactttttcaaattttattttacttgtaatgggagggacaatagtcacggtagaagaagtggaggctttgtatgaactgttcaagaagctaagcagctcaattatcgatgatggtcttattcataaggtttcttctttcactctaaaaggtccatatgtagacagcaattaggtaatctatatagcttaattagagtttaaaagtttgatgttgcaggaagaatttcagctggctttattcagaaataggaaccggaggaatctcttcgctgatcgggtacatatagtaactacctagctagaataagtgacattattgaaaacatatgtaaatttaaacaaagttctgttttataatatgcagatatttgatgtatttgatgtgaagcgaaatggagtgatcgagtttggtgaatttgtccggtccttaggtgtcttccatccaagcgcgccaatgagc

SEQ ID NO: 152472 - DNA, 259 bp, Arabidopsis thaliana landsberg
atcagtgtgtatttcccgagggtttatgatatcaaacacttgatgaagttctgtaatagtcttcatggaggtctgaataaattggcggagctgcttgatgttgagagagttgggatttgtcaccaggccggatcggatagcttgttaacgtcgtgtacattcaggaagctgcaggagaatttcttcattggttcaatggagaagtattctggtgttttgtatggtttaggtgttgagaatggtcagattgttcattgat

SEQ ID NO: 152473 - DNA, 279 bp, Arabidopsis thaliana landsberg
agagagaagaaaagtttctctctttggggttctgtgaaaaccaaaatcgaaaatcgcatcataatcttaaatctctcttctttctacgaattttcatgtttatgttccctctctcttgattctccaccatttcactattcacatattttttttttattgataagttttctccttttttgagttttacgagaggatttttcaaaggtctaaactttcttgggatctatcagattgtcttgaaactaatgcttacgggttttaacaggtttgttgcttaat

SEQ ID NO: 152474 - DNA, 307 bp, Arabidopsis thaliana landsberg
gagtagcacacatagcacttgatggctcgtaaggtattgtatggaatatatctctggctttatccaggtaacctgctctgcaataaagatcaaccatacaagaatagtgttcaaagcgaaggcgtataccaaacacatgctccatcttcgtaaacaaccagtgtccttcacgcactaaattggaatggctgcaagctgataaaactgcaaccatagttacatgatcaggtttgataccggatctgtccatatccttgaaccatgccaatgcgactttttctttaacccagcctgccatatccatcga

SEQ ID NO: 152475 - DNA, 243 bp, Arabidopsis thaliana landsberg
gaaagcttgtgaaaaagtattggtctcattaccactggcctgactcacgttgatgatgatgataccaactaataatgtggaaaatgtagtactagtaattttgttgtcattaccactagtaattttcattttggaaaatgaaaatgtaatactagtaatttagaacatgtaattgtttgatatactctcgagtaaaacaaaacatgagatcataatgatttgcggtgcaactaataataagca

SEQ ID NO: 152476 - DNA, 559 bp, Arabidopsis thaliana landsberg
  unsure (1)..(559): unsure at all n locations
gtctctcagtctactttatccgatcggcgccggcnnnnnnnnnnnnnnnnnnnnnnnnttcttctattgaacatactatcgaaaagacccaatcttcggattcattagtccgcactgcgctttttctgattctatctcgatttgttcaatccgattccaacttttgtttcgattctgagtttttaataatgctagttctaaaccaaaataagattatttgatgattctaatcaatctatagctcaagtaatagttattaacgaattgggttttaaaaattcgatttttgagtctttaacccgaatttatgtcactcttttgaaaatgtgttgatagggtaaagaagaagatgagtggtgaagttgttttagctgctagagtttatcgtgaccttctcaaagcagtggtgaaacatgttggtaaagaagatcacaagtctcatttgttagactttgttaagcaagaatttcgaaagcatgccaactcagagaaaatagaccttgctcaaaaaaacacatatcttctcaatagcattcactctcacaaggttcagtcggtt

SEQ ID NO: 152477 - DNA, 182 bp, Arabidopsis thaliana landsberg
tcatgaagaaaaatatctctctcgatgattatactttatattatcgacacttgtgcacgtggttgattctgaaggaacggacaaaataaaaatgttattttataattgtagcgtgatggtgatgtgatgtgtacatatacattaatcttctgtaataatatatggtaagcctacgctttctc

SEQ ID NO: 152478 - DNA, 430 bp, Arabidopsis thaliana landsberg
gttttaacccgcggtttaccgcggacaatcggtttatttggtttttgtactaaatatttgaataaatttgatatcctaaacttataaatataaatttctagtgattagtgaagaatcgtaatatatgatttggatattattgattattgatttcgtgattgaatatagtgtttttagggatggaatgtgatcatattttgatttcaaaaacgacatagatttcttatttttgttgaacggtttagattgaagggaattaattttattgaacggtttagattgcatcggatcatataaagtttaggagattgttaagaccaaattatccttaatgattttgaatagcaaagaacaaaatccaaaattaaaattaaaattgaggccaaattagacaaaatttcaatttgtacttcccttttaataataaagg

SEQ ID NO: 152479 - DNA, 200 bp, Arabidopsis thaliana landsberg
gtttattcttcacaaagttaacatttttagactcaaaactcattcttttgcccttcctctgtttctcctctctttgggtttatcttagattctccaaaaagtctctttcttccatggcttctcttctccatcttcttctcctttctctttctcttttagttcttgcttcagcttctccttctcctccagctgatgaaggt

SEQ ID NO: 152480 - DNA, 372 bp, Arabidopsis thaliana landsberg
actgcggacgcacgctgataagaacattgtcatcatccttattggaaacaagtctgatctatatagatcaaagagctgttcccacggaagacgctaaagagtttgctgagaaggaaggactctttttcctcgagacctctgctttaaacgcaaccaatgtcgaaaactccttcaacactctaatgactcagatatacaataccgtgaacaagaagaatcttgcatctgaaggcaactcaaataaccccggttcaatggctggtaagaagattctcatcccagcttctggacaggagattcccgctaagaccagcacttgttgtacttcttcttgatctgtctcctactcaagcaagattcattttttttcct

SEQ ID NO: 152481 - DNA, 386 bp, Arabidopsis thaliana landsberg
gtggggtcaagttatcaaccaagttctgactacaaaacaaactctaactttaaccctaaatcaagttacaagcctaacgaaatcgtcccaagaaatcctcaaatgattggagctcccatccaaaagccaagtgggaggaacaagaaaagtggagataacggattgttttcatgttttggtaacatttgtggcattgagtgttctattgtttgtggtggctctagtggacaaaaagcagcccagatgaagaagataaagaagtgataaataacaaacatgattccttcaattctaaatgattcatttctcattatgtttttatttttgaagcttgtcgattttgctactcaataatccaaatttatatagtaagacatggggaaaag

SEQ ID NO: 152482 - DNA, 552 bp, Arabidopsis thaliana landsberg
gtaaattcacaacaaaaccaaaaaaaaaaaaaagagaagaagaattagcttacgtgttcatcacatctgcattacgcgcaaacgaaacagattcaaattctccggcgaagttttcttattcatcaatcatgccagagatcgagattgccgccggcagcggcgacaacaacgacgccttattcggtaaatatgagctcggaaagcttctcggatgcggcgcattcgccaaagtcttccacgcacgtgatcgtcgtaccggccaaagcgtcgccgtgaaaatcctcaacaagaaaaaactcctcacaaatccagctctagccaacaacatcaaacgcgagatctcaatcatgagaagattatctcatccaaacatcgtcaagctccacgaagtaatggcgacaaaatcaaagatcttcttcgcaatggagtttgttaaaggaggagaactattcaacaaaatctcaaaacatggacgtcttagcgaagatgtaagccggagatatttccagcaactgatctccgccgttggttattgccacgctcgcggtgttt

SEQ ID NO: 152483 - DNA, 94 bp, Arabidopsis thaliana landsberg
tctgaaaactttgtttcagttatgtcctgtccccaacaaactactactcttgttcatatttgttgatccaaaatagagtttacctccaaaaaat

SEQ ID NO: 152484 - DNA, 163 bp, Arabidopsis thaliana landsberg
cttaaacaaacctgtggtttcagttttcctctttgaacaagaaagacttaatatctgaatgcatacaagatgttgagttactactcttcccgatttgaaatttggaaacaaattccaaccattgacgtgttttgatagggactcctcacatcccatacaaact

SEQ ID NO: 152485 - DNA, 685 bp, Arabidopsis thaliana landsberg
aagtaaattaattatgtatatatataaagcaaatgaaactatcattttttttttatgagaaaaaaagaagaagaagaagaaagaactatcattatcataaacaattttttttaacaaataaaacagggacatctttttatacatatctataagagtaaagacacatcatttcctttattggacaaagatatacaacgaaaagaatcaaaaacagaaaaagaaattctcggacataatagacaagctagaaacagagcattcacaattttcacataaaagaaagagaggaagtgtagataaataaatagaatataatttgagattctatgagcttgttgtgcattccttaggagctccctgtggaaacctcctatggtcagtacaataattgtagatcatgtaattcttctgaacccatttgagtctagcttggcttgttgaatccatttcttgagtgtaccaattggagtttggtttcgagtcaatcttaatgtttctgtaagaagccatgaatggagctttagaccaatcagttttaacaagaccgcctcttgttgcccaatcgtctgcgttccataaactcgcgtacatcctcatcggcttgttctttggaaacaagacaccgagagactcatagtttttaaactctctaatgggtgtgtcatcgacggtcaatctgatagaa

SEQ ID NO: 152486 - DNA, 641 bp, Arabidopsis thaliana landsberg
aggattaaatagctgattttattactttttgttacaccaaggtttaaatttatgggccgagcccataacagtttcagagataacccaatagaagataaccggaaatggaacagatctagatgtgttgacaaattataccaaaacaaaaaacagagcatgaatcatccggatgtaagtagattttagtcttaattcctagaaaaagagatgttcttgttcagaagtctacctgttattctaagaataggatgattttaatatcattgacgtcttctaactactctaacttcacaagtcttcttatctctttgactgatcctatgaagctaagaacttcatacatatcggaggttttactccggcgagggcaagcaccgccgcaggtaaagtccaaagcccttcgccacagattagccctgaagccaccgccggaaccataaactctgctttcttccgattcatcttctcccaaacaaacacaatcaaagtcccaacacacatgtcgattgcgaaataagctccgacaagaaacggaacagccatcgccgtcggaagtggcatgaatcttccaattttcgccggagtaagatctctgacgacgttgactaaaacagcaaacccgaaaaacccgtaacacattt

SEQ ID NO: 152487 - DNA, 248 bp, Arabidopsis thaliana landsberg
cctccacaggctccacctcctccacagcttccgccgcctgcaccgcctaaaccccagccatcgccgccaacacctgatctaccgtttgcgagctcattattaaagaaagtctatccagttctccaaagatttaaggatctagtcgcagatgataaacttaagtcttgggaaggccccgacatttgcaacaaatacctcggactcaaatgcgccatctctcccgaaaacaaagcatctcgcactcgcga

SEQ ID NO: 152488 - DNA, 524 bp, Arabidopsis thaliana landsberg
caataaacaagataaatggagggtctaattccgttagtatacaaagccgtcatgcaaatccgttacggtaacgagtcgcagcaactttcttcttcttactacgttcgtcttcccggtgattcgggtcggtttgtaagatccgatttagatgtatcgggtcctggatctaattcctccaatagggcgtcgtcgtcgacgagcacgacttcgtttgctgtttacgcgggagtccaatcacctgtttctcgtcaggttgtcacgtgattcacacgcgctttttgaaggaacctgaagatgcgtgtgagggaagggttcgtgacttttgttttgtgcgttttttattttttgtaagttaggcttggaccggtttaataaacctgatgtaataattcggtttggaagattgatttctctaagcgtagactttaacccaaaagggtggtctcgttggttttaatttgtcatttgtgtgtgttcttataattgtataaagtttctacgaatatatttagtttattcgagaa

SEQ ID NO: 152489 - DNA, 250 bp, Arabidopsis thaliana landsberg
ggtaatcccgaatgtggattactgggccactgtacctcacagtatacaggtattgttctgtgtttctatattctcttctggtagattggtgtctaagaattaaatttaatgagcttacgtttcctcttcatcttgcagagctgttttggctcactattttcaagattcgggggctctagtcgtggtcagcaaacctcatattctcaagtcaaattctgagcagtctcagcatcttctctgatccatggtg

SEQ ID NO: 152490 - DNA, 146 bp, Arabidopsis thaliana landsberg
  unsure (1)..(146): unsure at all n locations
ctaagggtgaagatcaaaaggagagagcaatggtgattcgatgtatatttaattaattgattaatcnagtcatgtccttgtagaatatccaactaatatgtaaaatgtgtggtttataaattaaatcaaataaatatattatatat

SEQ ID NO: 152491 - DNA, 294 bp, Arabidopsis thaliana landsberg
acaaaaacaaacagagtggtttctctatgaaatcaacgtttctgttgatgttggtgttacttagtctcaatcttctctttgtctttgtttcatgtgcttcttccatagagactgtttaccctaatttcacagcttctaacctcacattcgtcgatagctccaaaggagctttcctcttgtctcgtaactgcatcttcaaagacggattattcagtcccggcggcgatgattcctctaccggttactactttttcgtcgtacatgtagattccggttcaacaatctggtcatcaa

SEQ ID NO: 152492 - DNA, 326 bp, Arabidopsis thaliana landsberg
caggtgattcactgaaacaaaatgtagaagctgacaaggcataaatatttgggactatagtgaatgcttcagcttctttgaaacatgttcaataacaaagaagagcgttctatattactcttttattttctctgagttttgaaatcagctattctttttctgaaacttagcaacggaatggtttttgttcacgttatcttattcccatttgtttggaaatggattttatggcctttttgaatcatgcgaacgcacatttcaataaggatttggttccccaatgaatattaacgtttgttctaataatcctttggttctcaatctca

SEQ ID NO: 152493 - DNA, 539 bp, Arabidopsis thaliana landsberg
gaactcgttgatacaacgccgttcatcggcgacaggtaaacagttaaccgacgacgttcgttagtttccgcggcgagttgtgaagggagtgagatttgggcccttcctaagcccattactccttgggctccactagcgagcccacgtaacagccacggtggagtacaagcgaaaagtagatcaacggttcccggagaagtaacagatccaaacgacatgacgtcaccgaaaagctctcctctcgccgtaatcccaaaggcgtcgtttttaacaagtaattcgcaatcggcgttttggtctttacgcgatgatgatgatgatgatactcgttcatttccaacttttgcctttaagcagccgctagagctaccggagattaggttccttgacgaggaaacatgtcttgaggaacaatcaaaccagagaattgagccggccagatcgactacgagcttgactggatccggtgagtcaccgagtcgaatctgtgcgaggtattgaccggttggaaggtctttaacaacagggaaaacgacccc

SEQ ID NO: 152494 - DNA, 198 bp, Arabidopsis thaliana landsberg
aacaaccaacatcatatacatgtcacagtacggctgaaccgtgcttgtattaataaagtacttccaaagactatatttcttattacattatcagaacctggcttgtgaattcctggccgcattaacatccatttggaatgctcttgcaagaacattcgggtctacatctggtttagacccaaatattgtgttagcaat

SEQ ID NO: 152495 - DNA, 244 bp, Arabidopsis thaliana landsberg
agaaatgttgagaagaaaaccaacaaaaatccaactcaaaatcgaagaccgtgaagagcttgaacaatcccgcaaatctcaaccatccaccaccacaaccaccgcaccatcttcctcctccgccgcctcctctctccaccacctcatagacccaaaacacaaaaacccttcctccaaatccgaccgaatcggtctctcttaaaacactctatggaagttcgaagtcaaactccgtctcctaacc

SEQ ID NO: 152496 - DNA, 190 bp, Arabidopsis thaliana landsberg
atgaatccccaccgttcgatgatggaattcatcagctccggcgccgcaccaggccctgtctccgaaattgcaccagggcccacctccgaagaagtttcatctcctgctctagctccggcttctatgtaaaatgttcattaattccacatgtgtttaatactttatattaatattttcgactgatgatgat

SEQ ID NO: 152497 - DNA, 339 bp, Arabidopsis thaliana landsberg
agatgattatgcaagttgatgcagatggtgatggtagagtcaattacaaagagtttcttcagatgatgaaaggtggtggctttagcagcagtaattgatctttaactagggtttgatttgacagaagagaagtgtgtttattcgattgattggtttgtttttcttgtttttcctctgtaaataaattttctgatgacaaatcaaaacatcgtgtaatcgaggaaggtgtgtaatctttgttttttagggtatctctgagcttatgtaagattcaccttctcatctattctgattgttaagtgttcttaagtagattgttaactgtttcctatcaatata

SEQ ID NO: 152498 - DNA, 579 bp, Arabidopsis thaliana landsberg
taatgcacaacttgttctgtttcttgtcagcaaataaaaactacttgttaatcagcatgttgtcaaagttcccctaaattatagtatataatgttgaaggagaaaagatggggcaaatatcagacgataaatgttatcttctatgtaagtaattacacagctgggttctaaatatcttctacatctaattaatgacctcaaaaattgttacatatatgtgatccttgtgaattggatctaatgaagctgagaagtgacggtgataaatgtatctacagggcaagggatggtcaagccccccattggatgatcaaacccaaactcttgttcagatttactcaacaaagcttgaaatgaaggctggttcaaatatgagactggcactatgtatcttttcatctggctttctccaacgtacactgcaagaaacccttttggtgtcgaagctgccattgatcgaccttgaaagatcttctttgcgcccataagacctcggaacactcccatttttttgttctgctctgatggatcctggaaaaagattcagcttagaagtctcctttagcttatcagattaga

SEQ ID NO: 152499 - DNA, 250 bp, Arabidopsis thaliana landsberg
gcgttagtcgaaataaaagaattttgctcttcttattttatcgctcagtattatatttcactttgtggatatcaaacttctgacttttattgaagctagctaccactacttttaataaactggttaatctcatttaaacaattattggtgacggttgcagtttcttggaaactgccactctcaataaactaatagaaattgttgtcttgacttttaatttcttgatacagtaccattaaaacttaagaaa

SEQ ID NO: 152500 - DNA, 341 bp, Arabidopsis thaliana landsberg
atgtaattttctcatcttataaaaatggatagcaaatatcaactactaatatttgagagtttgcaactatttttaacaaaatctaaggaaatagagagaaagcctaaaaaaaaaacaatggactaatatactaacataatatatggacagacaaaaatagccacttgcgttttctatttctttctcttaatcaaaagctcttccttcttcttaagctttgttcaagcaaacccaaaaccttcattggcttcgtgaattgcaagaagcaggcgttcctgaacttgttccttagattgatactcagggaggtctagttggataaaactgcaacagaaccaatg

SEQ ID NO: 152501 - DNA, 534 bp, Arabidopsis thaliana landsberg
aagagaaactgacaaaattttacgatgattgaaaccaagttcaggaatacagtgatgaggaatttaaactagatgtggcttactagaaaacaacaataccaacaaatgagaaatggtgccgtcacttgtgagctggacagatgcagttgttggttcctacctccgatgcaaggcaaggaggctgagatccatcctcgtaccagatcaatctgtgtttgacaaggtctttcaggaaattatcaagcttctcgattgtaacacttggcataaccaccacatgagctatatcaccttggcaagcaagctgccaccttctaacaaactcttcatctttaggccgttcaaagaccacagtgctgctaagctcattaagcatggcgctaatcccagcttcacgaagtcggtctttgaggtaatgcgcgtttctcaagcatttctgaacttctttctggaatcctttgtaaccttttctgtttaaggtgtaccagaggaacaaaggagcatgcccgttacgacttcccatgattgttggat

SEQ ID NO: 152502 - DNA, 153 bp, Arabidopsis thaliana landsberg
ctcaaatgttcttaagaaatttcgaaacttttcacattcaccactcgattgaaccggacccgtttattcaatggatccagaggataggtacgagattgccttcttcgacgttgagacgactgtaccaaaacgaggtcaacgtttcgcgattct

SEQ ID NO: 152503 - DNA, 246 bp, Arabidopsis thaliana landsberg
  unsure (1)..(246): unsure at all n locations
gtaatacaactatcaaacaacaaccttacaacctcatcaagaagccgatacatataggttcttccaaccggtttttggccggttacagcggaataacacaagagttacaaatcttagaatacacccaaacaaaaatgccccacgatacagtaggagcctataataataatgaaaacccnatcccatctatgagtgtatttatattatataaattaaatcatctaaacagcctctcgctctctggat

SEQ ID NO: 152504 - DNA, 218 bp, Arabidopsis thaliana landsberg
cttaaaaaaggaacgcagttttcttcttcttcaggatttgtacggcgtcaacgggcattgaccttgtcgcagattttcctctctagtctccgttttctattaccagatcgagctttgttcttcgagcttctcatctctttgttcaatctcaaggtagaaattcgcgttaatttacttgtgatttcgctgttttttggtactgtttcgcgttgatcgat

SEQ ID NO: 152505 - DNA, 447 bp, Arabidopsis thaliana landsberg
aagaacaagaaagcagtagcctcccgtctctgctgcttatgcaacctgagacgtcccgtcctcaaaagacctaaaacccttcaacaggtaacttttcaatttttctttcttctcttttctcttagaatctcgttgggttttagctaacatattaagcagaagcttggaacaaacttctatactgttagtgttaggtttgactctttatgaattgcattggtttggattatgatctctatgtggaatcaaatcaaaattatcaatgtagttcgtcgaagttggatcaatagtgaaagtaacgacaatctttagtttttcagtctattgctagtttccagagtctcctatttttgtgttatgtatgagaagcgattgaatatgtgtgtgttaaagatatgcagagaatgctttatgaggtttttgggaggagatcatcaagtcattgtc

SEQ ID NO: 152506 - DNA, 94 bp, Arabidopsis thaliana landsberg
catatattaaatgtttatatataaaatttacgtattaaataacaactttttaataattcatgtagtaagcaacatatttccgactctatatttc

SEQ ID NO: 152507 - DNA, 119 bp, Arabidopsis thaliana landsberg
aagaccgataaaccatctccaacacctatatcacgtacaattctccaataggccatgcatcaactgtggcggcaaagctgactacatattatattatgcttgataaatttaaacttgat

SEQ ID NO: 152508 - DNA, 113 bp, Arabidopsis thaliana landsberg
aagtcaccacaagtttgtactttggtttgaatgctttttcacttcaaaataatattccgaaaacactagtgcttattgtgtattctatgacatcacttgtatgctaaacaata

SEQ ID NO: 152509 - DNA, 298 bp, Arabidopsis thaliana landsberg
cttgaggcagctaaccttgaagttgaagctgcgaccagtgcattacagaagcttgcaaaaatgagcacggaactgttaactcaagctgacatgagcattgaggccgacacaactcacactgtaatgccagagagagggtattcagaaggaagtaatgagtgtcttggtgaggtaaaaacagaagttgtcaggctctggtccttgacagagaaactcctccagcacgcaggaatcgttgctggtacatctaaatgcatggaaggtgtaattttataaagctcttgattaacgtttataa

SEQ ID NO: 152510 - DNA, 99 bp, Arabidopsis thaliana landsberg
ccccaattcaaaacgggtagttgttttgtaaaatcttaaagcaaattgtaccacattatgcgtgcagcttaagatgatgattctatttgtttacatttg

SEQ ID NO: 152511 - DNA, 443 bp, Arabidopsis thaliana landsberg
cttcctcttcttctagttgcttctttgcttctcctaactcttgcttgtctattactagacgaacgaatttgagctgtgttaacacttcggttaaatccttgcgccacagcagattcgactcgaagcataatctcgttaaacgtcgaatcaatggagattccgttgttgggagaagcaccacaagcaataatagcactgaggagacagaatcatcgtcgtcttcttcgtctgtagattgcgttggaatgggatcagacgtggaatgcgtcaataacggggaagatgaggagaatcggagctctggaatcttgagcggcggtgaaggaacgtttcttgaatggacggattctgaattcactcttcttttttctgggggaaccgccgaattgtgggccgaattaaaaggaaagtgttggcccctattaacctggatccctttttct

SEQ ID NO: 152512 - DNA, 348 bp, Arabidopsis thaliana landsberg
aataaaccttatcggaaacagaaaaaagaagagagagagctatcaatcgatcattgattgattgcagagaagcagggaaagagacatttccaaatctaatctaaatccaatccaattgaggttttttccatctgtctctgttgagctacttctgaattagcttcttctatgttcgatttccagctgctgatagtttagctcgagaatcaatttcgaatttcatcttggggcagccattttagtaatttaggttttgaatcttccttttgaggcgttgtagggttgttgctaccttaacgaatgacgacgacttctgtttgcccgttctccaaagctgctcgtcctgac

SEQ ID NO: 152513 - DNA, 398 bp, Arabidopsis thaliana landsberg
cttcaatggtaagaagagaaacatcaaaagtacccccaccaagatcaaagatcaacacgttcttgattccaacacttgatgccttcttgtcaagaccataagcaatagcagcagccgtcggctcattgatgatacgcaaaacattcaaaccagcaatcacaccagcgtcctttgtagcctgacgttgagaatcattgaagtatgcaggaacagtgaccacagcgttcttgatcgaagaaccaaggtaagcttcagcgatctcacgcatcttaatgagaaccattgaagagatttcttccgcagcgaattgtttctcttctcctttgtagtttacgaaaatcattggtttgtctgcttgtccaggggttaccttgaagggccaaaacttcatgtcgctt

SEQ ID NO: 152514 - DNA, 54 bp, Arabidopsis thaliana landsberg
ctataaataatgatgagcaaaacggtcgctttgtttcccctgtgggagccgaag

SEQ ID NO: 152515 - DNA, 247 bp, Arabidopsis thaliana landsberg
gaagcttcaatgtctgcagttgcaattaacatgaacacgatcaatcacttgtccaaaacctgttaaaccccaaatatccaatcaccgatttgcttcgatcgcatacccttttcatattctctcattcctctgattccaaaaaccctaaatggcttctcctcttactcttcttccgttagtcgcagaacgagattcatcattcccaagagacgacgattctgttgttccatggagcggcaagactgct

SEQ ID NO: 152516 - DNA, 689 bp, Arabidopsis thaliana landsberg
caggtattcaaaaactcctaagtctctcttattctgtttcagttttcttaggcatagttattgacagatcctcaaaaaattcgcagctttaggaggcgtgaacttgaagcaattgatggacgatgcagcagatgaggtcggagggaaaattttgttagattttaaagacactgcaggtgacagaatccaagtctttctagaatgacacacacctagtgaagaaaaagtaaatacagccgggaaacatttaaaaagagaatacaaaaatgtaaagattttatttgttccgtgaatgagaaatgtattacacatcttcaaaataaagaaatagaagtgaatgtgtatatatcaaattatatgcatataacaaaaaaagggcagacccgagcaaggtttgccactctcacactggtacaaatttcacaacaagctctcaatttggtccaaaccagaaaaaaataaaaatgaatgatgagtgacgagtaaggcaagaacaaacagagaagaaaattcgtggagccgtgttgcctggatgaataatgtaacctgagtacttttatcgactgatattacatatcccagagtaaagaaaaagcacaggcgagcgtattcttgattacacgaatgaagtcaagtgcatcatgtttggcttgatcttaccggtatccaccaccataggattgttgagg

SEQ ID NO: 152517 - DNA, 164 bp, Arabidopsis thaliana landsberg
agtgaagaatttaggagaacatccggtggttcaaacatcaaacatcataggatgtttcaaggggaaaaaaaggccacaaagagcttcatgtatgcaaatgtaaatactctccccacctccgttgattggagaaagaatggcgccgtccctcctgtcaaaaacca

SEQ ID NO: 152518 - DNA, 138 bp, Arabidopsis thaliana landsberg
tgtgatgcaaacagatgagatgtgatcacaagtcactaagtcaagccaagcaataacagttttggggtttctaacagtcttaagtgaaaatgcagaaaacataaacaaaaacagaattactaaaatcactcgaccaca

SEQ ID NO: 152519 - DNA, 292 bp, Arabidopsis thaliana landsberg
actcacgtgacagtctatgtagcttagaaacaaaatacaaagcgcaatgtgatgtaattattcaaatacgacaatctcaataactcatttctaagttaaataatcaaacaaatttagcaaattgaaaattatgcagggcaactctaggcacaacaattatataaatgtcctgatatgtgttctgttcatcaaacaatatctagaacaaccctaaccagcctgtagtcatggtcactaggtcccttctctagcacatacaaacagccatttattagttaaaaatactaattgt

SEQ ID NO: 152520 - DNA, 261 bp, Arabidopsis thaliana landsberg
caaaattgcaaaagctctttctagaagaaaacataaacgttaacaagaccaaaatagacaaatcgaactatcaaaaatttataactgttttccttcttttgtagccttttaaccaaaatcactcgtacaatttcttggccgaaagagttctgagggttttggttttgtcctttgtagctttcgcttcatacttctcgctcaacgctatagctttagccacggctttcatcttccttgcattctttgttctcttcatgtttg

SEQ ID NO: 152521 - DNA, 558 bp, Arabidopsis thaliana landsberg
aaagatggaccataataatcaggtgaattttcagctgcttcctctcattttgttctgacttaatttctgagttcgattgcatatcagattcttgattaacctgtatctagttgttcgatctagatgttattgtgtcagatctgtgtttcgacgttttggtctccgataatccgtagaaattatgcatttgagctaaataaacattgctaggttagaggatgtgttggcggataataatctttatgtactcttttgggtagcatcgtaatggttattacaatgtaaaattgctacagctaatcttaccaaaactttatgctttcttagatacaggcaccagttgaaaattatgcaaacccaaggacatgtcttttccatgttctcttcaaggtatgatttagagtataaatcagtttagtcaaaggaaatgttagacattggacaaatgttaaactagtttgtatttccccttggaccagggtgatgcgttggcgttttacaatctcaatgctctcttcttcaacagctttgtcatcatctttgtaggcactgtgcttc

SEQ ID NO: 152522 - DNA, 215 bp, Arabidopsis thaliana landsberg
atttatcaatcaatttatttcataaaataatcaagtattatatactaatacaattttaatgcaatattgtaaaaccaatcagaataaaactattttgtgcaaaatctggattttacatatatcttgacaaaacttttatttagggtaatatgaattcgtgcaaaatttgggtaaaatgatttcgtgcaaaattagggcaaaaccatgaacatttt

SEQ ID NO: 152523 - DNA, 335 bp, Arabidopsis thaliana landsberg
agagaatgttcaattggtttcgatttattacgtttctaacacctcacatacatcaattttaagaaagcaaaaaagcataaattagatttccacacatttatcggtacataaataagatttcttttgaagaaaatcataagagatgtaatcaatcactaaacactgaatttctttttggcaaactcgatgaactcggcaacggtaggcatgtaaggttttacagcttcatgggccctgaatttctcagcccactgaatcaggcccggtgttgtgtctggacgcaaaaacttaacacctgaaaaagcttcaatgacagagattggacctactatggc

SEQ ID NO: 152524 - DNA, 263 bp, Arabidopsis thaliana landsberg
ctctctcttcaacaaaacttattactcggatcagctattcatcttaaaaaccagacttcattcagacccagcagggagattcagaagcttagaagagtggaagcatatctcagcaaaatcaccaaaccttccatcaaaacaatccatgtaaccaaacaaaccctttatggaattaatctactttttttttccatttctgtgatcatttttgttattgtgaaactgtagagcccagacgaagatgtaatagaatgtgtaccgtc

SEQ ID NO: 152525 - DNA, 124 bp, Arabidopsis thaliana landsberg
agtaacaataaattccaattatgtctcgaagaagacaaccaatttaggaaatataagcagcagaaagtaacggctaaaacaagtctcgaccgaatacttggtggatttctaaattctaaacaga

SEQ ID NO: 152526 - DNA, 124 bp, Arabidopsis thaliana landsberg
tcctactcaagaaccctaaaatgccagttgagaaaatttagacgctcaaggatgtgtttacatcttgtccggtggctcgaagcaaattcaacttctgcgtactgtttctttggtgaatcatgga

SEQ ID NO: 152527 - DNA, 205 bp, Arabidopsis thaliana landsberg
  unsure (1)..(205): unsure at all n locations
tttctcatcctataaaaatggatagcaaatatcaactactaatatttgagagtttgcaactttttttaacaaaatctaaggaaatagagagaaagcctaaaaaaaaaacaatggactaatatactaacataatatatggacagacaaaaatagccacttgcgntttctatttctttctcttaatcaaaagctcttccttcttctt

SEQ ID NO: 152528 - DNA, 77 bp, Arabidopsis thaliana landsberg
ggtccccccgaaaccagtcatccataatatcaaataaatctttttcgtctttggtaaatttaccaagggctatagtc

SEQ ID NO: 152529 - DNA, 507 bp, Arabidopsis thaliana landsberg
aaagaacgtaaaagccccttatcggatttgaaccgatgacttacgccttaccatggcgttactctaccactgagttaaaagggccgtcttggtttaattcctgactgagccggtagtaaataaaatctatatatatatatatattaaatatatatacaatagacgcatagtggttagtagctcatttgggaactagaaatgagaatttgaattgacttcaaatttacttaacggggtattttttgcttttttaatattggatttgataaatatccatgcaatgaatttttttttaatagcctagcgcatcgaacgaaattaatttgatttatacatgtactcagcaagttgacatacacccaagatattttatcttgacatgtgatgaagagatacggattatcctctgaacaataattttctaaaaaaaaaaaaaaaaaagcaaatttttgataacttaacttataaatccacctttttccctaattagaagatggattctggctg

SEQ ID NO: 152530 - DNA, 613 bp, Arabidopsis thaliana landsberg
ttcttctcttcaacaatttgaacaagtgtgattgtttgtgacacaggtttgtttctttctctctttcaatcaaatctcgtttacctaaaattttaagcaaagtttccatttttcagttttcattattggaagtcaaatctaattatccttcaaattttctcgttaaaaggttctttttcccacatttggatcggcgaatcttttgatataaaggtttgatttttttattttctgggttgctcttgatttgctattcctagattgaacttgttgacatttctctcatttgttatttcataaagctatcatctttctgcagattacttcatttctggttattctggaagagtagagttctcaaaagaaatggagtctaaggaaattagatcctcctctgtctttgagagatcgatgcgttttaatggactgtttcaagataagctgagagttgttgagaaacagaatcaaccaccaaaacggtttaaccaaaaggagtctatttctggtttcacagtgattccaacgaagcaactttgtcgagtttatctccagaaaccgaatctgttggcttgcaagggtataattgacgcactagctaagcctcctcatagga

SEQ ID NO: 152531 - DNA, 601 bp, Arabidopsis thaliana landsberg
tttttcggagaaaacttttcaggtttgatattctaaaaaagattaacataagaaatctgtagctgtaaaactaatgatgagttaagcatttagattacactgaatgatgaagattctcccaaactaactttttatttttgttttgtttcttccttggggatctgttgtttgtctacacagctgagttgagagtcttccatcagaaaaatagttaaacagtaaagagagaagtcctgaagaacctcaagataagagctcgttctctctatcactgttaactctgaaactccgagattatccagcaaaagaccaatactttcaattatcgattttgggacgctttggctgtggagattctagttcctcacatttcctggtttcttcttctggaacctccttcgaatcagcagtcttcttgtcttcttgttcagatttggctgcggaatctgatgttgaggctgtccctttggtaagaccagagttttgcttctcgaacatcatttgcaggtacttgccttgttcttctattcggagttgcaggtttctttgaatctgcaggcaaaggaaaagaacacatgtcatacccaaattcagaatactt

SEQ ID NO: 152532 - DNA, 265 bp, Arabidopsis thaliana landsberg
gaaccacaacaatgcctcgcctacaatgcctaacaatggcgacttcactaattctgctgcttcaagctctgagtttagtgagctcaactattctgtcccgggccgatcggatcacccgtttacccggtcaaccccgagtcgggtttcagcagtactcaggttatgtcactattgacgagaagaaacagagagctctgttttactacttggctgaagcagaaaccaaacccatctctaaacctctcgttctctggctcaatggagg

SEQ ID NO: 152533 - DNA, 168 bp, Arabidopsis thaliana landsberg
cgattgactttattgactgagagaaagcttttgacaatgggccacagacacagcaagtccaaatcctccgatccgccaccgtcctacttctcctcttcctccggcaacgtagtccaccatgttaaacctgccggagaacgccgcggatcatactgtttcggaaccgtc

SEQ ID NO: 152534 - DNA, 173 bp, Arabidopsis thaliana landsberg
ttagagaatccataatattagactgtggaataaggatgcctgttacattgaacgatacaagacagatcatttaacatactaatttccttcttcgtagctacaaatcgctcacgagttagtatagactaagttccttaatattacatgcatctacaagatgggaatgaccagaa

SEQ ID NO: 152535 - DNA, 302 bp, Arabidopsis thaliana landsberg
  unsure (1)..(302): unsure at all n locations
ttttcctcggcttgtctcagattgacttgagctcttntgctgtatctcaactggtatgtggttctttgccttgtagcgatttcattaaacaagttggtttgttgatgtcttggtgggttctttttgtttggtcgggttttacttcagcgagtcttgttttctatcgtcgaggtgtcttgtatgtttcttgagaagtctgtagctttttcccaacgttttttatgtatcagtggaaaatggcataaacacaaaaaaacaaatcagttttgcaaattgtaaactttggtccatttgtttgttta

SEQ ID NO: 152536 - DNA, 488 bp, Arabidopsis thaliana landsberg
  unsure (1)..(488): unsure at all n locations
cagtcatcattcgttagtatagtatatatatcttacttccacaggacaaagccacattcatgtgatgctctgattcagtagtccatagtaatttagcnccactaatgcttggagatttttacagatatcttggatggctcatgctcgtgtaattagcagaaatcctaatctaaaaaccctcaaagccaggggatgtaaaattctactccaattagaagttgacggcagaactgacaatttctctccgttggtttctggtcaagaggtgtttaaatgtttaagcaaggggagtggattggaggagcttgagattggttgggggttttcttatttctcttttgagtctttgagacctgcagcttcgttcctacgagttataagtgtgggtttgggtgcttccttaggtgaagatgttttaaagcttctaccttcaacttgtcctttgctagagtctatcgtcctccattttcaggttgttctggttcttt

SEQ ID NO: 152537 - DNA, 816 bp, Arabidopsis thaliana landsberg
aacatctaaatcacaaacacaacaatgtctacatcaagctcgaatcgaaataagaagagattaaacaacctctgctttagctgaagcttcaccaccaagatctcccatatgaatctcactaccttcagtatccatcataatagcaaccgcaaagcctttctcctcattaagcctccgaacactacgaatcacaccgcgatgccaatcacgcgtaccgtgacacatattaagcctcgccacattcatacctcccacagcaagcgcctcaagctgctcaaatccacaagtcgccggtccgatcgtacagatcagcttcgtcctcctcgtacttctaaatccattctccttaagctccgcttccgtcacagtatcaacctcaatcccagacgtatcagtcgtaaccgccgtagcgacaacggatctctcatcagacttcacagcaccagtaccgttaggtgagagaagtacttgcgaggatgatgatgaggacgatgaatcgagatccggtgaaggagatggtgacgaggaggctctgatggaagtgtatttgatggttgttagagggaagcgacggaaggagatagaggagagaggacggttgaattgtgagtgagggagatggagaaggtgaggagtgtgtgaaggactggagaattggatagactgagacatagtttcgccggcgacggaggaagagagattggagaaatcgaaatctcaggacagttggctctgagaagaatgaaggcggagatatcgaagtgtgagagtgttgaattggattttgatttttcttttttctgatatgataggact

SEQ ID NO: 152538 - DNA, 872 bp, Arabidopsis thaliana landsberg
ttttaacttttggaaaattccgtcctaacaagtttacatttttgggttttaatacaaatttttaaactttctacaaaaagggtttcataaactaaaaacccttggaacagtatttctgggaattacaagttttcttcttttctcttgaacaagcttgtgttatctatctatgtatataagtatatgtcacatatatatctagatataacatcccatgggctaatcagtttcaggaatgctatctaacaaaggtctccagccttctttatgacactcatcatcatcatcacacagatgttgcttagcaagagtcttatacaccatttcatgaacagaacctccttgaagcagcttctccagctcttgcttactcacaaccatcttcactctcacaacaccattagtcttctccttggtgttgtcacaacaatctgttaatctatcttcttcttgttcttctttttccacctctggatttgcaaacctgactttcttcatcgtcttcttcatgtgcttgattgaggtagtctcctggggcaatagatagtagagacgaccacagagaagcttggcttggggatgaagatgacaattgttggtgagagagtcaaagagagagtagtgaggagagaattgggtgaggatgtgatgaaccttcataggtcctctgtattcaactactttcccatcatttctcattatctttatcactttcttctccattactaaacagttccccatacttttctttaatttgttttttttcttgctttagcttgtgctttcttctctacatgtgtgtagagatttgttttgtctcgggttttggagatttgttgtttgcatatttatagagcttacggttatgtgaa

SEQ ID NO: 152539 - DNA, 557 bp, Arabidopsis thaliana landsberg
tgctgcagagtggagcttaaaagtagcaaaattgtgttaggggaattcctcgagtttaaaggaaagcaggaagataccctggctttaagaaatatcaaaaggtcaaaagtcgaccgtgtctctattcagaaaacaagcatgtttggattaggtaaattctctttagaccttgattatttgtttgcgttcgcgattgtgtttacatttacaaatgagctatgtaattaataaaaaaaatgatttgggttgcagctccttcgaggttgcaggttctgtattcgtatagggactacagaagtgaaggcagttcaggggcagagtcgaaagaagtgactgtcaggtcgagcactgaggttctgtttcagccacgagactccacaaagatgaagaaattcaagctatcgtcgcttgtctccatttcactaagtgcctaactatgaagtgagcttattagcatgcagcagaggaagttgtcaatgtttattgtaacaattacattgtccatgactgaagtaagcttatgttattctcaagagtatttacctctttatggaaat

SEQ ID NO: 152540 - DNA, 341 bp, Arabidopsis thaliana landsberg
cagcttgcaatttgctcgtgttctcttccatcattcctttgttaagagcctcttcatggcttctacggttgattccaatttcttctcatccgtcccagctcttcacagtaacctcggacttttgtctcctgatcaggtttctatacttctgcattctgttatatgtttgtgtctggactagtgatccattcttttcttataattgtcttccatttcgtgatctggttttcgtggcagatcgaactggcgaagatcttattagaaaatggtcagagtcatctcttccaacaatggcctgaactcggtgttgatgataaagagaagctagctttttcgacagg

SEQ ID NO: 152541 - DNA, 90 bp, Arabidopsis thaliana landsberg
cttttcgcatagcgtcttcgagctgttgagccaacgcatcagccactttattcaccttaccaattatagcctgtcttcgatatgggaagt

SEQ ID NO: 152542 - DNA, 407 bp, Arabidopsis thaliana landsberg
tttcagaaaatgtatttgataaattaaaagattctacacttcacagaaatataaatagtagtaggaaccattatctcttctacgagctcaaatcaaaacgaaaaaaaaaaatgtaacttttctctactaaggtttttgagtaaaatgcatatttagtaaaaattcaacaccccttgtgtcaatgcttctcttctgcagcaccctgaaccagtgagtactaaactgagctgcggaatgaagaagatcagactttgccttcgagtttatcattattaacaagtggaagtaattccatcttgcttcttggggtacgaggagtcctaggagttcccggtgtttgctgtgaaagcatatgcctcacatatccataaaacgtgcagcccacaagcgtaattccgcatccaaca

SEQ ID NO: 152543 - DNA, 502 bp, Arabidopsis thaliana landsberg
ttgtattcttttgttatcaaagggtttcgactttgctccgaggaagaagataatatgaaaagagctttttagggtttatcattctccttgactttgcaaaacgtgaaatgtaaggcactttgatcgttgtactttgttgctttttatacgtatcgcttcctacaataagttaacaatgcttcctcgtagaattgcaaaacatttgtggaccgtgatttacatgactgagctcttttcagtggcttctttgcagcagcttcttccttggaggactaatcaagacagaaatctgttcctctaaaaacgatcgccgttctaggtaatcttgccattcttgacgagtcttgatctttagaatcaaatttataagggatcacgagatacacgtattaattattattttttttttttttgctttttgtggttatacaagttcactcaaatgatggtgaaagttacaaagcttgtggcttcacgtccaattgtggtcttttgcgtcctg

SEQ ID NO: 152544 - DNA, 302 bp, Arabidopsis thaliana landsberg
aagcggttcgtgagtagcgtctgttggaggcaatcaggtgtgtgtccagtgtaccctagtggctggaggatctgatggagtatgacaggtttacgtgggcaaaagaaaaccatagtgttcttcttaatttatcattactatattttatgaattatgatgatgatgatgatgatgatgcttcttaatttcttttccttttttcaaatttaatttcctatttgagatgatttttgattgagttgtgagagcatacgatctgtttgttttttttaaattataaaggattttttacttgttcaata

SEQ ID NO: 152545 - DNA, 445 bp, Arabidopsis thaliana landsberg
cggaaatcttcagcgctctcaccaagccagttcacaagaaactctccgttcttaggcggcttcccgccatcccaagtcgacgcgatgaataaaactagggtttctttaggtagatcttcaggttcgtagctatgtggatcgacgatatcaaatgctatgtcgttagatgcgcatagctcgtgaagccgttgagctaaggctttagctgtaccagtttgggagatgaagaagatctttcctctgctggctttcaatgtagagctagggtttaacgagaggtttttcagatgtttcaagcgacgatatttatggatacagtaaaaagtcgtcgctgagagtaacgcaacgaaagctagtcgaacacgcacggaggaagtcgtagacatgacggaagacttgaactagatagtcaagcttacggcggcgcgtagtgtttacgcgaaac

SEQ ID NO: 152546 - DNA, 386 bp, Arabidopsis thaliana landsberg
ggaaaaatgcgtggcaatcaattgaattgaatgccgccataaatgtggtaatgtcccaaccgtatttttggatccaagtttttgtgtttgttcagttttatctttatttatggttttgatcatagagtacgaaaaattagaaaaaaggatactccccccaatgacaagaaggaattcacaaacttttttttattcttaattttttgtagtgtaaatgtaaaaacggataatttggtatgaaagaattataccgaattgcatcatactatatatataaacaatatctctcggattgactctttgagttctaattaatatcggtcgccaaaaaaaatttgtagaataaaatgacataatcatcaagcgggacagaaattatttttaac

SEQ ID NO: 152547 - DNA, 235 bp, Arabidopsis thaliana landsberg
tcgctcatcttccacttgtgcatcattatctttgcgtcttcgtcaagtcaaattgattccattacccttttagatcgtatcatactcctctttgttcccttttgttgttaagtgaaaaaatgggttttggtaatttaattgttgggcatacatttgctattttggtattcttccggtaatgtaatgaaagagttgttagcatataaaacaaagttcagtttcttctttctttgga

SEQ ID NO: 152548 - DNA, 91 bp, Arabidopsis thaliana landsberg
aaaaacattcttctcacaagaatcagattcaagatagaagttcttcaaacaatgtctagtcctctgggtcacttttagattctggtttttc

SEQ ID NO: 152549 - DNA, 373 bp, Arabidopsis thaliana landsberg
  unsure (1)..(373): unsure at all n locations
gtgtcatccagccattggtagtcnctgaatgcgtggtgaccgcaacgtgggcatatgacccagataccagttaggacacagccttgacaggcacaatagagtggccaagccaagtaagagagaggctgagggaggagacagaagtaattggtggcgacgtagtataagcatcaggctataatgatgtcactgataaggtagtagaaagagcgagggattgagcgtttgaaacaatgcggcgggattgctttcttcagatctcccaccgagaaagtcggtttctcgcgcggcacacgctatgtggtgtcggtttccgatttcttggaagaagtaggaaccggcattcttccacctgcggccatgtttctgcaga

SEQ ID NO: 152550 - DNA, 290 bp, Arabidopsis thaliana landsberg
tgggtatcccacgtccaaaagaagttcaaatggatgcctgatttacgaatttgagagatttatagactctagacaaagagattggctagaccgcttattgactttggtagattgttgcttaaactctgatctactatgttttatcaacgagaattgagattaggaagtggttgagttatggaggtctctgtcacgacaatggattgacccggtttttgaatctatcgtcaagggtatctacctttcacctgttagccacctgatgaaccctagagttgcccttatcaatg

SEQ ID NO: 152551 - DNA, 84 bp, Arabidopsis thaliana landsberg
cgcctacctttaacttcgaattagggtttatcaggattcagtcgcctgctcacttgaatttcttcgcaagctcaaaaagttccg

SEQ ID NO: 152552 - DNA, 179 bp, Arabidopsis thaliana landsberg
tatctacttcgcaactaaaactcaaaacaatcaaagaaaaaccctaaaagaaaacctctatatcgaagatgggagttttgaagagaagagtatcgagcagcagaggacttggtggtggtcttagagagcaaagagcttagctttacatcatccaaccgatgtggtggtatggttcctat

SEQ ID NO: 152553 - DNA, 441 bp, Arabidopsis thaliana landsberg
cgaaaaaccaaccaaagtcacataatcgtcttcttcaactaacaaatcccaactaatcatcatctgtctctctggctctggcttgtgtctgagctcgaacttaaagaaaaagaatctcaccatgtctttagctccgagcagttatccatctctgtattcttcgccttcactgccaagaacccagcaaaccaagcaaaaccctagtttgatcactcaatccagtttcatttccgccaaaagtctcttcctttcgagcaattcggcttctttatgcaatacccatgttgccaaacgccggaatttagctttgaaggcgtcggagacagagtcttcagctaaagctgaagcaggaggagacggagaagaagaagagaagtatgaaacatatgaaattgaagtggagcagccttatggtttgaaattcaggaaaggaagagatgg

SEQ ID NO: 152554 - DNA, 138 bp, Arabidopsis thaliana landsberg
tgtgatgcaaacagatgagatgtgatcagaagtcactaattcaagccaagcaataacagttttgaggtttctaacagtcctaagcgaacatgtagaaaacggaaacaataacagaattactaaaatcactcgaccaca

SEQ ID NO: 152555 - DNA, 570 bp, Arabidopsis thaliana landsberg
gctaggaagagctatcaaggcagaatcaaaatattggaatgatataattgagggctatgttcgcgccttataatggaaagagatgtagctaagaaatgttttggtcatgagagcaggctttggcgggtatgaaataatatttctttgttaggtattatacaggtatcttagcttatctctcttcatttattcctttggctttggcagatctgcagctgcactaaatgatcataaactcgattgctgggttctaagcgtggttcctgtcagtgggcctaacacattgcctgtcatttatgaccgtggactgttaggagtgatgcacgattggtactgttttctccttagaatctgtcatatgaaatcagaatttggaatcctatagttgaaaccttggaaattagtgattcatcttgtccttttctctgttcatgttttttaaacacaaaagttcatctgtttatgtgtcttaaggtaaactaagatttagtctctggctctggatatttttttaataagtgatgcattctacctcaggtgtgaaccatttgatacatacccacggacata

SEQ ID NO: 152556 - DNA, 126 bp, Arabidopsis thaliana landsberg
ataacatcttacaaacaacaacaatcaacaatggcaacttccatgatccctatattcgtcaccttcatgctcgtgtgcgccacatggcctcgccgatacaaatatgcttaagacttttgtgttgtg

SEQ ID NO: 152557 - DNA, 392 bp, Arabidopsis thaliana landsberg
tataggtaaacgaactatagaatctgaagaatagaatcgtaaaatcagagcatgaaattgcatcttatgtcaaccgataagaaaagcatatttgtactttaaagaaaacttatactaaatggctaattacggccacgtttcttgacgggtacggcatgtaacgggttggtcttgtgcaatgtgagaccgaaagtctcgtccatgtccaaatcctctgaaccgacaccgtttggaagcttccagtcaaatgaataaagaagagaagcaagcataagaggcactgttttcacagccaaaggcaatcccgggcatattctacgtccggctccgaatggtgtaagctcataatctctacctctcaggtcgatatctttccctaaaaacctctctgg

SEQ ID NO: 152558 - DNA, 73 bp, Arabidopsis thaliana landsberg
ctcgacgagtcaattttaaccagatttagtggatttgtggatgtgatttcttcttttggtgagttaactcctc

SEQ ID NO: 152559 - DNA, 364 bp, Arabidopsis thaliana landsberg
agaaagaacatgtaggctcatagaagggctctggtttagatactacgtgatctaatcaagctcattaacaatgcatgctttaacataggatttctcggcttcttctggttatcttagctttaagtatagagagtttcgcggaacgcccccggttactctataatcatagtctgagttcgagaacggtgcaataacaatcctaatattagctagatctacaatttatctatctcccgagacaattccttagacccgacgctttaatcacttgaatctacaactcatttacttgcttatttgtcttcaatattcaattacttcatttagcttattaaacaacatcataagtctattgtgtgaacat

SEQ ID NO: 152560 - DNA, 758 bp, Arabidopsis thaliana landsberg
aagagggaagacacagtcctctcacaactcttccacttctctctttcctacaaatttctcgttcctccgacctctctcgccggtaagtcaattttccggtgagaaaatgattaaatcttcctgaaatgtataataaaatcctctttgtgccatacacttgtgtttttagtaactgctttatcccaaaaactctggaatttttactttcatagctcattcactcatttttgtttttatctgaatttggttcaaagtttcgttttttattagcagaagtcatctctaactacttaatttggtgaagatgatctttttcttactttaacatgtttatctttgtacaaacaggaaattgtgtagcatttgtctataaatgggtttggattctaaagaagctgatttggaggtaataagagatgagaaatctgaagcaaacactgtgtgtttacatgcgttttcagatttaacctatgtgtctcctgttgtgttcttatacctactcaaagaatgctataaacatggtaaatccttgctttacttctttttcaagttctcaatttgttttctagtttaagtaaatgaatgggtatttcaggtagcttgaaggcaacaaaaaagttccaagctttacagtatcaagttcatcgagttctagctaataaacctcaaccaggacctgctactttcattattaattgtctcactttacttcctttatttggggtatatggtgaaggctttagtcatttagttatatc

SEQ ID NO: 152561 - DNA, 505 bp, Arabidopsis thaliana landsberg
aaaaaaagagaaatcgaacccccaaataaggaattctgacagagtcgcctgctagatttgttttctttctctctcgtcatctctcttcctctctgtaatcccaaccggagttacgattccttcttatcgtaactcctgcttccgatctcgatccaattttcacttttgttttgtccgaacggtaaatcatttcgcggctttttttttttaaggtaattgatctcgatccttgaagaaaattcgtaattgtatatgcgcgacaaatgtgtattgatgcattcgtattggtgtattgtttagggaaggaggaataagcaaattttgatttgattccgtttttttgggggtgttagtgatcttttagatgaagtaaagaaattttgattattgaggggattatgtgagttatggtatcatcggcaaccatattgcggatggtagcaccatgttggaggcgaccttctgttaaaggagatcattctactagagacgctaatggtcgatg

SEQ ID NO: 152562 - DNA, 174 bp, Arabidopsis thaliana landsberg
  unsure (1)..(174): unsure at all n locations
ctctcggccattggaagtttggatcttaattttaacagattttttagaaaagatagattgagggaagttaacctaatattgggncttatatatatatatatattgaaagaagcacgaggaaatatgaatatagatttcagtggaatataaatgaaaagggtttctttgctatat

SEQ ID NO: 152563 - DNA, 143 bp, Arabidopsis thaliana landsberg
ctttatcctgatgataataatgggtctgaaagttactgtgaaaattctacctgtggcgtgatccgttgctgggtgctgcagtgcaactctgagaagtcgaaatgcctcgtccacgtcatgcttttcaacctttatcacaaaaa

SEQ ID NO: 152564 - DNA, 234 bp, Arabidopsis thaliana landsberg
agcaacaatggattttttcgacgaagacaggcctagattcgttttccaatctcgtccttcttcttctcacacggcggaggaagaagaagaagctagaatccctaacaagcttttcatttcattctccgtctcaatctccctcatcatattatctctctccttcttctacaaagaatcaaaacctgccaaatcgctactattatggctttccctcgccttcctggtcgtaccttt

SEQ ID NO: 152565 - DNA, 287 bp, Arabidopsis thaliana landsberg
gcaatgaactctaatataactccagcatagattctctgttatgtgtctatcgtaatacaaaatccgtacatgttctatctcttgaaatgctcttactttcttttcaaaaataaaaaagggtgaaatacattcagcggttcatttcctaaaagtagcaaaatccccttggattcttcacaactcatccttagaaccaacagcatcatcacctcccatgagctcatcaagtgagaattcatcttcctcaatcaactctccatctttaccatcccactccattgtcttca

SEQ ID NO: 152566 - DNA, 466 bp, Arabidopsis thaliana landsberg
ttgcacatttttgtagcattctgaaggtagaggaagcgctaggcggcagacaaaatccactgtaaaggttaatgagccaccgccaaagccgttgaacttcgattttctgaatgtgccggagaaggttacttggactgggataaacggttcagaagaagcttggttgcctttcattggggactacaagattcaagaatctgtcagccaagattgggacagagtattcactcttgtcacctcccaaaacgctggaaagacgatgttttagaagattgctgcagcaactcacatcaaattgtaataacacgggccacttgattatcatatctacttagtatttatttactgatcgttggttggaatgcaggttaattttttagtagtgatagttttagtaacactttgatttgagttgtaatgtactttcttaacattttcttagataatttgaaggctatgtatgtca

SEQ ID NO: 152567 - DNA, 446 bp, Arabidopsis thaliana landsberg
atggttctttttaaaaccaaggaatctagtttttaaaatatttttaacaaatttctattgacaatttaaattctaatctatttgaaaactcacgaccattctgaaagtaagagcaagacggctattttagataatgttttaagtgaactttactttctaattatttcacttaagttttatgttacatcacaagtttccttttatagctaaacaacgctagaatttcaattattgtaaactgacagatgtctcaatcttgttatgcttagcagatcatcaaacaatcaaatttgttctccgtgttgattgaaggcgtacgacagacgctcctcttatctgtcgttactctggctttgttctcttgcataggtggtctaaaccgttgagaaatagaagaagatttgttgggcttctcagttaagttgacattgggcttgattaggtga

SEQ ID NO: 152568 - DNA, 364 bp, Arabidopsis thaliana landsberg
aagtagaaaaatgagtccaaggctctgtgctttgaagttctgtacatagtaataaacttacatagaagtaacaatgacaacagaaaaatgctgcaaactcatctatcataagttgcagagggagagcaaaatgagacaagagaatcgatgacttttcaatatgattaggaagaatcacacaaagccgctttcttcactcttctttgttccacttcatttgccatcctaaagctacacagcactcatattgcaaccagtatcaatatcagtaaaagcgaatgcatcagctccgtgctaaaacctgttaatcctctgtaaaaaatctagcttgttccatcccaggtggcgataaaggagggatggc

SEQ ID NO: 152569 - DNA, 88 bp, Arabidopsis thaliana landsberg
cttcttttgattttatctatccgccatgaacgagaaagccaacgtctctaaggagcttaatgcccgccatagaaaggtctctctctaa

SEQ ID NO: 152570 - DNA, 517 bp, Arabidopsis thaliana landsberg
atgagtgacctcaaagcagagcagaggatgcagtaaaaccacagaacaatgttgcaaatgaaagaacagagaaagagcactaactaactaaacaaagtacaaattgggaatcagtgttaaactaaattaaaaagatccgcaactatttttctgatgtgaatctagtagatggtagtggaggaagataccaacaactagtaaaaggggaaaagaaaccctagtaagggctggaaaaagtgtaccttagacttatcgagtcttttgacggcgacgcgatctccattgggtctgtggatggcgacgtaggtgtagccgaattgaccatggccgagcaacttgccgatggtgtagtgatcgtggaagtctttggagtagccaaaatcggtacgcttgccgcaggggatggagccggttcggcgtttggtagaggccttggtatcgatgggagtaggagcagccttggatttggtctgactgcttcgtctactgctgctagcaccagtgactctaatggcgg

SEQ ID NO: 152571 - DNA, 420 bp, Arabidopsis thaliana landsberg
ccatactcttcagttttctcacaaaactagaaaggttcacagcttgaaccaaaatatgtaatctttacaaattgattcaccaattcaataggacagattagaaattcagtgaccaaaatcaattgaagccagagtaaaagcttaccatgactgactcgccattatcgagacacttgatagcttcagattggaaggagtcaagtgtaaaggggaaatctttagctggtggtttattgtgaacgagggagcaagaggaacgtaattttcagggaaggaaacatcgtgaacgcaaccaactagctcttcgttgatgatttgggtggaatcgtcttctctctgaaccttttgcggcggagtagaatcagaagattcctccactgattttctcttcactgaacccatgagagaatggtgtgtgta

SEQ ID NO: 152572 - DNA, 404 bp, Arabidopsis thaliana landsberg
gctaaaaccacttaaaagcccattaagaatatcacttaggcccatattaaacaacacaatttcaatcattcaacaaaacatagaaacaaactcattgatgttcttatcagaactacctccttcagaaacagcctcttgagccaacactttccatttctcagcattctttctaatctctttaccttgctctccctccataacttcttccacacgtctcacaaactcttctcttctcacgaacccatcactgtctgctttaaccctaactccaactttccacacatcctccatgaacttagcatttgtaggctgatctgcccaatgaggcataccaatcattggaactcccaaactcaatccctctaacgtcgagttccatccacaatgtgtcacgaaacaaccga

SEQ ID NO: 152573 - DNA, 324 bp, Arabidopsis thaliana landsberg
gtaaattttgaatttctcttctttgaaatccaaatgatctggggagaaaattatgggtaacttaaatgaaaattgtcatatcataagcataaaatgtagttgtatgcttaataattttcatattatctagtttttgttctcaatgaaatcttagtatattacatttatttcctagtatggaaagtaactttaaatgaaaatttgaaagacaaaaaaaagggagaaacgaagaaaaaaatggaaacagaaacttactgatgaaatgcaaaagcgtttctgtaaacggctcctcgaggaacaaaggtttcttctttgtccgataca

SEQ ID NO: 152574 - DNA, 607 bp, Arabidopsis thaliana landsberg
cccaaatggtggcagtgggagctcccagttcttccctctcaataccgcactattgaatctgaatatcaaaaacgctatcaactaagctatgatgctacacatttcgatatcagagcgtacgaagaagaagtggtttttggaacctgaaattgactctctgcggggaagcgatatcgatatcggagcgtacgaagaaaaccccgtccggcgggaaagtgatgacgttattgaggatccgtttattcacatcgatcacctgcaaaacgtctccggcggtcgtcccaaacaagcctgccttttctatgatgaacaactgttccttctccgtcgtccacaagagccgccacgtagcagatagagagtcgtctgtggtgatggagctgcgcccgataaccgtcatggattcgatggcgttcacgatttcatctcgcttcttggggtctttctgggttctcagacctcgatcctcctcggagatcagctcaagcagcttcctcttggctcgctgtgctggattcgcgaagatcgagcagcttgttcgaaaaccggcacgacgagtgcggcggagtggaggagaacatgccgacagcgagagcgcgagcgccat

SEQ ID NO: 152575 - DNA, 383 bp, Arabidopsis thaliana landsberg
aaagtttgattctccaaatcaaaagagattacttgaagagaaaggtttgtgagaactaaagttaggttttggttgttcttgcaagtgagttgaaactctgtttggccgcaataattgggtttattgactccccacaaaggatacgtcacgtttggcaacagcctcggacctgcgtactaatacgagaattgggcaataataagagcagactaaaaatgatatggactttatctagcatggatttaataagagattgacaaaaaaagatccagagtcaatctaattgtagtagggctatttttcttttcttttttttgtcatactcatatatattgggtttctaattttcaacaaatgcgttgagaagaatagttccataaata

SEQ ID NO: 152576 - DNA, 354 bp, Arabidopsis thaliana landsberg
cagaagagaagtctaagccatcatggatctcctgcaaaagacatggacctaattaattcaacctcattgacaagatgttaaaacagaaactaaaacatgtgaataaagaaaaaaataccaagctctaataaaaaactctatcttgtttgattaagtcttgtttcagtcttgctttcaaatgtttgttgagtcttatggagtttaagttggttcaagtagttcgcagctttgtagggattccagtttgtaatggcattatataagccatcgttttcattgaaataaagcagagaattttcagagtctaaattcacagagcatttgttactttcacactcttactaaacacatatt

SEQ ID NO: 152577 - DNA, 596 bp, Arabidopsis thaliana landsberg
gaatctagtcaccaaagagaatgtactctcacaaactgagctagagcctttcaagaacttctcatctcaggtgaaatgaaaaacaagaaaacccgtcaaaacttccttttcggtttatcggttaactttctccgctaaactaaaccgaagaattgcatatttttctttctggttatgtagctagcggttcttgatttcattgcatgcgctgcatcagacgcctttgcgatgacggattcagggagccaattgtcgtctctggtctcgggttatcggatatattacggagcagggaaaatgccgacgatcagaccgaacaaacggagattctcagacatattgttgaagaacaatactatagagtggaaagtgttcgagcagagagtgagaaaaacggttaggcaaaccaaacatgtattggttagaccaacgggacgcagcgtttaccgttatccaagatgtaaagaatgtatgtgtaatgaagattgattatttggtttacattgttggttcggttttttaaacggtcttcatatttttcatggcatttgtagcggctacacattctagtgagtaccaagcttgagtttggttcc

SEQ ID NO: 152578 - DNA, 443 bp, Arabidopsis thaliana landsberg
taaagcaggttcttgaggaagaatcagagtgtgctttttgtatcgacatacaaagcagtggaagaaatggagaagaaagaaggttaggaagttgtgcctaatgacgtgttcttgtaagtatgtgcagcgaatcttctctttgtagtattttgtaacgagacctaagaccatccttattgatggtctcttaacataactcttatgttaagagatatgtcttataattaacaaaagtgacttaaagtctcttatataagaaattttgttagttataaaacatgtctcttagcataagaattgttttaagagatcatcaataatgatgctctaagaactattatactatgttccgtctcgattttgaaagtacttaaacgtcgttatcgtgtttgtctcggcgttttaaattccactgtattagtaagaatttatttttaaattaa

SEQ ID NO: 152579 - DNA, 313 bp, Arabidopsis thaliana landsberg
atttctctctctctcgcgatcaaaattgttaaacaatctcttagaagaaattcaaattctctctgtttcaattgcgattcaaatttcaaaaactgacaatggggaaaccaacggggaagaagaagaataataattataccgagatgccaccgacggaatcttccaccaccggcggaggtaagaccggcaaaagcttcgatcgatcagcaaccaaatcattcgacgacgacatgacgatcttcataaatcgagcattggagctaaaagaagaaggcaacaaattatttcagaaacgcgattacgaaaggagcat

SEQ ID NO: 152580 - DNA, 524 bp, Arabidopsis thaliana landsberg
ttgtgggttttcgtgtgcctatgtgtgttttcttgatttcatctctccttttgattgtactttttgattaatagatttgtgaatatgttgatctttcttggcttttgggttctacgatactcaaacaaaactttcacttccaatcaaagtaaaaaaaaatatatctgtcagattatcattattacagcatcaaacagccagcaaaagaggaagacacagaagacttaaccataacgataagacttgtggctaagatccaaagggagaaagaaaaactctcttgcaaaagcagagtttgagaattcatacaaattattcaagctgtgaacaagagcatcctgagggacttaaccagattgagtcttcctctgctggaaaacgactgcgaagataggaaccccaacaccgatgctgaaagcggtgaatacaccgagagacatcttgagagcttggtacttcatgcggtccaaattgtacatgtgttttgcgtggaggtagtattcatcgtaaccaccatgtcctcc

SEQ ID NO: 152581 - DNA, 232 bp, Arabidopsis thaliana landsberg
agtacgttttaatccagcagagccatttgattgaggtttcgaatcaagcgactgctttagcttgtatccaaagcgaatggacaatgtgctcaacaatgcaccccctgcaattagtatccagtttggcccttcaccacaaaatttatcacctcgctgatgcttggaaatgccatttcttcgtgtactcattgtatgagaaagtcaaaatgtatctatcatccaaacataacct

SEQ ID NO: 152582 - DNA, 939 bp, Arabidopsis thaliana landsberg
acttcgatttttcaatcagtaatattggtggttcagagatgatgatgatgaatcttttaaggagatcagcgatagccatcggccgccaatcaaaatcgaaactggcgtcgttttcctccgctacacaaccttgttccggaatcccaaaatcggtaaggctttcgtattccatctcactctgccggcatttctatataatattggctaaaagctattggttcttctactacatagacacggattgtttaggatcttgtgaaaattgaggtcgtttttttcagtgtctctagtcctgtttgaattgaatctctctagtgtccttgatctggggaaaacttacagtgttacttttgttatatatcagtccaagagggtttttagcaactcatttctttcaaaggtattttcttccctttacttgttaaatatttgcttcgacaacattttctttgctctttacacccttttgggcttatatgttagtctcatacctctcatcgtttttcttatgcaggactctactggagctaatggtcagcagtgataattgtgtaatcaaacttcaaatcctagtgttgatgtgtaccttgttgttctgacaattgtctgttatacaggactattgtttcgcttccgaaacccgcaagcaagtatatgtacggaagctcgtccaaagaacatcaactcatcttactttaccagatcttttgcatcaagaacttcaaaagaacctgggaatcagcagaataaggtgtttcttcctacaagtttctacttaatgtctacgttatgtgtttgccatttatcacaacgcaagccgtcaaaagcgacagacagcttctgtcatctaataatgatgcttgctttgtgccaattgtattacaggctacgatagagagtgcgactgtggaggatccttttgatctcctacataccaca

SEQ ID NO: 152583 - DNA, 304 bp, Arabidopsis thaliana landsberg
atttaatatagattctacgtcacgcgtaggaacaactatgatttccatttataaaaacttgatacacacgtagtagtagcttacaacaatattggtcgtggtacaatttaaaaacttcaacaatagccgcctttctacggcttattatacgaaggattactctatttattgccacatataaatcgtgaaactatatagtcccttacgagatatgacacttcactcaattgccgttacactccatataaataatttttcatggacaatagcaaagcattccttcaccaccaacagcacccccacc

SEQ ID NO: 152584 - DNA, 62 bp, Arabidopsis thaliana landsberg
gagcttttggatcggaatctgttcgctgatgctttggtgaaaatgggtttcggtgcaattag

SEQ ID NO: 152585 - DNA, 696 bp, Arabidopsis thaliana landsberg
  unsure (1)..(696): unsure at all n locations
agatggagaagaagagacacgtgtagggcagagatgtaagatgaaatttggccggtggtgatgataaaaagaaatattgaagtggaaggagagagcattaatggaatgtggggtttaagcatttaatggaattaaaatgancgaaccagaagaagatagagagattcagaaattgctcagctgctcacattcacaacaaggttcgtttatttattactatttagtataaataaataataaccatacctttatttcttcacctctcttatttaatgctgctaaaatacggatttcatttatgaatatgatataacgtatagtcatagagaaataaataatttgttactatgtacgttgaattttcctgactaggatacacactttcttatattactatgggtctcagacaaaagacgccaagacgatgaaggttttggagcctgtacgacggcgttttggctgatgattcgttttttcctctctttggagttatcaaaatgcattaacttcaaaagctgccaaagttatcatagaaacgaaagtcaacaacacattgaatttcgtttctataataactttacatcgtcggtggctttactgttttctgttaccgaattttatgttcaaacttttagctgtcgatttaatttttgaccaaatttttttgatgatttattacatattgatgaataacgt

SEQ ID NO: 152586 - DNA, 1971 bp, Arabidopsis thaliana landsberg
atgtttagtgaagtcaaaatcttacaaatagttcttgttcagtggcttactctgttttcatttacttacaactcccatggcacatatatcctggatggatctgcagctttcaacgaaaatagttacttggttttaacgaacaccacgaagcattcctacggtcaagctttcgacaacacaacatttgaaatgaaggaccagtctttctccatcaacttcttcttcgctattgtccctgagcataagcagcaaggttctcacggtatgactttcgctttttctcctacaagaggccttcccggagcttcctccgatcagtacctcggattattcaacaaaacaaacaacggtaaaacttcgaatcacgtgatagctatagagttagatattcataaagacgaagagtttggagatattgatgataatcatgttgggattaacattaacggtttgagatctgttgcctctgcttctgctggttactatgatgataaacatggaagctttaaaaaactttctttgatcagcagagaggtaatgaggctttccatcgtttatagtcaacctgatcaacagctcaatgttactttattccctgctgagatccctgttccgccactaaaaccgctcttgtctttgaaccgagatctctcgccgtatttgcttgagaaaatgtatcttggattcactgcatcgacggggtcagttggagcaattcattacttgatgggttggtttgttaatggtgtaatcgagtatccgagattggagcttagtataccagtccttcctccatatccaaagaaaacatctaatagaacgaaaactgttttagccgtctgcttaacggtatctgtgtttgctgcgtttgtcgcttcgtggatcggtttcgtcttctatttgaggcataagaaggttaaagaggttcttgaagaatgggagattcaatatggacctcataggtttgcttataaggagcttttcaatgccacaaagggtttcaaggagaaacaacttcttggtaaaggaggctttggtcaagtctataaaggaacacttccgggttctgatgcagagatcgctgtgaagcggacttctcatgattcaagacaagggatgagcgagtttctagccgagatatcgaccattggtcgtctcagacatccaaatttagtcaggcttttaggatactgtaggcataaagagaatctctacttggtgtatgactatatgcctaatggaagccttgacaagtatctaaaccgtagcgagaatcaagaacggcttacttgggaacaacgtttcaggatcatcaaagatgttgcaactgctctactacacctgcatcaagaatgggtacaagtcatcattcatcgagatatcaaaccagctaatgttttaatcgacaatgaaatgaatgcgaggctaggggatttcggactggcgaaactgtatgatcagggattcgatcctgaaacatctaaagtagcgggaacattcggatatatcgcaccagagtttctaagaacaggaagagcaaccacaagcactgatgtttacgcctttgggttggtaatgcttgaagtagtgtgtggtagaaggataattgagagacgtgcagcagaaaatgaagaagttcttgtggattggatcttagagctttgggaaagtgggaaacttttcgatgcagctgaggaaagtatccgtcaagaacaaaacaggggagaaatcgagcttcttttgaagctaggtctgttgtgtgcacatcacactgaactgattagaccgaacatgagtgcggttatgcagatcttgaatggcgtttcgcagcttccagataatcttcttgatgtcgtaagagctgagaacttgagaggaatgcctgaaacatcaatcgaagtactacttggtcttaatctgtattcagttggtacaatgacattaacaaattctttcttgtcccatggacgc

SEQ ID NO: 152587 - DNA, 431 bp, Arabidopsis thaliana landsberg
  unsure (1)..(431): unsure at all n locations
gccaaataaagttttgatttttatctctcattcggtagatttagtgaattaggtgttgttggtgtctatgcttcttcgtatagcttagattttgttattttcgtaattcgtttaatgtttttgaggaaagtgatgatatgaaattgtcgccccaggcttaatctgcatccattacgatggttgtaacatggtgattgactatttttgtctgattctctcaaatcgtttattatgattctgttataatggttgtgtatggatatgatgaaatggcaataatgttttgtggnnnggggtctgatcttcgtgattgatttgccatattttctgatcctaattcttcttcagttttgtgaattttgattcaaagttttgatctttgaaagggaggaatgaggatataattccatacgtctgcaaatctgaaacac

SEQ ID NO: 152588 - DNA, 201 bp, Arabidopsis thaliana landsberg
ttctgaggagtgagaaatctccggcaccgaggaacaaagatggcttcttttacaaccaacagtgtcgctcttcgcgcttcagttctcgcaaaccctagactacctactccgatcatccgtccccgtctctctcttccccttaaactctctttcaatctctccctccataacgctagaaccatcgtatcctccgccgttacc

SEQ ID NO: 152589 - DNA, 183 bp, Arabidopsis thaliana landsberg
agtgattgcttctacgaagccaaggttagtgaaatacactctctgtattcttgaattagagtgttcttctctgcttatgctttatgtctctgatcgtttccttttttttttttataataatattctcaggttcttaaagttgaatttaaagacaatgaatggaaatattttgtgcattacatt

SEQ ID NO: 152590 - DNA, 305 bp, Arabidopsis thaliana landsberg
ttcttaataacaacttgtttttatttatgaacaacgtaaacatatcatgaaaaccaactattaacccattcttaatagctttgtatcatacaccttttagtcttttcttgatcatattatggaaatttaagtcgaataagaagaaataaagttagtagacaggactgacaacaggagtgaaaccgagcaactgcttagaatggagccatggttgaataaccacaacagagtcaaacatcctggtagagccattgggttgagtgacttcaatccttagatagtatttgagtccagcgacgacctgt

SEQ ID NO: 152591 - DNA, 67 bp, Arabidopsis thaliana landsberg
aaatcttggaactcaagaaacaacaatgtctgatatggccggagattcttcaacatcagaagataaa

SEQ ID NO: 152592 - DNA, 209 bp, Arabidopsis thaliana landsberg
  unsure (1)..(209): unsure at all n locations
ctctctcttctcatcttcttctttctctcttctctctctctctctacagcgaagaacaggacacaaattactctgtgaagcttagaaaggtataatttttaataaaacccagaaactacaatttctaggcggcagagaaaattngcttctacttctttttggttctctttggcttctcgnctctttatccccaaacccatcaataaaaa

SEQ ID NO: 152593 - DNA, 183 bp, Arabidopsis thaliana landsberg
cgatcacatcgtcgtgtttcttcttctctttgataacaatggcttctgcttgtcgtaagctttttaacagagctttcgtctcttccctcaaatctaccctcagatcaaccaccggatctacgtcggctgcgtcatcagccggatttcgtcttccttctcaacccactcgccatttctccttct

SEQ ID NO: 152594 - DNA, 150 bp, Arabidopsis thaliana landsberg
gcctggttttttttggtcaatccaagatgggtcacagagtattggtttatgttggagctctgtttctgattttattcacgatttttccatcttctagtgctttaatttcgtctcctgatgctaatcctccttaccctaaagctatctccg

SEQ ID NO: 152595 - DNA, 377 bp, Arabidopsis thaliana landsberg
aatcgatctgggttcattggattcattacacaaaccggagagacatgtcggagaaagagcaccctcggctaattctacacaatttcctgtcgccggcagaatgcaaggttgtcccttttttgcttaattttgtgtctaatcatgtgggtttggttaattttgaggtaaaaacaggaacttgagcttatacacaagagtagcagtacaattgggtacagaccaaatgtcttctccactactctctcttacctcattgccactaattctccttaccttatcatcccttttgtcttcattagaggtcaatcttttaaaactcaaagatttcgcttttgtctttatatcttacttttgtgagattcaaagggatgatcttt

SEQ ID NO: 152596 - DNA, 318 bp, Arabidopsis thaliana landsberg
aggtgtagagcacagccattgagcacgtaccgtattcttcacgtcaagagcttcaagctttactggactggtcctttcttctacacgtctgaaccaacgtactactaattatgatcttctgatgaacatcaaatttaacatgttcttggagaatcatttttcgtttgtttgcttattcgtcgtataacgttgtctgcaaaatgatctaagagtttgttttctttatcttatatttcatgttgcatatatgactttgtcacgtatcttatgtctcaatattttcttggtaaatgtatgggtttattggatttgttctaa

SEQ ID NO: 152597 - DNA, 166 bp, Arabidopsis thaliana landsberg
aaaatcccgagttcccgacacaatcgcccttgttcttcccctttaactctgaacacatcaggtttggtttcgtgtttcaactttgagatacttctttagatttcaatcggagagtcttttgttccgccaaagtttcaatttttcaataccccacgacggcaaatag

SEQ ID NO: 152598 - DNA, 269 bp, Arabidopsis thaliana landsberg
ctcagtgacatcaataagatcctcaaactcaattctttggcttcatactcatcttcttccacatcactaacttcaccatcccgaagattttgcctcacgagtttctcctcttcatgcagagacttccactgcatcacccatttctgccactcttcattcaatgccctcctcttctctctgtcttgttcactcaatagcaacgacacgtcctgatcctctgcctcatacctcttgctgtaattcctcaggttctttgctatctcttcttc

SEQ ID NO: 152599 - DNA, 955 bp, Arabidopsis thaliana landsberg
attgtaccccgagaaggcatccatgaaagataaaagctgatttccagacgttgcctcgactaggcgaactggtttgaaggttggatccgtattgagcttatgacaggttacctccggggcgattcctgtcatatccttcgtagaccaagcaaaagatgacgacctcgatttcaggaaggcgatcagctcttcctttatctctccttctagctcgcatccgataccgaccgtccgagatggatccgactcgtcgatgttgacctggataattgttataggaaaactgaagtcaagctatagcgttcaggggttaagctggcgagctggaaatgtgaagtcagggatgttaagcaaagcacgtgttgtgagctggcgagctggaaatgtgaagtcagggatgttaagcaaagcacgtgtgttgtgagctggcgagctggcaatccaaatggacgttatcggcgatcgttattaacgtggttaacgtttactttctttacctttttgtataagagcaacatgttatgctcatgctttcattatcgaataatctggttgtaatctctctctagagacttctagatttccctcatcgttttaccggagctctcgtcgagtctcttgtaggtgagaagttgatatcgcgtctctttacgaacgttgtatcaagtgtgttaatcggagtactctattttcatctctctgttctattgatttcaaactctgtttattcatttctggtttacgttaacaataatcctgcaacttggcgccttcattgattcgcgagctggtcgctccgacggcgcagctcgctcttcgtcctttaattgctatatccttctttcgctgcttcttctcgatcacgtaacatgtccgtgagacctaagatggtgagagaagcagagttgcatgctcagaaagacaaagaaaagaattgatcgacaccaagaacaca

SEQ ID NO: 152600 - DNA, 84 bp, Arabidopsis thaliana landsberg
caacaaatggctctcgaaacttttctaataaaactcaaaaacgctatttcctccaaaccaacttctcgtcgaccacaccgatca

SEQ ID NO: 152601 - DNA, 213 bp, Arabidopsis thaliana landsberg
tctctcatttgattatatttgctttaattttcaacattgttagtttctactgggtgagatttgtcctctgttcttgatcaacatctaagacaagacccattgtttcaacgtttcaaaactaagctaacaagaaattgcatgattgaagaactgatgctaatataaaacccgaaatggtagaactgtaggaacagaggacatggccggccttta

SEQ ID NO: 152602 - DNA, 216 bp, Arabidopsis thaliana landsberg
atttatcaatcaatttatttcataaaataatcaagtattatatactaatacaattttaatgcaatattgtgaaaaccaatcagaataaaactattttgtgcaaaatctggattttacatatatcttgacaaaacttttatttagggtaatatgaattcgtgcaaaatttgggtaaaatgatttcgtgcaaaattagggcaaaaccatgaacagttt

SEQ ID NO: 152603 - DNA, 402 bp, Arabidopsis thaliana landsberg
acaccaccgttgtcgtccaccttagtggtcggagaaaccaaatcagtataaaattctgatgaccgggaatgcaaactcaacgtcttcttccctcgagatcggcggcgaaatctttttgaagatctcctaaagatttacatttctcattatctcttttctccccattttcaagtttcgattcatgcaacaatgaaccaaatcaaagatccaaaccctaatctaccggaacgtctcttcgccgtcgattgctatcccgataaagcccgtcttaatatatattcaagacctgaatatctcggtacaattgctaaccttctcaaaggctctgaagaatgggaacgaatcaaaaattcacaatttggtaagctgttcgaattccctgtcgctcgatgctcacattca

SEQ ID NO: 152604 - DNA, 177 bp, Arabidopsis thaliana landsberg
tatctacttactcactcctttcagaaacccaaaccctcattccaaaaaatggggtctcgctctcaaaacctctcctttatcgtcctcctcctccttggcttagttgcagtctcctatgcttgcgactgtacccctcctaaaccatcaccagcacctcacaaaccaccaaaacatccg

SEQ ID NO: 152605 - DNA, 235 bp, Arabidopsis thaliana landsberg
aaactttctttcgtaaacaagaggtaaaacccattcggtaatacccttctttgttgttaagtttaccctctctgtaggtctcttaccagttacaagctccagcaaaagaacaccgaaactatacacatctcccatgtctgattcttttccagattcgatacattctggtgagagatacccaatgttattacccttggtgcttttgttagctccatcatctggcatcagcttatcg

SEQ ID NO: 152606 - DNA, 546 bp, Arabidopsis thaliana landsberg
gctctacaattgaaacatcctcttatgacaagttgagatttgactaggaagaaaaatctgaatgcattttcaacccaacatatagaagatcagataccaccaaagccgtttcttacaataccataaagtagaaaattacaaagacaaagagtttatgcataacacaactgacagatatcataacaaacatatacgtttcacaatcactcagagaaattgtgagaggtgatggtgttcaacgagcacttatggtgactactctgcgcttgtttcgatggaatttttccatgaaccactcgtgtttgtgtgcagtaaagaagatatgtccaataactaatccacaaaacacaccaggtccgtaggctattgccgctgctaaccagttaatcacttgttcttcgggttccgaaaattcctcggattctagtggtgtagaactcggggcatgagcttttccacagattttctcaagaccgtagagtctgaggttgtccatgaatgtagaacaatgttggctttgaaactgagtgcctagtggaactggac

SEQ ID NO: 152607 - DNA, 96 bp, Arabidopsis thaliana landsberg
agaagaagccagcaaggaacgatggagattattacggcatcatcatcatcatcaacatcatcattgtaattcgtaatcatatcttctttcggaatt

SEQ ID NO: 152608 - DNA, 470 bp, Arabidopsis thaliana landsberg
atattggggtatctgtgtagtcttgccagaacccgtttcccccacaatgataagaacctggtcagttaaaaatgagggaaaagggtttgaatcatacatgtcacagaagaaatcgttattcaaataaaagaaaaaatatatgcattttcataatgaaaaactttaatccacatcaataagatatgctagcttttctcatacatgttctcttatcaaagtactttttattatttaattctatgtcatagacttagatgctgtcaggatgaaatttggtccttatggattgctagggaaatgtgacgaaatgattttgtaaatgtacaactttccttgaaagtttcagaggaacaatcaataacttaaacaaaaaataagtgacatgaaagtaagaatcccgtcatgatctttcccagcattaaaaagttgatcacatatgtataaattggcagagctttcaatcctcctga

SEQ ID NO: 152609 - DNA, 200 bp, Arabidopsis thaliana landsberg
atcaattttcaataaactaaatttgtgggggaaaatccccaattcacttgcagcttttgtaatttctctaatttgggtcgtaactcgtaagcggccgtggaattcaagtcgccaccggatccgatcaaagtcttccgttatacgcaaaccctaatacctcactacacgactctttttgatctgaatcgagagatgaaagc

SEQ ID NO: 152610 - DNA, 474 bp, Arabidopsis thaliana landsberg
cagaattgagatcgattgaatgtaaaaactactgaaaccgaaggtagggaatattacaatgaatttttttcaaaaaaaatcccaccagaacgatgtaaaatttctatacacttgaacaatttgagtgacaacgtaagtaatgcacaaaaaagataacaacataagtacagaaaatcacacccctgtttttgtgactgtcctaactcctaaccagaagtagcaagcaacacagctttcaatcctagagagttcttacacttatgtgaactcaatctcctcgtaagaatatctgattcctcgcttccgtcaagagcaaaaaaacattcaggacttggctcagagcttcagtgtaagggtcaaaatgactcagggactatagtcttgcagaacttatgaggttggaagatggatgaagagctccaaggctcaaaatgtttccggtgtttgaaaaattggaagacaaatggaagatgc

SEQ ID NO: 152611 - DNA, 536 bp, Arabidopsis thaliana landsberg
tgtaggaggaagagttgaaattgaagcctgttgtttcatttgattgcggtacgtatctatataacttgatctttacttttcatgtaattatgttgcttggtttctttcagtcacattcttaatattatgatgtctgaacaaacaagactaaaaagtagaaaccaattgatttctacaaaatgtgttgagcagtaattaggtccaaaatggttggctctcaatagtgaaaacgtttattggttgaaccccatagagaaattacattttgtgaagtgaagcttacatcttactttatgttgtcctatgaatttgcatgttgatgacgagaaaactgcatctcccacaacttaaaattattgtctagttatacatcctactgactgttattattttttttccaaaaattgaagctgaaattagggagcgtgattggtgcaatgttgttacttgccatatggatacagcagaagcatatgtatggagacttcagaactttgtacttggagagcatatcctcaaaccatgcgctagaatcc

SEQ ID NO: 152612 - DNA, 176 bp, Arabidopsis thaliana landsberg
acaaaagaaaaatgaaatttattagtctcctttgttccttgaagaacaaacaatgggaatagcaaacaacgaaactcacgacacataaccaacacaaatgtacccgtacctcctttcttgctcaatggcacctcaaaattataaaagaataaataatcaaaagtgaatcaaatgaa

SEQ ID NO: 152613 - DNA, 152 bp, Arabidopsis thaliana landsberg
taccatccagtgagccgggcttgatcttcataaagagagaaagatagcattgcagatgataagaagaggagaagggtaagaaaaaccctaatcgccatagctatgacgattgctgactaatttatcttcagcagcagatctggagatgaaag

SEQ ID NO: 152614 - DNA, 455 bp, Arabidopsis thaliana landsberg
tacaatcattttcacaaatctcttcgatgaagcttcattctcctcttgatttgatctctttgaaaaacgacgaatcaaacaaaccctagagtcaagtcaatcatgatgataaatacaaacctggaagataaagaatcaaccttgtgaaaaaaaaaaaacttttgattccctcttcttctaaaagccatgaaaccgattcaatctccttctggagtagcttcacctatgaagaaccgtttacgcaaacgtcctgacctaagcttaccactcccacaccgcgacgtcgttctcgccgtacctctccctctcccacctccttcttcctcttcatccgctccggcgtcttcctccgcgatctcaaccaacatctccgccgctaaaagcttatccgagctagaacgagtgaaccgaatcggaagcggagccggaggaacggtttacaaagtaatccacac

SEQ ID NO: 152615 - DNA, 465 bp, Arabidopsis thaliana landsberg
gttgagccatgtgaaggagagagccttgtggttactgtcttcgagatcaaaagctcagaggtacaccaaaacatatctctggaaactgctataatcttttgatagaagtttatgtatactctttgacggttttgatacatcaaaatacagattccggcttttattggaagggagcttgagttccggtttctcgctgtgagtcactagttcctctttttcccctagtttgaagatatgctttactttgtgtcacactgctcatactttccctccctcacacataggttgttcctgaaacattggaaggcaaaccttacaccaattctgcggttcgtctagtttaaacaagtctttgttcttaatgacatttgttctgtttgtataactctttgccaagtctgagtttttgaggcttgaacaggtactttgtggtcgatacagtgatgaggagttttgccatttaga

SEQ ID NO: 152616 - DNA, 379 bp, Arabidopsis thaliana landsberg
gtgaaaacgtggaggctttcgtggagaagaagataaatgtacccgctcatccatgttaccatacttattgtggaagcatgatacgcaactgttattgctgccttggaaaaaaatttgattactgctccccaaaccaacaaaactgtttgtttagatgcgaggaggttaaccggattccagatttcccgaagacaaacggagtaagcaaaggattagggcccccactctatttatttttcttagggcaatttatttattttgttttaggtttatagtttatttacgggtgtttaattataaaaccctcgactaagataaattgtaagaaaatcctccaattatatatttagtgaaaaccccctcaattttactattacac

SEQ ID NO: 152617 - DNA, 83 bp, Arabidopsis thaliana landsberg
aatcatggctaccaccaccaatctcagcttcgctcctccctcttactcccgttttgccgctacaaaatcccaaatcagaaacc

SEQ ID NO: 152618 - DNA, 625 bp, Arabidopsis thaliana landsberg
  unsure (1)..(625): unsure at all n locations
atatattcattatacagacacgcatatgaanacttcaaacttgaggactgataagatcattcctccacgacattttcaagactcaacgaccggctcaggctcctcttctcctgcagcttcaggggcagcgtcatcttcttttgcttcgggaattgaggcggtgtcgtcaggtttgtgatcatcagaaggaggagaagcgccaccagaagaggcggatcgacggtggttagcagcggcttgatggacgtgattgtaactgcctttctcgagaaagagctgattgaagtggactttacagtagaggacgccattaagagaagcgtaagaagagtgagtcaaaggacaaccactgtgtgtgcacctgaagcaagtcttgtggtaactttctccttccattgttactttctcaagtgggtaaaccgtcttcttacaagtcgcacatttgtcttgtgttccactgaagaatgatgataacttgcttggagttcgagtcttgcagtatccatcaattgagacaaatcagatgaaaaaaaagaggaaataaaaacaagatgatgaatctttgaagacattaccagatgatcattgggcttctcggtctttcctgcctgaaaattcttgctgt

SEQ ID NO: 152619 - DNA, 587 bp, Arabidopsis thaliana landsberg
atcatgtatcactcgtggctcggtgtcgaacgttggtttatatatgataacaacagcgatgatggtatacaagaggagattgagttgcttagttcggagaattacaatgtgagtcgacatgtttggccttggatcaagactcaagaagccggtttttcgcattgtgcggttagagcgaaagaagaatgcaattgggttggattcttcgatgtcgacgagttctactacttccctacgcatcgctctcaaggcttaccgagcaaaaacgctttgaagtcgcttgtatcgaactacacttcttgggatttggttggagagatcagaacggactgtcatagctacggtccatccggtctgacctcggttccatcacaaggcgtgaccgtaggttacacttgtagacaagcgaacccgagagacacaagtcgataatccgccctgagttgctctcaagctcagtgctcaatgaagtgcatcattttcagttgaaagaaggagtggggcatatcagtttggtgcagagtgttgcggtagtgatccaatacaagtaccaagtatgggacactttcaaagctaagttttacaga

SEQ ID NO: 152620 - DNA, 170 bp, Arabidopsis thaliana landsberg
gaatagggatcggagaatgggtgggtcatttggtctaagtaagaaattctggtcgcgtgataaagtaataagaatcgttgttagttttttttacaaggacgcaataaactttagttaagcatttttgtataaccactacatttctttactaatgatatttacattcttat

SEQ ID NO: 152621 - DNA, 539 bp, Arabidopsis thaliana landsberg
ccaacgtataccaagagtttcggagacgacgtcgttttgtctctgcgccgcgttcttagtctgagctcacgcttgttcgtttctcctctaacgtcaactgtgtttttgcatcctcagaggtttgtgatacaccttattgtttctgttcttttgtacaagcttcacatggattagtgtaaagtcttagaattgggactcggaatttattgttatgttttaggttattcaacccagttatggtatcgttttgaagtagaggtagaaaccctaatttttggggtctgtaaatttggagaaaaaattgaacctttcccttttttgttatattgtgtaatttgggactaatagttcttcgaagctgagtttttttgtgtgtaaattttgtagggtttaacatagttggggctaggaattttcatggtttctgttggttctaaatcattgccatctagaaggcacatgcccattgaggaagatagcttgatgggtgaccaagaaaagtctagtaccaatcccagtgaaaggaataagggaatgct

SEQ ID NO: 152622 - DNA, 119 bp, Arabidopsis thaliana landsberg
cccaaaaggataaaagatctctgatttgtcacaactaagagttgaatatacatcactaagatatccaaggagagttttggtggtagtgaatacagttctacgcctacatttgcgacaag

SEQ ID NO: 152623 - DNA, 415 bp, Arabidopsis thaliana landsberg
aacatcaagagataaatgttttattatgataggacacaacatcacaatctttgaagaattaacaaaaaaagaaggaatacatgtgaaaattaaaataaaatctcatagagagtaaaacatattctgaagatgaatggcaacacatctcatcagaagacgaaagacatagcagcgaccaatgcggtggcgatgagctgagggtaggcggagaaagtggcggcacttggagacggagccttagccatgggtggcattggagccatagccgggccatggtggtgggttccgttgtgcgactcagcagtcatgaccatcacggccaagacaatgcagatgaaggcgaagcggatcaaagaacttcttggtgccatttgaatgttcttctcctttttcttcttatttggtttctttcttt

SEQ ID NO: 152624 - DNA, 91 bp, Arabidopsis thaliana landsberg
tgcacgcaaagatcaaaccccttatgacatctgagcttatgaggcaaacgtacacgagtattgtctagggttgtcagaaaaaaaaaaaaaa

SEQ ID NO: 152625 - DNA, 205 bp, Arabidopsis thaliana landsberg
tccatgagacgggcaacaccagacaagacatatatatgtaaaaacctttagattttgatgtgctgcggtagaactaagaatgtcgttaccagaaaatgaaaccctcaaagtagaagaaggaacatatccgctaaatcattcggtttcgtttttactggcggattttcatcgttgcttgtaacgattgtgttttttcattttttgg

SEQ ID NO: 152626 - DNA, 113 bp, Arabidopsis thaliana landsberg
ggcaatagggatggggactatgataatgatgccagtaattgggaatctatcagacagatatgggattaaaacaatcctcacccttcccatgtgtctctccattgttcctcctg

SEQ ID NO: 152627 - DNA, 179 bp, Arabidopsis thaliana landsberg
agaatctattccgacgaatcttttcgggtagattttttggtctttaatttgaagggtttaggtgtggtttcgaagatgatggtagcgaatagtttcgatctatggcaaaaggatgtttttttctctgcagctgaggaggttcaagaatctgctgatatgtatgtgttatgtgattctct

SEQ ID NO: 152628 - DNA, 269 bp, Arabidopsis thaliana landsberg
tttgttttgttgtagctttaatttttttatgcttatggatttttgaagaattataagacaatcagtaaccacaaaaaaaacagaacctgaaaaattgtttctccaatgtcagaaacagagcaagaacagaacatgaactgaatgtattcgttatccgtagtgatgatgaatcttcttcttcttcttcttgacatcacaggtgcaagcatcaactgaataagaagaagaagaagaattcaagcaaccaaacttcctcttcacttgccccc

SEQ ID NO: 152629 - DNA, 350 bp, Arabidopsis thaliana landsberg
ggacttagttgtttttacggaattgtggaccgtaggagaggagatttattatggtcccggaacaaattccagaggtttccgctcatatcatgcagtgatagtatccagtattgagatctataaaggagaagtggtggccatctgtaagatgagcaatggtactaaagtttgtgacgaaggatatgttagggtttctctagcgacaacatacatggtggtgggtgcctgtcctaaaaaaaaagaacatgttcgggctacttctaagccgatgcatcttctctgtgaattcatcatcatagatataggtgagaatgtgtaagagcaagagggagcggtagagaaaggatctg

SEQ ID NO: 152630 - DNA, 458 bp, Arabidopsis thaliana landsberg
gattataagctcaagtttgtagaggtattattattattatcatccacacaatctttctcctattattcgttgtgtcggaaaataataataattattggtgattttgcagcacaacgttcgtttctttcaagaaatacttcagaacaggaaatcagctgctctggagtggctaatcattatcctgattagtatggagatcgcgatttctttctataatatgtctcgggcatccttgtgatcgagatcatcctctgccatttctaaagcatattcatattctttattatggttaccacttttcttcacaatgcaaagtgatatctttataacaaagctcataaataagaatgagtttaggagttaggactacgtttgttacagattctctatgcatttaagagcctgcttcttttcagtccaacaagacttggttatgcatataaaatcatttatttcac

SEQ ID NO: 152631 - DNA, 404 bp, Arabidopsis thaliana landsberg
gaataaaatgtttcctcagtattctcaggtttcaatatcacacaaacctgacaactttggttatccaaagaaaataaaattagcatctctcaaatttaaacttggtgctcatggttacaccaatatatacacatacaacaacaactcattatatataaaggtaaataatgacaaacaccaatctccagctacttggatagcctacaacaccattgatactactattactactacattgccttaaaaagggaaagtgtattaactttggagaagtagaatcatttcggatgatattctcggattggaccaaactacctatctgcaactatatgactgatcttctccatctagaagatggatttggtgagctttggtcgcggttttatgatgatgctttcataggg

SEQ ID NO: 152632 - DNA, 394 bp, Arabidopsis thaliana landsberg
acatgagccccgctcaggcgctgcttcctcctctctctctatcatcatcatcatcactttctctatctatctctcttcttaaagcggccattggtgctctccaagttccatctcaagcttttcttcttgtgggtgattcaatctctctctttctattttttttttcatttctgatgatttagtgatctttgatttgcgaaactttgtttttatcgtgtttgtttttgatttagggttttattttgttgtcggcgagttttgatttgatgattttgatgatttttttttgtttgaccgtttggcttttggatcttaagagctatgtgtgaagattttttttcgttagatagggtgaagaatacgagctgatctccataattgtgagttagatctt

SEQ ID NO: 152633 - DNA, 324 bp, Arabidopsis thaliana landsberg
aaatcccatctttccaacaaatatgacaagcccatcaaattttttgcttttctcgacattggagcagcatcatctaggatcaagccagacatacttgcagcttctcactggaattcctgttcagtagctttcaaggcggcaaatggccagatcttccacatctccttaatcagcaagcccatctacatccaactctttccaggatacatgatcaaagcaaagtatataggtctgaactccctagaaaagatttcatacttggagttgatgtccttcatagccttaagagagtattttggaatccaaaaagacttaagcacaaga

SEQ ID NO: 152634 - DNA, 333 bp, Arabidopsis thaliana landsberg
agttacccaaaccgaagctgttgcgagtactgtgaagaaccagtcagctgaggatcctcctactctgaaattcacgtggactatccctaatttctctaggcaaaacacccaggaagccattactccgatgtatttgtcgttggaggttacaaatggtaatagtagtgtatacctatctctagtgtacttttttcttgccattgtttgtccagtatgcattttgattggttgacacctttttggatttgcttatgcaggcgcatattaattttcccgaaagggaacaatgttgatcatttgtccatgtactataaatgtttctgatgctgcgag

SEQ ID NO: 152635 - DNA, 193 bp, Arabidopsis thaliana landsberg
acctcattagatccaggagaacccatgtttcgtttcgttttggaaagataagagagataaaggtttcgacttttttaggtttttctgtgtgttttgtgattcatttcgctgattgatatcaattccctctgtttgttgtcccttctcttcaatttcacctgacttttgtttttgggtttggcataaagttttc

SEQ ID NO: 152636 - DNA, 322 bp, Arabidopsis thaliana landsberg
caatatatatcttttgcattttttacatcatatctttttttgcctaaaattttatacgagaaattttatactattaataatcttattgcctaaaattaaccacttctttttttggtgttctatttcatgcaccgatattaaaaatcgtaggaatatcgatggccaaaataaaataaaatggaagaagatctaaactttgtattttatactggtcctagtcctagaaaatcgaattcttcagtgttttcattaaatgcatagttcaacatattatttggcatgatagattgtctgcaaatgacacatcacttttcctttctgc

SEQ ID NO: 152637 - DNA, 164 bp, Arabidopsis thaliana landsberg
actcttttttcctgcgattctgctactctggagaaaggaagacgaatgattagttaaagaagaagaagaggagtcttgcgatagaagaagatttttgcgatatcttcatagaaggaagatggtcttatctcaaggctctgcatctctctccttttctcatccat

SEQ ID NO: 152638 - DNA, 105 bp, Arabidopsis thaliana landsberg
aatctctcaacataaaatcccacaacaacacaacccaaaaaaagacagagacaatggcacagcccatgcgcttcatgctcaatcaaatagaaacagaatcctacg

SEQ ID NO: 152639 - DNA, 341 bp, Arabidopsis thaliana landsberg
cttaaagataaccccaaatgattcttgcaatattagcccttgtaatagccacctttctatacggtggagccaccacggtccaagctggatgcagagacactctgaccagcctttccccttgtctttattacctcaacggtggctcatcgtcaccttcttggagttgttgtcgtcaattttccacggtggttcaatcttcaccggaatgtttgtgctcagtggttaatagcaacgaaagctcattttatgggttcaaatttaaccggactttggctctcaatctccctaccgcttgcaatgttcaaactccatcacctagcctgtgtaacagtaagaaactt

SEQ ID NO: 152640 - DNA, 324 bp, Arabidopsis thaliana landsberg
ctattatcctgtgatatgtaaaatacaggcagagaaccagattgagatgtacacacaacaaggcttctcgaatcttcccatatgcatgtcgaaaacacagtactcattctcacatgatgcatcaaagaaaggagcaccttcagggtttgtattgccaattagggatgtaagaggaagcattggagctggtttcatatatccactggttggtacaatgagtacaatgcctggacttcctacaagaccttgtttctacgagattgatattgacactgaaactggaaaagttcgtggcctttcttaagtttggtagatctgtcaaag

SEQ ID NO: 152641 - DNA, 221 bp, Arabidopsis thaliana landsberg
  unsure (1)..(221): unsure at all n locations
tcttatctctctctctctctttctctgactctctccttgatgcctcgtgactgcaaccaaagcaatttaaaaccgccgcacttctcatgagtcttcttcctcatcatcatcatcatcaccgntaactgtaatttatcttctncgatcttcattctccgccatgcgctcgccgcatgctttccgtaacggcgaatctccgactttacgggaccatactcact

SEQ ID NO: 152642 - DNA, 441 bp, Arabidopsis thaliana landsberg
gattttggtctctcagttttcttcaaaccaggtgatgtattatcatcttcgatgcttggtttccacggaattggaaggaatcttacccactaatgtttttgtttgcaggcgagacatttaacgaaattgttgggagtcctaactacatggctcctcaggtattaaggaggagttatgtccaagaaattgacatttgcagcgcaggagtgattctttacatattgctctgtggtgttccacctttttgggcaggtttagttttgtcaaaccacttgtcttgtgtcagttcttgtagaatcatacaaatgtaaatgactccttcgctatctttgtttgtttgcagaaaccgaacatgaagtcgcaaaagcaattcttacatctgtaattgactttaaaagagacccctggcctaaagtttctgataataaaaaagatctgatc

SEQ ID NO: 152643 - DNA, 294 bp, Arabidopsis thaliana landsberg; identical to SEQ ID NO: 71886

SEQ ID NO: 152644 - DNA, 69 bp, Arabidopsis thaliana landsberg
caatgcccacaattgatctgcgcaacctgactggaaggagcatgggcaacctgattggagtgcgctgtc

SEQ ID NO: 152645 - DNA, 408 bp, Arabidopsis thaliana landsberg
accaaacaaattagtcggtgaattaacattaacaacaacaagaatccaaaaaaggaaaagaaaagacatcaccaactgtagatagtctcaatccaacaataaagactaagcaatacaaattttttttttacctgcttacattttctaagtcccttttactggcatttcttatagactggaagcttcaccttcttctttcataattttctcctaactcgctttaccttttcataatttggttatttaacttcaaggtctagctctcttgttactgcaagttgggcatttgtaatgcttgatgtgttctgcttttgcaggtgttatcttcacacattttccatggaaccatttctcacacgcgtcgcagcaaatccagaactcatctgtaccgtagttgtctccacaagc

SEQ ID NO: 152646 - DNA, 554 bp, Arabidopsis thaliana landsberg
gcgggaagactcgtgttatcctgaagaaagttactttcctacccttcttaatatgcgggatccacgtggatgtgtccccgccacgcttactcacgtggactggactgttaacgacggtggtcacccgaggatgtacgagccggaggaagtcgtgcctgagctggtcttgcggcttagaaagactagaccaagatatggtgaggatggaatcaacggttcggagtggtctaaggttgagcggatggatccgtttctgtttgctaggaagttttcaccgcaggctcttgagccgttgctgggtatggctcgaaccgtcttgttcaatgactcagccggtggtgtgtgaatggtttctctaatggtattgttgtaaattcagttttagttttagtttttttttttttttttttttgtggggaaataataattgtaatttaaatgggtagctgggaaaaacaaaaacccgagtataccattatcgtgagtaaaaaagtaaactcgtcctactcgaatctcatcataatcttcatattagcaaatggaaccaattcatt

SEQ ID NO: 152647 - DNA, 231 bp, Arabidopsis thaliana landsberg
aggaagcttccgagttcgaaaacgactacgtttcgtatggctgtgaattgtcgtcaccgtttgagtcctaaactgaatccggagtatttcggaaacgcgattcaaagcgttcctacgtttgcgactgcggcagaggttttgtcacgtgatcttaaatggtgcgctgatcagcttaaccagagtgttgcggctcatcaagacgggaggattcgtagcgttgtggcggattgg

SEQ ID NO: 152648 - DNA, 368 bp, Arabidopsis thaliana landsberg
tcacagatgagtgatgattcgtgggatctaagtaatatatcaccctcttctcttctaggtaatataaaactcacatcaacgatatctgtaagcttatatggtctacctgtctcttgattatcttcttcatgtttttggaattaataaggtacacaaagcaagtaggggtgttagcggaatgttcagaggagtgttgaatgtgtgttctttctttagctatgacaatgttgatgaatttctttgggttatgtaatatgaatgagtgttgagtggtttctgcattaaacatgaaggagttgtatgattaatgaaccccttttaggaagaagaaggattatacgtttctttaataaagactggtattttag

SEQ ID NO: 152649 - DNA, 522 bp, Arabidopsis thaliana landsberg
cgcggccatctccctaggctcggtacccggttttcctttttttttccaagcagttcgctttcggtttctttttggccagtcaatggttttttggcagggtttcctttttatcaaggaaactctagcttatctcgaaatcggaaggttgtgtgttgcttgagaatatatttaccgggtatacgagattttagggtttatcatctcctgtttcttgctgctttggtgtcttttacgagccagttatctattttatccccgtcgtttgtctttgttgggtttggttttcctcggaagggtcttgtatgatatgtacgggttcaggtttggttcaggccttggttctctcagaggtttgctctggctcttgttgcaacaactctattaaagagttttttttggttttttttttttgccagagccctcgttttttttccaggcactgtattacaatctgtatgaacactgtactaaattatgtaatgccctttgggatggtttaatgagtattgaataaaattctca

SEQ ID NO: 152650 - DNA, 584 bp, Arabidopsis thaliana landsberg; identical to SEQ ID NO: 20457

SEQ ID NO: 152651 - DNA, 285 bp, Arabidopsis thaliana landsberg
agaaaaatcaaatctttctctctctctctctctcgttgaaaacccatttctgtattgtgttgaagctacgttactactaagaagaagtgaagcaaaaacagaggtttttgaaaatggagaaaaaacaaggctttttctctgctctcagacacgaagttgtgagaggtctttcgccgtcacgatccagagcaaggtctcgttccgttagtcccgctagtctagttcaccatgtcagactcacttggggaagaaagacttaactggaggaggcggtggtggtggtgc

SEQ ID NO: 152652 - DNA, 203 bp, Arabidopsis thaliana landsberg
agatgaaattttgaagtacttactcgggaagaagacgaaaagcggagagggtatcttggaagatcaaagctttgacatttttgggtgatagagagtaagcaagattcaatatggagcttagttcattgcaagcaaatgggtaaatacgatttttggagaaagcttctcctacctttagattttggtatctcttcatttctctt

SEQ ID NO: 152653 - DNA, 419 bp, Arabidopsis thaliana landsberg
tggatgttgaaggaaccgaattcgatctgatcccgaggctaatcaagacaggagcgatttgtctaatagatgagttgttccttgaatgccattacaacaggtggcagagatgttgtcctggtcaaaggagccaaaagtacagcaagacttataaccaatgcttagagctcttcaattcgctcagacaaagaggggtgcttgtccatcaatggtggtaatggttaggatgctgcataaaagtctccttcttctatgcatttggtgaaaaatgtactttcttcttctagaatatataaagcgggatattgtaggtttctattaaaaatacgttgtctgtgctgaaattcccttttactgtaagaaaaaagaagtttagctttaaatggaaatttgagtttcttttacgctcgcaactgtct

SEQ ID NO: 152654 - DNA, 119 bp, Arabidopsis thaliana landsberg
agaaaaaaggaaagaggagagaagaaagaaaaggaaaagacccaaactttgagaaacaccttcattctcttccttccttcatcaaagcttaaccttttttaattttatactcgtttttt

SEQ ID NO: 152655 - DNA, 112 bp, Arabidopsis thaliana landsberg
ggtaccttaattcccagatttctgtgccagaattgacaatcagcagcaccaccagccattgtaccaagcatataaggattaatttcaataatcttcttcacagattgcgacg

SEQ ID NO: 152656 - DNA, 746 bp, Arabidopsis thaliana landsberg
ctctgtgcgagctctctcctctcatcaatggaatctctcatcaatcccagccatggcggaggaaactacgattctcactcttcttctctcgatagtctcaaaccaagcgtactagtcatcattctcattctcctcatgactcttctcatctccgtttccatgggcttcctcctccgctgtctcaatcgctgtagccaccgctccgttctccctctttcatcttcctcttccgtcgcaaccgtaacttccgattcccgacgattctctggacatcgagtctctcccgaaacagaacggtcctccgtgcttgattcgcttccgattttcaaattctcctccgtcactcgccgatctagctccatgaattccggagattgcgccgtttgtttgtcgaaattcgaaccggaggatcagctccgtcttcttcctctctgttgtcacgcttttcacgccgattgtatcgatatctggctagtctctaaccagacttgtcctctctgtcgctctcctctcttcgcttcagaatctgatctcatgaagtctctcgccgtcgtcggctcaaacaacggcggaggagaaaacagcttccgtctcgaaatcggatccatcagccgtcgtcgtcaaacaccgattccagaatccgttgagcagcatcgaacttactcaatcggttcgttcgattacatagtagacgacgtagattcagaaatctcagagtcaaatttcaaccgtggaaaacaggaaga

SEQ ID NO: 152657 - DNA, 428 bp, Arabidopsis thaliana landsberg
ggttctacaccaccagacagtcatgggtcagtatcttaacaatccctttatattcccaactttttcttatttttttgtttatcacttgtccttaaatattctgtttttattgtcttttaacagccctaggctttcgaaattgagttcatctccgcaatgtacactttcggaagcagtccacctgtgggctctttgccaaaatcattaccgcctttatcaacatccaagccaccaaattgttggaaaagaatgggtttaaacaaaaaaagtgagtctatggttattgtatggagcaatattttttgaaggataagatcgtattttgaaggtctctgttcttattccttttaaatctacctataggtacttgaagtatcgcaagcgctgcttaaacgaaagaaaaaagctaggtagcggatgcagtgagg

SEQ ID NO: 152658 - DNA, 155 bp, Arabidopsis thaliana landsberg
tttttttttatgtacaaaatatggtaagacctcaatgtcacttttgtttccctaataaaactgtttttttattttttgttggagaacttgggatagatatccttctgatccagtttccaagcaatgactggccaacacattctgcaacacaaatg

SEQ ID NO: 152659 - DNA, 138 bp, Arabidopsis thaliana landsberg
aagactccattcactaattaaaatcaactccgggggattccgccagcttctagtggtcaaggtttgcggtttgcacctgtcgatttcccgagccccggcgatgtttggacttggagagttgggaggagagtgaataat

SEQ ID NO: 152660 - DNA, 462 bp, Arabidopsis thaliana landsberg
aattcgacaaccaacttttaaataaataaaaaaaactcaacaatagagggaaacaaataatcctcatttactttcccccaaaaaccataaataaaagattcacaaaaaaaaaaaacatggaagaatagaagaaacaagaagtgaaactatagaagccaagaagaagcaaacaagcagagcaagctcaccaccaaaccagccttagctcctccgatgatcctaaccgcaccagcatcatctgccgtcgcatcatcggcctctccgtcaggcccttcggcaggcgaatccgagtcaccaaaaggatcattatctggcgacggtgcagccttcttcttctttcctttcgctttccctttagccgcttttggagaatccgcaacatcaccatcctctggtgccggagcaggagccggagcttcaacagccgaagccttaaacaactctttaggcaacaaaacctta

SEQ ID NO: 152661 - DNA, 401 bp, Arabidopsis thaliana landsberg
gtccgcagatgcttctttacggttattatggagatttggcctcatggaaattcttctacctatccagtttggtgaattttctttagcagtgtggcattatggtgtacacactgagtactttctgttgttcacatcgaaatcacttatgtattcgcaggcatcttatcttgtttcccaagggttccggaggcgtgatggaaggtccaacatgcttctggtacatatttttgcattctcagttagacatggcaacttcctgtctagtagtagtaacactacagagtgaaattatggttccatagggctaactgattacccttgcagtcgctatttcgcaaccttgaccgacttgtagcacctgatcgaccatgcagcgagttcctctggtgagaaatcttctt

SEQ ID NO: 152662 - DNA, 210 bp, Arabidopsis thaliana landsberg
gaataagaaaaaacctgatggatctgagacagagagagattccgtaactcgtaaactgagagtccctgcttcgtctaaaacatcgaggaatacgaagaagaagaagaatgaaacaaaaaaagagactgaaacaggtgtcgaaatattagcggggctacaaaaaaagagagaaaaaagagaaggggagatatttttatggtttttattatg

SEQ ID NO: 152663 - DNA, 419 bp, Arabidopsis thaliana landsberg
agtaaacagtattactatggaaaaaactttacctggtctccttctccgcctttaaacggtggttgttaggaaaaacgcattgaagaagtgcccgtgccatggatgttatagaggaactggaggtgggattaaggtaagtggaagaaacaataacaatagatcactgtcttgttcttctctcaagttctcaaccaagtgcgtcccaaccagtcttccaaaaaaatggaaggacttagagttggagtactccacattcttttatcaccacttcgtaacggttgacttcgaactcgaggaaaaactcgttggttttcacatccgcttcaagttcaaaggttagcaaatgctccgccaaaattggaggcacaacaaagccgtgtgcagatctccatggaacaataacacccaatttgtgtttg

SEQ ID NO: 152664 - DNA, 673 bp, Arabidopsis thaliana landsberg
cacacaccgtcacaaatactcttcttcacacagctttgaatccatctgtcttctcctctctctctcttctccatttgcaattacgataatgtgaaagcaataagaagaggaaaagttatcttcgcacctcagcaaagatccaatcgattcgattcttaagcttttttgtcttctccaataaggtcactactctagaagccgcgttgtggtttagttgactcctccaggttttatcttcaagctttttcgtctatcagatctggtgtcaatgtcttctcataggtacgattcattctctccctgattcagtatcaattggtgaattttagctctagatttcgagatctgtcgtaatttagctactgagatcagtagattcagtttccttgtggaataatttgtttcttctctgtgaaggattacatagagatggggaaaaaagctaaatggttttcaagtgttaagaaagcattcagcccagattcaaaggtgaagtttttttttttgtatattgatgtgacttaatgttatagtctgtatatattgacatgttgatatgttttcagaagtcgaagcaaaaattggctgagggacaaaatggtgttatctctaatcctcctgttgtggataatgttagacaatcttcttcttctcctcctcctgctcaagctcc

SEQ ID NO: 152665 - DNA, 185 bp, Arabidopsis thaliana landsberg
  unsure (1)..(185): unsure at all n locations
cgtgcggtctgctattaagagatatagaaatganaatatctcnatatatgtgagtttgattattattgtttgcttcttttattttgttgtcatccctatattaaatgtgattgttttcttgggtattgtttcttgggaataagctgtatctaaaatttataaaagtcttgaaagttcagaatgtt

SEQ ID NO: 152666 - DNA, 365 bp, Arabidopsis thaliana landsberg
caggagcatcactatatattaagaacacaaacaacatgtaacaatgtaagtttgcaatcaacaggcaagttcaactagagagatatactagtagttgaatgatgatacctgacatagagaggcccaccactgatggccctagcagaggcatgatactctgcagcagggtgcacggaatggaacatatcccagtcaggctgcataaactctcccaagaacacactgttataagcaacggaggctatatggatggtatgagacaccggatcccgtggatagaaatcatctgatgctctaatcacagctgcttgcttcgagcagtaaagagcatccgtattatggctcatacaagcaatgcagccatt

SEQ ID NO: 152667 - DNA, 168 bp, Arabidopsis thaliana landsberg
aacttcagtgcaagccgctgaaccaactttccgctgagaataggcttgatgttagaacatgccgagacagctggtccctctttgccgttgtggaccaagttgatgtcagagagagcaatattggtgcaaggcactcctttgctgcacattagcttcacagccaccttt

SEQ ID NO: 152668 - DNA, 1352 bp, Arabidopsis thaliana landsberg; identical to SEQ ID NO: 61419

SEQ ID NO: 152669 - DNA, 452 bp, Arabidopsis thaliana landsberg
attttaacaaaccttagttttactagcaagtataataatttaaggtggaccgtacgtatataacaatatttaatttacaattaccacaatcatatctttacgtatgtatatcgatcatcagtcgtccttacgtacgtttggtgatgttcctagtggaaacacgagaaggcgaagatgacggcgtcgtttcgagcattccaaaacggtccgtcccaaatcgtcggagatcggacgttcgaaacctactagacgagtcgccaggaagtcgcatgtaatatccggctttagaattagagtgatgatcgctgagcaaaaccgacgaaaagcttccttctcttttatacataacaatggctttgtacaaaaatggaatcaaaccctccattttctttttaaatctctgcaatccttaagaaactttttttttcttccttttgatgagattttgtttt

SEQ ID NO: 152670 - DNA, 132 bp, Arabidopsis thaliana landsberg
atcaaatcaaaagcttctctatcaagcttatcgaaaagtcacatcttttggaagaaacaatggctcgtaccaagcaaaccgctaggaaatccaccggaggtaaagctcccaggaagcagctggcgacaaaag

SEQ ID NO: 152671 - DNA, 592 bp, Arabidopsis thaliana landsberg
agagcgagccctatataccatttaatccctttgtaaatgcaggcatctttttgacacagaccaattctccagacgcggtaaaagcaaaaataataggatttgagatttgatataatcattcactcaaagagaagagtgacagagtgtatacatacatataggtatatccgaatattaacagaatgcataatcttggtatatgcttcatctcatttttacacaaagatataatcctaggctaagcccctaagaggtactacttgttgttggaacagaagacgcctctggctgagcctcactagccatagtttccggcagtgaggtttcttgctgagccaccggtggagtttctggcagtgaagtttctagctcggccaccggtggggcttctgtgacggagggggtagaaggttgaacaatttcagaaggcttgaacttgttgatgtagtagctaagagacggtccactgtaatccactgctttgggtcgagttggggcatctttcccgacttggaggagtatagaggaagctgcagcgactgcgataagagcaatgcctgctacgattgctgctgtgttctcagccccatca

SEQ ID NO: 152672 - DNA, 362 bp, Arabidopsis thaliana landsberg
tctgagaataaaaagagtgagctttacttacagagctcttgcttcttctcgaggaaagatctatcaagggtttgagtagaaggatcatataaaagctcgaaactgttgaatatctcaacagtacgacctctctggacaccgatcacacatccgtaaaccctagggttttgctggaacattgcttcgccgttgtttgagccatggccgcttgcgcagattgaagcaggaggattgagctgagttttgaccctagtgtagtgatccgatatgttgacgattaccaaaggatgtagcttgaaggttaaaccgcttgatgacgaaggtgccattgtcgatctctctctcctttgatgaattctttg

SEQ ID NO: 152673 - DNA, 172 bp, Arabidopsis thaliana landsberg
tatgaacacactgagatctcgagcggcaagttggtgatcgaagtttcctactttggatggcatattcattctgagacacatgatctttgtgatgagacaagttgtcctgtggccattggagatttcttggtagcgcactcgcaagttcttcccggatatacccctcctgtaa

SEQ ID NO: 152674 - DNA, 353 bp, Arabidopsis thaliana landsberg
acaacaagtcatcatcatgtaatagttttatacccaaaaaatccattgctaatatagaagaatacatgtaggacattcattgatttgagattcaatgaggattttttaatataaaagaactctccagttaatcaacatttgctcctctaccacatagttactccatctgaaaatagagaatatgcaacgcagaactcgggatttctgcgaccaaatccttttcggaaaaccaactgtcaatgatgttcccaataggagattcctttgaatttgcagcccatctgtctgcaagcttaaacccaaacttagatgcagctgacaaaagagaaggttcatcaaccgttctgaaaaca

SEQ ID NO: 152675 - DNA, 68 bp, Arabidopsis thaliana landsberg
ttaatatagtttttgaggcatttcttgggacgagttttaatactaaaaatatattaattctgaagcat

SEQ ID NO: 152676 - DNA, 451 bp, Arabidopsis thaliana landsberg
gagagagattcatcattataaattgtaatacatgatttaaagttaacgaaccaaactaatacctaacatacaatattatcaccaaaaatcaaacaaacactcacaatttctctcaacgggcttcgttttgttacaagggatgataagggacgtagcccaataagcccgtgacgttagccactacttcgttgcattttgacaaaaggttgagcatctggtgagagatgtccccagcgctaaccgctgggctcgggccacggaagtttcttgaaggtggcattggtggttcgacgtggtctactggtttaatgggaagttgttgtggttttgtgtattgtggagggagaggaagaattggaggcaatgtagaaggaggaagctgttgatgatgaacaacgttttgaaacttcttactaacaaattccattggaacagatgatgatgatgaaga

SEQ ID NO: 152677 - DNA, 431 bp, Arabidopsis thaliana landsberg
tggaaaaaaaaataaactccaacttcaatataattttgggtcaaaaaattagcatccaccattaatacagctcaaacccaactttgtctccccttttttcttacaagtttgaatatcaaagtacgggctcttttttttctatataatagttatttaatcaaccatacacattcatcaaatccatatttcatgcagctgttacatttttattatatgtcctctccttccttttgagtgtgtatatgtgcctaattatattccctcatcacaacctcaatctcaatctcaatcatgtctccaaatctcaatcatgcttcttccactttgattcttatctatctggatcacaattctattcatatcctttaatcaaaatcatatcatagcttctttttttttatattactaatcttgatgaagatcaccaaaac

SEQ ID NO: 152678 - DNA, 1171 bp, Arabidopsis thaliana landsberg
  unsure (1)..(1171): unsure at all n locations
aaaataccagagagcgagaaaagctcttatcttcttcatcttctccaatgtcgagaggaccaggtcgtttaatacagaacgtgacacagttcgctgatgctcaattcaaacaattctctactcgttatggacaacaagttatagacattctcgattttccaatcaagctcgtcttgtctcctttcactctcgcctttgatatcgctggctctgcacctcgtggttttggcatccctgagttcatctccaaaatttcgtatctctctgtttttgtgagttggtttctcctgaaacttatatggttctgggtttagaacttgacatgtagttgtcttaaaggttgaaacttttgttggtttttgctgagtttctagcttgaaactatcattttctttctgggtttttggtagctgatgtttccggggaaattacgcttcgaatgtttgctaaagttttgagctttaatttgagtgtgcctatattgtgctgaatttctgtctgagtttgtcaacttgatttctaagtcgaagttttgtaagatcaaaatcagtttaggaaactggaaaatgcatgttttacttgttctatatggaatctttttatcattggagttccattgattgcaggcggttgctacgcttggaacttatgacattgcattggatttgggaaagaaagtcatatgccaaaggtcagcttcaagatttgatgctttattctgggtcagagaatttttgagaaacctcagttctcacacttcctcgctatgtttttggttctactgtttgagttcatccgatgagatgaaaacattttttgttggtcagggattgcaaaacttgtaatgggtgnnnnnnnnnnnnnnnnnctatgtgcaaaggaacagggagtgttcattaccaaatcaaagattacaacttgagaaggtgggattatctcttgtttaacccaagctatatcgcttaaactactaggcttcatgaatagatccactttattctgacggtctctttgtgttctctgtatattaatgtcgacagttccatttggcaatgcttaagctatcctagtgatattctaacagataaaaggatttaaagatttatcctttctgtctttacttgtagtggagagaaaccaacagcagattgtgtcgcagatgctatagttg

SEQ ID NO: 152679 - DNA, 323 bp, Arabidopsis thaliana landsberg
atccatttatcgaaatatcaggaatgtacagatatatttactatcagaaactatctgtatttgcgttgtgatgaagagattttcaaaaaagatcggaagatggttcaccgcagaaagcttctggttcgaaagttcttgcggtttcatcattgtacgctcctgggattggcagcgaggatctgtccctaggatccctgtatgttctataagacgttgcaattggagaatcaccaaggtttataacaagaatgagcgataatccgagaataactagcgtgtttttcagtctcgcaagaactggctttacctggaaaaacaacaca

SEQ ID NO: 152680 - DNA, 273 bp, Arabidopsis thaliana landsberg
aaataaaaatatttctgagaacctcaagtttaattttgcggcttagatttaaattcgtctctcaaactcaaatatctgaaaaaacctttgtccagtatataaataagctccacgagattttcaatttctctgtatatttttccttttgattcccagaaaatgtcactagattccactttctagcttgcggtttctcgggaatctgaagtttccttttgtgttgaatcgctgggaaaaatctgatggaagcagcttcaagtttcctgggtagaa

SEQ ID NO: 152681 - DNA, 158 bp, Arabidopsis thaliana landsberg
aacaaggaaaccgccgtcgccggatctgatagtgcatatccatgaagtagaagacgaagaaacttactttctgatcttagaacggagtatatgtacagaagattcgcgtccctcaatttttgatctcaagggtcgggtttacctttttttccttctta

SEQ ID NO: 152682 - DNA, 146 bp, Arabidopsis thaliana landsberg
attagtttgttacatgttagctttatggctactgtttgtgtgaatggtcagtaagcacacctatagcaatgtcgttggtgattcgtttcaacactagaacaggatttaacccagtttttggttatggatcatcaactatatctttg

SEQ ID NO: 152683 - DNA, 356 bp, Arabidopsis thaliana landsberg
tgggccccttctgagcccaaacaaaaacaagagaagtaaccttgagttgatcctggccgttagatttattataacgttttccttcagccgtcggatgagtatatcctgtctgatttgaaccgacaattttatattagcttttaacatatgaacttatgaaggcgacgtggcatttgtattaccacgaccatcatcaataatgtaagccataaaaagatcacatgattattactttgtgtatttaaaagaaaaaagatattgatctcaagtgttttaaccccttgtaacaacaatccaatcaagatgtggccattatataattattatggcattgtatatgtgggggtaagagtttt

SEQ ID NO: 152684 - DNA, 141 bp, Arabidopsis thaliana landsberg
caggtgtatctttggtatcctctcagtattatagctggtggtaccactgctaagatcatggttgctgcaaaagataaccttttgggcaagtatatctacaaagacaccattgcaagaaacattgccgctgttatttacaga

SEQ ID NO: 152685 - DNA, 478 bp, Arabidopsis thaliana landsberg
gttgcattaatggcttccattaaaaagttgctggacccaaagggaattctcaacccttacaaagttcttcctcactctctcttctccaactaaggtaaaagattattatgctttatgattacgcaccgaaattattgaaagcatctatctttctatctatgaatgctcttccaacgtcaaaagtgaagaatcatcatcttttactttggaatcattgacattcttttttcggcgaatgcaagggtggtgatgagatgattcttcaaacaggaatttggaacatgagcagccaagtttgagcgatatgattgatgcaaaggaacaaaaatacaagtgctgattaaaaagtctttaaactcaaaagtgtatatgcttcgcttcttcttctttgttgttgttgttgttaccttgtaataatataattttagtaaaggataagaaagaatctaaacctattgatcttacgtgtatttaactt

SEQ ID NO: 152686 - DNA, 903 bp, Arabidopsis thaliana landsberg
attttgtttcctcagtcctggtatgccataaaaggaacatttgttctaattaatctccaaaggttatacctttttaacatgttttttttctttctatattgcgagtgtagaatcatatttattgatattgcatccacgttttgccttagcaatgatccttcaagttaaagttgtaccacactgacacaagttttatttctttctgtagcaggatcagagcaaaagtggaattggacaaggtcatttttactactttctctgggttgggggttctatgatacttgtactggattgataatgagtatcaacagagatgaggctcttagagccaaagatcttgcggagggtttgatgaaaaagaccgattttactgctgctcgtaagcttgcaatgaaggctcaaaaaatggattccagcctggagaacatatctcgtatgataatggtttgtgatgttcactgtgctgcaacggagaagttgtttggaactgagatggattggtatggtattcttcaggttgagcagatcgctaatgatgttatcatcaagaaacagtacaagaggcttgcgcttcttctccaccctgacaaaaataagctccccggtgctgaatctgcttttaaattgattggtgaagcccagaggattcttttggacagagagaaaaggacgcttcatgacaataaacgcaaaacttggagaaagcctgcagcaccgccatataaccaacagatgccgaattatcacacacaacctcattttcgggcaagcgtcaatacgagaaacatcttcactgagttgagacccgaaatcaggcatcctttccagaaagctcaagcccaaccagctgctttcactcaccttaaaacctttgggacctcttgtgtcttctgccgggtgagg

SEQ ID NO: 152687 - DNA, 202 bp, Arabidopsis thaliana landsberg
gcaatgatcttgagagacaataaagacgctactgatatactagaagtttcaccagcaaaggatcttgaagaaacaaacttaacttgtgaagcatcatcctttttgtctattgatatgaaatctgatgaagagaacgaaacagtgaactcaccaacgatctggagagacaatgaagacactactgatctactggaagttgtac

SEQ ID NO: 152688 - DNA, 171 bp, Arabidopsis thaliana landsberg
ctaattaggaaatggatctcatactgcgggagatgtgactaacacatagttggtggatccagatgcctccatagcagccaactttgctggtttcccatatgatgtattcttaaatggagacactttctcagaggaaggctttgcttgagatgggctaggagccgaagaagc

SEQ ID NO: 152689 - DNA, 660 bp, Arabidopsis thaliana landsberg
atttatgataaagattacatttttaggctaaaggaagtttcttttttcatgaatgactgaatgagaagtttttttcttataatgaaaatctcagtttagggtttagggggaaggaaaaaaaaggtaacccaaggaagtaaaattgacagttttgtatacaaaagaagcaatttttggacactatttgaagaattctctgtttttgttgttactatgtttgtaagatttttagtttaatgctaaaagataacattttttttttgtttttcaggtctttgagaaacggttttactagattgaagacgagagttttgaatgattggtgaatttgttgatcatcaatggagaagaagagatcaccaagaagtagtaagagtcctggacctgcaattttccctaaaagccctcttgtctacgagagttataagtctggttgtggttggaaattgataaagttcttcgaaggcgggcatgtcaaatctggtaataagagacttggttcagagaagaagaaattcgtcagagattctgctggttaatagtttttaaaatcagtgtttcttggataacatcaagataaagctaattggatttgtatccctttattagtaggtcatgtttatactaaaagccaactcgatttgcttaagaagcttcatg

SEQ ID NO: 152690 - DNA, 330 bp, Arabidopsis thaliana landsberg
gcaaacgaagctgaagctgaaggttgtgttcatgctcttcatttatccttcttcgagagcggtgggctctcagggttattgatacaacccagacttggcaacgggtcacctgtcaggacactgcaagtagaaaattgactcgacaagcttattgcttgatctgtgtttttctttgtattccttctgagtgtagtatgtacgttcatcaagcactgcttgttgtcctacgtttaggaacgggaactgctggctacctttcgactgttgtaagaccaattttttgtaccatttgcgtgatcaaagttaaaccagttactagcaagaataaag

SEQ ID NO: 152691 - DNA, 145 bp, Arabidopsis thaliana landsberg
agatcaaagaagcatatatttcattagagaaaacaaagatacatataacattgcaacaagagaaacatatagtataaagccgtaaactctcttcaacgaaagcgagagagtgtgactccattccctcaaaacctaactttggcta

SEQ ID NO: 152692 - DNA, 681 bp, Arabidopsis thaliana landsberg
tagtcatcaataacgctcaatatcgaggtttggtccttgatattttttcagtttcactctctctttatgaaaatgctgaagtttctgttgttattggttgcaattgtgaagggagattggagagatccgcggttttaaaggcgatatgcgctggttttaatgtaacatcggagcctgccatttgcttaaacacaggtctagagacaaatgagtgccttgaaaacaatggtggttgctggcaggatacaaaagcaacatcactgcttgtcaagtatgtcgtaaaaccgagcttaccacatcatatctcaccactatattgaatatcagtatcaatttgtttggaattgttttgaaaactagagaaaatgtgaaaatctagagagatattttctagtcctataatacttgaatcttttttgtttgatcaggacacattcagaggaagactctgcgagtgtccggttgtaaaaggtgttcaatataaaggagacgggtacacttcatgtacacgtaagttgttcacacatttcacacaacatagctctcaaatgttgagaccggtttcttgaatagtctctggtttgtgattgagctttgcagcttatgggcctgcgaggtgtactatgaacaatggaggttgctggtctgacacaagaaatggcttaactttctctgcttgct

SEQ ID NO: 152693 - DNA, 127 bp, Arabidopsis thaliana landsberg
gattcttcgaacttgatatttgggaaacttgcaatccgattctgtcaccagtgttttgccttcataaatggagtttgttgttgaagaaggaaagctagtgaatgaagattgctcgactttagttctc

SEQ ID NO: 152694 - DNA, 176 bp, Arabidopsis thaliana landsberg
atcttatcaggtttgaatcccttcttttccattagttcaagaacacctttcatctctgcaaacttttccatcctcccgtacgcatctaccagacagttaaagaacacaaggtctaaccttatgtctgagttctcgatgaaacgcaatactcctccaattttatcagctgtagtact

SEQ ID NO: 152695 - DNA, 345 bp, Arabidopsis thaliana landsberg
gtaatacgaaaacatctttgttttcggagaaacgagaaaacaaaacgccaacatgtttcacagatttaccttgtaccacatgaagatcgaaggtgaagcatcggtctccaaagtactccactcagctttttcattgtgttcaacagtatatattttatcagcctcgcccttcaatcccacctacaacaaacgccaaacattcaatgcttccaaaataatcttcatatttcagataaagcgagagaaagaaaaaagaatccacaacgttcaactttttttaagacatataattttaaaccatatgcacgctaactacacctgatacgtccatgacgattttgacag

SEQ ID NO: 152696 - DNA, 127 bp, Arabidopsis thaliana landsberg
cattactttaggagctttctcaactctagctcttgcgttttcattatcatgttacaagaggatcttaaatcaaatcattttggatttttgttatgtttattttgttataatttatttggatatgatt

SEQ ID NO: 152697 - DNA, 59 bp, Arabidopsis thaliana landsberg
aaagttgttgattttgagatacatagctgccgcaaatgacgaagagaagatctcatcct

SEQ ID NO: 152698 - DNA, 375 bp, Arabidopsis thaliana landsberg
ggaggtgctactcctggtgccggtgctaccccagcacctggatcaaccccaagtactggaggaaccactcctcccactgcgggtgggaccacaacaccttcaggctctagcggaaccactactccagctggaaatgccgcttcctcattaggtggtgctacttttctggtcgcttttgtttctgctgttgttgctctcttttgagtcacactcgaaacctagttatgtgtttgttttaccttactctccttatttaaatagccatgtatttgattctttgtgagaataaggacttgattgcaagtcattataaacgtcttatactcgtgattagcctgagaggcaatatatgattattcggttgcaaaataaaaa

SEQ ID NO: 152699 - DNA, 323 bp, Arabidopsis thaliana landsberg
gagttgagagaacgacgtcgataggagacggaggagaagaaggtgtcgacgataaagcttcaaatttcatcaacaagtttaagcaacagcttaagctacagaggctagattcgtttctaaggtacagagagatgctcaagaacgattaagtgaagattacgcttttaccctttgtcggaatcgtctttccctcgctttccaatttgtagtttcgtggtaaatacccctgaatctgaatggcgtttaggtcatttacgatacgtattttctagtttgtgttctagatttggtgatgactggatgacaaaactagtttgtgtcgt

SEQ ID NO: 152700 - DNA, 450 bp, Arabidopsis thaliana landsberg
gtcagtgtgatgcatatagtcgaaccggagcaaaacacggtgttaatggtggatcgtctaagagatcgtaccggtcggaatattcttcacctcatcaccaaatcaaacagcaagagattaaccaaaccactagtagtagtattcctccagcagccgacaagggaaaaactggcgtgccttctcctagaccggccactcgtaggtacaagcttctcaaggatgttatgtgttagtaatgttttcgaaataaccaaaagttaagagagacatagagagtttattaggatctgggatgatgataataagacacatgtctgtaagatatataaaactagctagggctatgatagctgttgttatggtttgagaagcaatgtaatatacctgcggagttatttcatggattagtaagtgtttgagataaattaattaagtatatctataacaaat

SEQ ID NO: 152701 - DNA, 369 bp, Arabidopsis thaliana landsberg
gatcttaaacttttgtttttcctggccgctgagtatacgatctacggtaacaacggagtccaagaccatcttcgcgaatagtggttgttgctgatgaccattgcaatttgtgttgtcattggaggaatttccaccgtcctctggcatgtaaacgctttcgacacaatcttctccatataactcggtgaagagatgaatcacctcagcatgtgacacgggaaaaccacgagaaaacgttaggaataccgtccgttctttatcagtcgcgacatggttagcgttccagccccaaagaccatgaggaaaaagaaatgaatttgcgtttggaagattatccctagcaacgatattaggcaatacgttgatgct

SEQ ID NO: 152702 - DNA, 138 bp, Arabidopsis thaliana landsberg; identical to SEQ ID NO: 152554

SEQ ID NO: 152703 - DNA, 88 bp, Arabidopsis thaliana landsberg
atagatatatattttgtcttggttggattttgttctcgggggttacttacttgagagaacctcgagacctgtcttgtctttatgctta

SEQ ID NO: 152704 - DNA, 102 bp, Arabidopsis thaliana landsberg
ttattttgaggggtttagccttttgtttgcctttcgatgatttttgagttttgaatatgtttcgtacatcttaaaattgagtacaagcggcatgcagtcgtc

SEQ ID NO: 152705 - DNA, 524 bp, Arabidopsis thaliana landsberg
aagagaagcgcgtttaaagacttcaccgtacgagagatttcgaatttctcgagatcacgaaaaactcttaaagagtgatcaagcatattagcttgagcatacaaaacaatggcgtgagcagcgaaacgttccgatttgagatctggtctgttttcgatgaatccgtcgaggagattcgatacagcggagaaatgtttcttctcggcgagattctcgacggcggcggagaaagcgattcgatctatgtggcaatctggagtaagagaagctgcacggcagatttcgaggatacgatctggatctttctcggatttgagaagagaaagagctgctttgcttttttctttgcttgtcagaggagtttttgaatctggtgagaggattgttgaagccgaggagagtgatcggatttgtggtgatgcgttgaggtgacggaagagagatgttgatgaacggattcgagagagtaacgccattgctgttttcttagggttttagatttgttgaagaagaagaagaagact

SEQ ID NO: 152706 - DNA, 1232 bp, Arabidopsis thaliana landsberg
ttttgcttttgaattttaaacgactgttcactcacatatctctcttagtgtctactggattcggaatgagatcgatgagatctgggagagacaacaacatctgcttcctgggttttctgtcctttgcccttatctcccttccctccttgtcacttgctcttaccaatcctgacgatggtaagcccctaattctctctgtttttcccttttgtgtaatggtaatgttagtatagctaatcgtaccctgattgtttgctttagttgcggctattaacagtctcttccttgcactggagtctcctcttctccccggttgggttgcatctggaggtgacccatgtggggagagttggcaaggtgttctatgtaatgcttcccaagtagaaacaatgtaaaaaacgacacctcccatcttcttcttcttacttttctttatcattcttctaacaacactctcacccttttacagaattctcatcagtgccaatcttggaggagagcttggtgttggcttaaacatgtttacctctcttaaagcaatgtactttatcctctcttgcgttgatgacttttgcttctttaatctgcttctctccttatttttaccttttgatgttttgtctcagggattttagcaacaatcacattggaggaagtatcccatccacgttacctgtttcattgcagaacttgtatgtttcccactttccaactcgcaaatcccctcttttttcttattcaacatcttgtgttacaatctttgccttttcacaggtttctttcaggtaacaactttacaggaaccatcccagaatctctttcctccttaaaatctttgtctgtcatgtaagtctctgctgtctctgtcatcacatccattctctaccggtgataagcgtttaagactgacttctttggtcttacaggtccttgaacaataacctattgtctggcaagatacccgatgtctttcaagaccttggccttatgatcaatatgtaggtctgctttctaaatcagctgtgttaagattgttttctgtatatatgtgtaactgaacattcaacacatgcgtagagatttgtcaagcaacaatctgagtggaccattacctccttccatgcagaatctttcgaatcttacatccttgtgagtttctcctttgcattccatatacatatcagtctgtgttgagtaggtctcattcagttcgttgttctgatttctcatct

SEQ ID NO: 152707 - DNA, 322 bp, Arabidopsis thaliana landsberg
gacatgagtgcttggtgttctgctgttgtgttattgtctttaatacttttgttatctgttcgtgaaaacaacgcttctaattcgattagaggttctcaattctcaacgaaaccttgtgaggagatttacatcgtcggagaaggagagacacttcacaccatcggcgataaatgcggcgacccgtttatcgtggagcgaaacccgcatatccatgatcccgatgatgtctttccaggtcttgttctcaagatcgcacctttttacttcaacaggaaattgtaagacatataacaaatacgtttcttttttctttctcttttct

SEQ ID NO: 152708 - DNA, 741 bp, Arabidopsis thaliana landsberg
  unsure (1)..(741): unsure at all n locations
gagccttgattttatttgatgatcggagaagataagatagccacgtcatttctataaaaattccacaattgttttttttctctggtgcagaaaatccacattacgtgacaaatgatgagagcaagatcaaagtagactctttgcaactaaacagattacaaatcttcattgaacaaacacaggagaagatgaatagtacagtctccggatgaaagactattcatttgctatggaattgggctgaagaaaccatcatcactggatgttgatgtcgtggaaagatggcaagactgcaaccagaggatctccataacctacggagtctgtttgcacacgaagcatgagttcatataaattcacttatataatttctgaatgttcatactaaatgaaacggtttgaatactcaaatgtttacctccgnnnnnnnnnnnnnnnnnnnnnnnnnnnnnagctacatctgactgctcgacaaatagcaagatcgatgagtctgattagatagtttcaaagaagagatggatatattagttaagatattaccgtcactggaagttctgttcccaactgatgtaagtatccaataacttggccttcctttattgcatcaccctaaggagtttttttcacttagctctttgatcttatttctgttcttttgttctaagagatgcaacagaatttagagtcgtttacctctttgcagaaaggaaattgtttctttccttttacagttctgtc

SEQ ID NO: 152709 - DNA, 376 bp, Arabidopsis thaliana landsberg
gcaggactgaagcagggactagtagtcctccaatgtcttgtcattctgagccatacggaggaggacgagatgatcctaatgggaataattttgatacggtttcgactaaatcgcttcccaataatccctctgtttctgcttccaatctcatattagacctattgtcattggatgacgtaagtaacacggcagaagcagaagatgttgaagacaagaagaagcaagacgattcaaaggcagagactttcgatccttgggaggcgttgatgttgagagatgatccgaagaagaagatagaaacgattgaggaggaaccttcaaccgctgaggatcatcagagagattcagggaattggttgcttgcgttagaagaaac

SEQ ID NO: 152710 - DNA, 121 bp, Arabidopsis thaliana landsberg
ttactctttccagtcttgtctgtttttgacattaaatactcagtagtggacatgtcttgagatttgtttggaacatgaaagttttgatgtttatgtaggttctttcagttcgctcatcaag

SEQ ID NO: 152711 - DNA, 246 bp, Arabidopsis thaliana landsberg
cctttctcgccgccgtattcgtcctccaactcctctcaactctcacggtcgcggagatcaagtctttcactatctccaacgattctcggccagtgattctcttggagaaattcggtattattgagattggtcatgtaaccgtctctgtttcctctgtttcagtatcgtctccgattctagactcgtcgaaattagggttctttgttctatcagaagaatctcttcctcatgtactcctcgagctcc

SEQ ID NO: 152712 - DNA, 176 bp, Arabidopsis thaliana landsberg
agactttgaggacaaaatgtttcgacaagtgcgtaacgaagccaggatcaagcctcggtggaagtgagagtagctgtatttcgagatgtgttgaacgttacatggaagctactgcaatcataagtcgttctcttttcactcaacgttgatcaattccagctacctcttcctttttt

SEQ ID NO: 152713 - DNA, 239 bp, Arabidopsis thaliana landsberg
tggatgatctcttaccggaggttcttaagaaatgcttgagcacaaatggaacatgtttatcctctgtgttcaactattcccttttggtgaactggaagacatagctaagtagccactctgctcccaagcaaaatgggcataagaacttcaagcagcaattcactcggaaggcctcgcgagagctttttgttaagaagttttcctgcatggctcccgtttatcataactgtagaatatac

SEQ ID NO: 152714 - DNA, 107 bp, Arabidopsis thaliana landsberg
tccctttttggagctggcaccttttttctttttgtctctactttcttatacgattgtttcaagaaagaatcaacaagtgttgcgttccacacattttgagcaacagc

SEQ ID NO: 152715 - DNA, 254 bp, Arabidopsis thaliana landsberg
  unsure (1)..(254): unsure at all n locations
aaaagaaaaaaaaaaaaaagaaaaaaaaaaaaaaaaaaagacgagaagngtagcaggacnanagaaataaaaaaaaaagaaaagaaagggaaaaaaaaaaaaaaaaaaaaaaaaaggaaaaaaaaaaaaaaaatagataaaaaggaaaaaaaaagaagaaaaaaaaaagaaagaaaaaaaaaaaaaaaaaaaaagaaaaaaaaaaagaaaaaaaaaaaaaaaaaaagaaaaaaaagtaaaaaaaaaaaaaaaaa

SEQ ID NO: 152716 - DNA, 374 bp, Arabidopsis thaliana landsberg
gaaaattttgactcaaatgagttgatgggtcaaatgagttgattagtcaattggtttgatgagtccattgagctgggttgtaatggttaatggtttcaatggtttacccaattaacccatcaagttttgtaaaattgaattaaaccaactaaaatctctaaaccaatgccaatttaagtttaaccaacacaactaaaccgatttaataaaattaatatttttccaaatttcttaaatatacaagcgatgaaattgagaaaaaagtaaactcgtaattttccaccaaaaaacttaaacccgtaattttcctgccagtaacgtatttccgtaattttcccgccaaaaacgtaaacgcatgattttatcgtcaaaaa

SEQ ID NO: 152717 - DNA, 133 bp, Arabidopsis thaliana landsberg
gtattcaagttccaatatctgatgattgtgaggatggtactccgcagtcaagtaatctggccttgaatattcaaggtagtagcaactcaagtccaaaggccactgccccaagaagtatgtggaaccgaagtaa

SEQ ID NO: 152718 - DNA, 252 bp, Arabidopsis thaliana landsberg
atgaatcgcccaaacgttgatgaaaatcttggagtctttaggcacagtgtatcccgcaaccaccgaggtttcgctgtttctgtgtggaacaagaagaggaagggtagggtgaagcctaagagtctctttcataaccgcttgtagataaggaagcttaggtaaatgtgattcttcaacgatgttgtctttgccaataacttggtcaagttcttgtcggatcttgtttaacacttccggtctgctaacgatttc

SEQ ID NO: 152719 - DNA, 169 bp, Arabidopsis thaliana landsberg
tacatgtctttgattgttgtaactttactacccaaaacctataaagatgggcttatttcgttctattggatataggaatcatcattagtggtaaatcaagtttctttctaataatgtaaaagatcagaatatccataagaagatatcaacatctgagttgtatggtaaa

SEQ ID NO: 152720 - DNA, 372 bp, Arabidopsis thaliana landsberg
accatgcagttataatgcacctgaactggatactgaatctttaaggatctcccagcagcaagctcttcttctacaatcaagaaggtgaggagtgtgatttgattatatgctagcatgttattttactaattcatttgatcaattataagcataaaccaaatgttagtctagcatgcattttgctctcgagagttcaaattcaaaccatcgttacacttggcactcactgtagcctgaattgttaatagaagccttagaataggttaataaatttttcgaagttggttatgtccctgaatgcagggagatgcttgctattcgctaactttttatattctcattccaggcaagaagtggtgttttatagataac

SEQ ID NO: 152721 - DNA, 213 bp, Arabidopsis thaliana landsberg
ccgtcgccgacgtgttcgatttacaacgattcggtggctaatcgttgttagatttagaattaaaggttaaaggagacgacgacgagagatgccgtcaaacggagatctcgaccgtcagatcgaacagctaatggagtgtaagccgttaggtgaagcagacgtgaagatcctttgcgatcaagctaaagcgattctcgttgaggaatataatgt

SEQ ID NO: 152722 - DNA, 201 bp, Arabidopsis thaliana landsberg
agttgtttttctggatagccggcggtgcgattcccttcctctgacggtgatcacgtggtgcatctccatcaccgatgttggcatggccattttgttgattctgttcttcagccatagcgagtggttgctgaggtacagggttgactgtggttcttttttttctgatttcgcgggctgtgcggttgatgttgtcgttgaaaa

SEQ ID NO: 152723 - DNA, 1091 bp, Arabidopsis thaliana landsberg
aagatgcttgaagttagatcaatggatatgactccaaaatcaccagaacccgaatccgaaactccgacccggatccaaccagctaaaccaatctctttcagtaacggaatcatcaaacgccaccaccaccaccaccacaacaacaacaaagtcatatacaaagaatgtctcaagaaccacgcggcggcgattggtggtcacgcgcttgacggttgcggcgaatttatgccgtctccttcttcaacaccttccgatccaacttctctcaagtgtgcagcttgtggttgtcaccgtaacttccaccgccgtgaaactgacgattcctccgccgttccaccaccgtctcttcttccatcttcaacaacaaccgccgcaattgagtatcagcctcatcaccgtcatcatcctcctcctccggtagctcctccgttaccacgtagtcctaattcatcttctccgccgcctatctcttcctcctacatgcttttagctctctccggtaataataaaaccgcaccgttctcagatctaaacttcgccgccgcggctaaccatctctccgccacgcctggctcgaggaagcgattcaggacgaagtttagctcaaatcagaaagagaagatgcatgaattcgccgatcgaatcggttggaagattcagaaacgtgacgaagacgaagttcgtgatttttgccgtgagatcggagttgataaaggcgttctcaaagtttggatgcataataacaaaaactccttcaaattctccggcggaggagcaaccaccgtgcagagaaacgataacggtatcggcggcgagaacagtaacgatgatggagttcgcggtttagctaacgacggtgacggtggtggtgggagatttgagagtgatagtggaggagctgatggtggcggaaacgtaaacgcctcgtcgtcttcgtcgtgaagaagaaaacatcatgtcgttttgcagggaaagagttataataatggaagcttaagctttgtttttagctttagatcatagagagtaagcactggtattattatcgttaatacgttttattaatattaattaaactcttttagctcttt

SEQ ID NO: 152724 - DNA, 325 bp, Arabidopsis thaliana landsberg
aagagcttttgcggctgaagaaacagaggactaccacgactacgacggcttcaacgagggtatcgtctctctcgccgtcttcttcttcaagctcgacatcgtcttcttcgagttcgattggcgatgcggtgaagaaggaggagagagagaaggaagggaagagaggtaagaaagggttagagagaacaagatctgtgactatgaggataagaccaatgattcatgttcctgtttgcactccgtctaagtcctcttctcgattgcctcctctgtttcctctaaggctgcagaaaaacagagttgagagatgaacttgatcaacata

SEQ ID NO: 152725 - DNA, 553 bp, Arabidopsis thaliana landsberg
gcctgctgtggaagacaaacttcatgaagtagcagccagcctcatagctgcttatgacagcggagagattcccagcgctttacaacaaggacaaggtgcttggcagaaatgggtgaaagcctttggcaaatccttgaaacgcaaagttagtcatctctctaatgcagttaataccgaaacaaaatctactttacttgagtgaacaaaccttacaagagattcttctgatgctggttacagggtaaatcacttttcatgccactacgagtgttgttaacgggaaaactccatggtcctgagatgggcaccagtattgttctgatttacaaagctggaagtcctggtatagtggttcctcaagctgggtttgtgtccatggaggaacggtttaagattcttagggagatagactgggaagctttgaacaaagatgagagtgtgcctcttgaatctacagccacagtatcaacctgagaaaactccccttttttttttttttttttttccttcaaaatttgattagttggtgagagaaagacagcccagagatttt

SEQ ID NO: 152726 - DNA, 205 bp, Arabidopsis thaliana landsberg
  unsure (1)..(205): unsure at all n locations
cactgctctaaaaaaattcattaattgctgaaactctctctctctctagnctctatctctcttcttcatccttgagctctgttagattctctctaactctaccatcgnttcatttcttaattctctgttttcttgttcctccagagtgatagatctggcagagaacaatgtctgaattagccaattaggtcgccgagataaaaca

SEQ ID NO: 152727 - DNA, 222 bp, Arabidopsis thaliana landsberg
ttggatggcttgacccaatttgtttggtttacacaatttatgcgagagggaagagtgttgtttctgccggtattatcaccggttaataaatacttcatttaatatgactattttgcttttttatctgtagttttgtgatgtattatgatcttagcgaaaattttttgttattttcaaacgctctttgggaccctttttcttattttcatcgaatacatttat

SEQ ID NO: 152728 - DNA, 307 bp, Arabidopsis thaliana landsberg
aagaaccctctttcctgctcaaggagatgttgctctctggatttcacccaaatcacattacgcttgctagcattctccctctttttgctcgggtgggaaacctgcaacatgggaaagagtttcactgctacatcttaagacgccaaagctacaaggactgtttaatcctgtgaaactcccttgtcgatatgtatccaaaatccggtgaaatcatagctgcaaagcgagtatttgattcattaaggaagagggacaaagtgacatacacttctttgatcgatggatatggcaggctgggttaaagaaa

SEQ ID NO: 152729 - DNA, 261 bp, Arabidopsis thaliana landsberg
attcatttgaaaagagataaagatgtgataagttacataagtaatagtcggttttgatacaatggagatgatcaaggtccaaggacatggagctgagcattccatctcgtattggttttggaaattgaagaaatcgaagatggtgaaagtaaagtcgaggatggaaacaagggcgatgaggatgaaggagaagacacaaattattgaaaacaagatcattcatttttttttcagagaactcttttagaaaaccctaacaaa

SEQ ID NO: 152730 - DNA, 357 bp, Arabidopsis thaliana landsberg
gactaggttagcttgagagtctctgttgcggtggcacttagatttggttaatgaacttgttgtctagggttaatttattgagcatgtcaatcacctgtaaactgaggaaacgaaactactcaattatcccatccttaggaattctttatctgattgatctttattgtttactctattgctgtgtactgcatcccgtcatccgttgcttagtttctgcaattctttactgttactcgacctgatactcgaccacccagttgtctggcaacagactgtgcagtcgagtatccctgtttcattttctgtctgttactcgacctgtcactcgacctcacccagtgctatgcaaagagctgt

SEQ ID NO: 152731 - DNA, 61 bp, Arabidopsis thaliana landsberg
tgctaaagtgatgatgtgtcaatcatatggagagagttgaccaactttcatatatataatt

SEQ ID NO: 152732 - DNA, 229 bp, Arabidopsis thaliana landsberg
acccaaaatagtaaaaccttaaagcttcgaaagaaacttggaagaggaaattaaatctaaaacatctaaagtctgataactagaagaaagcttccactttcatggacatgatacaacaacatagagggaaagagagaatgtagaaaaaaattgaaccctaacctccacatacacacatacacagctaaaagtctcacaatttatctcctgctgcttaatctataagacc

SEQ ID NO: 152733 - DNA, 701 bp, Arabidopsis thaliana landsberg
aggctctgcttttgtttccccttgagctgcttataatgggagagttaaagaagataaagcatgttatttctgacgagactgattggtactcgttgcaagtggttttacccgtgggtttatcgtgtctttttggcttggctatctctttcttcgggttctcatgtcgtcgggccatttctgcaacggggttcaccgttcttggaattgtgaacaagctgttgacagtggtgatcaatttgatggtgtgggataaacattcaacgtttgttggaaccttggggctcttggtttgtatgtttggtggagtcatgtatcaacagtctaccatcaagaaaccgaatgctacacaagaagctaaaccgcaagagcaagacgaggaacaagagaaacttcttgaaatgcaggagaacaaggagagtaacagcgtcgatataaaggaaactctgaaatcagaagagaaactatgatcatagtggttggagcttacagtggctggagtttcttcggtactgatacgatttagtttccaagtaaagaactacattgtacttagtggttatgaaattcttttgtatttagaggtaagagtacttcggtcctgatccagtagttgaacaatatcgacttcttctttacattgtgatgcggtcggatatttatcatgtaccccattcatatttatatgcgagtgaagaattctt

SEQ ID NO: 152734 - DNA, 250 bp, Arabidopsis thaliana landsberg
aggaggagctgtggtaaatgcgtaagcgtggagtggacaagaccggtcttaacgtcttagaccattaaatatgatatgatgatgttgtttgagtttaggggctttttgttatgttggtaatgtgttacgtccgtatatgttggtaatgtgttgcgtccgtaccttctgtagcaaaagtatgtgtttaataaagactttacctcgacaatagtcggggcctgttcccttaaaactaatatagaagttttgt

SEQ ID NO: 152735 - DNA, 242 bp, Arabidopsis thaliana landsberg
gaattttgtggtgaatgagagagtcaactttaatggagaaagtcacaaggagaactatctcctccttcatcttctttatcgtctcttctaccattctctttctcgccggaaaatcctcagccaaaatttctcataacggtgacaataatgtgacggccttgttcctctttggagactctttaatggaagcaggaaacaataattacataaataccactacacttgaccaagccgatttccac

SEQ ID NO: 152736 - DNA, 67 bp, Arabidopsis thaliana landsberg
gggcttcagtctttagaatagcattttgagtacaagaagctttttgctggttagttgaacatcctga

SEQ ID NO: 152737 - DNA, 310 bp, Arabidopsis thaliana landsberg
agactggcttggcatctctgctatgccaacacaaaagctatattctcttaacaatcagtacaccaaacgtagaacctgtacacagttggtccaccaccaccactaccacaatctcctcctccaccaccaccacctagtcaccggaaaccaattcatgccctagattaagaaccagaatccttttgagacaagatctatatatacactctacacactctacttatacactttatctagatatagatgtgtatgatatataaaggttctttttcattacttgttggtttagtgataaaaaggaggagagttt

SEQ ID NO: 152738 - DNA, 240 bp, Arabidopsis thaliana landsberg
gatttcattgtattcatcgatggtgtatccttgtctgaaggcgaactcaatttgctgtcttgaggatttgtggaagttgcgtattcctcttcttcagggtttagggcttgttgttcttggcttggagaagaagcaacctgttctgtttgaggacacatggatttgagttgcttcccgagaagtaatatagtctcttgacactatgctagcttctctgcagcagccgctggttcattatca

SEQ ID NO: 152739 - DNA, 260 bp, Arabidopsis thaliana landsberg
tttaaaatgtgcagtagatatcttaaagagggaagctcctaatagcaaatcacacggtgggtttaagactaaccacaaaagacaacatacataaacttctagaaaacaacaacatttagagataatgaagcaaagtctcacctatgcttcagatttgatggtagcacttgcattttgcgcagctgcggaagaagaagcattactctcaagaagccattcccttgcgcaaatcagagcctccactgtctcgggcctcagtg

SEQ ID NO: 152740 - DNA, 89 bp, Arabidopsis thaliana landsberg
ggtttgtgagggtgtatctgaaaaaaaataaagtttggttgattcaaaaaatattcttatcctcggagttgcgatccaacgattggtat

SEQ ID NO: 152741 - DNA, 569 bp, Arabidopsis thaliana landsberg
  unsure (1)..(569): unsure at all n locations
gagataggaagagaaaaaaaaancagcttcttcttcaaagcgagacctatctgagtcgactcgtaacgagttgatttttttttgttttcttctctactggtttcgcttttcgagcttctcgtctccgttaatcgttaaatctagctcattgatccgatatccattgttttctctcgccggcgcgtcattgtcattcgtcgtcgagttctggtgagtcttccatttttctgtagatttgttgttgtcttgacaaaaatggagttttgaagatgtttcttaatacgttcctcggttgtttgtttcctgatttgattcataggtctgagattgctattaattattcaaatctcatatcgagcttatgttttttgtattagttcaatgttgttgattgttaactagatcaagctggattaagaaaattagatatcttcaaatgcttttgttgcttccatttgttattttcagggatctatgttggacttaaagttttggttttgtgttcttactcacgttcgatttaattcctctctttgtagattgttttaactatggaagctcgtcgggag

SEQ ID NO: 152742 - DNA, 295 bp, Arabidopsis thaliana landsberg
caaattgcatattgcactaatatttgtaattcaaaaagaagaagaacccgaaacgaagactcaacttatttatacattttaagccaactctgctactttcttatcttacagtctcaaatcactggtgaatcattctgtcttgagtcttaaattttggtagtatccggttccgaaagagtagaaacatatttttcagtgtcgaccgcggcttcgctcttgcttctaccactttccggtcttctcctcctctgtccattcccatctcttgtgccttgagaatcgctagaagcttcat

SEQ ID NO: 152743 - DNA, 163 bp, Arabidopsis thaliana landsberg
aaacggccagagattttcgcataagggtctcgagtttacgctttgaaattagtaatgtaactgttgttttaccttagcttgggcaatggcgtcatctacttcttttctaatttccttctccatatccttaagctctttctcggttgctaggtcatgagatagt

SEQ ID NO: 152744 - DNA, 410 bp, Arabidopsis thaliana landsberg
atcaagactgtggatgatgggatccacgagctcttcaccgaatacatggcgctcccgtcgccccaaaacgcgacatctgaaggtgggaaagcagatggactgtcggattttgacacgtacataatggagacaacggggcagaatctgaaatcagagctggaccagtaccttgatgaaaccctgcttcccagggttcaggagtttgatgttcttgactggtggaaacagaacaagctcaagtacccgaccttgtcaaagatggctagagacatcctttcaatcccggtttcagctgcagcctttgactatgtctttgacatggaaccgagggaaatggatgagtacaagacgtcactgaggcccgagacagtggaggctctgatttgcgcaagggaatggcttcttgagag

SEQ ID NO: 152745 - DNA, 653 bp, Arabidopsis thaliana landsberg
ttcgtctggtctcactcctatagttttgtttaatcgttttcgtggcggtgaaattcatgagagcttaactggtgaatcttttttttggttctgtaataattttataatcttctttctctggcagtttgcgacgaaactaatttaatatataaatgtaaatctagcagccattcttattggtttattgttgaaatctctacgaaaattcctttttattcgatttcgtggttttaatcttcaccattacgatttttcttcagctccttctctctttcaattcaatttttactctttttgtatattgcaggtgaagttttgagcttttgagcgatcttttgggtcttgctcttgctcttgaggcagagaacccatagacagttgttttgtctgtttgttggtgtcagatccaaaatcaagaggctgttatagctttgacttggaagtgatttgacacaatgaaggaagaagattcaaaaaaaataagagggtaggaatctatttggtcgcttttgcttcctcctattctggggagaatttgggatcttggagttgaatccgttgtgagaagaaggatctttttgagcttgtgtactgtgtcctctcagttgattcatcgcagagacaacaagtcctgtcatgtctatgagttttgt

SEQ ID NO: 152746 - DNA, 133 bp, Arabidopsis thaliana landsberg
  unsure (1)..(133): unsure at all n locations
atctgacttagctaatatccttcttcattatatcataattccaaatctcgcaaactaattttttcactttcttcttcgntgatctctctgaaagcttctctttttcttctcaccatgtctgggtatcctccat

SEQ ID NO: 152747 - DNA, 323 bp, Arabidopsis thaliana landsberg
gtaccatggctccactctaatatcagcaagtttgtccgggtaggataaatattgttcctcatatgttctttctagaagtgctaaagattccttcttttccctaacaaagttcgtttgttgatccagccttcccccgctacaccaaaattttgatttacctgcaccatttgcgttgcacacagattgccctcattattggcgatctcatcttccaggtatgaatgatccttactgccatatcaaacagtaaaagcatctgttattataacctttgaattgcttggtcacgccatacggaagaagagttttcaaccagattagcc

SEQ ID NO: 152748 - DNA, 496 bp, Arabidopsis thaliana landsberg
accaatgctaatatacatgaaacaattaattttattttttttggtcactattaatttggtttctattacaacatatttacgaaattcatcgtactattaacacaaatgtgtctttctcaaaatataaactatttcgagatatcaaaacggtccaaacattcctatctatgacaattacttgatatattattctacatagtatattagattacgatgtacaggcttctttagttcctcttacacatgtacccatcaccgcaaactgagattacgccacgtgtaactcgctactcttgacgaggatctcccataaccgttggatctctgagaagacatcgtcggtgggaagctgaaacctgcagaacggacacgtgttcttcttgcttagccacggcaagatacacttccagtgaaagaaatgctgacatggcatttcacacacatctcttccttcgctcatctcttccttgcatatcacgcattctacttctccggc

SEQ ID NO: 152749 - DNA, 370 bp, Arabidopsis thaliana landsberg
agaagctttaaagaaacaccttttgatttttgattcaagaaaccattttaagtacaaagttttggggggtcatttggtcactcttttgttgagtaatcacaagattttcatctaaaataagaatgatacattaccccctcttacaacataagacaaaagggacaaaagttgctggataagcttaaaggaagagtgaaaatctttatcagaaaagaaggaagaagaaaaaaaacgatcaaatccggatactgtacctttaattatcatggcctcccttttctggaacaacaacatgaaaaaactgcagaagataagggaaaaaaaaacttatatcattatgtttctgaaccacttctggtcttgagtcttt

SEQ ID NO: 152750 - DNA, 408 bp, Arabidopsis thaliana landsberg
tgtccgccggcgaatcatcagagatcgaggaagcggttgcgagtctaaccatgtcttctaacaagattttgttgacgagttccgatggcgagtctttcgagatcgacgaagcggtggcgcgtaagtttctgatcatagtgcacatgatggaggataactgcgccggtgaagcaattccgcttgaaaatgtcaccggggatatcctctccaagataatcgagtacgcgaagatgcacgtcaatgaacctagtgaagaagacgaagacgaggaggcgaagaagaatctagactcgtgggacgctaagttcatggaaaagctagatctggagaccatcttcaaaatcattctcgctgccaactacctaaacttcgaaggacttctcggtttcgctagccagacggttgctg

SEQ ID NO: 152751 - DNA, 192 bp, Arabidopsis thaliana landsberg
caaactgattctggctctcctcaagcttagaagaaacttcttggagctgtttcctggactcctctgcttcttggtctgcttgcttctttgatgtttcagacactgagatttgatctttcggcttttttagctcctcctgaagctgcgagactagcaactctagctccgttattctactcggcctcttcttct

SEQ ID NO: 152752 - DNA, 492 bp, Arabidopsis thaliana landsberg
aaattggtcaaataaaaattgatcaagttcatgtcgaaaaagatgtaaaaggaagtagcatgttgcattaacctaaaaccatagtaaattataatttctaccttctgagagcaaaggagggaccaaaaaatatcctaaaaacctaagaagccccacaaatagtgcagctgttacattacataggagcagtgcaagttgttctgaaatggcctgtttgattacaccgaccacaatgaaccacacgcctcacacggtcacgatcctctgcccttactctcctcttcctgggagcacctttcatagcctttggtgtttttattacattttcactgtctctctctgaatcattttctttccactgaactttgtctgatattggctctagagtttctgcataagctcttctgtaattctccactgtgaaacaactctctgtgtatctataaacgtcctcttcgcaagacaagagagctccaacggcgtggctacagg

SEQ ID NO: 152753 - DNA, 69 bp, Arabidopsis thaliana landsberg
tgttcgtttgtggaatgttcctcgtccttcacttgaagattctagcatttcatctgagaatttcattga

SEQ ID NO: 152754 - DNA, 303 bp, Arabidopsis thaliana landsberg
tctttagtggtttgattctaatataataagagtagagcaacttatgacacaaatgagaacaagctcttattacatataatattcgaactacaaatacaccccttaagcaaatctaatgaaagaaggggtaattaaacaataacaaaacaaaatacacgaaactgatattaaaggtgattatctaatgacgaatcacaatcattctcttcaggttttcttgtttggcccgtatgcatacttaatcagagactccttgatagagagtagctcaaggaactctttcttgagcttggaagcatacat

SEQ ID NO: 152755 - DNA, 387 bp, Arabidopsis thaliana landsberg
ccaaatcatgatccgaaattcgcataactgaagaatcaacctaacctaacctaaaacaatattcataaatcaaatcgcaagatatagaaattgtggattcatcagatcaaatgatgaagatttcacctgaatagctaagaagcctttgtaattgaggagacaatgagagaacgagatacaagcaggatcacgaacacgagcagcgcgtagatctgcgacggtggcgttacgaagagaaggatcggaggaaaaagtgtttaagaacagatcgtataaaagtgtggataaaagcgttgaggaacaaagcttgtttcctagatgaaacgagatagatcgttcaagagacgaatgagaaagaatcgtcgaatatagatagctagctaaagc

SEQ ID NO: 152756 - DNA, 99 bp, Arabidopsis thaliana landsberg
gccatgggtccttcggaatcaaccatccctccgaatctctcctttatccactctttttgctcctctaacttcactcctggcccccatggcctcttatcc

SEQ ID NO: 152757 - DNA, 277 bp, Arabidopsis thaliana landsberg
tcgtagagagctgagagatcgatcattggtcggtttaggattggaccgatttgtgaaccggaggatgttgacggaggaggaggaggagcgggtttgggtttgggctgaggattggaggtgggattactggtttgaccttgagaaacagttggtttagggagaggttggtagtgatgaggagggcttgaatcggaagaggaagagattgggatctcatgtgtttgtgatttgccaaatttggagaaacaaaatcccattattttttttttaagaaaat

SEQ ID NO: 152758 - DNA, 385 bp, Arabidopsis thaliana landsberg
atccctatagcagctggctctcagtttctttgaaggggccacgccacacattcaaacccctaaaacagatgagggtatgagaaatgttgcaaactgttcaagcgaattttatagtaagtttggctcattgaagcaaagactatggaggaagacagtagttgagggtgtggccgctgtggtggttgtggctgctgcagttttaggagttgttaaagcgtaccaatattttatggcatcacctgtgtgatcaagttttaataagaccatgtatttgcattattggtatgatgtatacatatattcattatgtttcactttacataagttatttcttcattaaaactaaataagtataaattgtccttcttgagttattattatataa

SEQ ID NO: 152759 - DNA, 332 bp, Arabidopsis thaliana landsberg
ttgacttctcactcttcttccttcaatcacgagcctttgcttcttgttctcattgaagatttctctttgaagaactaatcaaaagttcagattcaacagtttgtctaaaaaaaaatgatttttctatattaaaaagtacacactaagactcaaaacttcaacttggttctccacatttctccaataactttcccaggctgtggattatctggtcctctatccctctgtcccgacgtgaagtacaaataaccgttccagaatccggccatcgctgttttgacacggtatggtaaccgtccaatcacagaccaagtctgcaaaatatttcatat

SEQ ID NO: 152760 - DNA, 350 bp, Arabidopsis thaliana landsberg
gaatttgaaaagccgctatgggggaagggttcatagcgcgggacatgacattcgtgaacaacgccggacccaaatcggagcaagcggtggcgctccgtgtcggagcagataaatccgtcgtgcatcgatgctcagtggaaggataccaagattcactctacacacactccaaacgacaattctatagagagacggatatcaccggcaccgtcgatttcatattcggaaactccgccgtcgtatttcaatcctgcaacatcgccgcacggaaacctttaccgggtcagagaaacttcgtgacggcgcaaggacggagcaatccgggtcaaaacaccggaatcgcgattcaa

SEQ ID NO: 152761 - DNA, 420 bp, Arabidopsis thaliana landsberg
acctccaaaatcgggttctggggcatctcatttcttctgctgatgtttccccttctgtaacacgaatcacactttgaaatgaactcttgagcgtctttgaacatggttggccaccaaaatcctgcttgtaggattttagatactgtcttgaacgttgcaaaatggccgccatagctagaaccatgacagtgctgcaagataccgtttatttcatcttctgagacacacctcctatagattttatctttgaagagagtgtagaggtacggctcatcccagtagaagcgatttatgtctttgaagaatttctttctttcgtaccctgacagattcggaggctcttcaccacatgccaagtagttgacataatcagcgtaccacagaagtttctcctctactgcaagcatctcatcccaaaac

SEQ ID NO: 152762 - DNA, 475 bp, Arabidopsis thaliana landsberg
cttaacttcatttggcccaacatttttgagacatctcctcacgtcattaacgcagtgatggaagccattgaaggaatgcgagtcgcattaggagcagctgtaattctgaactattgcttgcagggtttgtttcatccggcgcgcaaggtccgcgaagtgtactggaagatatacaattctttatacattggtgctcaggacacccttgttgctgcttacccggttcttgaagacgagcagaacaatgtgtatagccgaccggagttgacgatgtttctgtgaaagaaagattctggattcgatgtgattctattactctctagtcacctgtagttgttggtattttggctttattgcaaaggtttgctttgtataaaacacagaaacgtttcttttctttttctgataactagaaaacctatgttcacttttggttatttcttattgacttaagtttcatgttatttgtatgcat

SEQ ID NO: 152763 - DNA, 351 bp, Arabidopsis thaliana landsberg
gaagaagatataattgcaataccgcgacgccacaatcgtggaagataaggcggaggaggcgggaccaagggaagagtcactcttagtccattccctcactttcgtaacaacgattttctcaaaatcaggacaaatcctatcataataattcaacgataataggttgtccaaagggaacaatgactttgtatcatcatcgtcatcgcctccgtatcctcccgctccaggtaagtcttttcggccagccgataccggccaagccacgagaactccgagtatgacgacgactgagaccacggccaacttcattattttgctttcttgatatctctctcaatttgattggctttg

SEQ ID NO: 152764 - DNA, 537 bp, Arabidopsis thaliana landsberg; identical to SEQ ID NO: 55593

SEQ ID NO: 152765 - DNA, 282 bp, Arabidopsis thaliana landsberg
agggtaaattcctccatgaaagagtaggtcaagaagaggagaatcatacccaggcttgctgtcatctctactccaatcgtttctgggaccttctctgatagtcctctcagcctccgctgaagcagcagataatgaagaatagcaagaagcagattgcagaccacccgagacagagggtcgcaactgagatcgaaatacagatcgaacaagcatcatttgatctgctaatcagaaaatgtggaaaaagaagaagaagaagaaatgagatttggtgtttggttt

SEQ ID NO: 152766 - DNA, 440 bp, Arabidopsis thaliana landsberg
agaagaagccgctcagtatcgcctggtctctgttatcgcaaccggcggtacagccgcagccctatccgtagccgatctccaccttacagaaagagaaggtcaccatccgctagccacagcctgagtccatcgaggtcaagatcaagatcaaagtcatattcaaaatctcccattgggacggggaaagcaagatcagtgtcaagatcaccatccaaggcaaggtctccatcgaagtcggattcgacatcctcggataatagcccaggtgggaaaaagggattagtagcctatgattaatgaataatgattacccttaagttaagtgtttgttctttttactgagaagggatggtaaagagagtaagtagtttacttctgtaaaacataagcattgtcttttgcgtatgtttgtttgattatgctccaagattgttaaaaat

SEQ ID NO: 152767 - DNA, 171 bp, Arabidopsis thaliana landsberg
tttctcctttaaactctgaaccttcaacgttatcttcctctcactagctaagaaacccatttcgattctctctctctctctcgtttccaacatcattccatggctgacgatagcgaattgtatcctcgtttcttcaaagtgttcctcgttgaatcggcttctgaatcgttg

SEQ ID NO: 152768 - DNA, 226 bp, Arabidopsis thaliana landsberg
aaaaaaattgaaccatatattgcaattttaccttaaaaatttgataaaatgtaagatggttatattaaggaagtcgaaaaataattaacgacaagtgaatcctcctataagcgaataattaattacctcacaactcaaacgctcttgtgctcctaatccagcgagatggaatcaagacaaaaatgaatagatcctcacacttctcccggaaacgatgatgtcggaa

SEQ ID NO: 152769 - DNA, 178 bp, Arabidopsis thaliana landsberg
agtgggagaaattccaacaaaattcagtgggagaaattacaacaaaattcagtggtagaaattcttcaaaaaacgaaaacggcgattccaactctacaatcaaggcagaacgcagggagggagagagaattgattatagacggcggaccggacccaagctagggctgaagcaggactt

SEQ ID NO: 152770 - DNA, 199 bp, Arabidopsis thaliana landsberg
  unsure (1)..(199): unsure at all n locations
catcaccacacatgtgtacccgacaaaatgatggtaagacttccagtacctccggaacttattggtcgtctttggtctgaacagcaaagccagtgtttgcagcgccgctgctgtgaaagtagctatcccgaggctccgatgtaacccataggtcactccaggggaattatgtgccgagctcgattccaatggannnnnn

SEQ ID NO: 152771 - DNA, 193 bp, Arabidopsis thaliana landsberg
agcatctcttctctttttttaagattttttttcctttatttttaagcccatctagggttttttttacgagttaattgactcgtctaactagaaataaatccgtatgagatagagattctatgggtttagatctgtaaataaagtttgtaatgttttcctcacagatcttcgttctgtgagagaagttatttaa

SEQ ID NO: 152772 - DNA, 155 bp, Arabidopsis thaliana landsberg
tctctctctcaaccctaaaaccactcgtcacgcgccacgaactctacaccacattccccactactagtgaccatccacctctccgtctatggcgtcagacgccgttaagtatatgccaatccacggcggaggaacaacagcaacaaccgccgccg

SEQ ID NO: 152773 - DNA, 272 bp, Arabidopsis thaliana landsberg; identical to SEQ ID NO: 64963

SEQ ID NO: 152774 - DNA, 491 bp, Arabidopsis thaliana landsberg
aaataaaatcaatgtgctagcttaaagatgcaaatgcaccattcaatcagagtctctcttgaagttagtcactgatgagcttaaactagacaaaaagaaaatgactacgtttctgaagtcactcatcttcttacaagattcatgtcttgccttcctctctctaatggtaattaacaccagcatatctttctttctctatcactcgctctgtttctctgctttacggataatttctaattttgtctatttatttatgcatgagaagttccatcgagggagttctgaggatgcagctgaagctctcaagaagcttgaagcatccataaatggtgcgaggataagcatcgacactacatggacacgagaatttaggagcttatttatagttcccttattcaagtgtttggtggctttttgtttgataatctccctcttagtttataataataggtatatacatgaaccttgtagtactctacgtcaaggggttt

SEQ ID NO: 152775 - DNA, 53 bp, Arabidopsis thaliana landsberg
cttctaggattttctatttcctctaaaatcaggatctttcagctgaatttcac

SEQ ID NO: 152776 - DNA, 326 bp, Arabidopsis thaliana landsberg
ctgagacaacctacaacagaaaatcaactaaattcacatccctaaattgaataccagtagaggggtaaactttctatcaagaacaagcaaaaccgttttgttattcatcaaacacaaagaagattgaagcaaaaggagtaatgttagtgggagagcgacaaagaaggctttgaattatatcttactacatcattacaggtaacgcgatgcattttgtatccttaattcatgggaagagcagaatagctatgcaggcagataattgcatatgatatgctcactataggatgatgattgctactcacaaacaaaccacattttcaatg

SEQ ID NO: 152777 - DNA, 539 bp, Arabidopsis thaliana landsberg
agactctataattttaaaggtcttcctaataaatgccacattcatgcaaaataaaaaagtaacaataaaaaaatgaaggtaggtgactcttgtatctaccaaaagggtccaaaaagaatctaaagggacccaatcacacatgccagcctgaccagccccaatagtcttcacgtgagatctaacccaccggtgacgctaaacctccggccaactcaatcttgtctgcttgccggtcctgcctctgtctgccacgtggcatcttcctccctcacaagtcaccacctatgctccttcctctctcattattcgccacattctctctccttatttcccagaactacccttcacgatagggtccgttttcacagaaactataacccaccatgcgctgtcatgtttacttgtaatcaccacacgacacttcctacgtggacttagattctgaatgctgtcttcttcttcttcctttagtatatataaactcgtcacaaggtcgtctctttcaattcacaatcacaactcttaagaataaatttata

SEQ ID NO: 152778 - DNA, 182 bp, Arabidopsis thaliana landsberg
atcttattcaacgaatcatttatcaccaaaaggttctctcttttttgtttgtttctgtcttgtgtgaatgactcgtcggtgttcgcattgtagcaacaatgggcacaattcacgcacgtgtccaacgcgtggtggtggcacgtgcggtggaagtggcggaggaggaggaggtggtggtggag

SEQ ID NO: 152779 - DNA, 118 bp, Arabidopsis thaliana landsberg
tgtttaaaactgcgtgtccacgtgcttacagctacgcttacgatgatcagagtagtaccttcacatgtgctgaatctcctaattacgttatcacgttatgccctactcctaacaccag

SEQ ID NO: 152780 - DNA, 205 bp, Arabidopsis thaliana landsberg
atcacagtaaaccttttcctcttcttcttcgtcttctccatcgttgctgctttcattgccttagtctctgttatcgtctcaagctttggcttccatctacgtaaaccaaccaattgaacatagtctttcttcaacttcaccgtagtacaaaccctaccttctccttctcctcctccttcttcttcctcttcctcttcgtttactc

SEQ ID NO: 152781 - DNA, 1263 bp, Arabidopsis thaliana landsberg
  unsure (1)..(1263): unsure at all n locations
tccattttcccattttcttctcagtcgtcatcttcatcatcactcctccttcaccttcaccttcactctctcttttaccgccaatcattaccaccgattcacctcctaagcttccggcgaaaactgagcttcctgtcatcggaagctgtatagattgaagatccagtttcaaatttctcgaatcatcgttagtttcccatcgacgttcactctgtaaatcagtgtctgtgaaacaccataacgtagaggagcttctaaagtctccggcggtgcgacctctcgggctagtatctggaaatcgccagacgttgtcgattctcgaccatgaatctgtcgctggatcgtaaatttctccgtcagatcggaatcttccttgagattccgttccgtaaccgctcagcacgcaaaaccttagacccataccaacggcgaatccttgacattcgtctcttccttccgtcatcggagtaaccgacgaccactcgtctttctcgacgtcgtacacctccgccgagcgtaaagcgtttttctgatcgtcgtgacctccggcgacgtataccttcgttggacttacggaggcgcaggcgaagaatgatcgtgattccttcattggcgcacctcgtctccacttccttcnnnnnnnnnnnnnnnnnnnnacgtctctcgtcggctgtaacgtctccggatcccaaccgccgatgagcagaatcttcccggcgtcctgaagcacgacgcactcgcagaaaagcgggatctgctcctcctctggaaacgcaacgcgatgccacgtggacatcgcagcgttgtaaacgctcaatccaaaacgcggcgtgcagaaaacgcgcgggtgtgactcatcctctgattttttctcgtcaaccattaatgtctcgtcaaccgatttagacgctggaattggcggcgttagcggttgaacgaggcagaggagaagctctgttttgccgcatctccgccgttcttggataaaagaagagtcggagagtaagctacgccaagaacggcaaacggatcttatggcggtttgggattggaacggaactctagccaaacactccaaagcttttttggaaggttaaccgggaatcaattcatgacattgctgaaaatctccacctttctttctcgacactttcatagtcatcgaacttaaacaagttcgagaaaaacagaccagagagcgtgtttgattgaccaagtgtctatgtgtagaagaaaacacacaaaaactgacgaaagttgcga

SEQ ID NO: 152782 - DNA, 400 bp, Arabidopsis thaliana landsberg
cattagaaaaactcaaaaaataacagaagtgtttttaacccgaaagaagaagaagaaaagaatgactaaacaacgatatgaataaacaattaacaatgtgtggaataaagagcaatgaaatgggaacaacagaacattagaagtaattacctcaaatcatctaacaaagatttgattttattcatgaaggttgcaacgacgaagatatgggtgatcaaacttgatgtacttggtccaatacggccgatacttggacattgccaactccaaccatggtttcatgttcccattatagtgaaccactgctgcattctcaatgtccttcttgtcgatactcgggttatatccaagtcccagcacatgccacgccttgtttaagggatgtgttaatccgtagaat

SEQ ID NO: 152783 - DNA, 1114 bp, Arabidopsis thaliana landsberg
aattcttcgactcactttcggtttctgatgttttgtctctctgattgaaaaaggtaaaatctcttgaatctatatcatatcgctaaggttaatttgttggctaggattttacctgattttttgggtatatagtgatgatagaaatttgaagtaatttctccagttttctcattgatttaggggttttaaatgtagacttagtattcatgaatgagttgatttctaattgatattatcatgttaatcatcttgaagaattgaccttgaattggtggttcatagatgtctcatcttgtacaatttatttgctcgaggatcttatgattcttggacatagtggaacaaagatagctttaaaaagggacgctgaaatgattacttggttgatgtataatagtttggtctcttaattaaggttttgatggtccttaaggttagtgtatagcttctatagaactttttagtctctccttttagatggttatgacgaattgacgattgtgttattcacgagataatttgcatccgaacatgtaaatgttacacacttgcaatattggtgtgcatggagaaattatagattgtgttaagtgttaaccccaaaatgcatctgctaaaagtgttgcataatcatcttgttgactagataacttgtttttgtggtttggacaatgtgacgatactatatatgatgtaggtaaagatcgggttttgcaagatgagaaacaaagctacaacggtgaaagaagaacgcgaagagatccatttgaagattgtacctccattggacaaagtttttctgcgttggctcgcaagagatctccagagagctcatggattcaaaccgaagaacaacactcgtgcgatcactcctccagatagctacatcgagtttatgcggttaaatggatcgcttgatgtagatttagatgaccctgatcttgcccatttgttcaagtaaaaaggggttcttctattgttgtctctgtttgttatgtatgaagctttcaaagtcttagtatcttttttgattactcatacagtcatacttaaagcttgtgttttggaagctcagtctataaatatatattataatctaaaaacagtatagcat

SEQ ID NO: 152784 - DNA, 71 bp, Arabidopsis thaliana landsberg
tccttaaaaagcatggaagaaaaagaagctacacaatgtcatctatacattacatttttcatatatttaga

SEQ ID NO: 152785 - DNA, 87 bp, Arabidopsis thaliana landsberg
ggcctcatagaagcaaaggtgtaaaacttccataggaccataacatagccctaaatattcaattttctttgaattaaacaataaaat

SEQ ID NO: 152786 - DNA, 67 bp, Arabidopsis thaliana landsberg
tgcttagtctttggctcagaatatgcaaagcttttgtcagaaacagagacatccatcttggaacgct

SEQ ID NO: 152787 - DNA, 136 bp, Arabidopsis thaliana landsberg
  unsure (1)..(136): unsure at all n locations
cattcgaactcttttgtaaatatgtttttgaattttatatgtttaggggtttctttggacaatttaaagttgtaaaagaaaacatttgtttgtaacttttanctgtaaaagtgtaagagagagagaggttagaagt

SEQ ID NO: 152788 - DNA, 255 bp, Arabidopsis thaliana landsberg
acagcgagagaaagatcgattctgtctttatacagacattatctcccactcattctctgtgtcgcttgaagcagcaagagagagagagagactgacagagacagagttaaatgcgaatttatgggtttgatctatacagatctgtgtaccctaatttatgtctctggcgtaacggtcatatttaaccccatttcaatttgagctcttcatcgctgcgtttctgtgatctcggagctcttccaagagtacgtctgt

SEQ ID NO: 152789 - DNA, 232 bp, Arabidopsis thaliana landsberg
cgaataatttaacttttgtacttgatcaattattttggaatatttttgatgttaatcatgattcatgattaatatgtgggctggataatcatgggtctctctatttttctagtctgtaaagtttgatcgaaactgagagcatattaaaatatttaaatcgagatatagaaataacttgtctcatatactactaatatcaaatgcctttgttcttattctacacacatctcag

SEQ ID NO: 152790 - DNA, 375 bp, Arabidopsis thaliana landsberg
ttaacacacccataactcaaacttgtctcaaacctcagattatataattaggctaaaatctgataaaccaaaaaatgtatcagagtgagtgctaaagagaactttgtgttgacctctctttccctcctaattccttagggttcctcgatttttctttttcaccgaaacaaaaaccttattcctccttctctttctctgtctatctttctctgtacgttttattcactttcctccacgtggatttgcataaaagcatgaaaatttgttgatgggtttctcttcgacatccagattctagcttccaattccgtaattctccgttaaaaaaccctaatttcacgaatttactctgatctgtgtagaaattagggagtg

SEQ ID NO: 152791 - DNA, 359 bp, Arabidopsis thaliana landsberg
cccgaagtacgtaccatttacgccggtttaatatttcagtattatgaatctatgatttataagccattgggcctctatagatttagcccaattaaatagtaaacagtttgggtttgggcacgagagccgtgtaatttttgttgagtcgtgtataattttttttaggtcattgtcttattgtatagttttaaggaaatcaaaaatgaaaaattaaaaacaaaaatggtaccagaaaccattcaatcatgtgattgagaaaagccagctgttttctagtacgaagaaaaacaagcttcatcttttccatgtatttttctttctttcttttctcaagaacggtgaatccataacttatgatt

SEQ ID NO: 152792 - DNA, 655 bp, Arabidopsis thaliana landsberg
gtcttcggatttagaacggagacagcgagaggagagagcgcttcttcggctacaacaagctttcgctaatggcggtttccttctgatcactctcaccggagccgtcatcttctctgttttaccgatttttagggtttgtttccggataaactcttcgtatgctttttttttttcgttggattcgtttctggaaacgtatccatttcctgtctagagatcatgtgaatttctcttagaacagaactcagatctaaattaaagtaacggtgcttgattcattaaactcggaatgcaaagtcccttgcgttttattcactgaaatcttagtcgattagatcttgaggtctgtttgttaatcgcacttttctggggaattgatcgtagaagcaattacgctcatgggaaatgatgaaagttatagctaaactttactgtagaaccttactctgattatatttcatttaaaaatgctatttggttggtaaagagaaacatcacaacttttcatactttgctatttttttcagaaattttgattgtggtggaaacttgttgtggcaactctactgagaaagtttgaagaagctggaatcaaagatatagctagagttaagagggttcatactaacttgtgctcgttttgtgatgtgctgtc

SEQ ID NO: 152793 - DNA, 608 bp, Arabidopsis thaliana landsberg
  unsure (1)..(608): unsure at all n locations
ctaactgagtccatgttgaatagatctcctatagatgtaaggaaatactcggcttctacatcttaattaagcattacttcctatttctaaatagatagatttgttctgactcattatgatttaagaagattcaagagcttgtctcccagacgtgattttcgagacagccttttcatcaattttttctggcaccggtagagcgttagctcgtcggtgccaggagctagcttcttctcaccggtttcctcccataagctctctcatcggtttctctgttttttgtttcgtgttgtttcgtctcttttccctcctattagatccataaagcttcattaccgcacaaccttcgaaactactcccatctggtattagctcttctcttaccttgttcgcgattctcgtggatccctctcctcggctttccttaaagtcaagnnnnnnnnnnnnnnnnnncgcaatggatgagagctcggcctcgacgtggaaactgtggaggcttcaaatcacaaaagaatcttcttctgcagaccgagattcatcactcgcacctctcgatgtggtcgttttagtcttagaagccctcaattcggtcaccagaatgttgcatt

SEQ ID NO: 152794 - DNA, 481 bp, Arabidopsis thaliana landsberg
tcttctcatatgaatctaccaaatccaagagaaaagaccaacactgttccctaatttcaattagctaagcaatgagaaacaatcgttaagagaccaaaattgatttacctcgtcatcgagagtgcgatcaaggcccatggaggctctgatactccacacaccatcaaaatcctcgccgcaatcaatatctttgagatcatcctcggaaggcttctgctgttttaagagctcgtcaaaggatgaagcacaaggaatctcgtctctatcgtacgaatctcgcttccactcccgcttctctacctctgtgtcggagagagtccacaccgaccccgattgctgccgcgacgccggagcagaagacgacgtggaaaacttggaagacgaaggacgagagaagggtagagatccgaagatcttcgcaacgcgagactggaaatcttcgtcggctgatccagacgatgccattgtgaagctattagaa

SEQ ID NO: 152795 - DNA, 369 bp, Arabidopsis thaliana landsberg
atcaataattaattattaataaacaaacaaaataattccgatgtttttactacaaacccattagattttaccaaaaatagcagaaaacactatttatgtatcacaaataacaaatcccacccaacaaattttcaatttccccactccactccttaaaaaccctcccaaggtcaacaaaaaaattacagagagcttggtcttagtaactaaaaatacataaatatatatatatatatatatttattaatacaaacttgaatatccccctaaatttattcttataattcaaatccttattactaaccagaacgcaaacttcactagttcaactataacctaaaccgaaccaccttctaaactaagacgctc

SEQ ID NO: 152796 - DNA, 507 bp, Arabidopsis thaliana landsberg
cagattgacccaacaatatcatctctttgctcttcacactcatctcatccacatgaaacggtgacgtttccttgactgaaattgaaggattctgactagtaaaccccaattggtattgatgaaagtgaaacggagcaacagagatctgagtaccaaggctcaaagacagtccttgaccatcgtgaaagcttagatcgctgcttgaaacggtaccgtttcctgttacaacgtctcctgtggtggttggtgggataaaaaccatctcgtttcgaacagtatcgccgccggtgacggtgaaagaagcggcggcggatgaagaagaagcttgttggttttgttgttgatggttgagaaagattggttcttgctggtaacaaccgacattacttgtgtaataaactgccattggtgtttacaccttttaaaagttttattacagtgagttcttagttcgatgagtttggtcgggaaatgagatcctgcaaaaaaataagaggaagaagagtc

SEQ ID NO: 152797 - DNA, 448 bp, Arabidopsis thaliana landsberg
aaaagaaaaggatcagatataagattcataagtccaaaggtacataacatcaacaaaacaagatcacaaagctacattctctcaccacgtcattgtacgaatataaaaaccaaaggggtaaagaagtgcatcatcataacaaccatttgacttcttaattctaaaggtagacactcaagttttattcaaagctacaacagcagcaaagcagagagggagagagagatcattacttgacatgcttagtgagattaggttgtaaggattggaggcaggtagtctgatttggtgccgaggatacgggcctttgtgtccgggaagaattcaaatcctggaagctcagtgatgtcgccttcgctggctacaccgatcgggtagcggagcaagtgaccaggaaggtcatgttcgagtgactcacttgagtaaaagtcccaatacttgtcagaaa

SEQ ID NO: 152798 - DNA, 378 bp, Arabidopsis thaliana landsberg
aatggtacataaattttgcagaaatttttaaagaatcaaatctaaaaacagagaggttaatcgcaatggaacatccagaaatcggaccaacagttaaacccaaaccgaaccggtttatcccaagcttgaccttgtcatctcataagccaagaagcaagcagcattagcaggaacactcctagccatagctggaccaaatcctttatacagacctttaactccttcagatttcagaatcttccgaaaagcatccatcgaccccgtgtatttcgggtttttgtaatcgtctacttgaagaacactcttcacaacatctgtcggatatactattccccaaaacgacgcaccagcgactccaccagccatgatcaatgaccc

SEQ ID NO: 152799 - DNA, 179 bp, Arabidopsis thaliana landsberg
  unsure (1)..(179): unsure at all n locations
gtaaattagatatgatggtaacatttattagataagatatagctttttcttttataataagtatagatctcttagtgcagatagacagttgatgtgggtgcttcctagcgtttcttgagaatgtggatagattcattcgctcatcacgtntcatagacattatttgcatatgatagctg

SEQ ID NO: 152800 - DNA, 119 bp, Arabidopsis thaliana landsberg
caagagtctctctgtcttaaactcattcattctttctctctgtataaccagagttgtgtctgtgaaaacacacaaatctaagagaagttatgaataaacaagatgttatgaaacttcag

SEQ ID NO: 152801 - DNA, 818 bp, Arabidopsis thaliana landsberg
gacagacaaaacactcaccaccctcaccaaacagtctctcttcaactctaaaatcaggttctttcttcttcttcttgtgttgtgtgtttttgattagttgagctactgatttaatacttttctgggtttttactgttactgaatcaatgtttgaaagttttaattttggatttttctgttaatttgctcatcccatatgatgttgtatgaatttctgggttcaattttgattagtgcaaattagcttaggtggagaatttaggctattaccgtcttcttcaaagctaattgtatattcgtaagctaattagaaaagaatttcagaatcttgttgtatataatcccaaggctaggactaattttgattcatagatagatgcttaggtttcagatttagagaaaatgcaagctcatttacaagccaagacacataactaacctaaggctgatcatagcatattaataaggctgaaaaatctcattttgttgagaacatttctttaggtggcaaaacaaaatcaatggctctagtggtgtcaggtggcaaagcagccatgatgccgcttcatgccaattctcttcctctaagtatcaacaccaaatcaagagtactaagtgcatcagcatttccactattctcgtccactcctcacctaccttccagatccctctccatccgcctctcgccgaatgtttcccggtctctcactgtggtatcttctgttttgtcagaggacagagctactaacgttagtggctctgggacagatgcattcaagctgacttacttggaggtgaatctttactacttgagcatt

SEQ ID NO: 152802 - DNA, 502 bp, Arabidopsis thaliana landsberg
cggtcactttttcggtgtttatgatggtcatggaggccatattgtattttatattcacattttatgtaagttggtttagcggtgtatattgttatacacctctttgagatgttctggtaaaattcatagattttaaatctacaatggcttgtaggttgctgactattgccgagatagactccattttgctttggctgaagaaatagaacgtataaaagacgaattatgcaagaggaatacaggagagggtaggcaggtgcagtgggataaagtcttcacgagttgttttctaactgtcgatggtgagattgaaggaaaaattggtagagccgttgttggttcttctgataaggttcttcaggctgttgcgtctgagaccgtcggatcaactgctgttgttgctttggtttgctcatcacatatcatagtttctaactgtggtggttcaagagtggttttactccgcggcaaagaatccatgcctttatcagttgatcacaaa

SEQ ID NO: 152803 - DNA, 99 bp, Arabidopsis thaliana landsberg
attctttctatatatggatacactactgcgtccactgagcataaacaacaaagagaacaccaacttctattttttgcttcacatggaaatgaagctgtg

SEQ ID NO: 152804 - DNA, 261 bp, Arabidopsis thaliana landsberg
ccttttgctaatcgtttattgataatcctccattaaagctctcacggaagctcccacgagaacaccttctttccaccacataaaccagagactttccctctcacgagaaatcagaaaacaaaacccattttctctactttacagctcgtctctgttcttccctctgtgtatatatatagtctctgtttcttgaacctgtaacggctaagtctgaagaagaagaagaagaagatgatgatgagatttaccaagttggtttgg

SEQ ID NO: 152805 - DNA, 373 bp, Arabidopsis thaliana landsberg
cgctgtctctgtcgttgaatcatcctcataaccatcaacaaagatggaaaagcaatgcttcatcatcactcagtgaaacaagcgaagcagtctcatcttcttctggtccattcatcttcagagattgttttgcttcttcgaagattgatcttaatcttaatctctccttttctctactccatagctgaagctttgttcagctttgttcagctttgttcctttgttctaaattttagcgtagtgaacatttagattgtttttaaaccaccttaaaagttcctaatcttttagttaggcctcttgatttgtgaatgtgatgtttttttttttggctgtctacaatgtcacaattacatcggatttattaacaaga

SEQ ID NO: 152806 - DNA, 268 bp, Arabidopsis thaliana landsberg
tgctagggagttatggcagtctttcatatccagctaaacgcactatcggttgtaaatctaatcatgtccgtgggcatagcggttgagttttgcgtacacataacacacgctttctcggttagtcccctctctgtctgtactagcattatacacaagcaatttgctattgtcactctgactgtacgaaatgctcagataagcactggggacagaaaccatcggatgaaagaggcgttgggtgggatgggagcttcagttttcaagtatt

SEQ ID NO: 152807 - DNA, 127 bp, Arabidopsis thaliana landsberg
acaaatatttctttaactccaacacaaaagtacacatagcattaggttattcctaagatttctgggcttctggtcctaaaatcccattcactactgacgtagcgacaagaactccgacgaactcagc

SEQ ID NO: 152808 - DNA, 219 bp, Arabidopsis thaliana landsberg
acatgtcgcatttcagcatctggcattggcaaaagtatgaatagtgttttacctaaaagacctaaactaagcagagaatgaatgtatacctacttaaaccaatgttggattgtgttctctctttgcaggctcctctgctgatcggctgcgatcttagatcgatggacaaagttacatttgaattgcttagcaacaaagaggtgattgctgttaatcaag

SEQ ID NO: 152809 - DNA, 705 bp, Arabidopsis thaliana landsberg; identical to SEQ ID NO: 32374

SEQ ID NO: 152810 - DNA, 528 bp, Arabidopsis thaliana landsberg
caaacatggcctaaattttgtctgtcaccaatacactgacaaattttcagtgacattttcgagtcttagctcaaaatacaattggtcaatggcactcttaacagaaacaacaagtgttgaatcataggaattacactcaacggtcgaaaattgttataaatgaaaagacatttctaagagttggttataatattggaaccaattatcaaatcaaaaacatgaaacaagaaaaagtgtactaatggaacaacaacattttccaaaagcagcagatgagtgtgccatcattcttcaaaaatcaattgtagagccatcattcttcctccattgctgtagctgcgtaatgcccaacgttcatattctgcatcacaattggaaacaacacactttgttattctttctgcacaacacaattcccagataagacgattaatcaaaatttataataccttagctaacatcctttgcttggccaggaactgcgttcttgctttgttaagagctgagtttggtgatttaaacaacctc

SEQ ID NO: 152811 - DNA, 290 bp, Arabidopsis thaliana landsberg
cggagaggacgaagacaagttcagggaattgtgattgatcctgagtttgctacttttactagaagcggttccacttcttcccgacgtttttctagaagcggttcttcccgacgtttttcatcgtgaattgaaatataatccgcccgcatacacatacactcacagttcttaacttaacggattgtgctctacaggtttttctggttcgttgttgtagttttatacgagaaaaatcacaggcgtgtttatttgaaattgtgttttacgtaattatgatgtaaattagactg

SEQ ID NO: 152812 - DNA, 477 bp, Arabidopsis thaliana landsberg
ctgtaaaagtgatcacaacttcttagaaacaccttaagcaatagcagcagtacagatacagaagaggagggaattagggtttactcagatcacagtacataatctaaagggagaatgagtcatgcatatttagatccaacgattataagaagacataacgaacagctgaggaactgctaatgctctgtctcaatcaggatgtgcagtttaggaatgcaagtctactaaccttgcattacatatgatcttctagcgagccacatcataagcctggtctgcatcgtactgatttgagcgacaatgatatcactgtgctgttcctggagcagctgcatagccagctgattgagttgctgattgctcatagccggcctgaggaggtgcagtctgggaataagcggtttggccagtaggtgcagcatatgctgatgcgtttccacctccatagctaggatactgagagccaatgtatccata

SEQ ID NO: 152813 - DNA, 210 bp, Arabidopsis thaliana landsberg
tcattaagagcaaactaatatcattccatacaaaaatggaaataataacaaagcacaaaccttgtaccgagagaacccggtttgtatacagtctataacccctaaaccggttctggtcgcaataaaaaacatacagacatttccccaaaaatattttaaaaaaaagaccaaaaatcaaaatcaagatgtaaaaaacacttacaggtgtgt

SEQ ID NO: 152814 - DNA, 389 bp, Arabidopsis thaliana landsberg
gtaattacaggaaacgcacacaataacagttacatcttgtaaatatccgactcatacctttgtattgatcctcgtctcttgttttcttttttttttctttctttctttctattcttagcaaaatagatttcattcttgttttttcaccaccacccacaaagtttgattctgtttttctgtttttggtatatatagagggtttggtttgtttgtttttccatttttttcgtaatttattaaccgccaattcatgcgcggcaataaattgtgttattagacctttgaatccattgtgttgaaaagttaccaacaaactaaaacatagcatcctgatagaattattgccaaaaggtttctttaaaggttagagaggcctgcgtttcgagacc

SEQ ID NO: 152815 - DNA, 534 bp, Arabidopsis thaliana landsberg
gtggtaattaaactctccagtcttgttttgaaacaacaacagttacattgtttgttccctaagatgaatcggatgcttatgagcatttgcagaccgttaatagaggtgcttaattatgatttagattcccaactggattccatctctgggtgttcttcttgccaaaagatagaaaacaaccaaacagtttcttcttatgtgatatagtaggccatatactttgtttccagctacgtccagtctgattacttgtgtacaaatgacctaaccaaacaacttccttctttctgaacatgagagtatgaggaaagagtttggagattgcttgcttttccataattcataacatcagtttgtacgtaagtggacaattactcttgtgtgtatccttggagttgctgtttcatatgtaagtggacaattactcttgtgtgtagccttggagtttttttatttacgttatattggtcagcctttaattattttgcaaacaatgtatctgtttctgccgcatgcccacataaaaaatttcgc

SEQ ID NO: 152816 - DNA, 138 bp, Arabidopsis thaliana landsberg
atctctttctcctctaatgccatgatcactcttgctccgaacatgcttggccagaagttcaacaccaccacttcttcttctgacatcctttttttttttatcttcttctttttttttggttttcaatgacttttcttt

SEQ ID NO: 152817 - DNA, 790 bp, Arabidopsis thaliana landsberg
ctcatcacattataaacataaaacacctacagttttttacaatgtgctctcgcaagtctctgaacgaagtagtctatgatcatatattttccatttagaccgcaagagaaaatggttaagcaaataaccaaaattaaaaacaagagaaggtaaaaaaaaaagaagaaaaaaaagttattatcaactcagagagctaaaaaaccgaccctttttcatcatttgtctaaactccatgtaattaaccctaccatcaccatcaacatccacttgcattatcatcttcctacattcctccaaggtcttaccttgcttgagtcccaaggaagataaaaccgccttcaattcatccaccgttataaacccatctccgttccgatcaaatacgttgaacgcttccttcatatcttcttctcctacctcgtcctcatcttctaccattatcgtcttgtagagctctccaaactcttcaatgtcaacacaaccgtcaccattaacatcgatcttttggataatttgtgttagttcgtcttcgggtattatgataccgaggttcttgaatgactcgttcagctccttcgtagtgatcttcccgtctccgtccttgtcgaacatttggaacacacggttcagctccgtggaatccatttgttttaataaatttagggttttttgaagggtgcgtatggaggaagaaaatgtgaaaaaagagaatgatgagactcctagaagccgagaaagaggcctttcttggcctcttggagacccgatgagggtagtttcagaaaccaag

SEQ ID NO: 152818 - DNA, 254 bp, Arabidopsis thaliana landsberg
atgtcttttactgtgtagatcaatgttttcttgaggatcaccggaaagcgagaagatgggtttcatgatttagcctctttgtttcatgtaagttttcttcctcacaagtttaaagcttttgcgatatttctcattgtctcttgatgcctttagtatttgctatttgtatttgatataggtgattagcttaggagacactattaaattctcattgtcaccatcaaagtctaaagatcgtttgtctactaacgttc

SEQ ID NO: 152819 - DNA, 308 bp, Arabidopsis thaliana landsberg
gatctcaaaagaagatatctaattctgtgttgtatttgtttagaagacattttcaagtgttattcttacagtttaaacatttcttctacccacatgatgggttttactatcttctactctttttcgtcttctttctaaaacaaaacgtaaaagaaaaacattgcaagagatgcaacgcaagagcttctaaggccaagcaaagtcaatgtcactgttatcaacatcccacactccaagaccgatctcatcaaacaactgctcataactccagcttgagtatcccaagaaaaaccagtactcacttggat

SEQ ID NO: 152820 - DNA, 387 bp, Arabidopsis thaliana landsberg
ttaaacccaatttattatttttcttatattaaaaaagagagttacattcattaacacacaaatttgtaaaagataaaagtacaaatatatttctacttgtacaagcaaaagtagtaaaaagaaaaatggagaaacaatattctcatcgtctcaatatttgtagcgtgaagatctctcatgcatagtcttgtcttctaccttcttgtctgcaaaaaatctctgcaaggatctgaggaaatgaacctgtttggttgatatagtaataaagctacttcttcctttaattatcttctttaattatgttttaaactagaagcaaccgaaataaagagagaaaattaaaataaatgaaactccgtaagagaatctgatctttgcatcggatcc

SEQ ID NO: 152821 - DNA, 433 bp, Arabidopsis thaliana landsberg
tctcatcttgttctgcacagaaacatgtcctgatcatcagaattataacatgagcttacgctgtccaagtccgtgtaagaagtcaacaagaccagctctgcctgcatatttaccaaacgccaataatcgtttcccatgatccccaacaatgagctcataatcacacaaagtcactctctcagaaagaatctgcaattggataccccttttgtcaacattcctcagtatcttagataggactaaaaggataaatgaaaagtgtaatactttatccaacaaaggcatgttctctttctgtgccttatgagtatgtgaaaagaaagcgtatgctctctctggaagaatcatttctagctgcaaacagaatcaaatctcataaactgatatatatatagaagaaaaaaaggaactctttttaatgcaaattcccaca

SEQ ID NO: 152822 - DNA, 346 bp, Arabidopsis thaliana landsberg
gaaaattttgactcaaatgagttgatgagccaaatgagttgatgagtcaatcggtttgatgagtaaaatgagttgggttgtaatggttaatggtttcaatggtttacccaattaacccatcaagttttgtaaaattgaattaaaccaactaaaatctctaaaccaatgctaatttaagtttaaccaacatatttaaaccaatttaataaaattaatatttttccaaatatcttaaatatacaagcgatgacattgagaaaaagtaaactcgtaatttttccactaaaaaacataaacccgtgatttttccgccaaaaacgtaaaccagagatttttccgccaaaaa

SEQ ID NO: 152823 - DNA, 179 bp, Arabidopsis thaliana landsberg
tgttgaaaccaaggagttaagcttctcaactttctccactataattcattccattgtcgtcacctttttgtttcttagactgttaccttacctgtaaagaagagagttaaagatccattgcaaaaaaaaactcaaccttttatctctctgcttcttctaattaagtaatttcaactacc

SEQ ID NO: 152824 - DNA, 687 bp, Arabidopsis thaliana landsberg
aacaaaagaaagacttaaagcaagttaatatcattcgctgtacattacttgtccaacgataaaacttaaacccaatatatacctgatcacaacattactacttacccccatttatcatctcttatataacagccgctcaagtaaaaacattttctgctctaattaaaaacaaaaaaaaaaactcaaaagttgcccatccaattttagcttcttgaaccagttgatctatacttgtaacgcattgcccaaaagaggtagtgcaagaagttagctgcactaagaacacacattagccaatagaagtagtctagtttgtaacggtttatgctttttcctctgagccaaggtgtgttccctgagcttcctgtgatgctgtttactatggacacgatcactgagcttaggtaataccccatagccaaagaagcccacgagagcgatgttgcgagagatctcattgaggaaggtgcttccgtgaagaaatactctagtagtccagctagtgtgaatagatcggctgaccctaggaaaagatactgaagtgcgatccataggaaagtcacgggtaaggtttctttcgagtcaagcaagccggagtctttagccactccctttcgtttaatctcaactagagctgcaaccgccattgctaatatcgaaagaactaaacctactccgattctttgt

SEQ ID NO: 152825 - DNA, 241 bp, Arabidopsis thaliana landsberg
tggtcagaagattactagtcattcaaatgcattccctgaagatcaaaaatacagtgggctcagagtgtgtctggagtgaacacacttgtcccgatgggaataaatattacttccattgcatcacgtgggaaagcacggtaaaagtttccctctttcaatgtgaactcctatgaagcaatatctacttttactgaatttatggatgaacacacagtgggagaaaccggccgaatactccatg

SEQ ID NO: 152826 - DNA, 80 bp, Arabidopsis thaliana landsberg
ggaaactggtgacggctactattaatggatccagatggtctgatgaaccattgctcttgattgagactcttcacacagtc

SEQ ID NO: 152827 - DNA, 56 bp, Arabidopsis thaliana landsberg
gcgcatatccaaacattaagaggaaggatattggagactattttgagcctgagatt

SEQ ID NO: 152828 - DNA, 369 bp, Arabidopsis thaliana landsberg
ttgttccagcggtgaaacctgacccgagaacatcttcagttggtgaaggtgctaatcgtcatgaaaatgacgacggaggaagcggcggttctgagattggagcaccggatctggataaagacttgctttgtccgatttgtatgcagattattaaagatgctttcctcacggcttgtggtcatagtttctgctatatgtgtatcatcacacatcttaggaacaagagtgattgtccctgttgtagccaacacctcaccaataatcagctttaccctaatttcttgctcgataaggtttctttttctaattttactcgtaatttgtgtttggtccttagcttttcagttcaagttcgggtgttgcttgttt

SEQ ID NO: 152829 - DNA, 334 bp, Arabidopsis thaliana landsberg
gtattacaacacaagcataatatagtgatctttaatgtgtttggacgtaagaaggctgataataagaagatgcaaatttgtacatgccacattaaaaatcacgagcattattatgtacattcataatcacgtataagcaaacacatctcatcattgtctttttttaatgaattggaccgcaaacatcaaaagttgtctactttaacttaacgaaaaataatactactccaaatcaaaagtaaacatcgaatgtagacatgttttcgatattgtatttatgaaatgatcttatgaaaatacttacgggtgtgtgtgtgtgtgtgtagaattatta

SEQ ID NO: 152830 - DNA, 1148 bp, Arabidopsis thaliana landsberg; identical to SEQ ID NO: 26099

SEQ ID NO: 152831 - DNA, 214 bp, Arabidopsis thaliana landsberg
ctttctttaacacagagaaagagcctgagagacaagtgagaaacgcaacaacaccaccgaaagagaaagtccacattcgaaagaaacaaagaatcaaattccttctttcttccttttttggtcttcaattattactttaatcttctttcccgctctctattcttcttcttgtttaggatcaatcaccgtttagctttcttgccatacgttttct

SEQ ID NO: 152832 - DNA, 73 bp, Arabidopsis thaliana landsberg
ttagtaggagtaattaagctattgaggtttattatatcaaattttccaaagagcactagttacaacttacaca

SEQ ID NO: 152833 - DNA, 373 bp, Arabidopsis thaliana landsberg
gcctaaggagaatggaaaaaaacggagcttgaatccatcttcactgacaccattaatttttgttaggttgcagagcctatcgacttcatcaaggtggtcgagtggatcctccattggcagaccatggaatttgttcccctgaatcatcgagatgagaccactcttaatctcaaagttgttgttctagatagcaggtggtgcgattcccttcctctgacggtgatcacgtggtgatctccagcaccaatgttggcatggccattttgctgattctgttcttcagccataacgagtggttgctgaggtacagggttgactgtggttctcctttttctgatttcgcgggctgtgcggttgatgttgtcgttgaaaa

SEQ ID NO: 152834 - DNA, 105 bp, Arabidopsis thaliana landsberg; identical to SEQ ID NO: 75045

SEQ ID NO: 152835 - DNA, 355 bp, Arabidopsis thaliana landsberg
tcagttcttcaagtaactgcaacaacaacatttccattgtacttaagaaacggtttctcttattgtaaactgatttgcttgcttttggcatataacaaaattgggaaaaagaaaggagtagtgcatgaatacctcggataagcgcattgatgatcctccaatttgcatcttctccagagctatgtctctaattgacgacgcaaaggtattccgcctcattcgttcacttgctgacactccagtatttatcaggtccatgtcaatggtcccttcaccaacataaatacaggtgtttattgttagattggtattgaatgctactgttatctttatcctgatgataataatgggtctg

SEQ ID NO: 152836 - DNA, 290 bp, Arabidopsis thaliana landsberg
aaatattttaaaatagatattccaaaaaagaaaattgaaataacgatcagttgttctgttgattgatgatacgatgatgcatctattgagattgataacgttagaaacgagatccaacagaataatatccataacagaacacaagaataaaaaaagaataaaaggcaaaaaaaaaattgttaaaaaatttaaacagattaattatagtttgccacgtagcatgctcctcaagttaaaaaagctcttctctccgtattaatgtattttcatttatttttactacaattaaa

SEQ ID NO: 152837 - DNA, 421 bp, Arabidopsis thaliana landsberg
gaacccttaactttaagtttcttacattcaaaaacattaataaagaactcaaaatgttttgactatttaatctcaaaaaagtaataatccgtttttacatatataccatattatccttcataattaaattttatgcatttatttaactgttgacccatttcaagcaaagatccgctttgacaggcttatgatcagaaccatatacttggtctatggaatcataagagtgaagagttgcttgaatattatcagtatcttggatcttgaataagatcctatctgtccaagctggaaccctgatcttatggcttgtatcatagtcgctgcttcctacattgtatttgtatgttggtttaaaccctaaagttccttcggagtaacctttgaatatttctcctctctccgcttcttgcaagagttg

SEQ ID NO: 152838 - DNA, 259 bp, Arabidopsis thaliana landsberg
ggttgaagaagaagagttgagaattaaaaaatggaggagacgacgattcctttcaagagcttacatagcagagaatatcaaggtcataagaagaaggttttttttttctatctccagtctaattttctgtactcaataaaacttgcgaaaccctagttttttgctgaatctgggggaatttttggattgaaggtacattcagtagcttggaattcgaatggaacaaagcttgcttcgggttctgttgatcaaacggctc

SEQ ID NO: 152839 - DNA, 341 bp, Arabidopsis thaliana landsberg
gtgcaacacccacaatgcaaacatctgattcatcaacattcatatatcaaaaaaaaaattcatccttcaaattcagtttactaatgaaagtgttttgttacctctaggattcacagattctgatgtatgggccattgctaatctacaaaatggtgtcaaaagtcaacaagggaccaatctcattaagaaccagatcccctataaacatttgggatctatgtgggatcatttaccttgattcttcaattccagaagagagcgccgaatggagagagctgaaagaagtgagtcgttgtgaaaatgacagcgaattctacaataaaactggagagagaaacagg

SEQ ID NO: 152840 - DNA, 707 bp, Arabidopsis thaliana landsberg
taactcgagtatcatcaaataaaaggaccatacagaaattctacttgttgaatcacatatctaagactgtagaatcagttcttaagaatgctactgtctaaatgagttatcatcaatcaagcatattagaagtctcctgcttcataaaacacacatccacagatccactgaatctaactgtacacttccttttatacactattcgccatcttcatcatcatcatcaagctctacaatttgtgctcgcctctcagcagctttcctcctgatgaagaacccccatctcattgcggcttttatcttaagccatccaacaacagctctgcctgatcgaccacggtcttcatcataaccttgcataggcgtgtgtagaaacgatgggaaagtatatccatcttctggcaagtgtgttgcagagccattgcctcctcctcccatgctgaataggcggaggaactgttgcatgtcttcactctctagcatttcatggcttctgagtcggatctcttcctctgagaagaaatcatctggtcctctctcacgggggtttgaccagtcttctaaatggttgagatctgcctggtgaacagaagaagggttgatgttttggtatccgcttgtagatgattgtggaggaccgagagccaggccattcatgtgttgattgtttatggtgctttgagtttgatgtagatttcccatgaact

SEQ ID NO: 152841 - DNA, 348 bp, Arabidopsis thaliana landsberg
gtcaaagagaattttttaaaaaaccttaatgaaatcgtgcaatttcaagtaacaaccggcgcggttgctgtgaagagcgatcttctgtggtttagctttagcagcagtaagagcctccgtatagaagagaagcgcctccttatacttgccgtctctatatagctgatgtcctttctccaccttgcctgacgccgtcaccgctgacgccataaatgctcccggagaagaagaaaccgtggatttaagtaatctgctaaagcgaaataactgtagaaagaagagagggagaaggagagatccagagaataagaagaagaagaagagggaacaataatggcgagtgaaagc

SEQ ID NO: 152842 - DNA, 169 bp, Arabidopsis thaliana landsberg
  unsure (1)..(169): unsure at all n locations
cgatattatccagaaacagtagtgtagaagaagaagaagaagaagaaggagagattctgagtttagggttttgtttgtgttgcttcnaattgagcagctatggcttccgtgttgctacttcttctggggggcgngtttgatctcattgcttttggacttgctgtcgctg

SEQ ID NO: 152843 - DNA, 630 bp, Arabidopsis thaliana landsberg
tatggtcagaaaaatcagagaaagaaagaaaacagagcaattacttgaagaatccataggaagctgaagatgagaagaattcctcgtatcaaatttcctcagagacattctatctcatctggttaacatttttctttcactactcttattttctttagttcttgctttattcttgttcttaacgtctccttttttgtgtgtgactttctcaggttctggaccggcgccgggatctgtttccggcgttaagaaaaatgtgacgacgagttctgatgttccggcagctccgaagaacactgctgatggagggaaagcatctctccagccgaaacgtacacctgtctccgacaaagaaatcgaatctattatggtgagagattatataacttgctaacaaataaagttagtatccttttgttgtcaaacaataacaattagtaactgaactctgagttttttttttgtacttgtgaatttttgcagttgggtggttgcatatgacatttggggagttacgaagatttgatcgaacacattggtgttcttgtcttgttcggctggtgatgtttattttgctgtttttaaatgtaaagaagtaactaataatgtagagaatatgattttataaga

SEQ ID NO: 152844 - DNA, 414 bp, Arabidopsis thaliana landsberg
ttaggtttatcattgtttatcgcatctttctggaggatctagccgctgctatcatgaagttcttagagtacaccaacctagacaggttaaaatttcgtttttgttgttgtcaaattgagttattgcttttttgtgaatcatgggaatcagatttttccaatttttggaatatttatatgatattgaaaacctttgcttccagattgaatgtttttctgggtcatctaaatctcggggaaaggactatcaaaggttgcttggaagcttattcttgtaagaagcacctgtctgtgttctctctatcaattattggtctgggctacaaggaaaacaagctaaagctttttgtttttgcttttgataggcaaacatgcaggaagtgataaaagattgtctcttagtttggagaatgag

SEQ ID NO: 152845 - DNA, 157 bp, Arabidopsis thaliana landsberg
  unsure (1)..(157): unsure at all n locations
tatttccgagttaaccatgtaagcaaaatcctcttcctcttaaaaaactattacacttaatactntggttntgtaaatgacagattctgattattccttcaaaatataatttgaagtttttaatcttctaaggtnataacacgagacgaagcacaca

SEQ ID NO: 152846 - DNA, 138 bp, Arabidopsis thaliana landsberg
aagatcccattcgtctagctcgaaatcggaaaaggcggtgacgtgttggtcagtggtaagaaacggtggcttggccgtggatagtagcacttgctcgtcgccatttcaagaagaagaagaaatgaaactttgtttttg

SEQ ID NO: 152847 - DNA, 656 bp, Arabidopsis thaliana landsberg
gccaaacgcacatcaactgtcgtctctctatctctctctccctcacttgtctctctctcttctcttcgacactgatggcttcgctcaggctccccgctcaactagttacacgtggcaatctcatccaccacaactcttcatcctcctcctccgggcgtctgtcttggcgacgttctctcacaccggaaaatacaatcccgctcttcccatcttcctcatcctcatcccttaaccgggaacgatcaatagtagttccggttacatgcagtgctgcagcggttaatcttgctccggggacaccagtccgacccacgagcatcttggtggttggagccactggaactttgggaagacaaatcgtccggagagctttagatgaagggtatgatgttaggtgtttggtccgaccaagaccagctcccgccgatttcctccgtgattggggcgccaccgtagtcaatgtacgtattcacatcttcctttaaagttactcaaagtatttaaatttgtccaaaagagaactaaaaccggagttttgtgtggtcttaggcggatcttagtaaaccggagacaattccggcgactttggtcgggattcacactgtaattgattgtgccacgggacgtcctgaagaacctatcaagacggtaagctt

SEQ ID NO: 152848 - DNA, 106 bp, Arabidopsis thaliana landsberg; identical to SEQ ID NO: 65096

SEQ ID NO: 152849 - DNA, 63 bp, Arabidopsis thaliana landsberg
gaagcacctgtagagaataccattacatgtgatccattttctgctgctcgttgtcgagtattt

SEQ ID NO: 152850 - DNA, 239 bp, Arabidopsis thaliana landsberg
tttaattctgaagttatcgatatgatgaagaacacagaagcagatactgcaatcggggagactttggtagatgagtctatgaaagagatccaggagaaagaaaacaaagatgaagatgctgatgaatctagttgctttgtttcagaacttatcgatatgataaagaactcagctgcaagtgatgctattgaggataaagatgctactggtgaagagacactaaaggataaagctgaaga

SEQ ID NO: 152851 - DNA, 499 bp, Arabidopsis thaliana landsberg
cgcaacaaccgtcggcggaagaattagcgacaaaggcgttacaaaagcgttacgaaggattaatgatggtaagaacaaaagcagttaaaggcaaaggcgcgtggtattggagtcaccttgaaccaatcttactacacaacaccgacactggtttccctaaagccgttaaactccgatgttctttatgcgacgccgttttctcagcttctaatccttcccgaactgcttctgagcatcttaaacgtggaacttgtccaaatttcaactctttacctaaacccatctccacaatctctccttctcctcctcctcctccgtcttcttctcaccggaaacgtaattcctccgccgtggaagctctgaatcatcatcatcatcaacctcatcatcatcatcaagggtcttataatgtgacgcctcttagtgtcgttgatccctcgagattctgtgggcagtttccggttacacagcagccgcatttgatgctttccggtggaaa

SEQ ID NO: 152852 - DNA, 419 bp, Arabidopsis thaliana landsberg
atatgaccatcgatggttcggtgagctgagaatggtggatgtatccacttctcggattccgcgggaacagaatcgagatgagagttgaagagaattgaagaaaggttaaggtttgagcctagccatgtgaggagaagaactggcttaccaggaacaaactcgatggttcgagaagtaagaccaattgatcttgcttgatcaagaagaaaagagattggtgcggtgtagttagggtttggatgagcggtgttgaatcttaagtattgctggaatcgtgtgattggtgtgtcttcttcttcttctttgctgtgtgattggagggagaagataaatgagaagaggaagagagtccagagaagaagagacaccgccatggaattgtagttggaggagttaagacaagaagagcaacttcgggt

SEQ ID NO: 152853 - DNA, 290 bp, Arabidopsis thaliana landsberg
gttttgagtttttgtttttgatttttgcatgctaaaaaagatagttgcttgagaattttcattttcttttcaacttggaaaatatttatatgcaacagatagtttcattacattgtccctaagtaaaagaaaaagagaaaaaattaactcaggaaaatgtaattcccgatttaattaatcctcgaatacgcatacttcgataaactttgaaaatcactacaacgaaactagtacacgtggacaatggtgattgataggtatatcaagaagggtacaaagtcaaaatagtc

SEQ ID NO: 152854 - DNA, 1211 bp, Arabidopsis thaliana landsberg
aaacaaagcccaagtttgagttttacacttactcttactcactcaccacaatctctggttctttctttattcagtttttcttagatgaaaagattattatacatacacaaatccataggcattttcagtaacggcgtacactagttgtcgatagaagtactcggctctgtttcttccctctcttaccgggctctttgacggttggtgcgattggtgttgttgttcttgaagctacactcgcgaatgatgttacatttgtgtttcttgcacctgaaaccatgtttagaggtcatccgagaatcttatttagaatttgcagagctaaaaacagtggttacctgtggttgcgtttgcaacttcactgctgctgctgctttgaacgtttgttggctcgttattcaggtttggggagtcgtgaccagctgcgaaaccgagccttgtcacatgtgagaaggaacttctctctccaatgtttggagggcttgatgatattggggcagagtttcccagagcttaagagagtcacaacaaaatcttcttattagatcaataaacctaaaatccaattatgagacgagagattcctcttgtttaccttcaaagtcatccaaggaaaatgggggaaagtcatcactagaagactgcccaaaactggccatcaatggtacaagctcggcagctgcagctacttcagctttgattttattttttcgatcctgaaatatgaacatcatatgatcttaagtcctgaatttttcttaaacaatggaatacataggagaataagacacaaggcaaacaaaggcaataggaggttggaatccgaaagatattagatgatgtagaccgtgggttgtgtttcatggttagaacgaggaataccttccaagcacgttctttcctctgcttctcacgcttcttaatttcatgtataaatggagcaaaggcatcatgaggcaaggattccttcatatcaatctcacatatctgaaaagattaccaaaccaaggataacctcatgagaaaatttcaagatatagcaacatatgcagaagataggagcaacaaagagaaaatatacctgaagtgtagttgctaaagaaaaatgacttaaaaagcggtagcgtctccttatcgcttctgattgggtaatggtctccatttccagtatctttccactcaatctgccgtttcatggatcaaaatcagaa

SEQ ID NO: 152855 - DNA, 242 bp, Arabidopsis thaliana landsberg
gtttcttcgtcatcggagaaaacatacgatcaattgaagaaatcagcaacgcaatggagcaaattgctctgatacctgagaggattttatatgaagaaggagaaatgaagaactgatttgcttatttctcacttctcagtaactctcacttatatatatggaggctttgactcggtttcatcaatcaatcttaattacgtggtttaagtaaccaattactctcatcattaatatctcggtcg

SEQ ID NO: 152856 - DNA, 522 bp, Arabidopsis thaliana landsberg
aataaaagaatcaactgttccatcacattaaaactgataaccaaagaaaagaggtaatttgtccaaactgtgtctcactctcacctaaacaaaactacaaaacagaggaaaaaagaaaagaaaagaggatgcctcagtagttcttctctaacaaaaacccaagacgacgaccaaccataaaataaattgaacatatattcctaagcgactctaaacaaaacagaccacaagctaaaacactgtcaatcaatggatagtaaaaaaaaaagaaggggaatgagatacacttatggcaaacatgtcttcttgatggacagaagaagcaaacatagaaagaaagtgagagaacaaggagatagaaaaaaaacatccaacgacttgggcttttttcttctttttatgtttgtgtaagagaaacctcactctcaagcagctgcctggactggtggtccatctgatctgttgttgaaaccaccatcaccaccacgtcctcctcctcttccacgtcctccccttccacgt

SEQ ID NO: 152857 - DNA, 274 bp, Arabidopsis thaliana landsberg
ttttattttgtcattttctcttaaaccttcttcttcttcttcctttgatcagtaaaaaaagtcaccgccttcttcttctctttcctctttcccctaattgatcaatcatgcttcttcatttctagttctctcttcctgactcatttccctcattagatcttcttctacactaaacccataattgaaagaagctcttttcttgcttacattgaagataaaaaatcatcacttgttttgtttttgaagaaacacacattaagcttgtctttttact

SEQ ID NO: 152858 - DNA, 380 bp, Arabidopsis thaliana landsberg
aacttatcatttgaccaaatataactccatttatgcaccatttctatttgtttgtatcagattattattacacaagttgttactctaaatatggaaatatatttaaatacataaaaaagctaaaatctagcgttttcgaaaccatgcaagtcactgactctgttcatatgtttcctcaccatcgccactttagccaacctctccgccgctttccaagccgacgtcggagtaagcgactccaaactctctgatgccgccacgtgtcttcctttcacactattaagatcagctatctctgcgtccagtccacgtatacacgcatcgctcgagctcaaaccgtgctgcacaagcaatgctctagctgacgtcagcaatctatg

SEQ ID NO: 152859 - DNA, 367 bp, Arabidopsis thaliana landsberg
gctgaatcctgtgatcaatcagtgccaatgctattggattgtccttgtgagtttgcatttggaaataaacatggtgtctgaataatgtagactacaaagcttaagtagctccgctgaccgctgcttcaacgctgcatcacacccactctggatcacgagtaacagctttgcagcaagaccaacctcaacagcaagtggtgaacattcttctggagctaatttgcagacagaccaaagaatcgacagcgcgtagttagtgcaattctcagacaccctcatcagcaccctaactgtataaggtattgtgtttgcagagtctttgacagcaactcttccttccacgtctgtacacaaagcatcaagaaca

SEQ ID NO: 152860 - DNA, 113 bp, Arabidopsis thaliana landsberg
cagaaaccaaagaaatagccaacttttcactttcgatcatttccaaaactatcatcggattttattagttcaagcaaaacaaacaacccttctacgctttgttttaattattt

SEQ ID NO: 152861 - DNA, 111 bp, Arabidopsis thaliana landsberg
ccatttggcttttgtttttggtgagttctttttctttattttttttctgtttggttggttatttttcgacgtttatgcatgaatacaaacagtacttgaggtttgctggtt

SEQ ID NO: 152862 - DNA, 282 bp, Arabidopsis thaliana landsberg
catctccacaaccttgatctcttaacaatttcaccaatggttcacactaagcaaatcgctagccgagtacttatccgtcttcccagatatcgacacgtgtaacacacacacccctccgggctttaaagtccgttcgatctccccaacgaacttctccgggtaaagcgcgtgatcgaacacgtttgagaattcgaaatcgaatgtctcttcgtcgaacgcgtgcgcgtggaagtcacctttcaccacgagaggtggtcgcggaaccagatctattccgacgga

SEQ ID NO: 152863 - DNA, 267 bp, Arabidopsis thaliana landsberg
ttagcatatcacaactaatcacctcatctatatctagtttctaaagactagttataccattatccaaatttattatgtattgttcttttggagaacacatggcgacaacgtgtccaaaatatggacccaaaagtgcttccaaaaaacataacaaaaggcaaaataaaataaaaatgcaatattaggtttgcaatcatcatcatatgatgatggggacaagaacatgttcgttaacatttttccaaaagattaacacaaatagataac

SEQ ID NO: 152864 - DNA, 86 bp, Arabidopsis thaliana landsberg
aagaaattccgtcacgacaaacgtgtataccttggagcccttaaattcgtccctcacgcagttttcaagctcttggagaacatgcc

SEQ ID NO: 152865 - DNA, 371 bp, Arabidopsis thaliana landsberg
aaaagagaacattcgccaaaccaaccaacaaccgtttgggtgagcttgacgagaacgacgtcgcacccgccattttctccatccttgaagcaacaccttcttcacttcagatctcttcttcttcttcttcttcttcttcttctttgctcgcaccttccgtgctattgtatttctagggtttcggatcctgtgccttaccttagatccgacggtggagtagaaatcactctccctgtctcttcccttcttttttgtttccagtttttgattgaagatcccttcgtggatccactataatggcggattctcagccaatcacgcctggtcaggtacggtatctcctaactttgtttttttttgaagcttcagcg

SEQ ID NO: 152866 - DNA, 641 bp, Arabidopsis thaliana landsberg
agtaagaaaatttctcgttcaattacgcacttacttaaaaacgaataaacctcagtttcaagaaatcatagcctctaccaagacattaaccgctgaagcagaaagctttttgaaagaaggtattcaagagcaactagaacgtttcctacttcaggagaaagtataaaaaacgaaacggattattcttaatttttgattctttagtcaattttactctttaattttaattaattttttaagaaattctagaaatagaagtctataagtcaagtatatataatagaaagaagtatctaactaatatctgtttaatattaaatcttaaagcattcagaatttctttcttattctatttatttcttatcttttttcgaaatagatattatattattatatataatatatagaaatggaaataatagataaatatcaatatagatatattgatatttatattgcgtccaataggatttgaacctataccaaaggtttagaagacctatgtcctatccattagacaatggacgcttttcgcttttttttactttcctattgttaaaaaaaaagaatgtgcaaaatctttttagcaattgtgtattgaagtgaattcaatacacaattgctattagacaattctaata

SEQ ID NO: 152867 - DNA, 167 bp, Arabidopsis thaliana landsberg
gtaaacaaattttttagaataatagacagaaattaaggtggagttcatctttttgataattagcattaattcctactctaccatgtttataattgaaatcattatttcatattttgataattagaattaatccctactctaccatgtgtataattaaaatcacaatt

SEQ ID NO: 152868 - DNA, 186 bp, Arabidopsis thaliana landsberg
gaactggccccttgagtcaaaacaggcttcttcgtgtccgattctgaacgagctcgctctttatcatccaattctctccaccgtcttctactccgatcaatcttcaaattttcttaacactcatcgaccagatcgagtttccatcgatctaatcaatcaatcatcagatttgatcttctcaagaag

SEQ ID NO: 152869 - DNA, 284 bp, Arabidopsis thaliana landsberg
tgcagaaacagcttttcaacaacggagataagctctttagttgtaagctctaacactttcctccctcatattcacatctattagtgcaaatcaagaataactaaaaccaatcaattacaattcctccatttctttactttcagctcgacataaccgacgggtttcgatagaacaattccatgtaatagattctcttcccgcaaactcgataaacctgtttcataaacctatatgttctccaatatcatccatcatcacttcaagaagagcaaaagccattttag

SEQ ID NO: 152870 - DNA, 527 bp, Arabidopsis thaliana landsberg
cgaatgttgtttaggggatttaactcatatatgcattatatatatcccatatatataatctttctacaagcaataacaacaaagatcatcaacaaaccaatcatgtggttctattactcacaaataaaaccatttctctccaccaaaccaatgaagaagatacaaacatgaatagacaacatgatcaaatgaggccagtgctacggaacgggttgttatgttggtttaccgagaaatcaccataaccggaggtatttggctgctgtgaaaccgggttaaccgggaattccccaaaatcaccaaatggattactattattagtgggagggttggactgatgctgatacgttggctggggctgatgctgatatgtctgctggtaaccaccgaatgggttgttcaccgcttgctgctgaggtgggggagctgtgccattggacgatgcaaacgggtcatgggacgcaaatggattgggagctggtgcaccgtagacaggacgttgggaagctatgtaggctccatcatcg

SEQ ID NO: 152871 - DNA, 128 bp, Arabidopsis thaliana landsberg
gctgagatttgcggatcttgctggttctgagagagttaaaaagctgggctcagctgtgttgtcaactcaaagaagctcaaagtatcaactaatcactatctgcattaggggatgttattggtgcttta

SEQ ID NO: 152872 - DNA, 103 bp, Arabidopsis thaliana landsberg
attgcaaactaggaaaaaatattttattatatgtactgcttagtttattatgtgtttttattcacaaatacatcttgcaataaattatattgagttttggttt

SEQ ID NO: 152873 - DNA, 82 bp, Arabidopsis thaliana landsberg
gtgtaattgactttgtaagaaccggtaatctcatatccggtttagcctccaaaaatttgtatccaaagaccggtttgttggg

SEQ ID NO: 152874 - DNA, 213 bp, Arabidopsis thaliana landsberg
caggatagtctacttacaagacgaggtacatatccaatgaattttctttccttgatttctcttccagttcagaaagtcgtatacgagcttgtcttatgtcattggacatactagtagatctgtcaagggttccagaggtcttctcttccatttgcttggttagaatattaacatatctctccatatcacttgctgcctgcccataatccctaa

SEQ ID NO: 152875 - DNA, 615 bp, Arabidopsis thaliana landsberg
attttcataaataagaagaaaaacaaaacaaacttcaccattaccgtagctaaaaaagctaagctcacaacacctaaaaattaatcattcaatttcaaaggatatcacaatctaaccagaaatgaacctttgtttctgttttattacaaaaccacacaagaaactctcacatgcaattctctctagaaagcaatatagatagataacttaccaacagaacatagtaagaacacaggatcatatcatcgttcatactcacatctcagtatggctctcatataccccggctgaccacagactggagattccctcttgtcccgcacagtttgagtggaactgttgaatcagtgttgagaccattgaatgttcttgatatcgataccttctttaaccatttcataaagcgggctcatttccctcaacttctcaacttgtttaaccgtaagctcgcccgctttatcaatctcttccttcgtggtaaacctaccaatcccaaacctaatcgaagtgtgagccatgtcttcatccacacccaaagctctcaacacataagaaagctccaaactcgcactagtacaagcactttcactagacactgcaacttcctttaatccc

SEQ ID NO: 152876 - DNA, 148 bp, Arabidopsis thaliana landsberg
gcttctgtcaatgacagggggcaaatatgtattaggccgtttgtattatttattattttcttactaaatataaattcatttaatttctttgttaacagacttgaggtattactcaataatacacattaatatttcgttcatgagtggt

SEQ ID NO: 152877 - DNA, 103 bp, Arabidopsis thaliana landsberg
ggcagttgatatgaaactactaggctctcttagcagagacgatttgaagcaaatttgtggtgataatttccctcaatggatatggtttccagcatatcaacag

SEQ ID NO: 152878 - DNA, 1016 bp, Arabidopsis thaliana landsberg
  unsure (1)..(1016): unsure at all n locations
tttatcagcaatcattcctacaagatccttttcaaaaccctaaccttaataacaacaacttaatcccgccgtccgaccaaacatgtttctcaccttcaacatgggttcctccaccaccgcaataacaagcttttgtctcggacccgggttttgtatacatgcctgctccaagctatccgccacagccagagttccttcctttacttgaatctccaccgtcatggccaccaccaccacagtctggtcccatgccacatcaacaattccccatgccgccaacctcgcagtataatcaatttggagatccaacaggtttcaatggatacaacatgaatccgtaccaatatccttatgttcctgcaggacaaatgagagatcagagattactccgtttgtgttcctcagcaactaaagaggcaagaaagaaacggatggcgagacagaggaggttcttgtctcatcaccacagacataacaacaacaacaacaacaacaataatcagcagaaccaaacccaaatcggagaaacctgtgccgcggtggctccacaacttaaccccgtggccacaaccgccacgggagggacctnnnnnnnnnnnnnnnnnntcccggcagtgccgcctcaattacccgccagtgatggagactcagttacccaccatggaccgagctggctcagcttctgctatgccacgtcagcaggtggtaccagatcgccggcaggtagacatgcacaatcatctttctcattgtttattctttaatttagcaatactcgaatagtttgtgtaattgcaccactcgtttggtttgatgaagaagctaaagattttacatgtgttttttttgataaaatgtgaatcggaagattatacatttgcaatggaaatgaaatgattttgatctttttggtttgattttagggatggaaaccagaaaagaatttgcggtttctcttgcagaaagtcttgaagcaaagcgacgtgggtaacctcggaaggatcgttttgccaaaa

SEQ ID NO: 152879 - DNA, 220 bp, Arabidopsis thaliana landsberg
aatcgatttctctctctctcaagcaacaatgggtaaaagtttctggctttatttcgaaactgtttcttttttgttgaatgatgttgttgtaaaggaattggtgtaattgcagatgaaggaagagaaggagagatagagaagaagaagaagaaagatgaagaaggagaagtgaaggaaggagtaacatcaatagcttttgtaccatgtgggactatctctg

SEQ ID NO: 152880 - DNA, 457 bp, Arabidopsis thaliana landsberg
acccgtcggtttcactcgtttcttgaacccatcgacgacgagttaacgaccttttccaccctgcaagaatgttaacatatcaaacctgatatctaacatctacctacattgcatctatatacagggggatagtattttcacaccttatgaggtggggttcctggtctaggaacactgttgttgaatccaaatctttctttcttctcagatgccttaaggatttgaaatgaacatgttaagctatcatcaacactcatcaatgcaccagcattgtcaaactcgccacagtaattgggtgcagagaatattgtcttcacgaaatcagagctactttccatcttcatgtatatattagctgattcagacaagaaggatactaagttacaagtttgttataagatgcaagagtaaaggatttcactttgcaggttgtatcaaccaattgaaacagtcttgt

SEQ ID NO: 152881 - DNA, 185 bp, Arabidopsis thaliana landsberg
agcacaaatggcgactctttatagtcaagttccttctgtatcagcagttttctctctttacacatctttttccgcaatcacgatgctttttcgaacaatcctcaacgagattgtgcctaaaagaatcagagagtacatagctatgaaagctgtagacttcttctcttcttactttcaatctgatt

SEQ ID NO: 152882 - DNA, 434 bp, Arabidopsis thaliana landsberg
tttaccactatccaaagtccccacaatctttatcatctttttatatattttggatctcaactctagcccttttctattggttctcaaaatttattatagacatatagtagaaacaaatgttaaatactttggacgtaaacattaaaactaaaaaggaagtaatcataagccaacaagtttattaagatggaaattattcaaatgttagattactgttattatgtgaatatgtcacacttaatttacttacatgcagagagagaacaacattggtagtaataacgccgacatatggcagcagcagcatgatacgcaagaagtcgtgtcgtttgaacattttccggcggaaagttcaccggagatctcccatgacgtcgagagcacagcatctactccagcaactactgttggagacagaaaacacgctatggctg

SEQ ID NO: 152883 - DNA, 276 bp, Arabidopsis thaliana landsberg
acaacacggtagaagggagctggggctaggtcgactttagatcggtctcttcttgcaatgactacaataaacaaaaaggtttcgacaccaagagcttgaagagctctaatcttgttgtgcccttgacggattcgcactctgctgttgtttcttctcagccaagaaaccgtggaggtagagtaatgtcttggttattccctaagttaaagaagaaacaaaagagtaattcgatctttaattcacctagtataactgagaagtcagaggaagtttctg

SEQ ID NO: 152884 - DNA, 158 bp, Arabidopsis thaliana landsberg
tttagtgctctcaagctatcataacggtcttgttgagatgttcgtagagaggatagattcaacacctccctgagctatggggtgataagtttctcgagctttctgcaaacacctgttttgccagctgcttctcttctgttccaccagattgtgcaaga

SEQ ID NO: 152885 - DNA, 138 bp, Arabidopsis thaliana landsberg
cccctttccctctctctctctctctcctagggttttcgtctctctcgttcactgttaatagtcttaacggagaggtttgattagcctccgggaagattctactgcgaactttggacacatctctctctgccatggcgg

SEQ ID NO: 152886 - DNA, 382 bp, Arabidopsis thaliana landsberg
aaaaaaagtaagagaagaaaaacacaaaaaaaaataaaacctttctatttctcttcctcctttgagctttgacctctcctccatctcccccacccttttatgcaacaatgggaaattgttgctctcacggacgggactcagccgataacggagacgcattggaaaacggagcttccgcttcaaatgctgccaattcgactggtccaaccgcggaagcttctgtaccacaatcaaaacatgcacctccttctcctcctcctgcaaccaaacaaggccctataggccctgtcttaggtcgacccatggaagatgtaaaagcttcatattctttagggaaagagctcgggcgagccattttggtgtcacacacctctgcacacag

SEQ ID NO: 152887 - DNA, 316 bp, Arabidopsis thaliana landsberg
gagtttgacggattttttaacggaagctggagatttcgttaattcagacggcggagatggtggtccgccacggtggttctcaccgttggaatgtggcgcacgtgctcctgaatctcctcttcttctctacttacctggtctgtttctttcaatttagggctggaaatagatatttcctttaattgatttcgttattctgattgggctgaaggggaattgttgttgaaaactagtttttcaaaatttcagggatcgatggaactggattagggctcattcgccagcataagaggcttggagagtaagtcttgtttga

SEQ ID NO: 152888 - DNA, 312 bp, Arabidopsis thaliana landsberg
cgggaacagctcgggcacttgaagttgaggtccaatagttatccattcccatggttgttttggtcatgggagttttaaatccccgcacgttggctcttgattggacgtaacttacctttgaacattccattaagcatacctccgatggatctgactgggtggcttattctatctttcaacatgaaaatcatggagtactcagagagctgccaaaccaatgtcaggatgatcgtagccgagagaagtacatgggttattttgttctgcttcttcaccttcttgatgtctttagctatttcttctatactttct

SEQ ID NO: 152889 - DNA, 193 bp, Arabidopsis thaliana landsberg
atagtgtttgtcatctcttgtgatgcacaccacagagagaaggatctagtcctttgagtccaagatatagctcgatcaacaatatcctttgtttgttctctttaatttcttgggtattcacggtatagattgactattatatattttttaattatatttttaatatatagatatattagtatgtggtttaaac

SEQ ID NO: 152890 - DNA, 424 bp, Arabidopsis thaliana landsberg
gatcggtggattgaaatcgacgttttcgttgaacccggcttgttcaacgattctgatacttaggcttgatctagaaagcttggagtgggaagaagcaggtagaatgccgttagagatgtaccgaggttttcaagaatcgagtaagtttaaagtttttggaggtggagatagggtttacttctctgctaaaaggatggggaagcttgcaatgtgggattgttggcaaggttggagatggattgagggcgtccctggttatgcagatggattgtgtccaggttttgtgtttgatgctaagcttacattgatgccatgacaacagaaaaaaaggtccgtttgtgttcgttgcgcattattattccatagaaggaaggaatctgtatctctctgtttatgattatttactgattttctgtatttgatt

SEQ ID NO: 152891 - DNA, 467 bp, Arabidopsis thaliana landsberg
catatataattctagttcttatgagccagagttcctcctacctggagatggaattgccaggattttacctgctaatatccctgctaataaggaagtgttgcccggcttagacagttggcgagacagtaaaattgccacatggcatcatctcgaaggtcagtccatcgaatggttatgtgtagtatccatggatcgcaaaggtatgggtatattcgttttgtttagtcatgattgatgattccaacaacttacaaagtaaatatgaactctttgttacatttggcaggcataatcgcagaggttacaacagtcctcgcagctgaaggcattgcattatgttcttgcgtggttcgtggttttactttaaaccttgcttctaaaaacattttatagttcctaactactcatcttacaaaacttatggtttattgcaggccgagattgacagaggaagaggattagcagta

SEQ ID NO: 152892 - DNA, 132 bp, Arabidopsis thaliana landsberg
catttatttcctcaaaggccgataataacacaaaatcatggaccgaatcactttagatgaataatatattaatcttttttcataagactttggtacgtaaaacccattgccatgcattccattccatggttt

SEQ ID NO: 152893 - DNA, 708 bp, Arabidopsis thaliana landsberg
tcttcatcttctcgactctgctgcgttgctttatcaactgaggaattttgaatttcatatctccaaagtaatctcttttccaaggaagttcagtaaaaatcttaaaacccccgatcagagtaatccggggacctatctccgccgttgatttcagtctgagggtttctccgatttcagttcgatctgtgtccgggattctctctgtgttgctttctcattgcgtttacgattcttcttcccctttcaaggtacgctcttgttggttgcgttctaatcactctcaaattccgggttttggcttcattactacaaattttccccttttattcacttgcttcgattcaacaattgctgaaagctaatcgatagttaaatgcttttgaatcgtgaaattcgtttcggatttagggttttttttctccgctataagcttcaatccttagtccactgggattcttgaacacctcccggagaatttaggagggaattagctcttctccagatcttgcttagctcttgtacaggtacttacctttagcatttctcttgtttagagtttgacgagtttgatcagaatttagttacgaattgtctacttttgtctcccagaatggcggatttgttacccatttacctcattattttggcatttctatgcactgtcggagccattgctttggctttattccatatctacaagcacctatt

SEQ ID NO: 152894 - DNA, 308 bp, Arabidopsis thaliana landsberg
ggggaatcaaaccgccattttcaaacgtttctagagtctttccagatcataagtctgttaaaagagtctaaaaaaaactgagcaaaagcttggatcatatgtacagaggaaaaatcctaagattattaagaagaaagcaaaccaaaatccaaactaaatcgaacacaaagcaataattctaatggagagggagaattcagcaaatgcagctatctagtgtagaggccattgcagtagccgttattatatcttacatcagccaagccattgggagatttcttggaagttccattgatgaaaatgtttgt

SEQ ID NO: 152895 - DNA, 107 bp, Arabidopsis thaliana landsberg
aaaatctgaaaatcctcaaacgcaaagatctctagcagataaaagagataaacacttataactgaaaagtcagcgagagaggaccttaattccagatctaatgccgg

SEQ ID NO: 152896 - DNA, 434 bp, Arabidopsis thaliana landsberg
cagatttatgattgcttggtcaatagaagaagaagattaatattgagtctgcattggttttgttagttagtgtatatctctgaagtcagtctcttatgccttgtctttggcagcctttacttgaagcaaagatcaaggaacctcagaagcttcaagtccttgattccaaagatgtttccagaagaaacactatgctgtatctagctgctggatttcttggagggatcaacattctcaatagtgaagccgcagaagctcgagtagggagaaaggagaacagaaagaaagcattggagaagctgagggccaaagctgaagagtcagagcccaacaacaagtcaggtaaccaaaagatagagaaagagttagagaaagaagaagtgtttcctctacttcctccacctcttgtcgttgaagcaaacttgctacaataa

SEQ ID NO: 152897 - DNA, 4325 bp, Arabidopsis thaliana landsberg
tgttatgtttatccttttaggcaattgaggtggttgatctagaccagaaaattaaaatggtgaaagaactcgatggacatgtgatgcgatgcgtacgtgatcagaatgggaaccatgtggttcaaaagtgtattgaatgtgtgcctgaagaaaacatcgaatttattatttccaccttctttggcaatgttgtgaccctctccactcacccatatgggtgccgagttattcaggttcttgctcttagtaataaagaaagattacacagttcttgatcttatgcttctaagtaaaacacttctcgtcttatgttgcagagggtattggagcactgccatgaccctgatactcagagtaaggttatggatgaaatcatgtcaactattagtatgctggcccaagatcagtatggaaactatgttattcaggtttgttaaaaaagagttatactacaactggttattttgtataggttgcttaaaaactaatacacgttttgttgacagcatgtattggaacacggaaagcctgatgagcgtactgtgattatcacggaattagcggggaagattgttcagatgagccaacagaagtttgcttcaaacgttgttgagaaatgtttgacttttggagggccagaggaacgagaattgcttgtgaatgagatgctgggaacaactgatgaaaacgagcctcttcaggtctgtcaaacctttatttcagatgattgtcgggggaaataaagaaactattagctcataagcttcttcttcttggtatataggcgatgatgaaggatcagttcgcaaactatgtagtgcagaaagttttggagacctgtgatgaccaacaacgtgagctgatacttactcgcatcaaagtgcatcttactgctttaaaaaagtacacttatggaaagcatgtcgttgcgcgtattgaaaaactcgttgctgctggaggtatgtatatgttcctcttctcttctatgagcacattgcatttactgcatttatttgagaaagagagacaaaataagcatttttatgacatttcattgtctctaagtggttcttttcttatatgcagagaggagaatggctttgcagtccctaacccagccccagatggcttaagaccttaagtaatgtacagcttaactagggtggatggggctgccgtagcgttttgagaattaggtaagatctaagccggaaataatctgcggggaaattgtgaagaagagctttgttttctctgcaaaatctgtaaaattgtgtagtttgcggacggtttttctatacatagaaccaaacatccctctttaggctgatgagtgagagagaaaaaggcagagaatggtgtaaagatggattttagggtttccttcacacaaaagagaatggctttttcattgccaaatgtgtagaagtgagaatatgtgttcatgcttttaggacaatcccagtttagagtttttttttctccatctatgtaatttgtttcatcaaactcttgtttcctatttcacgaggaactttttcgtttcggctagtttgcaatcttcttgtttatatcgatccagttgattggtaacgtatcatagatgtaacaatcacatagcaaccttacaaacaaaatcaatcttggtctctctgcacacagtggaatagaatcattcacaatcaatttttaatcttatgaacctcttggtccagttttggctcacattgccttcttttggccacctttcttagacttcttcgatgctttatctttctcaaacctctctctttagtctttactcttcccaagaaactcagtcactccaatgtacacagagatgagaagagtagagaagcacttgtataatcaaagcaacaccatcttgaccaccactagacacaatagcttcagaagaagaagatgaatcagaagaaacgatctcctgggaaattacttccggagttacagagactctccatagttggggtttttcttggtgaagacgaagaaccctagaagacaagatctttcttcttgaaacagaccaagagagtggagatatatgctgacctttaaatggagtttgaaatcttggtctgaaatttgaaagagatagagatggtgttgttgtcgcaaacatctttccgtccactcccgcacactctatcttttcagatactggacataacccacttctgtttggttacatccaacggttcatagattattgagattgaaaagagagtattgatgggccacgaaaagcccaatatactatttttgggggccttatatttctactagtgtttgattacgcattatgagttacgccatcatcactaaactaattcagaacttaagattgtttactttgatctctaatttttcgacccaaaacaacagtgacaacgtcatgagatacgttagctttcctcaatttcttcaaacaatctcatagcctcgtatcattaattcatcataaatagccatttttcattatcatttttaatcaaacaagaacatacatcattacacaacaatggctagagcagaacagagcttaacacatgttacatggggtctttagtttttctcaaacaatgaaacatgagtcgatcccatgtagttggggcttaacccttaatcgaggcccattattttgagtaacctaagaaaaaacatcaaaaggccttactatgtacgaacgtcattaactcattactcattattatcattcattcattcattatgaatttttctcaaccataaattcagatctccaagaaaatatctttaggtctgtggctcataatcagagatggctaagacattcagacaagggtttcaaaggacaaagttaaaaaaattcacgtaaaagtatctttggccatcctcacgactagtcttccacctcttggccttaaatatgtgaccttcattgaagaaaatgatatccagaaatggctaaaacagaagaaaacttgagaaacatatgtagatggagccttgaaggcatgaccgctcttgttaccggtggctccaaaggcctcgggtcagtccccctaatattgaatatatatgagttctcatttcaatcataaatatattttttgtttttatttttaaatttactttgattatactgaatacattaatagttcaactatatatcaaagtatatgtactttgattatatttaatgtttcaaccctggaaaaaggaaaagcttgatgatgtgtaaaagccatattacatatttgcacgtgtcaatatatatgtacacaagtgtgttatgaatagggaagctgtggtggaggaactagccatgttaggagcaagagtccacacatgtgctagaaacgaaactcagcttcaagaatgcgtacgtgaatggcaagctaaagggtttgaggtcaccacttctgtatgcaacgtttcttctcgtgaccaacgagagaaactcatggaaaacgttgcctctatcttccaaggaaaactcaacatccttgtaagtttatgtataagagcataacccataaggttttgagcaagatcaagtgattttttgttgtgtattgtgtttgctttgggtctattttaaatatataggtaaacaatgcgggaacgggtataacaaagccgaccacagagtatacagcacaagattactcatttctgatggctacaaatctcgagtcagcttttcatctcgcacagcttgcgcatcctttgttgaaagcatctggttcagggagcatcgtgctcatgtcctctactgcaggggttgtacatatcaatgttggttccatctatggagcaactaaaggtttatatatactttaatatatactcaaactattaatgatccttttacgttctgaggctaacataaatatgagtatacatatctctacgcattgtaggagctatgaatcagctagcaaaaaacttagcatgcgagtgggcaagggataacataagggttaattctgtctgtccgtggttcatagcaactcctttagctaacattgtaaggcaataaaatgagaaaaaaaaatacaaagatctccttaatactatgaaattttataacatatgaattttaacttatgccaaaatctcttaattagtatctcaatgatgaagagttaaagaaagaagtggagcgtaagacaccaatgggacgtgttggaaacgcaaatgaagtatcatcgcttgtcgcatttctctgctttccggctgcttcgtatataacaggtcagacaatctgcgtcgacggaggtttcacggtcaacggcttttctttcaagccagtgctttaa

SEQ ID NO: 152898 - DNA, 3874 bp, Arabidopsis thaliana landsberg
atgaaagctgtagcttttcccgctaaaatcgcaaatcttagcttcccttctaactgttgctcactattcttccgatcaccggcgacgtttttatcgccggcattgccttgtcggaagctgacgaaaggaataagaggtgtcgaaggcttgatgtctcagtgtttatcatcatcgtcacaatcattgtcatttttatcgaattcattctcctctcaaccggaatcagaattacttcaagctttaccttcttcgaagccaaaatctccgccactgcagctgccatggctcattgttggtttgggtaatcccggcaagaagtaccagggcacgcgccacaacgtatgtctctctcttgctttctcactttgcattttccttttcagctcggtaacgtgatcatgaattgcaggttggttttgagatggtggacgctttggctgatgcagaaggcatctccatgaacactgttaacttcaaggccttgtttgggaaaggttctctttttcattctcttatcttctccattgtgaattttcattttgaaatggttttcttatctcaaagtttgaaactttcaaatttcatacgtctcaaatgtttgatgagggtgatagaaacaatggctaactgtttccggagaatgaatattgaaataaatatcattttctgtctctggtttgtttctaactttgggtattgttttcctttatcataggcgttattggaaatataccgattatgctggctaaaccacaaactttcatgaacctaagtggtgagtctgtaagtgagctcatcggaaacaaactttggtttatttagttaaccaatctctttaacttttatcacttgttattttgattctttctgtttatgattgctggaattctttgaaggttggacaaatcgtttcattttacaagatcccgttaaagcaagtacttgtggtatacttaaccttctctctcgcttactctccaaattctggctctagagtgcatatgccgtcttaattttttttgtctttttcaggtttacgatgatttagatttgccctttggtaaactacgtttattgccaaaaggtggtcacggaggccacaatgggtacaatgcttttcactctctatctggcctgttgatgttttcatttgtgttttaacttttaagtattgtcttactttttacttaagaagcaatgtggatggataatagtttacggtttcactatcaaatcatagagaaactctacaagaaaacatgatgggttgttcttttacttgcaggatgagaagtattatagaccgcctcaaaggtagccgtgattttcctcgactaagaataggtacagttctcatttttctccactccgacatatcttcccattttcttctctggttttgcaaattgtcgaatgtttcatttcagggatcggacgtcctccagggaagatggatacagccaattttgttctccgaccgttcaatagacaggaacaggaagaggtaaaatccgatttatcccataattatcttaaaaaatttcagaacgacactacctgattgtattaggctatgcagttggatcacacattccaaaccgggttagaggcaataaggattcttttgcttgaggggttcaacaaaagtgcaacatttgtcaacactcgaaaatctatggagcaactcagttagaagtgacattgttacattacatatattcatataacaaactacaaagtgttcttgctgattcattaataatttttttttggttccatacttgaatcctttttgagcaaattgtacatcaaaagataaccagattatttgtttatcataatttctattatgtaactcgaaaatatggatttcagtatttgttcggctgtaatttaaattatacactttcattaagcatagacattttatttggcaataaatcagcttcgtttactgcaaaaagggtggtcacaaaagttggttcggtttagaaaaattgtgttcggttcggttagtcccttgactaatttaaacccgacggattaaataaaggtattgtggtccccacaactcgaactgagtaaaaccaagtcgacccgattcagctggatccgagattacagagaaccccgtcccgtgtgtaaaccctccggcgacaaagctcagatagagaaccgctccacccttgtcgttccctgcagccatgtacggcggaggtgggtttctttttaaacccttgaattgctttgtcgtttatcttttgagacattcctgagctgtttttttccgtggtgggttttcacagatgaagtgtcagctattgtggttgacttgggttcgcacacttgcaaggctggttacgccggtgaagatgctcccaaggccgttttcccttccgtaagtcttaattaccagcattttatgtcactataagcttaatggtgttattgtagatttgctcaagtcccttgtatcttcagactcttagttttttttttgatgtgttcataaggttattggggcagtagatggtgtagaggcaatggatgtggatgttgattctacaaagactaattcgaactctgaggattcgaagaccgagtctgaaaaggaaaagggcaaacgcaagctctatgtaggatctcaagccatgagctaccgcagagatcatatggaggttagtttttctccttgattaatgttaaagtttataactttgttggtgaaattacagattgcattttctctcaccaggttttgtcacctataaaagatggcatcgtttctgactgggatttggtggacaatatatgggaacatgctttcaagtaaatgtgtaaagcattatattttctcttaattgttgtttgcatttcatctctaaaaaaactttgtcttttaaggagttgtctgatgattgatcctacggagcatccaatgctgctagctgagcctcctttaaacactcaacagcagagagagaagtatgatttatctgctttgaaatatcctttattaccactgttgctttatcttggtgtgttactgattttctcaaatcatatgcttgacagggcggcagagctaatgtttgaaaagtacaaagttccggcactgtttatggctaagaaccctgtatattccctctcccttgggtcatcattctttttgatagattattatatgacgttcactgtaatgttgatatccagtcagctcttgtgtaatcagatgtctaactatctacatgaatttggtgtttttggtgctaggttctcacgtcttttgctactgggcgtgctacttctttggttgttgactggtaagactttaagtattaaaagtttctctagtatgtagaagctactaatgttccacttctgctctatatgctgtgaaagtctaccttgttctgtatggtgtataatttgagaagcactgatgacactttattgtatttctagcggtggaggatccacaaccatttcaccggtgcatgatggttatgttcttcagaaggtacttgtattacacgatttagtaagaattcagctttgtgatgctgtttctttgggtttggattttgtactgcaggagaaagtttcccatctctcgtttccatagtcatctgtagctgctataaattctcatccatgtgaattatgactgacagcattgatgtagattgtgattctccgattgttgaccatacttttattggcaggctgttgtatggtctccactaggagggaaatttctcactgactgcctaatgaaaagcttggagagtaaaggaattaaagtaggttaaaaaaattcttcactgttcttttcttttaagccaaattaaatgagcccctcccgttatttttt

SEQ ID NO: 152899 - DNA, 842 bp, Arabidopsis thaliana landsberg
caggaggcgacgaattatagtaatttgttccaacccgaggcataaacaaagacaaggataatcttactaaaggaactaaagtaaaagaaaaggcacttccaaagagttggaaaaaagggtctattttgacctgaaatggatatatccgtatatttcttgtgaaatgaaaaaaaatggcaaaacctatattaagaattggttcgcgtaaaaatacacgtagtggttcacgtaaaaatgtacgtagaataccaacgggagttattcatgttcaagcacgtttcaacattaccattgtagctgttactgatgtacgaggtcgggtagtttcttggtcctcatcatgcacctgtggatcctggggttcagtacgagatcctgcctttgatgtccccacctcatcagaaaatgctattatagcagtagtggatcacaggtatgcatcaagctgaagtaaggataaaaggctctgttctcgtaatagaggtggcattcgacgctattcgtagaagcggtatacttttaagtttcgtacgagatgtaacccctatgccacataatggttgtagaccccctaaaaaaagacgtgtatagaactaaaaaaaggctaaaagggtttcaagaaaaataaacgaatcaacgatctgatcaaataaaattcatatggcttgagagaaagtcatagtattgtctcggtcattacagtgtaagtgtgttcaatcagaaaaagccagtaagcgtgtttaccatgtgcgctatattctgtatccacttataaaagggccagctgacgcaataggcagtgcgatccgcagagcttgacttggcgaaatagaaggcacagt

SEQ ID NO: 152900 - DNA, 921 bp, Arabidopsis thaliana landsberg
aaggcgtttctctgttagtctctcccgagttcatcctctatggccattttcggcgacccgaacacatatggatcatcacgctcgtatctttcgattccttcattaaagtttcggttccgtccagtcacggcttcctcacacatttgtgctccagcgatggacaagtctcctttagtcatatccgaatcggagtcagaacatgagctttgggctgcagcgtgtctccgcgtacgaaccttcatcgaactcaatccttctgcttacaatatccaagtcagtttcttacttaatcggtgaattagaagatgatttttagctgtttgttgtatcatgaagtcaactccgttggctatgaattggtagatgaaatgataattgatgttggagctgtgtttatagttctgaagagcttcgttgttgttgtgtgattagttagtgagtgttttgtttggtttatggtttgtttcttatgctgatgttacagtttgctgttcaagtttcattaggatcatagaagatacttggcagagcgtgaattcgaggcgcttaaggagagaacttcagggaagagggaagggtttacgcgggtcgcttgcataaatgctacccttccattgtcgcaattatcaagctcttttgaggatttatgctctgcatgtaaggtctgtgtactcaatttggtcatcctgtatttacctgttcaagagggtttgttgcatttaagttatggtgctctacatttggaattgtcatcatgtcattgttacttcctggtctagaaaaaactgtgatatggatttgtgctatggttcatctgtttctcagttctctgatggcatagaagacagagttgtggtgggaagccttgatcttaaccaatgtcgttggcttcctgatgaaattgctggaacaaaaccagag

SEQ ID NO: 152901 - DNA, 1010 bp, Arabidopsis thaliana landsberg
acatttatttcgggttctaattggattaacctgaatagatcggatcctcggaaatcaggcgaagaagacgactaaatttctcctgggattagagagagaggaaggaaagatggcgtcggggtgggggataacgggaaacaaagggaggtgttacgatttctggatggatttcagcgaatgtatgtctcattgcagagagcccaaagactgtactcttcttcgtgaagactacctcgagtgtcttcaccattccaaagaggttaggtttcgcctttttcctttttttagggtttctttcaattatcgttcctgtgttgttgtatgtgtcatcaattcacgcttttgattgcttgatctgtttcattgatgattcgtcctgttatcggtcgtctgtacgatcatcgatagtttctggatcacgagtttaagtcattcctagatccgttggaacaatctctcagtctggtcgtttcgtttgctacatgtataaaaacataagctttctttttgcttgaaactagaaaagttgaattgcaatctcccaagtatatatgtggatgctttcactaggttgcttgtagggattaggttaatataataccacttcccttatctgagatttagtttcatggccatgaattgtttagctgttaagtttggaagttgagacttactctttatctcttgtctctgtttgatctttcaaatggaacgatattgtctctcttctctatgtgttgaaatcataaatttgaatgaaactgaatgtataggcttgcgtgtgaacttttgagggaatcaaaagctttattattgttgtctccaatattgtttttttcttctttgcttagtataagcctatggtagatgaactgataaggagcgcatatttgtgtattttgatctagttccaacgaagaaacaggatatacaaagaagaacaacgtaaactaagagctgcctcaaggaaaggcgaagaaaccggggatgggactcatactcatcactag

SEQ ID NO: 152902 - DNA, 2013 bp, Arabidopsis thaliana landsberg
acagagtcaagtatggtcttccagcacggtgatgtggtgacaaagccggatatgatcgctgcgacgcctcctcctcgactgagaaccattccgatgggacaccaaaatcgatcttaagactgtaggaataaactatttcatctgttctacacctggtcactgcagtctcaatggcggcatgaagctagccgttaatgtcgtagccggttctgcggacctccggccactcccacgccaccttcttcaactccggaactcctaccacaccggaatcacctccgtctggcggatcacccacacccaccacacccacacctggtgcaggttcaacttctcctcctcctccaccaaaggcaagtggtgcgtctaagggagtgatgagttacgttttggtgggagtctcgatggttttgggttatggtttgtggatgtaattggtttagagagccagggtggagtcagtgcttttgcctttttaaattattttggtttttggttgtaagagaatttgggtttgtgtgccacgtcagaagctcttcattattcgtaggatttttattatctcggcatttgattatcgttatcatcatcatcatcacattcacttattctcttgttgtaataaattatactattaattttcattttcgttcatgtggaaccactccatcgttcgtaattatcatctgttctcttcttcatattcgtttttaatttatcggttttggaatcacatgtacagttgttttccacaccatcccttcgtattttacatatatagtatgttatcaagaatgaatcacgtacaacaacaactaagagatatgatcaattcctgaaagaaatgatttctagcaatgtgttcaaactctagttgttgctatgggttaaaagatcacataaacaaatgcaacttgggataggtagtattcgattagctgtagctagcttttaaattaaaaactcttatcttatatttttctatttagattggttgtatatttgaagaattctggaccgaactcatctctccataagagtcaaaaccttatattgacgcaaacttaactaccctttatatatgatagaacttaagttatatatgataatatgaagataagtttctctaattttcttataaatagtattgtcaaagactttttatttgacccatgaccatgagtaccttgtcaataacacatgagcaatgccaatggaatttgaccctaatcaggagtgtcctttacggacataactcaaaaataattaagaagaggggacctttcagacattcccttaattaagcttaatttctcattagtcgttctcatgcctctttgttatataaaccatcaccgtcaccattatttcctcctcttcacatctttaatttaaaatagctctccacgttcaaaacctaaagatggcaacgaatggtcttttccttgttatgggcttcatggctatcgccccaggcccagctgcaggcctgcagtctctatgacttaattagaggctaatcaatgggccagttgcgtggactacacagattgggttgcgggaaagactttcagggttggtattataacttatcgtacaagaaaactctgtttcgttttaggtaagtggctaatgttaatctttgaaacagagttcaagtacggtggatgtggatgtggttgacaaagccacatatgaatggagacggctcatccgcgacagagaaccattccgatggagacaccaaagttgatctgacgacagtaggaccaaactatttcatctgtcctacacccggtcactgtctaggtgacattacggtcgtagcctctcctttctctcctccaccccagactcgcagccgtctgatggaacacatgaagctgattcagggtcaaccacgccatcaaatgatgcatcaagcggactaatagtaataagctacgtggtggactggtggtcgggatgtcgttggtgttggcttgcaatgtatggattatcaaggtgtgtgtg

SEQ ID NO: 152903 - DNA, 2176 bp, Arabidopsis thaliana landsberg
  unsure (1)..(2176): unsure at all n locations
caaaaccttcaagtaaaggtaacatcactcttctataagcttagatttttcacttttattcttcatactgtcgtctccctggattctatcttctcgattttggtgattcgaacacgattttacctatccttgagcgatctcgatcccaactttttgagttgattttatttcaggagttttcaaaaaatctgttgttagtatgtgttattagtttctacactctgttcttctggtttcgtatcatcagctagctagctttggttctcgaattttgcttctcaagattcaaatttcacttcgttactcgtttttttttgtttgggtgatgatttgatttttcctcattttgtagagtggtgaatcggaaaatgtcgcagtcttccgtcgatataccgccaaaaggtgggtttagcttcgatctgtgcaaaaggaatgatatgctgacacagaagggtcttaaagcgccgtcgtttctcaagactggaacgactatcgttggattgatatttaaggtctttgtttctatctcacattctctacaatgtaatgggttttgggttttcttttatagcttttgaatggttagcatagtgttattgttggatagtgagtgctctattttggttgtttgcaagttatggaactatggaagtgaacatagtgacctaagatttaagaattgtgggctaagatgcaaatgtgattgaacttgtgtttgtggatggctgcttatcagtgaattgggcacctgatagctttagataagataacatgaaagtctgaggtgttgttgctttctcaacccttgaccatatgacatcacgttgatgtttttatggtctatttacctctatattctacaacattttatgaaacatgtgattatgatgtgacattctcttttagatgattgctgatttcatttatctgttttgtataggatggtgtaatacttggggctgatacacgggcaactgaagggcctattgtggctgataagaactgtgagaagattcactacatggcaccaaacatttactgttgtggtgcaggaaccgctgctgacactgaagcagtaactggtaattttcttaacttccaaatttctttactgctaccctagatcaaagttgaatttctcggaacttctgttaactcgatcaaaacccaatgcttaagttattttgattgctatttcactgttcagatatggtcannnnnnnnnnnnnnnnnnnnnnnnnnnnnnnnnnnnnnnattctcgagtcgttactgcattgacccttctcaaaaaacatcttttcaggtatttttgcttcaccatgctcagaaaattgttatctttactaataggcatacataatttaacttctcaagtatcattcagctaccaaggccatgtctcagctgctcttgtgcttggtggagttgatattaccgggcctcatcttcacacggtgagtttcacattcctgatcaaaattctcagctgtagaaagctctttccaggttctttcattttgtattccatctctaacgttctggtcaaaatgcagatatacccacacggttccactgacactctaccatttgctacaatgggttctggttcccttgcttccatgtcagtgtttgaagcaaagtataaagaaggtctaactgtaagtaaagcagagacatttatctttatgttttagatctcttcttggctgtttgtttgatggttgactcaaatcttccagagagacgaaggaatcaagttggttgctgaagccatatgctctggtatattcaacgaccttggtagtggtagcaatgtggatatctgtgtgatcactaaggttggtcatactccatcttcctctgcttttaatagataactgaagtatctagaaattcgtttgcttcatgactgacagatattaagctaaaccaaagtgattcgctacaaaaccagtactatggattacctatatcttcgatttgaaactgattgtttgagatgattttgggacaggggcacaaggaatacttgaggaattacatggaaccaaacccaagaacctatgttagcagcaaaggctattcattcaccaagaaaaccgataaaaatccagttgttgcaacacttactcgtctctggttatgacatgattattgaagtgttaaacttggttt

SEQ ID NO: 152904 - DNA, 501 bp, Arabidopsis thaliana landsberg
gtgcaggctaattcagcgtctgggatgcacgttagcgatgagtgcaagctcaagttcttggagttaaaagcaaagaggaactataggttcattgtgttcaaaattgatgagaaggctcagcaagttatgatagacaagcttgggaatccagttgaaacttacgaagatttcaccagatctattcccgaggatgagtgccgatatgctgtctatgactatgatttcaccacccctgagaactgccagaagagcaaaatctttttcatcgcatggtacaactccctgcccttgtatttttaatgatttgaaaaagtagatgttataattgagacatcaacttgcttcaggtcacctgatacatcaagagtgaggagtaagatgttgtatgcaagctcaaaggacaggttcaagagggaattggatgggattcaagttgaattgcaagcaacagatcctagcgagatgagcctcgacatcatcaagggacgagtcaatctctga

SEQ ID NO: 152905 - DNA, 1934 bp, Arabidopsis thaliana landsberg
tattaaacattagattcaatgggatcgcaaataccaccatatttttcaatattcttacaagaggtagaagaacttcagtttctttttccatgcttctcactttacttgtgtttattccatgcaatgccaactctttggctgattctttctttagcaatgcaggtagccacttttggccgtagactatttggtcaattgctagttgagtaataaaatctctgacccataaaaaaagttatcaaaagaaaagagaaccggaccattggtgaaaaccggaccgttggtgaccatttttatttttgttgacatcaaaccggaccattggtgaaaacaacccccaaatcgaattccagacatcatcgtctccatcgtaatcgactcaaatcaggcaacggttacctccgcgtcgaatttcagcgaaaacccatttctgggaagggcaaaagctgcgcaatttgtgtatttttccccccagaaaatgtcgttagggcaaaagagttcgacggatcctggtgcgatgctcacttctcttctgaacaagcgagagaagcttcgccaagagttacgaagcatcgagaaacaggttagggcacaaatggtccagagtcgattcaattgtgaaattcgatttcatagagaaattattgtttggggcatacactaaaaatctttggttctttgtaatcttaggtttatgaattggagacaagctatcttcaagaatcgagtcatattggaaatgctttgaaaggctttgaaggatttttgtcttcttccaagagtactgctaggtctctcattctcttgactctgtagaaaacattgacttttggattctatttgcagcttcatacactttagagaatgtggtaacttctcagtttttagcatgtttgttgtgtggaacgagaaattgaggttgatatgaagttatgaacccatttctgcagtgctaaaaggtcaagcaagtttcagcctgaagacagagtcttctcattgtcctcagttacatcaccagctgtatgttttagacaatttttatcaccttctattatatgcaaagacgttttttgttttcttgtgttggtttgtaatagaatcaactgcccaaagaacctatggttccctttatagtaggtagtttggtttgagaatcagtggctttagatatggttgaatactacatggctaatatctctagcagattcaaacaagtgtgaaagctgaatctatgattgtgaaagagctagagttctacgaaatgcatatgtgtcttatgtttgtgactgtcatttgttagtttattactctgccttctttagagaaaatggtttttagactggtatgttgatcttccctgatatgtattcaggctgaagaacttggtgttggaagagaaggtaaaccctgcagcaaacaactacgctgaattctcgtttgcaaatcttggatcagtttttacacacttttatctctgtataatatagatggacgagctgaattagggccagggcgatctaagggtggtttgtcgacacagttagtttcccgacctagctgactttacctcgttcgtacctgccctgtatgtctctgatacatggttttggtttgttgaccaatgtgataaaattacaggggaaagccgaagaaagggagaggacaatcaataatagcaagagaggcaaagagaagcagaccatctacagaaccagattatgaagatgaagacgatccggatatgaatatgtatggccatggttcactcatctaaggcattttctgttttggtgccagaaacagtaagaaaacaaatcattttgtaaccttttttgtgaatcctataacagaactgaatctatcgaagtaatctaagaattaatttgccagctttatatcattctttattataaagttgcagtgacgctttaatc

SEQ ID NO: 152906 - DNA, 3088 bp, Arabidopsis thaliana landsberg
aaacatgtagaatctagtcagtttaagaaagaatgggaagacggtatcggtttgactttgcgacaagaatttccaagtagggcagcaatgcaggaagtggtggacaaaggtgcatttgctaacagttttggttatgttattaaaaagtctgataaggagcggtatgttctaaagtgttcaaaagcgaattgtgactggcgtatacgagcttcatgtcttcaagatacaagtatttactctattagaaggtacaacaaaatgcactatttgttgccgaattagtaagagttgtacacggatgaggaagaggaaatgtacccctgaattagtagcagctcttcttgatgatattttttctggtcttttagaaactccacctcctaaggttatcatggagcttgttcaatttaaattatttgtgaagatatcatattccaccgcattgagaagggaaaggcaagccgtttgtgatttaaaaggtagcgcggaagataactacaaagacatcaattgttacttgtacatgttgaaaagggtaaatgaaagtacaataacaaatctgaaattggatgagagcgggaaattcaagtatctattcatagctttgggagctactattgaaggctttcaagtgattagaaaagtgataattgtggatgcaacacatttgaagaacggatatggtggtgttctagtctttgcctcagctcaagatccaaatcgtcatcattatatcatagcggttggcgtactcgacggtgagaatgatgctagttggggatggttctttgagaagctgctaagtgttgtacccgatactccagaattggtatttatgagtgacagaaattcaagcctcatcaagggcatacgtaatgcgtatattgcggctcatcacgggtattgtgtttggcatttatcccaaaatgtcaaagctcattccactaacatcaacagagacgttctcgcttggagattcatggagttaagtcggatatatacctggtcagaatttgagagggagtatagagtattcaaggtgagatatcctaccgcggcgaattatttggaggattcaaccgtgaaagaaaaatgggctaggtgttgttttccgggggaacgatacaatttggacaccagcaattgtgtggaatcgttgaattctgtttttctcaatgcaaggaagtattctttaatacccatgctagatgcgaacatggcccaaaatttctgtttggttaatgaacatcgcaaagatgccgctccaggatctaatgataataagtttgtgcctttagtggagaactacttgcatgatttatgggttcatgctgagaaactaaaagtgacagagctaaacacattccggctcgagtacaatgtccggggagtagaagggaacgaatttttggtcaacttgcacttgaaaacttgtagttgcaaggtgtttgatatccaaaagtatccatgtattcatgcgttagccgctttcattgcattcgaaagtgatacaacaaggactcgaggtatggaattacatgaattggtttcaaagtattattgggcggaattgtgggtattggcgtattataggactatttatttagtcccggatagatcacagtgggatatcccggatgacatcaaagcgttgaaggtattacctctgcctcgaaaaatgaagaagggtagaacaaaagtgcttaggtttccatccaccggagaaagacgtcccaaacgtcaaaggactgaaaacaaaaggaggttgaggcagccgctgcaatggttgttatttggcacccatagtatttgattttaatcattgtaaatcttattcgcgttgtgcaactatgtaacactagactttctttctgtacaactatattttatttcactggaaattcaagtttaacgataatactgcgaatacatgagaaaactatgatttgacgataatactgagaatacaggtgactactatgactttgacgataatactgggaatacaagtataactattgaaggatattaaaattcgaatttatgtttgtttgaaacatcaaatattaaatagactatgaagagatgaagaactcttaaaaattaatttaaacgaattaaataaggagaaaaaatatttggtcaaaatacaagttaatagactctatcctacatattccttatactttaaagctaacttttgatataaactccaacttaggattgaaattttgcaattttatatattgttaacatgtgagtgcgctaaacctttagaatttaatagtgatagatttctctcaactgaacaactagataaatcattttgaatgatataaaaaactgtctaaactggaaaacacgaaaaatacaactacgtggacgttttgtacaactaataactagggtacagctaaatctaaaacaacggcgcgaatgtataagttacggcgccggcgtggaaatcacctttactctaaaagaactctctctctctctctctctctctctctctctctctctctctctctctctctctctctctctctctctctctctctctcgtcaaaattctctctctctctctcgatctcaaatcattctctctctctcgaaattccttcaatcagctatggatcgattgtgtgagagtgacccatggtatgatgagatgaagagcgctaagaggataatgcaacaactagaagaagtcgcaatgatggaaggaattccgataatttgtccttgtggtggacgcatccttgacataatctctgagaaagacggtgacaaaggaaaaagatactatgaatgcaccgattataaggtaaattgaagatatcatcaatcttgttttagaataattgattaagcaataagaattcatgttttgtagaatgatgggttacacattcagaaactttgggataaagctatggtagaagaggtgaataggttaagaaagcaagttgataaccatcaccaaaagattcaaagcttggagtactctaaccaagaagtgcgttcggagtttgatgagatccaaaaaaagatggggactttgtggagagtttgttgtggagagtga

SEQ ID NO: 152907 - DNA, 996 bp, Arabidopsis thaliana landsberg
  unsure (1)..(996): unsure at all n locations
tcacataacactcacacacacactttctcttctcttattttctcagttcttttaactcttttctctacatatattcaaatggccaccgtcgaggtatgcaaacatatattcttaaaatttcaaccaaatttatttcgttggtctaacgtttgattagcgatccaagcaaacaaatcaaaatcggaatatatgtattcacttgctttaatacagactaactatatgctaaagtttacataatgatcatgtattctgttgaaggctaactaaaacagactacatgccgtttattatatcctttattatatcaaataaaaacctcacgcagttttgaattgatctatataatctaagttttgaagtttgaaacaatggtttttgtaggttgaacaagtgactccagtagcagctgagaacatcgaggtgccaccaccaaaggctgtggagtcggaggaagtcaccgccgtctccgagtctcttccagttccggtaacagaatctcaagcgccagtcgaagtaacaactaaagatttggtcgtggaagagacagagaaaccaatcgaagaaacagaggaagctcaagttgaaactccggaggttgtggagatcagtaaagatgaagaagctcaggttgaaactcctgttgaaactccggtggttgtagaggaagagagcaaaacagaggaagttgtagaggcgaagaaagaggaagaagtagaagaaaagaagacagaggaagctccagtggttgtggaggaagagaagaagccagaggcagaggaggagaaacccgccgtggaagcctccgtgacagctccagtagagaaggctgatgagtannnnnnnnnnnnnnnnnnnnnnnnngaaagacaaaagaagaagaaaatgttagcaagtaatttatttgctactttaagtactttgtgtcttgttatgtttttgagtctatgactcttcttgcttttggttttttaatcctcttaagtactattttca

SEQ ID NO: 152908 - DNA, 6455 bp, Arabidopsis thaliana landsberg
atgctgccttcaaacccaacaccaaacacacacactctcgtgatcttccgcgttacaaccacaaaggtatgcaaccgaagcatcattaccaagctctacaccgtcgtgtagacactcggccagggtagctagccccttctctccgagttcttcgcactttatggcgatcaagtaacatcgttacaagaccccacgatagcacggttcacaacgaaggtcagacatatcacgatcttggcacgcttatggtctttgcctcctaccccaaagtttaagatattatgaaacatatggttaaatcaaacacatagaatcatcaatatcccaacacaacctcccaacctaaacaatagcataagaatctaaagatcgcatatgcaatccaatataaccattcacacgattcctataactcacgaaatcaatcaagaatgcattagaatatgattatgaaatttaaaccattatctagaactcagtcagtaaccaacggaatgcttcctacgattcgggcagagttttcggctacaggaccttaacttgaattggacggacgattttaactcggcagtcaagtgacccgcataaaggcatcgggcacggccaaaggaccgaataagaaaattttggcccgaataccaagtcaattgactgcgtatgtccaaacggtgccaatacaagaaagggcaagaacgggcaatgggcacgaatgggcaagaataggcatgccaagggcgaagtttgccccaccggccgcagaaccgacatgagtaggacacctcactcgcggtgccttgcggctcaagttaccaaccttggagccgaagtcagctgagtcttgaagccgaagttggtggaacggtggagtgacacccgtcgccacctgtcaccacgccatcgcccgaattcagtaaaactttcccctggtcgaggaaactctgtccgagacttgagaattatcgcctttggtcgagtaaacttgaccgtgagtaagggatcgttgaccgtgctcgagaagttcttcccaagacccagaaaactttccgagataccaaatccgtgagttgtggtcgaattgtgtgtttgtttgcatgttttctagagctagtctttagaatatatgcatgcttactcacttagacttaactaattgtatttcggcttaagttagaacttgaatcttaaagtgaatatgggcatttgacgaacttgatcatactatcactaagtaatggaacggactggtgcatgactaggttaaatgaatatggacttaactaagtttacttgatgaattgagatatgattcgagggcttacttaccttgttagattgttacactgatatcagatatgctatgaggttgtgaataaatccttgttatattatgtatatatattgatacgtgatttgctacttgattgtcgatacttatttaaggtatggtaaactacttatatatagtactgcatgaggttactgtgtctaagtggtattcagggtttacctgagaccatcatgttagagtaagcagctgccttcctttttgtgttgtgattgtgtcagtaagtcttgatcctgagtggtcacttacatgatggcacaagacacggagcgtatgccgggtaatgcatggcgatggattaaagtgatgttctagttataagcctttgtgactatagctcgggtgttcacagttgtgtacgtacgtgtggtgtgggtgtgcacgtacgtgtgtgtggtagcatacgtgtggagaacatgtatacacgtatgcaggattttgtgccgatgttgtggtgcacctttttggtaaggttggtagtatgttgggcccaagtttcattcatgtgtctagtttggctgaatattctggtattactataagtataggataatacgtttattacgtgctttgtgatatcgaatggttaagtttacttattgagttgattaaaccctaaagatttatttgtgcatagacccagctcaggagtaatgttagattactcatgattctacttgtcttacaggaaacccatgtggggattagagggcgtggtggagaatacgaaacccggagtagttttgtgccttttgtaaaacaagtatgtttctattatgtaccgtgcttttggcactaggccttggccagaacacttataaatgtttggtaacatgttgtaaaatatttatactaatgagataaatcgggtattcttgtacaaatttgcgagtaatgattgataatgacttagtccgagtcggcacaacacttaaatatcgtaagggttggcaagcctaaacgatgttttaagtgggagagtggtcgtcaagggtcgggatgggttcccaaacctcggttggatgttgatgatcaatctcaatgtggcgttttcgaggcgctcgtgacttgtctggtcatagagcgtctcgagggtgttacagtttgtggtattagagtatggttaatgatgctagcaggactcgtgtttttcaaactgttttatcaagtaattgagtcgcaaaaggcatttaggataatccggtcagttcaccattgttaggtagatggattaagtttaccttggttgaatggatgcaaatgtttggtcaaagaacggagaggagcgagttgatgaatttctcaccagtttatgataactcgagtcagcacttcggggcggaaaactgggtaccgtatgttggaggagaaggggatgggggatactattatcctaatatgtatggagcgcctgattgggatgttcgcggaaccacaccggaatactccttaccaaggtttatgtactatagcacatccgaagggtcacactcagggataagatcacatgttcctgtgaatcaacccactgcacacccaaatccgtcgctgccaagagaagttaatgaaggaaatggggaaggtcgtaatgttcaaagtgtgtcggagactcaacagacgttgaggatgattcagaccttgatgagtcatataattcaacaatagcaacacgaacaacatattcaggaaagcctgcgtgctaaatctccttcggccaagttcttaaagctggttatgatgatgaaggatttaggtgtccggaagtttaaaggagagcagaatactgctttagcggataagtggtggtgtataagcttgtatttaggtgcttataatacccttcggcgcttaatgtgtcatctcgacaccaaaaccatccctaacctttgatcaacatataagtctgtattttgcatgctttgagcatccatttgtcatcattttagcatcatatcatcactgttttatacaatttctcatcatttgtcatcaccttgcatgtttaggatagttttgcatgcatgttgcatatttgtgttgatttcaagtgatttggagcttttgacgagctaattggaagaagcgtacctgatcatgtcaagccactcgagcccctggtcgagtagatgcttcacgacttcaacagaccactcgaccccctggtcgagtagaagacctcatcacttcacgtcactactcgacccccatgatcgagtaccaccaaaacaaccactcaatcacatcactcgaccccctggtcgagtatcatcacctccaccacctgaccatcactcgatcacatcactcgaccacctggtcgagtaactctatcaccttcactcgatcactttaccaccaagtcgagtaccaccatctctatcgctcgccttcatactcgactgccagctttggagtcttctatattctgcattcaactagacactcgagcaaaaggaagaaaagaagactccagcttaccactcgaccatgcactcgaccacttgggtcgagtaccgttcttaatccgtcccaatactgcgtcgttttgagtattagggtttcagaatattttgctataagtagcatgtactttacattttcgttatctaatttttatcccgcagacactgtgttcttgacgtttttgtaatccggatttctcttaatctattcagtattcagtatttgtttttcatttcgcttactaagttgttcatcctgttatcatcctgctattactctgttgatataatgctttcattccattcaacgtttatgctttcttcaatgatgtttgagtagtgaataggtttctgaggatgggttagagtagtttagaattcttagtatgttaggtggttgagtttgatttatagatcccttatggattagttgttcttaatgcctattgctttctgatgaactggaatttgagtccaaacatttccgcgcccaaaaggtgttcgatgaaatgtctgaaccactaattctagagatttgtggctctgtaccaaggtattggttgcagggagcgttttggctttaatttgttgattcgtaatgcttgttaggttggctctcgtcaatggtgattgagtcagggactagtttaacttgagggtctctattgcggtggcacttagatttggttaatgaacgtgttgtctagggataatttattgagcatgtcaatcacctgtaaactgaggaaacgaaattactcaattaccccatccttgggaattctttatctttatcttgtcagatgttgcttagttcctgcaattctttactgttactcgacctgatactcgaccacccagttgtttggcaacagactgtgcagtcgagtatccttgctacattttctgtctgttactcgacctgtcactcgaccacacctagtgctctgcaacgagctgtgttggtcgagtgctttattgtttctgcttgattttctgttttctgcatgttcacttagggctgctagaacacaccaaaacccgttattgcttggcttgacttagtgacttctgatcacatcttgattgttagcatcacatccatttggattgacaacctaaaatactacaacgacgtgattggtgttttaggataattgactaaaaacctattatcagtaatcttgaatgtgataaatgcaggtgattgaaaatctttaattggagctgccattgtgtgttgattgggtatcaagtactttttctaagtgatccaaatccttctctttttcgcagttccaactctttggaaagattgtaggaaaaatctatttgctctatatgttaagtcttgttgtgagtaattgttctctctgcggttttaggttaacttgctttaaatccaaataattgttctgtgttcgtgttaccttgagatgtatgatatgtttcagtttgtatttgcagtacttttattcctctgttgttttgattctctagggttcattgttgctctctgcctctcttgttcttccacaatagccaagatcaactctttggttcaatcgatcgctttgtctaaggtactatcatcattcatcaaagctatgttagtactcaattggtattttttatatattgaaaacagagcttgatcaattgctgaaaatagagcttgaaacttcctttgctttatttgactcaaatcttaagctctctgaattgggactgtatatatgtgtttggctgtgattatttgtgaattggaattttcagggacttagttctagttagtcttgggaaaacctgttaaagtaaaaaaaactgcaccaagtctcattagtgtcattagacgtgaatctacttcagttttttctttatcttgtatacctcctaacagaaaatgatagatgatttcatacaaaaacttagtttaccagttattgaacagtttcgtcgtcatgctctcttttcacttgtcgccgttgtttcactttcaggcaagtcagagattcggtgagaaaaaggtaagctttttaaataatctttgcccatttctaataaacccttcttgttaaagattgggaattttattgcttgattaaattttgaaactttttcgtgttttgttttgatttagccatggatattgatgcttcgtgtagcttggttttatatggtaaatcctctgtagaaactgatacagcaacacgtttgaagaacaataacgttcttaaactcccagataattccaaagtttcaatctttttacaatctgagatcaagaatcttgtcagagatgatgattcttccttcaatctttcgttgttcatgaactcgatttcgactcatcggtttggtcggtttctcatttggtctccatacttgtcttccactcacgatgttgtttctcagtaagcatctatctgtttggtttcctctttaaggtttgcttatcttttatgtattgaaatcagcttttttagtttctttcagtaacttctctgagattccagttggttcagtttgtgtctctgatatacaacttaaaggtcgaggtaagtgttttttctcaccaacgatggattagataagagttaagcatatagaaatggaaattgaaaaccggacaccgtgtgtgttgttgc

SEQ ID NO: 152909 - DNA, 3748 bp, Arabidopsis thaliana landsberg
gtcttccttctctgcaattaagaaaggctagctcgaaatcgatttctcattcttcgtctatttctccttctttcccaaaatcactaaatttgtttgtgttttttttttcaaaattagccggtgatggcggcagtgaaaggaggaaaacaatcggtgagaagaagcagcattacggtggttcagataacgtgttgtaagaaggaattgcatcctgaattccacgaagacgcaaaggtttactgcaatggagagctggtgatgactacaggaggaacaaagaaagagtatgtggttgatgtatggtcaggtaaccatccgttttacctcgggaatcgttcggctttgatggttgatgctgatcaagttgagaagtttcgtaagaggttcgttgggctttctgagattatggagatttctgtgcttaaaggagaaaatcttatgcctacttagaaaagtaaaggtcccaaagggatgaagaaatgatgagtcttttctggtaaagcttatgtctttgaatttgttgtcttttcaattgaagtcgagatactgcttaggctgttaaaaattgtatgtgaattttcttctgaatgctattggttatgctttctttaagatctatttggtttcattgagagtgagactaggatctcagagcaatgatacaagtagtagcgaatctcaaggacaaatctttagcttgtgagtttggcatgaatttgtgatggataatagatagatatacactggtgagacacatagcaacaatgcctatgaaatggtaattgcaaatgaaagaaaggttgtggcttttgccacattttgtgataatcttggaaagttatggcatgagattaatgactagtgtaggtagttgttgttgatgtgtaagtggtgtgttgattagttgattgagatcatttttacatagatttataaatgttgaacatgatgatcatggtctatgtaagtgtctgctgaagttatcaggcaaaacatttgtcttctgacgacgaagtggcgtactaatagtgagcagattcttgaactgtggccatggcgtaggagtatgttttgcttgagaacataaaagaaaatttttggcacttgaagttgaagattctgtgatcatgcccaattgtatactactactgaatttgtgtgaccaatattgaacagaaacagaatactccagctcaatcagaggttttaccaatatcaagccaaaccaatatcaggccgtctcaagcccatttgaagacagtcgaatgtgtgggctattttaggcccatttcctctcagctggagtcttctgcttcttaactaagctaccaaagttttcactgaagttcaaaaggaaaacctgtgggctttttaatccgttagtaaattggggtttgacatctctacatacttcatatgctgatcgatgcagttgaatctgaataattgagttaaactaaattcattcgttggttgaagtcttagatcctttcttatcaatgatttgcgatcttgactaaaattgagtcttaaaatattatcttaaagactttagacacacaaaaagaaggtgttttaagataaactaatggtctcctgtttcctagcataagattgatgaaagacgctgtgttgggttagttaaactatatgtctaaccatatctaattagtttgttaattatgttggaataaatacaatgtgttggattaaataaattttaattttgctgggacaaatacaatttaaatgttcgttgcgttcatttgtcgaaaataatgcacttcgtatgtttgtttgttcggggacagttatctgactctgttgatctttccaaatcagcctttgtctgcagtaaacactaatagctccctcaattttataataattatgaattaagctattaacttaattaaaatatttgcatatatacccccctatactatgtttattgtgtaaaaagtcctcttagggcacatgactcatcttattctcacgtggttctcgaccattttcctgttattcttttgttcgggatccacgaacctcgttaatgtgtggataagtctgttattcttttactttgacggcgcgtaactttcacgtgtattcttaaaagataagtgggcttctcatggactagtttagataaatccatatccatgtaatataatcaactttatcctcaaatatgaagtcgaatagtgcgttatatctggcatcgttaaattatagtaagttgaaatatgttcagtatattctatagcaaattcagtatctttaagtggatcagtcactttatcttcgtgcaagtttctatatagtgaaaatattgtttcgataccacaattaataaaatatggatgacaattagtaaacaaactaatcattgttttcataggaagagagacaaaacaaacaaagtattctctaggttcttttctaaattttgaatactaaagaaaaccaaaagaaccattactatatgtttgtactattatcattggttgggtgtccaaaaagcaaaaccatagtataaaattaaattgtcaaaaaagagtcattaaattttaacttattgaggatatataaaaagactagtcctgcgatcgtatttccgtatcagtgtcagtgtatctccttcttacaataaaatattttctctcatttaacaaaatcgcttcactttcccgattcaattttcccggaaaatatcactttcccgtttcattttcccagaataatccaaatctccatcgtaatcaatttctcaaaacctgtagtattaatcatcaaaccaagcatttatactgtctctgttttcaatttcacggaaagaaagacaaacaaaaacagagcgcgtaaaaaccaaaaaatggagaagccgttcgaattccatggcgtggaggtggagaaagcggaagcgatgaggagatacaacaaccgtagaagcttcagaggcattcttcgtttagtcggcgtagcttttctgtgttacttatggttcccgacggtggcgattatactacaaaccgtcggcgactggatttattggaccggagcggttttaataaccgatcgttccgtcgtctttttcttcgctaacctaatcgtcggtttgattttctttctctccggcgcgagtaacaacgagagtagtagtagtaatgtcgaaacagaaccagatctctacgatcaatacacctcttcttcctccaccgtgatcgcaaacgcctccgccgcgaaagttgatgataatgattcgaacaagcaaatcgttccgacgtttaacgcggaggttgatgaggcggttaagacaaaacgaatttctaggaggactaaatcggagatatgccggccggcaatggagtatgagagaacggagtcggagaaagtggtggaagacgatgaatcggagaagcaaatcgttccggcgtatttcccagaggatgatgaggaagtggtagtggatgaggctaatcgggagatggttacaacaccgggaatttataggaggacgaaatcggagacgaagaaagagataatccggccggtgatagagattcggagaacggaatcggcgaaagaggtgtcgatagataggctaagtagtgaagagtttcgtttggtggtagagagtttcttgaaaacgcagaagaagagagcacgtgattcggaaaacgacaccgttcgatgtcatgtacttggatctagacctggcctcattggtggctatggctcgtgctag

SEQ ID NO: 152910 - DNA, 1531 bp, Arabidopsis thaliana landsberg
  unsure (1)..(1531): unsure at all n locations
gctcgaggtagagcaagcgccagagtccgattgatgaagccagtaggcagcgggacgttagcagtgaggatgaggcaagcacagcccatgccagtgttggtcaacgtcttcaaggagtcgcagcagccggcggtgggagtgacggaaccgccgctgcttccggtgatgaagttgagacatggagtgaaggtagagatcatggaggaggtgcatggcgtgcttatctgctgaccttgccctcccaacataaagcttgacatcatcactactatcaatgttaagccttccattttaattggcctgcttaatctttcggtgacgatgctntatagatatacaattattcagttttatatatgataaaatgggtgcattggagttcaacaacttccaactaatatcctttctctcaatctcttatcaacacacaatttttctttttatttcattaattaacaaagagaaaccaaataaaaagagaaagtagctgagtttggtatactcctagtaattttgtaacttaagtaattacaatctttaattagttctgaaaaagtatactggttcatgtctacgtggcgttgtatatattgggatgcatctagaacatagatatgtttgataaataaaagccatataaaccatgtaaagtaggtcatccaaccagacctgcctctttgacattttctggtcagttcctcctataattaaaccaaagcaaaaacaccaaagttgaacaataataactcaaattatggggtatagaagaagctacgcaatcacatttgtagcccttgtggcggctctatggagcgtaacaaaagcacagccgagcagttcatgcgtgagcacactgaccactctctctccgtgcctcagctacatcaccggaaactcaaccactccctcacagccttgctgttctcggctcgactctgtcatcaaatcttcgccgcagtgcatctgctcagccgtcaacagtccgatcccaaacatcggccttaacattaaccgcacacaggccttgcagctccccaatgcctgcaacattcagacgcctcccctcacacaatgcaacggtatcccacctaactatatttttctatcctatgcgttataatattgtttcactcataacagtgtttgtgaattagcggccactggtccaacagcacagcctcccgcaccctcaccgacggaaaagaccccagatgtgacactaaccccaacctcattgccgggtgctcgttcaggtacttactcctcttactatatatcaccaaaccatcaacggttgattttagtttattgaatacattctccttgcacatcggtacacaggagttggaggtggttccaagacagttccctccgttggtaccggctcgtccagcaggaatgttgaccccttgccgctgcattttcttatgtttgctgtattggtggtctgcacttcttcttttctttaaccaattctgagagttcatgtatttggtaatttcatttcacttgctgtgccagattgatcata

SEQ ID NO: 152911 - DNA, 1749 bp, Arabidopsis thaliana landsberg
atggacctgatcatatcaatatactcgaccctgaggtagagtactgccatcctggaatttctgaagcacccgatcacacctccgcagccagtcactcgaccgcaacactctggttcaccactcgaccccctggtcgagtagaaggcatcaccacttctctccaccactcgacaccctggtcgagtatcaccatctctaccactccacgttcactcgatcacctccactcgattacatagtcgagtaccaccatcatccaccactcgacatcatactcgactgccagcttcaaagtcttctccattctgcactcaatcagacactcgagcataaggaagagaagaagactccagcttaccactcgaccaatcactcgaccacctgggtcgagtgccgttcttaaatccatcccaatactgtgtcgttttaagtattagggtttcagaatattttgctataagtagcatgtactttacattttccaaaaaagttttaattcggcagacactgtgtgttcttgacattttgtaatccgaatttctcttaatctattcagtatttgcttttcatttcgtttactaagttgttcatcatgttatcatcttgatattactctgttgctatcatgttttcattcttatcatcgtttattctttctacaatgatgtctgagtagtgactaggtttctgaggatgggttagaatagtttagaattctcagtatgctaggtggttgagtttgatttatagatcccttatggattagttattcttaatgcctattgttttttgatcaactggaatttgagcccagacattcatggctctgtacaaaggtattggttacaaggagcgttttggctttacttgttgattcgtaatgcctgttaggttagctctcgtcaatggtgattgagtctgggactggtttaacttgagggtctctgttgcggtggcatttagatttggttatcgaacttgttttctagggataatttattgagcatgtcaatcacctgtaaactgaggaaacgaaactactcaattaccccatccttatgtattctttgtctaattgattttattgattactctactgctgtgtactgcatcctgtcatctgttgcttagtttctgcaattctttactgttactcgacctgatactcgaccacccagttgtctggcaacagactgtgcagtcgagtatccctgtttcattttctgtctgttactcgacctgtcactcgacctcacccagtgctctgcaaagagctgtgttggtcgagtgttttactgtttctgtttgattttctgttttctgcatgttcacttaggattgctagaacacaccaaaacctgttatgcttggcttgacttagtgacttctgatcacatcttgattgttagcatcacacccatttggattgacaaccttcagtactacaacgacatgatagtgctttagggttaattgatcttaaaaacctattatcaatttggcgccgttgccaattgggtgtttgtttgttacatttgagatttcacacttgcttatatcaagttctttttcaattttcaattcagttactaactgtgtgtttttcttgttgtcttcttgatccaggtacaactctgctgcatgcaaactcgatcaacagacaaccagaacctcctcttcaacgacaacttcgaccgagtaactcgcgaactcagagaaaggagaaacacagtcaaccttttaccctaa

SEQ ID NO: 152912 - DNA, 1215 bp, Arabidopsis thaliana landsberg
gtgtagtatcgtcgggattttttgaccggagaaatggggaggaggattttgaacgatgcgttgaggacgattgtgaatgctgagagacgaggaaaagcttcggtggagctcaaaccaatctccaccgttatgtcttcgttcttgagaatcatgaaggagaaaggtgaaatttttctcccttttgttttctaattggttcttgatgcttacccatttatcatttttgggatcggaagctcatcaattctcatggacactagatttagtagtattttagaagctgcaattagttcgtgagattgttgggcttacttacttgtgaagctacaacatttgaaagtttgaaacttgaaacaaagtttaatgttttttgcttccaagtttatgtttttgcttttatgatgctatcagtggtctgagttgctttgttctacttatgtatatatatacctgttgattcatattaaggatggttagataattcttctgctaaatggatttttttttgggtaatgttgctagatagcgatttcaaatggttattatagttgtaaatagctttacatgttacagattgtttgatggaatcagcttttccttagtgtgttttaactttacaaaatggtaatgttaaatgtaggttatatcaagaactttcaagtgtatgatccacatagagttgggagaataacagttgatctgcaagggagggttaatgactgcaaagctcttacctacaggcaagacgttagggcaaaagagattgagaaatacactgaacgcacacttccaacacgtcaggtttgttcattgtctctctctctccatatccagaaatgcagctaaatagcttagcctttttgatttgttccatgtagtggggttatgttgtaatcacaactccggatgggattttggaccatgaagaagcaatcaaacggaatgtgggtggtcaggttcttggcttcttttactgaatagcttgagctagcacatggcaagaaccttctagtgtcaaaggattcaacaaaagattgaagtttcggtccttctcctgttgctttttgttttttgtaacttgcattgtctttgaacagattggcaattattagataacacatttgttgctaaattcaaagatcttgttgttagtttatattttggacgagaaatttgttcttccatagctatctgaataatcgatatttcttctat

SEQ ID NO: 152913 - DNA, 554 bp, Arabidopsis thaliana landsberg
acaagtctgaggatgaggagcacaagaagaaggtccaggccaagaacgcaataatgtttctacgctgacaacaggaggaacaccatgtgggatgagaagatcggtgagaagcttccagctgcagacaagaagaagggtgaggactctattgaggaagcaatccaatggctagatggtaaccaattgggtgaagctgacgagtttgaagacaagatgaaggagttggagagtgtttgcaatccgatcatcgctaagatgtaccaaggaggagctggtggtgaagctggtggtcctggagcttctggaatggacgaggatgaagctcctcctgcatcaggtggtgctggtcccaagatcgaggaagtcgactaagtgttctcttagttattttgtctttttatttgaactctctcaatttagtgttggattttatgttctacattttctttgatctaagtactttctctctattgtttgatcattggtgacccctttctcttaacaatgctttagtggtcacttggtagaaagctttgttatgaaaatttctttac

SEQ ID NO: 152914 - DNA, 998 bp, Arabidopsis thaliana landsberg
agaacatcaggagacacctccggcgagctccggttactaggtttactaattttggcctgggcaatattgctagcttgtggtttgctagcgaaccaagaaactcctgtcgcgccgaatatagaaatagcttctatggatttcactgtgcgtaatattacacaaactcgtctcagtgcaaattgggatttattgataagggtccccagtaaccttcctaatgcctatatatgtctccaaggagacattcaagcttcattgttttacaagactattaatcttgttacctcatctgcacaaaggttatatataatttattcgattataaatcaatcttatagtattttatttaaaactgtttataattctgacaaaaaactgcttgcatataaaataggtatatcgatctcaaatctggcacagctcaacaaattagggttttagtagaagaagatattgacggtttgattaggaaaaggattatcaaagatatcaaagaaaagagagaagtgaagttcggatcgcagttgtttctaacggattgtagaaaagggaccacaggagttatgagctatgcgtgcgatgaaaccatgttgcggttcgagccaggttctgagaccaaggcgtctaaatttggagacaaccctagctgttttaatttttgattagttattttgcaaagatttgattttactctttctttaaaattagagtcaatctatgtaattctcacttattactattaattaatggaaacagagaaacaaccatttcatacaatctcaaccctacaatataaatgatcattagttagcgtccactagagagaaacgattccgtcatgaccaagcaaacgttactactcgcttccatagactcagtcgttacacctaaggtatcaaatccttcattgattatccgagaattcacaaggtctagcaggttatgaggaagagtggctacaccgtctaaaaattggatcacgcttgacatgcttggtc

SEQ ID NO: 152915 - DNA, 770 bp, Arabidopsis thaliana landsberg
ttcaaaaattgtcgaccaattttatttgttaaagataagaagaacgaagaagaataagcacgattttcttatctagatatctgcaaggtaataatacagttccttaaactcaggaagaaaagagaaaacgacagaggcagaacatgtggagattctctccctaaaacctgtccaaaacgtgacgtacaattcatttttatcttctccttacgagttatcttctctatttttgcttcaatatagaaattttgagtctttgagtaaaaagatgttggaagggaaagcgaaggcggaagagacagacatgcctgtgaagatgcaaatgcaagcaatgaagattgcttctcaatctctcgatctttttgatgtctttgattctatatccatcgctgctcacaatcaaaaaggttagtagtcttgtttcttgttcttttctagctaaaaatcatatataaaagttggtgttatttttttttttaaaaatcaggagttcgatgagagatatggaagtggatggcaatgtgtcgtgggaaccaattttgggtgtttcttcacacattctaaaggaactttcatctattttcatttggggactctcaacttcctcatcttcaaaggcgccactctttagtttcttctaaaccacatccatgtttcatttccttttcttttaacctcaaagtagctttgtctgtgtaggaagaagctgttctttttttctttttctgttaacagatcttgtttccaataaaattgtaagatgttgtatt

SEQ ID NO: 152916 - DNA, 649 bp, Arabidopsis thaliana landsberg
tttttcaattttgatgaaatactaaataaataaaatcagaaaaaacttctatttcgattctattatagtatagaccaaattttaaattttaatgatagatctaatgataaaaactattgtgtcagccggggaagcaggaaaagggaatgaagtgattccccttttttattctatctttgaaagattaaaaaatactatatgttcataatatactaatttagttaagttcatttttcaaaaacacgataaaaaattgttctgattattagcagttcaacgggaccccctcgaatcagacaaagaaggaagagttgggccccgttgagttcttatgttttcacgtctataactcagctcatccaatttctacagggatgaacctaatcctgaatatgaaccataaaagaaaatacctattaaaccgatcacaagaataccagctacagtacctattacccaaagaggaatccctccagtagtatcaactctatacaccgttgtcctgcacatttcatggagtggtgatgctagacaccctaacagacacagattattattatctattatccattcgactgggataataaaaatactaccctctatcgtggatatgattattctacgctcttttcttaatcgaagaaataat

SEQ ID NO: 152917 - DNA, 947 bp, Arabidopsis thaliana landsberg
ccagaatcggttggttctggattttttttttttttccttctttgttattgttatcttattaatgaatcttttttgttgttataatttacagattttttttaaacgagcttgatcaataaattctctcaagatctatggcggaagagcatcgatgtcagacaccagaaagcaaccgtctctgtgttaacaactgtggcttcctcggcagctccgccaccatgaatctctgttctaattgttacggcgatctttgtctcaaacaacaacaacaatcctcctccatcaaatccaccgttgaatcttccctctctgtatctcctccgtcgtcatcatcatcggagatctcttctccgatcatccctcctctccttaaaaatccatcagtcaagctagaggtaccggagaaaaaggcggtgatttcgctgccgacgacggagcagaatcagcaacagaggccgaatcggtgcacgacgtgtaggaaacgggtcgggttaccggattcaagtgccggtgcggtacgatgttttgcggggttcataggtacccggagatccatggatgcagctacgatttcaaatcggccggacgtgaagagatcgcgaaagcgaatccgttggtgaaagcagcgaagcttcagaagatatgatcagagccgttcgatgcgttgacttttcctctcgtaagtcttcatttctacgcgtatgtgtgtcctccgtcccccgagaaatacggatggtgtcgatttgattgatctcagccgttggatcaaaaatggtttattattgtaaaagattgattatgtatttatcaaagggacacgtgtcacgtggttttaggatggagacgctttcgctttctctccttcattttattttctttttcctttcagaaagaaataagattattcgcgttggctttttctttttattaaattccggcttattatt

SEQ ID NO: 152918 - DNA, 720 bp, Arabidopsis thaliana landsberg
gcccgcacacaaactctctcataattcataagtaaacaccaaagcaatcgctcgagaccccttacaaatattgatctctctctttctatatacataacaagactcattttgtgaggccatgtcaggagtttgggtgttcaataacggagtgatacgtctagtggagaacccgaaccagtccggtggagtttccacacagtcgcacggccggagaaatgtcttggtttacttgccgaccggtgaagccgtctcatcttactcgtcgctcgaacaaatcctaaggagcctcgggtgggaaagatacttcagtggagactccgatctcatccagtaccacaaacgctcctccatcgacctcatctccttaccaagagacttctccaagttcaactccgtttacatgtacgacatcgttgtcaagaaccctaattccttccacgtccgcgatttcaattgaaatccacacggaattaattaccctcgaccaagaggtctagtttgtgtttcttttgttcaaccgggaaattatattccagacataaaacctataatttcaaaattggagcagtgtgaatatgaatcacgtaaaggtagaagagaagatgtgtgcagctgtttgaattcgagaaacgaagcgatgactattggattatcacacttagttagattgtgtttatttgttgatatgtgtggtttaatttttaactgtttggttggttt

SEQ ID NO: 152919 - DNA, 539 bp, Arabidopsis thaliana landsberg
tccctttcgcaaaccttagcagtcgaaagatcgaaatcgaaaatccctaaaacgatgaaggagattgctgcatttctcctcgcgaaactcggtggaaacgagaatccaacctcaaatgatctgaagaagatcttggaatccgttggtgctgaaatcgatgaaacgaagatagatctgttgttttctctcatcaaagatcatgatgtgacggagcttattgctgctgggagagaaaagatgtctgctttgtcttctggtggtccagctgttgctatggtggccggaggtggtggtggtggtggtgctgcttctgcggctgagccggttgctgaatctaagaagaaggttgaagaagctaaagatgaatcttctgatgatgcaggcatgatgggtctctttgattgatcatttggttagaagtttggtttaaaggtcaagactttatgtttctgatgttggttttattgatggatctttgtttaatattgagacttgtgtttctgatgttggtttaatgatctttggtggttagactctat

SEQ ID NO: 152920 - DNA, 724 bp, Arabidopsis thaliana landsberg
tatagacgataaagattgcacaatttctccataaatagatttacacatttcctcaacataaccaaaagatccaaactacccttctctgatcaaatggattgttcattcataactacaaacgatctccgaagaatgttcaagacgctcgacaagaaccaagacgggcttgtgaccctcgacgagctcctttggattcttgataaactcggttcggccgaacacactcccgatgagcttgaactgatcgttggtaaacagagcctcgatttagacgagttccttcggttctactacgacgctgttttagatagcaaaggatctaagaagaatattgatgttgttgctgataatgatgaagcgattgcgagggcgtttaatgtgttcgatgtgaacggagatggttatatttcagcggaggagcttcgtgatgtgttggaacggctagggtttgaggaggaggcaaaggcttgggattgtgggagaatgattcgagttcatgacaagaatcttgatggttttgttgactttgaagaattcaagaacatgatcttacatgtctaatgatggtgatacacatgtgacatgtgtgtgtagtccttttacatgtttgatgtgttatttacaaattgcaatcactatatgtaaagtatataaagcttatccgatgtgttgatgtataaactgtctagcttttatactatgataaattattaattttggtaat

SEQ ID NO: 152921 - DNA, 993 bp, Arabidopsis thaliana landsberg
ctcatttctaatgatgtcatatctcatatcgacctttcatgtcatcactgtcgccgagggaaggactctccagttcacgaagatggctacggatcattccggcgccggaaacttgatggactgttggaacgcggggttggagcttaagtcatgcaccgatgagattgtcaagtttttccttagtcaaaccggtacgagtgaaccgccggttaaaggtggaattgacaaagattgttgtggagccattgggttggttgtgaaagattgttggtccgttatgtttacttctttagggcttacgactatggaagggaataatttgagagagtattgtgagtttcaagctgagaagtcggaattatctccttctccggcgccggaaactttggctttgtctccggttgagataacgtatcccggacttgattattgatagcttcccctttatatttgaagttaataaaagttaccagtgaactatgtttcctttttatgtgtaacattttctgatttctctttgttaaatttgattaatcacggtctaaatcgatttaaaatcgttttggtcaattaccacggtttttacatagaaccaatcaccaaaccgaagctccaccaaaaaataatataataaaccggaatctttagcctaccgttgtttgtttcccggttaaattaaacatcttcaatcttgaatcctagagtcacctggtggtttcttcctcaagctcatcaatattccctcaacaagcttatcttcaccaaaagtctttgcaggcttcctatcagtgtcccaagaacccagaatttgaagtaaatcactctctgtttcatcttctttcttcttcctttccccaccgctctgttttgaagaagctttttcctccatctctgagtcataatcttctccctctgaaacagatgactcattctcatgaatctttttggaaactggaccgagatcttcgaatgatgaatcagattcacatggaa

SEQ ID NO: 152922 - DNA, 1063 bp, Arabidopsis thaliana landsberg
acacgacaatcatcatagcgcactctctgctcttctccttcacacgtcacgaatctgactcactccattctctctatctcccaccaccatcgccgccgcctcggtgcagtcctctcctctccgacccttttctccctcactctccgccacctcctctctctatctcttcctgacaaaactcacctcatcgccaaccatcttctctccctcctccatcctcttctcatccaccgtaaacaccactcctcctacgccgtcaccatgaagctccgggacctagacgcggtggtcctcctcctctttctctgcgaaacccaccagcttcatccagatgttctagaagcttccgctgataattggcgggaaattctcggtaatacgtactctaataatatgttaagtaataattccggtctttggacttgcgatgccggaatcttgatgccgtacatagaaaccctagttagatgcaaaagatttgttgacataatgggaggctataaccatcttcgtcgaagagatcaaaaagaaggctaccaagttccagccgctagagcggctgtggtggcgttacgggcggttgaggttttcaacgtcgccgcttcaaacgccggagaagtagaatgcgtgatatgcaaggaagagatgagcgaaggaagagatgtgtgtgaaatgccatgtcagcatttctttcactggaagtgtatcttgccgtggctaagcaagaagaacacgtgtccgttctgcaggtttcagcttcccaccgacgatgtcttctcagagatccaacggttatgggagatcctcgtcaagagtagcgagttacacgtggcgtaatctcagtttgcggtgatgggtacatgtgtaagaggaactaaagaagcctgtacatcgtaatctaatatactatgtagaataatatatcaagtaattgtcatagataggaatgtttggaccgttttgatatctcgaaatagtttatattttgagaaagacacatttgtgttaatagtacgatgaatttcgtaaatatgttgtaatagaaaccaaattaatagtgacc

SEQ ID NO: 152923 - DNA, 4016 bp, Arabidopsis thaliana landsberg
tgagatttgttgtgcaaaatggatcagctttttctaattcctattcttctgctagtgctactgatttgagctcaagagatgctcgaaaagtgaagaactttacagtctcttacctcgttggttcattgggtttatctaaaaagctcgctgaatccatctcaaagaaagtcagtttcgtgaacaagggcaatcctgatttagttctgagtctttttagaagttatgggttcacaaattctcagatctccagcatcattacggattatccaagattgcttctaatagatgctgagaaatcacttgatatcaagcttcagtttttggagtctagaggagcttcaaaccctgagctcactcagattgtttctactgttcctaaaatattgggaatgaaagagggaaagtctctaggcagatactatgatttcgtcaaagagattatagaagcagataagagttccaagtacgaaactttatgtcaacctttgccagaggctaataggcaggggaataaaatcagaaatgtttcggttcttagagacttgggtgtgcctcagaggttgctattctccttgctcatctctgatgcccaacctgtttgtggaaaagaaaattttgaagaatcactcaagaaggttgttgagatgggatttgaacacaaccacctcaaagtttgtccaagctcttagagctgtttcagattcaccgacaaaacagtagaagaaagagttaatgtgtataaagggttcggctttgctgtggaagatgtatgggcaatgttcaagaagtgtccttactttttgaatagttcggagaagaagataggtcagacaattgaaaccctgaagaagtgtggactactcaaagacgaggtcatctcagtgttgaaaaagtatccgcagtgcattggtacttcagagcagaagatattgaactccattgaaatatttctaggcctaggcttcagcagagatgagttcataacaatggttaagcgctttcctcagtgtcttattttatctgcagagacggtgaagaagaagattgagtttgtggtgaagaagatgaattggccactgaaggatgtggtttcaaaccctacggtacttggatacaacctggagaagaggactgtcccaaggtgtaatgttattgaagctctcatgtcaaaaggacttctgggagacacaggaagtgaactccctccaatgtcgtctgttttggtatgtaccgatgagttgttcttaaaaaggtatgtgaggaaccttgataacaaggagctggtccttgagttgatgactatttacaccagaggtcgtgtatcatcatagatcagaaggattttgcttttgtttttggacttcaaaagcaatccggcttgtaattttgaatctattttctgatatattactaaggtttgcatcctagaaacagcaatgtagcaaaatcacagacttgtgaatccaaactatgtatttgctgattttaatcttctgcaatttttggtgaccttgctcgtctaaactcttgaagtttaaactaaagacatagaagagacagtcaaggttctgtttctggatctctgctcttttttaccaaacttttcatttttagaaaaccctgtgatccaatgcagctccttagctcttggattaatcatgtaagctcttttcgtttctttattagtgtttgatctctggtcttgagagcttttaatttcactaaattccttaaaaaaagattttgaattcgagccaaaatcaatttatgatacttcaaaaccttgctacgttcaggttcttttccaagtgatttgcttcgtatctgtcacaagctcactgtttaccccaagaatggaaggcacatgttatgtctttgtaatgtccatatgatgcatctaactctacagctatccaattagttgaaagtaaaacaaacttctctcgcctgaaaaactgcatctccaatatgactaaattctacaatgaagaatcattagcaaaataagggtttaacttcctaaaccctcttttttttatagcctcctcccaattcccaatttagcttcttattgattttggattttgtgagtgaagagagaagcgaactcttgaatagtcgaccacccatcgatctttggcggcactgtaagttttgaattttgagatagcttgtttccgagccttgtctcgccatgtattctctgattcgccatggaagaagtttggtcgagttacagaaatggcgtcatttgagagttttagtgcaaaaggcgtctcctttgtccaattccttctcctctgcttctgctgcgcgtttgagtcctagagttggtcgaaaaggtaagagctttacagtctcttacctcgttgattcattgggtttacccaaaaagctcgctgaatcggtctcaaggaaggttagcttcgaggacaaggacaaccctgactctgctctgaatcttttgagaagtcatgggttcactgattctcagatctcaaacatcgttacggattatccacaattgcttgtagcagatgctgagaaatcacttggtcccaagcttcagtttctgcagtccagaggagcttcaaggtctgagctcactcatattgtatctacagttcctgaaatcttggggaagagaggggacaaaactatcagcatatactatgattttgttaaagagattatagaagcggataagagttccaagttcgaaaagttatgtcattctttgccagagggtagtaagcaggagaacaaaatcagaaatgttttggttttgagagaattgggtgttcctcaaaggttgttgttcccattgcttatatctgatcaccaacctgtctgtggaaaagaaaattttgaagaatcactcaagaaagttgttgagatgggttttgatccaaccacctcaaagtttgtcaaagctcttagggttgtttacagattccgcgacaaaactatagaagcaaaagttaatgtctgtaaaagtttaggcttttctgttggagatgtatgggcaatgtttaagaagtgtccttcctttctgaatttctctgagaacaagatagttcaaacttgggaaaccctgaagaagtgtggactactcgaagacgatgtcctctcagtgttgaagaagtttccacaatttattaatgctttagagcagaagatattgaactccattgaaacatttctaggcctaggatttagcagagatgagtttgcaatgatagccaagcgctttcctcaatgccttattttatctgcagagacggtgaagaaaaagactgagtttctggtgaagaagatgaattggccactaaaggcagtggtttcaacccctgcggtacttggatacagcctggagaagaggactatcccaaggtgtaatgtaattaaagccctcatgtccaaaggatcgcttggaagtgaactccctggaatgtcttctgttttggtatgtactaatgaagaattcttaaacaggtatgtgaagaaccatgatgacaaggagatagtacctgagttgatggctattttcaccggagatcgtgtttcatagatcagaagtcttgtcaaggattttgcttttatttttgaatttctgaaaccttgattttagacttcaaaagctatccaacttggaaatgtaacttttaatgtaatgttgaatcttttatgatatattaccaagattggtagcttagaaacggcaatgcagccaattagtagacatgtgaatccaaactatatgtttgctgactttagttttctaaataatttttcttctcactttttgctgaccttgttcgtcttgactcttgaatttttactgaccttgttcaggagctgcattgcacacaaggtttcttgactgtctctatacgtcttgagtttggatcatgttttgtctgatttctgtatcatgtattggatcatggtttttggaactgcagatatggagtagaatgatgcaatgcagctccttagctcttggattggtcatg

SEQ ID NO: 152924 - DNA, 316 bp, Arabidopsis thaliana landsberg
aatcgattgcttaatcatttcggccgttggattgaatcgaaaaagggcgaattatttaaaaagcttcagaatttgaaatcgaaatctgcgagtactgttgtgtttgtggaagagagagttttggggtttaataatggcgaaagctggagggatcacgaacgcagtaaacgtaggaatcgctgttcaagcagattgggagaatcgagaatttatctcacatatctctcttaatgctcgccgcctcttcaaattccttgttcaatgcggtaaacctcactctctcacttatttctctgcgttgggttttgaatccaat

SEQ ID NO: 152925 - DNA, 1297 bp, Arabidopsis thaliana landsberg
aatgtcattttcccctcaattttcatgatccaaacctctacgaagatgatcatcctcatcaatctccatctcttgctcctcttcttccttcttgctctctacctcaagatctccatggtatatatatacataaacttccacacacatctcctctgttttctctctctctatctctatctctttctaatgctctgttctgttctgtttcaggatttgcttcgtttctaggtaagagatctccaatggaagggtgttgtgatttagaaactgggaacaatatgaatggagaagaggattattcagatgatgggtcacaaatgggagagaagaagaggagattgaacatggaacaagtgaagacactagagaagaactttgagcttggaaacaaacttgaaccagagaggaaaatgcagctagctcgtgccttaggtttgcaaccaagacagatcgcgatttggtttcaaaatcgaagagctcgttggaaaacaaagcagctagagaaagattatgatactcttaaacgacagtttgatgcacttaaagctgaaaatgatcttcttcaaactcataatcagaaactccaagctgaggtaattaatctcataatctaacaaaaaaaaatcaatatgttttttttttttggttaatgatctcataattaaatttctttttccatgtaaaaaaagatgattttttttctttttgaaaaaagttaaagattatatttctggtttataattatttggatcaggagttgctttcaggtagggttaataaactggacatgattcatgacttttcagacatcattatctcttttttttttcactcttgtctggaaagagatctgaaaacaatagtttctttatgcttatcacattgtacagtaactctgtttatgtttaaaattttgtctttaattacgcagataatgggattaaaaaacagagaacaaacagaatcaataaatctaaacaaagaaactgaaggatcttgcagtaacagaagtgataacagttcagataatctcagactagatatctcaactgcgccgccatcaaacgacagtacattaaccggtggccacccaccgccaccacagacagttggtcgacacttcttcccaccgtcgccagccaccgcaacgacaactactacaacaatgcagttctttcaaaactcatcttcaggacagagtatggttaaagaagagaatagtatcagtaacatgttctgtgcaatggatgaccattctggtttttggccatggcttgatcagcaacagtacaattga

SEQ ID NO: 152926 - DNA, 150 bp, Arabidopsis thaliana landsberg
cccacattttaatatggtatcagagcccgatccgcacatacacaacccgatccacatcggtccggcccaatacttggcccgccgatccatgcccaaacatatcgagatcaatggctagaagagccatcatctcgagggggcgtattaggg

SEQ ID NO: 152927 - DNA, 5036 bp, Arabidopsis thaliana landsberg
gaacgaagtaattttttcttcttgttcttgttttgttcatgggtctccatggcccaacccactctttctctttcatcagatggccaagctcttctctctctcaaaagaccatcaccatcactcttctcttcttgggacccacaagaccagacaccatgttcatggtatggcattacatgttctgcagacaacagagtcatctctgtctctatccccgacactttccttaacctgtcttcaatccctgacctctcttctctctcctctctacagttcctaaacctctcctccaccaacctctctggcccaatccctccttcatttggaaaacttacccacctaaggcttctcgacctttcttcaaactctctctctggtccaatcccatcagagcttggtcgcctctctactctccagttccttacaatgaacgcccacaagctctcaggttcaattcccttacagaattcaaatctatttgccttgcaagtgctttgtcttcaagacaattttttgattggttcgattccttcaagttttggctctttggtctctcttcagcagctcagacttggtggtaacactaatctcggaggtcctatccctgctcagctagggtttctgaaaaatttgacagctctagggtttgcagcaagtggtttgtcaggttcaatcctttccacatttgggaatttggtaaatttgcaaactttggctctgtatgacactgagatctctggtaccattcctcctcaactgggtttgtgctcagagctcaggaacttgtatttgcacatgaacaagctcactggatcaatcccaaaggaactgggtaagctccagaagatcactagcttgcttctatgggggaattctttatctggggtcatcccaccagagatttccaactgttcttcccttgtggtgtttgatgtttcagctaacgatctaactggcgatattcctggagatttggggaagcttgtttggttggagcagcttcagttgtctgataatatgtttaccggtcagattccttgggagttaagcaactgttccagcctcattgctcttcagctggacaagaacaagttatcaggctccataccctcacaaattggaaacctcaagtctctgcagagctttttcttgtgggagaactcaatttcaggaacaattccgtcttcttttggcaactgcacagacctagtggccctggacctctctaggaacaagctaacaggaagaataccagaagagctcttcagtttaaagaggctcagcaaacttctccttctagggaactccttatccggtggattaccaaagagcgtagcaaaatgccagtcgcttgtgaggctaagagtcggagagaaccaactctcaggtcaaatccctaaagagataggcgagttacagaacctggtgtttcttgatctctacatgaaccatttctccggtgggcttccttacgagatctctaacatcactgtccttgagctcttagatgtccacaacaactacatcaccggagatattcctgctcagttggggaaccttgtgaatctagagcagcttgatttgagcagaaacagcttcacaggaaacataccgctgagttttgggaacctaagctacttaaacaagctgatcctcaacaacaatctcctcactggtcaaatcccaaaatctatcaagaatctacaaaagcttacacttcttgatcttagctacaacagcttatccggtgaaatcccacaagaactcggtcaagtcacaagcttaactataaacctcgacttaagctacaacaccttcactggaaacatcccggaaaccttctccgacctcacacagctacaatcactcgacctctcaagcaactcgctacacggcgacatcaaagtcctcggttcactcacaagcctagcttcactaaacatctcctgcaacaacttctcaggtccaatcccatcaacaccattcttcaaaacaatctccacaacatcatacctccaaaacacaaacctctgccattcactagacggcatcacttgctcatcacacaccggacaaaacaacggagtaaaatccccaaagatcgtagctttaaccgcagtaatcctcgcatcaatcacaatcgcaatcctcgcagcctggcttctcatcttacgaaacaaccacctctacaaaacatctcaaaactcctcttcctctccatcaacagcagaagatttctcatacccgtggacattcataccattccaaaaactcggtatcaccgtcaacaacatcgtcacttccttaaccgacgaaaacgtaatcggaaaaggatgttcaggaatcgtatacaaagccgaaatccccaacggagacatcgtagcagtgaagaaactctggaaaactaaagacaacaacgaagaaggagaatcaacaatagattcattcgctgcagagattcagattctcggtaacatcagacacagaaacatagtgaagctattaggttactgttcgaacaaatcagtgaagctgcttctatacaattacttccctaacgggaatctacaacagttgttgcaaggaaatcgaaacttggattgggaaacacgttacaagattgcgattggagctgctcagggtttggcttatcttcatcatgattgtgttccggcgattttgcatagagatgtcaagtgtaataatattcttctggattcgaaatatgaagcgattcttgctgattttggacttgcgaagctgatgatgaattcgccgaattatcataacgccatgtctcgtgttgctggttcttatggatacatcgcaccaggcaagtttctctcttttttaacgggagggcctttttgataaatttgataaagctcaaggtttcatttgcattattataagagatagggggttttagtgtatttattaaaattcagagcttcatatccattattacaagagattgagagaaattttgaatgaatttgttaaaaaaacaaaagggtttcttgtgcatcattacaaaatattaggattttttttaataatgaatttgttaaaatttgaggtttcatttgcattattggcaaaagattgttttttttttatatatagtgaatttgttaaaatcagagcttgattttcattactacaagaaattgggggaaatttggaatgaatttgttttaaaaagtgttacttgtgcattattataaaatagtagttgtttttatttgaaatttaaggtttcacttgcattattacaaaagattgtgtgtttttttggtagtgaattaataaatttgttaaaagcagggttttattcatctttacaaatatagtttttttttaatactttgttaaaatcagggttttatttgcattattacaaaaacaattgtgaggtttgttaatgtgtttgttcaaaatcatggtttaatacataaaaacaaaatactggggcttgctttctgataacgtaattaataagaggttttttgtgtaattattgcagaatacggatacacgatgaatataacagagaagagtgacgtgtacagctacggcgtcgttttattagagattctaagtggccggagcgccgtggagccacaaatcggcgacgggcttcacatagtggaatgggtgaagaagaagatgggaacctttgaaccagctttatcagtacttgacgtgaagcttcagggattaccagatcagatagttcaagagatgcttcagacattaggaatcgccatgttctgtgtgaatccgtcgcctgtggagagaccaacgatgaaggaagttgtgacgttgttaatggaggttaagtgtagtcctgaagaatggggtaaaacatctcagcctcttatcaagccttcttcttcataacctatggtgcttgtgtttcttgttcttgtttttttttttttaggtcaaatttggttgagtggttttgatttcttgtacataaagtatcattgttagttgaacttggaaacatttgagctctttggaatcaattagaattggttacaactttgcattacatcatttggtgtttgaaatatacatttgggagaagagtaagagctcgggttttaaaagccagtattgtttgaatctctgtcttgagtactcggcgtaatcgaagtcgatcttgtttacatattcctacacaatcacaattcatgtttcagatactttcttgatgagattatgtttggattggagagaggaagagtcttacagagatgattccccataagccccaaaacagatggcttgctaatgtgtacttctcagcatccttcaagagctgttttatgtcatgttcttttggttcttcgcctaacaaaagaaggcgtatattagtccatgagacgttgttacggctagaagaagaaggaactatgtttctttgagaaactgacctgaagagctgaggtagttatggatgaatctccttcgttcctcttctcctgcaactctcaaaccaatcagtcaaaatacgaatgtatttgttacttttctacttgtggatgtgagtacctgggtacagagtatagtccaagatatggggagtgtcagaatggtaatttgctgccatttcgcagaagtgatttgcaatgtcgtatgcaactgggttataactagcgtactcgtagtcctgttttagagaatctcatattggtccatgtgtgatgatatgttaaccttaagggtaatggaaaacttacaatgatagtaatggcattggtgtcttcatcaatcataatgttaccatattgcaaatcattgtgacaaaaccctatctcctgctgcttacacttatcctgcagctcatgttccagcaagtatatctcagcttcaatcttgtctagaccaaactctgctaaatcttcaggtgtacacagactcttggcttgtctaagccaattcctggtcatatgttttcaagattctgttattgattaaaccacttgatgcttcacgttaacatagaaagattactcacctcatcc

SEQ ID NO: 152928 - DNA, 1045 bp, Arabidopsis thaliana landsberg
tcagctagttgttggtcatccatttgacacaatcaaggtcaaacttcagagccaaccgactccagcaccaggccaacttccaaggtataccggtgcaatcgatgcggttaaacagaccgttgcttctgaaggaactaaaggtttgtacaaaggtatgggagctccactggcaaccgttgctgccttcaatgcggttttgttcactgtgagaggtcaaatggaagggctgctaaggtctgaagctggtgttcctttgaccattaatcaacagtttgtggccggtgcaggcgctggtttcgctgtttcgtttcttgcttgtcctactgagttgatcaagtgcaggttaggttctttttacatgtattaccaatcagagcctatatatacatgtgcttttaactcaagctctagactgaaacagaactaaaacatgtctctttgtgtgtgtgtttaatcttgtttctccatcaggttgcaagcacaaggtgcattagctggtgcctctaccacaagctcagtggttgcagccgtgaaatacggtggaccaatggatgtagcccgtcatgttcttagatcagaaggtggagcacgaggtctattcaaaggtttattcccgacattcgcccgtgaagtcccgggaaatgcaacaatgtttgcagcctacgaagctttcaagcggtttttagccggtggttcagacacttcaagcttaggacaagggtcattgatcatggctggtggagtcgctggtgcgtcgttttggggaatagtatatccgacagatgttgtgaagagtgttcttcaagtagacgattacaaaaacccgaaatacacggggtcgatggatgcttttcggaagattctgaaatctgaaggagttaaaggtctgtataaaggatttggtccagctatggctaggagtgttcctgctaatgctgcttgcttcttggcttatgagatgacaaggtcaagcttgggataaaccggttcggtttgggtttaactgttggtccgatttctggatgttccattgcgattaacctct

SEQ ID NO: 152929 - DNA, 938 bp, Arabidopsis thaliana landsberg
atggatgtgaaaaagatggagttgaactttagaattgaagacctaaacgaagagagcaaagactctaatctcttcacttccttcagacaaagatttcactgggaaaaatatttgcaagtatcaaggatgttggtatactcacaatgttctccaagctgtcctcaatttccagaaaagcttcaagcctcaagacaccgatatcatcgttgcttcgttccctaaatgcggcaccacttggctcaaggcgcttacattcgcactccttcatagatcaaaacagccttctcatgatgatgatcatcctcttctttctaataatccacacgttcttgtaccctactttgagatagatctctattattatagcgaaaaccccgaccttaccaagttctcatcatcttcgaggctgttttcgacacacatgccgtcacatacattgcaagaaggtctcaaaggttctacttgtaaaattgtgtatatgtctagaaacgtaaaagacacattggtttcatattggcatttcttttgtaagaaacaaaccgatgaaaaaataataagcagtttcgaggatacgtttgagatgttttgtaggggagtcaactttttcgggcctttttgggaccatgtcctaagctactggagaggaagcttggaagatccaaaccatgtgctttttatgaagtttgaggagatgaaagaagaacctcgtgagcagatcaagagactagccgaattcttaggatgtccttttactaaggaagaagaagaaagcggcttggtggatgagattatcgatctttgctctctacgtaatctgagcagtttggagatcaataagaccggaaaattgcatagtactggtagagagaacaaaacatttttccgtaagggagaagtcggtgactggaagaactatttgactccctgaatggagaaca

SEQ ID NO: 152930 - DNA, 1861 bp, Arabidopsis thaliana landsberg; identical to SEQ ID NO: 28509
  unsure (1)..(1861): unsure at all n locations

SEQ ID NO: 152931 - DNA, 2174 bp, Arabidopsis thaliana landsberg
atgggttgctttagcagcaaacaccgaaacacagagagtgatatcatcaatggcagcgtgcagagctcaattccgacaaatcaacctgaaaaccatgtctctcgtgatgttctcaagcctcagaaacctccttctcctcaaattccgacaacaacccaatcaaatcaacatcaccaacaagaatccaaacccgttagtcagcaaatcgaaaagaagcaggttctaacacaaccattgaaaccaatcgtttttagagaaacagagacaattctaggcaaaccctttgaagaaataaggaaactttacacgttaggtaaagaattaggtcgaggccaatttggtataacctacacttgcaaagagaattcaacaggcaacacatacgcttgcaaatcaatactcaagaggaaactaacgagaaagcaagacatagatgatgtgaagagagagattcagataatgcagtatttgtctggacaagagaacattgttgagatcaaaggtgcttatgaagatagacaatcgatacatttggtgatggagttgtgtggtggtagtgaattgttcgataggattatagctcaaggacattactgtgagaaagcagctgctggtgttattagatcggttttgaatgttgtcaagatttgtcatttcatgggtgtgttgcacagagacttgaagcctgagaatttcttgctctctagcaaagatgagaaggctttgatcaaggctactgatttcggattgtctgtctttattgaagagggtaaaataatcagacttttctttagggtttagtacattttgatgaagttggttgtctctaggacatagataggatacgtatcaaggttctggttatattggtatcttgtgtctcttggttccgtgaattgcatgaagaagttcagacctttcttgatatacggactaggctagagaccgctgtttttgttctctgatagagtttgatgtttcttactcttcatcatttggtgtttcttcttcttgtctttgcaggaaaagtatatagagatattgttgggagtgcatactatgttgctccagaagtcttacgtcgcagatatgggaaagaagttgatatctggagtgctggaatcatcttatacattctactcagcggtgtgcccccgttttgggctggtaacgcgatattctctcttctttgttcctttcccttttgagatttatatgttgtgaataaaaagctgaaaacagaacattggatatgcagagactgagaaaggaatatttgatgctatattggaaggccatatcgactttgagagccaaccatggccgtcaatctccagcagtgccaaagatttggtacgtagaatgttgactgcggatccaaaaaggcggatttctgctgctgatgttcttcgtaagtaccttttgaagacattttacagagccacaacacaatgcaaagttctggaagattccattatcggttccttcttgattctgagatttgctctactgttttgtgcagagcatccatggcttagagaaggtggagaagcatcagacaagccaattgacagtgctgttctctcaaggatgaaacaatttagagcaatgaataagctaaagaaacttgctttaaaggtgaagtcaagatttttcacatatgcaatgtgattctgtggtgtggtcctctttttcgatatactcatgatgagattctaacaggtcatagcggagaatattgacacggaagaaatccaaggattgaaggcaatgtttgctaacatagacactgacagcagtggcacaatcacttatgaagaactgaaagaaggattagccaaattgggatctaaactcacagaggcagaagtgaaacagctcatggatgctgtaagttggtcaaaaactatattttcccccattccgttcctttactttaagaactcagattctcgggtttgtgattaggctgatgttgatgggaacgggtccatcgactacatagagtttattacagcaacaatgcataggcacaggcttgaaagtaatgagaatctttacaaagctttccagcattttgacaaagacagcagcgggtaagtgacctgtttcttctcgatgttattcattcttaaccggtatatatatacccaagcacggtgagccttttcttg

SEQ ID NO: 152932 - DNA, 1061 bp, Arabidopsis thaliana landsberg
gcaaaacacataacacaatgggggcaccaatggcctctttccttgtcttagcattctcccttgcttttgtctctcaaaccaccgcaaattacttctactcttcccctccaccaccggttaagcattactctcctcctcctgtttacaagtccccaccaccaccggttaagcactactcgcctcctcccgtttacaagtccccaccaccaccggttaagcactactcgcctcctccggtttacaagtctcccccaccaccggttaagtactactcccctcctccggtttacaagtctcccccaccaccggtttacaagtctcccccaccaccggttaagcactactcccctcctccggctttacaagtctcccccaccaccggttaagcactactcccctcctccggtttacaagtctcccccaccaccttttaattattactcccctcctccggtttacaagtccccaccaccaccagttaaatactactcccctcctccggtttacaagtccccaccaccaccggttaagcactactcgcctcctccggtttacaagtccccaccaccaccagttaaatactactcccctcctccggtttacaagtccccgccaccaccggttaagcactactcgcctcctccggtttacaagtctcctccaccaccagttaagtactactcccctcctccagtttacaagtctccaccaccaccggttcactactctcctcctcccgtagtataccattccccaccaccaccggttcactactctcctcctcccgtagtatatcactccccaccaccaccggttcacatactctcctcctccagtcgtataccactctccaccaccaccggttcactactcacctcctccagtcgtataccactctccaccaccaccggttcactacttaccttccttcagttgtttaccagttccccacccccacccaaggaagcactacccaataccagatttttcttcttcttccgggccgattaccttcttcccccttacgggatttcccatttggtaacttcccttcccttcca

SEQ ID NO: 152933 - DNA, 1786 bp, Arabidopsis thaliana landsberg
atggaattgccggtaaaagctcctattcccggtggccgggaaatctcatatagattagaaaccaagaatctgtcgtatagaataggcggaaacactccaaagttttctaatttatgtggtttgttgagtgagaaggaggaaaaggttatcttaaaggatgtttcttgtgatgcaagatccgcggagattactgcgatcgcgggtccaagcggagcagggaaaaccacgttgctggagattctagccggaaaagtttctcatgggaaagtttcagggcaagtgcttgtcaacggtaggcctatggatggtcctgagtacaggagggtttcagggtttgtgccacaagaagatgctctgtttccgtttcttacggtgcaagaaacactgacgtacagcgcactcttgaggctgaagacaaagaggaaagacgcggctgcaaaggtgaagaggctgattcaagagcttggtctagaacatgttgcggattcaaggatcggtcaaggatcaagatctggaatctctggaggagagagaagaagggtttctattggagttgaacttgttcatgatccaaatgttatattgatcgatgagccaacctctggtttggattctgcgtccgctcttcaagttgtgacgcttctcaaagatatgacgattaaacaaggtaaaaccattgttctgacgattcaccagcctggttttcgcatactcgagcagatagaccggatagtgttgctctctaacgggatggttgttcaaaacggatcagtttatagccttcatcagaagattaagttctccggtcaccagattcctaggcgggtaaatgtcttggagtatgcaattgatattgcagggagtcttgaaccgatcagaacccagagttgcagagaaatctcatgttatggtcatagcaaaacatggaagagttgctatattagtgcaggaggagagcttcatcaatctgattctcacagcaactcagtgttagaggaagtgcagatactcgggcaaagatcttgcaagaacatcttcagaaccaagcaattgttcacaaccagagccttacaagcttccattgccggtcttatactggggtcgatttacttgaacgtaggaaatcaaaagaaagaagcgaaagtcttgcgaaccgggttcttcgcctttatcctcactttcctgctatcttccacaacagagggacttccaattttcttgcaagacaggagaatcctaatgagagagacatcgagaagggcttacagagttttgtcttacgttttagcagatactctcatattcattcccttcttgttgatcataagcatgctctttgctacgccggtttattggctggtcggtctcagaagagagctagacggcttcctctacttctcattggtgatatggattgttcttctgatgtcaaactcttttgtcgcatgtttcagtgctcttgtcccaaacttcataatggggacatcagtaatctcaggtctcatgggatctttcttcctcttctccgggtatttcattgcaaaggacaggatccccgtttactgggagttcatgcattatctcagcctcttcaagtatccattcgaatgcctgatgatcaacgagtatcgaggagacgtgttcttaaaacaacaagacctcaaagagtctcagaaatggagcaatcttggtatcatggcaagtttcatcgtcgggtacagagtccttggattcttcatcttatggtacagatgttacagaacaagaagctaggttaataacaatg

SEQ ID NO: 152934 - DNA, 2159 bp, Arabidopsis thaliana landsberg
  unsure (1)..(2159): unsure at all n locations
gaaacaagcggtgttgacagagaggagaaagtagtgattgttgggggcgggattggcggacttgccactgccgttgctcttcaccggntaagtatataaattacaaaaaccggttctttgaattttcttagaaactcagagccacttaaccggatatttttgtttgatgggtttaggcttggaatccggtcggtggtgttggagcaggcagagtcgcttcggacaggaggagcatcgctgacgctatccaagaatgggtggcgtgttcttgacgccatctccatcggacctcaactccgaaagcagtttcttgaaatgcaagggtacgatttttttgattctgtcttgtaataatttggtcttggttttagctgagtgtgttggtatgataagctgtgcagggtggtattgaagaaggaagatggaagagagcttcgttctttcaaatttaaagacaatgatcaaaggtacctgctacttcataatttgagcattccatttgattcatcatgtgtgtataccaaccaaagcatatgtcttgtatagccaagaagttcgggcggtggagaggcgagtactcttggaaacacttgcaagccagcttcctccacagaccattcggttttcttcaaaactggaaagtatacaaagcaatgatgccaatggtgacactctccttcaacttaaagatggaactcggttccttgcaaatgtatacttctcttaagctctggtcctatggttatgtgtttattattctcagtatatggctgatttgatgatgtatgtctttgacagattgttataggttgtgatggtatccggtctaaggttgcaacttggatggggttcagtgagccgaaatatgtcggttattgcgctttccgtggccttgggttctttccaaatggacagccatttcagcaaaaggtgaactacatattcggtagnnnnnnnnnnnnnnnnnnnnnnnntgtatctgcaacaaaagtctactggttcatcactttcaacagcccttctctaggtagattttcgacacttctcagacattccacaaagataattccttttccttttctcaatttcctatatcataaacgttgagacatgcagggcccaaaattacggatccagcgatcctaaaaaaacaagccaaagaactggttagtacatggccagaagatctgcaaaacctcatcgatttaacacctgatgaaactatcagcagaactcctctagtagaccggtggctatggcctggcattgctcctccagcatcaaaaggacgagtggttctcgttggagatgcttggcacccaatgactccaaatcttggacaaggtgcttgttgcgccttggaagattcagtagttctggcaaataaacttgctagtgcaataaacggcgagaccgaatcaatagaagtggcaatggaatcatacgggagtgagagatggtctcgagcattcccgttgacagtacgtgcaaacctagttggcgcacttctgcaatgggagaatcctctagtgtgttccattagaaacaatattgtcataccaaagttactgaggcttggaccaatgcttgaacacacaaactttgagtgtgaacctctctttgtttctaaaagctgaatttcgtatatatagtgagatccattgaatagagagacttgaacaatgtataatcataggaacaatataaactctgtgattgaatgtaaaagaatcatacaatgtaattctagaagctaacatttgtgagaaaattgtctcaacaagaacagagtaaagcttgacctaatcaaagtatgtcttccaccatgtcaatttgtcactgtttgatctttgctactgtgaagaaatcagacaatagaaatataagtcataccaaaaccttaaaaattacagagattctcgaacatgaacagaggatttgtctccgaggaattgaatttggttacctggattcgaaaacatccaaagtatgactgcgcagagaatgagtacgatcggaatgaaatggatagcgttctcggcggatctgaatcgcgatttgttcttcttcccgggatgagagttgggatcgtacctaggcaaaagaaggtggctatcatccgaatctgcggaggttttaattcgcggcggagatggtga

SEQ ID NO: 152935 - DNA, 1655 bp, Arabidopsis thaliana landsberg
atgagagatagaatggagagactagtggtgcttcctttctccatcggatgtatctccgactcaagtgttgccgttttatctcctctctctaagcctcatcatcatcactctcgtcaaggttcattccctctctctttttaaatatcatgtatatatatattgaattgatatctcatgtatcttctattgtgataccttgatgtgttttcaaaagtgattcgtgaacaagaggaggaagataacatgaagaatgtattcaagttccttgcggtttctaaaccggagatttctaccggtattaaccggcttttcaagagcttcaagaccatttctcaactctttggtaatattgtactctaataaatgttgtctaattatcagtatgttacgaaataataccatttatacgtattggcaaaatttaacaattgctagaaccagttttacatgttcttttggttcatatagatcctagtacatgtgtcctcactctttaacatttataagttggtactatcttttcttccaaaaatgttagctgacaaagaagaagagaaggaagaagtcgagacatcaggaatggagataggagttccaacgaacgtaaaacatgtatcgcacatcggttgggaaagcggtctaaccgcggctacaggtcctggtaaaggatgggaagatctcataccgccggagttgcttgcagccgctgcttcaaaaaaagatgttaatcctcatcttcatccaactttataatccactccatctatttaaattttatttgatgttttgtttaagaatctagacatattttgatacataatgatatatatggtgaatctgatctatgatataaactatgttatgcggtaaatataatcgttatgtaaatattttgtatgttaatcataagatatgatattagtaccatacattatcaacattgatatacgttaatccaaattaaattttagaaacagttgaatcatattgtggggtcatcataacgaatctttgatctattaatagaaaattctaaaaattgactcttttagtcaaaataggaaatttcccaatcggttcaacgaaaagttgaaggatgtaacaacgtgtcataatctggtgagagattacagcgaaaacaaaacattcccttaaaaacctgaagaggatccaacaagaacaatctctaatggcggtttttcaaaggtttaacaatttttttccaaatccgaaaaaatctcttaacaaaaaaactccttaatcttcgtcatctttttgtctctttttaaaaaataattaaaccccacttgatgattatcccattaatcatttaaaggtttttttttttctttttgttcaacgaatctctatctctctctagattttggggattttgctctctctccctctctgtctctctttggtgctcgtagctttctgtctcccaattgagagaaggagggagatagaaacgtcgatgggcttaattgtggatgatgataacgatggagaagttttgattccgccgccgaatttttcaatggtagaagatggaatttaccgatctgggtttcctgagctggagaatttcggattcttaacaaccctaaatcttcgatccatcatgtaagattctcttctttcattcttctaat

SEQ ID NO: 152936 - DNA, 1193 bp, Arabidopsis thaliana landsberg
gtgaagtctaagggaaacataattgttcctccaaaagcagaattaaatttgtggtagatacttctttttaaaattcatatagctcaaaaaagttgtcgtttttaatattggttttctggtggtgatatatgctcttaattacccaattccgtacgatttatgatcataagtcaacttttgagatttgggttcgtgaaattttcctgaataaaattatgggtttagggtttttatgatcaatttttcctgatttttttcccccggggattttggtgaggaacaggatagaaagtcttggttttgttctgtttattgtgtttgtttttgggttctgatcaatgaagaagatgattgggagtcctggaacaatgagtgggttgtttctgagattagggcaatgtgcaactgctgctgcttccattggtgttatggtttcttcttacgacttctctaattacactgctttctggtaattgtctatcttcaatctcattggtgttttggttttgtttagttgaagatataccaaaaatctatcttaactttgtcttgtatacctgtttgaagaaagagctaagagaactagttatcgcgtatgatttgtagccgtttgacatttgcatggatctttgacaattattctgtttttgtttggtaaaaatatgtgtaaatgggattgtttatatattttgactactggatacggttatctcaaaagatacaagatgatgaaggcttttgctaatgatttcagcttcttagtcgcatctatgggtcttcaattgatatggagctttggacttgcgtgtattgatgtatatgcgataaggagaaaaagtgatttacgaagccctatcttattgagccttttcactgttggtgattgggtaataaacttatctccatttcattatagctagtaatgctcattcactgttggtgtcttgttgttttaaaggttatgtgtttgataggtttcttttggaattctgcaggtcactgcacttctcgctcttgcagccgcgtgttcctctgcaggagttactgttttattcactaaagacactgagttttgcaggcagcaacccgctctctcttgcgataggtttcagatttctgttggtttatctttctttaattggtttttagctgctatatcgtctcataccatgttttggatcttgatatgatat

SEQ ID NO: 152937 - DNA, 1381 bp, Arabidopsis thaliana landsberg
aaggcaagtcttacagttgtaagcactgcaagacccatcttgctctctgtgatgatgtagtctctaaggtttgaatctgagctaaatcttaatttgggttattggaatttatctcctctgatgatcatatcatcatttggggtctcttttcactaggattgtgttttgaaaattgcataaattagatgatctaatttgattgccaaaatcatatactttttgatgatatctggaatctggatgatcatggatacattaatcatgatcagttaaaaaaaggagctagaattggggatatactgactgttctgcattctcattagatcaacttatgcttcaaacattgttagactctttctcagtgatactggattgcgattagatgctaaatgcaatcgattagtctaagtgcttatggttcagacattgtaagactctttctcctcttgtaatggtgaaaagatttgcaatgtctcttagtatttgtggcatatagaagatactaaagacattcctgcattctctttccgtataatgatataattggtggttaagctgtgttagatgctgctatatgcaatcgattagtgcttatggttcacttcaatacattggaacactctctcctcatttgatttggagtgtgtggtgtttcttgctttttttacatggctccacaatttcattttgttatgaatctcttctacttggcttcacaatgtcttagtattgtggcatatgcaagatactgacaacatcttgtttgtctatttgtttacagtcttttcagtcccgacatgggaaagcttacctcttcagtaaggtgtaagttttcttctccaagtttgatctggtgttttttgctagccatatttgaagaaacccgaagatccttttgatggataggacgagctatgcattttcaccagttatggatttgtgtgaacagagtgaatgtgtatgctggcaagaaagaagataggatgatgatgacgggaatgcatacggtggtcgatatttactgtgtcaaatgcggctcttatgttggatggaaatatgtatgaaaacatcaaaatgtttattcttattcttcctctcttggtcttctgcattcggctcttgcttgctaatctaatctaaccaattattgttgttcaggagtttgcttttgagaagaatcaaaagtacaaggaaggaaaatctgttctcgaaaggttaatacccgattaatcataaccgctgatgtatcttctttgacagagatacttgagatgatgcatttgttcatattcttgacaggtacaaggtctggggtccagatgggaacaattattgggtggctcaagaagttgaagccggagacagcgattctgatgatgct

SEQ ID NO: 152938 - DNA, 967 bp, Arabidopsis thaliana landsberg
caaaactctcgtttcctcttttattcagagcccaagcaaagtcaacaccaatcagatttcccgtcataagagcttcatcatcttcgtcggcgtcaaatcataaaccttcactgcttaaaaccaccttcatcagcctcaccgcagccgcagctctgttctcagcatcgttttacttcgtcaacaaacgcgccgcgatgactccagttgctgtggtagagacgacactcgagaagcacctcgagacacaatcaaacgatgtgaatgctttatcattgctgacggaaatcaaatttaagtccgataaacatgagcaggcgattgtatttctggaccgtctgatcgagatcgagccatatgaacgaaaatggccggctatgaaggctcggattctctcataccacgggaaaagtgaatcagcaatcgaagctttcgaggagattctcgaaaaggatccgatacgcgtcgatgcttatcattacttggtgatggagtattacaactctaaacctaaattaacagagatagagaagaggatcaacaaagtgattcgaagatgcaagaaggagaagaagacgaaagagattctcggtttcagaatgttgatcgcacagattaggtttattgaaggaaaatcagttgaagcaattcggatttgtgaagagctagtgaaggaagatccaaatgatttcactatatatttgtttcaaggagtcgtgtatacattgatgaataagggagaggaagctgcgaagcaatttgagcatgttgctagggttataccaaggaatcacccgtctagagagactgccgcgaggaccacgaactcaaatgaatggagagtcatcgtagcttacgataatgtctactgctatttatctacatttgctaggctttccatggcttctttgtttaataagtttggctaagtatggtggaaattgaaaaagttcaaaactctctattgatt

SEQ ID NO: 152939 - DNA, 1132 bp, Arabidopsis thaliana landsberg
cgtttagagaaaaacgctctgcttttttatcttctgccgtctcttttccgattcctctcaatctctctttcttcttctttttctctcgctccaaattccatgtctgtgtctctttcctcctccgccgtataattcgccggaaaaattatctccctttgattttcgaacacctccgcgaactatgcgcttcttttgcccttatcctccaactacttgtcggatctgcaattcttcttgtcaattcccaaccctaatcggagctaatcacacctctgctcgtttctcttctcgttagtctctgctccatctcctcctcagatttagggatatttgcttccaatttaacaaacaaaccaagagctattctttcgttctttattctctccgtcttgtaaagtagttttagcagtgagatacatacaaatggagacttccatggggaaacccagcttcttacggaatataatggttcgcgtgcttctctttggtgttcttatcatcgttgtgagatttgcttatgttgtcaccatcaccggtgaatcatgcaatcgcggcgacttctgcttcttctctctccctgagaatctcaactttgtcatctccggtgctgcctccggctcttctgctatcgacgccatcagatctacttcccctggggatgatctctacaccaccagggattggatcgaatccgtgcagttttactcctccatcttacaggatctgatcgcgacggtagtctatcgcctgaatcgaagacgctttgtgtagagacggcgattggacaagaggttcactcgctcagagagattggggtgaataacaccgtcgggatctctaagaaagcttttaggccgttggtggttagaggcgagggacatgctattccctttgagcataccgctttccatcttgtattgcccggtggtgtccgccttgggaagtcgctgaagcagttgggattcgccgatgagattactcgccccctgaagcccccagggtttgcggtggttcatgttggggttacagatgcggacagtttcaattcaaaccctcctcgctcccttcctgcagattggtgaagatgcgtgatagcgatggttttgatccttcgatgcttcatatcacaggt

SEQ ID NO: 152940 - DNA, 1254 bp, Arabidopsis thaliana landsberg
atgggatcttcttctgggcaaagtggatacgatctgtcttttaagatcttgttgattggtgattctggtgttggtaagagcagtttgcttgtcagcttcatttctagctccgttgaagatcttgctcctactattggtaatgaatcgttcgttctaaacagtcttagagctagaatcgtgactggtcagacttcaaatatctctttctcgacatgatttttttttgcattgaaggctagcttattgtttgtgagctagaccactgtctggtcaaaattcaaatgaagttgaagtttgagaacttgaagttttcttcttgatattctgtttgaaaataaactcggaaaacataactcttgatgcttatctgaatttgaagcctgcttgagtctgatcagtataacattgtaggtgttgactttaagatcaaacagatgaaagtaagagggaaaaggctgaaacttacaatctgggacacaggtaaaaaagcaataagagcaattcgagtttttggaacgtgtgtagttagttactacaaaactcatggtccatgtgatttcttgtttgtgattgttgtgtagctggacaagaaaagttcagaacattgacaagttcttatttcagaggctcccaaggaatcattctcggtaatgatatatgagatcatataattgtcagtagctgttgtcgtaataagttctcaagacttgtattaatactctctccggattttcttggtcatggtgcagtttatgatgtcacgaaaagagagacatttttgaacttggcagatatttgggctaaagagattgagctatattcgactaaccatgactgcattaagatgctcgttggcaacaaagttgatagagtgagtagcagtagtagtaacacttgtagtcaaacaacttgagatcggtttcactgatagttgtcattgcaggaatcagaaaggaaggttagccgggaagaaggaatggctctagcgaaagacctcaattgtttgtttcatgaatgtagcgcaagaacccgagaaaacgtgaacggatgcttcgaagagctagctttgaaggtaagaaagaatcttgatgatcccttttcactttcaaaaccggtcgaaactgaggaaaataaataataggagagttgcaaaatgaaacagataatggaggtacctagtcttttggaagaaggatcaagctctgtgaagagaaaaccggattaccgagctcatcaaggccggtgttgcagctc

SEQ ID NO: 152941 - DNA, 1146 bp, Arabidopsis thaliana landsberg
atggattcgcaagtccagttctttgaaggggtcgaaaaaagaattgaattcgattttgcaggaacgaatctccgcgatgaactcaaccgagccgtcttggagaagatcgtcaaacctgtggagtgtgtgatcgaaggggttctttccggagatcacgtagactcgtatctactttcggcgtcttctctatttgtttatgatgatttggtaatcataaaaacttgcggtgctaccaaaatcttcgagtgcatcaatgggattgttgctgcggtggttggaataagctaagatccatcaaatatacccgtgggtcttttttccgacccgatttgcagccatacccgcatcagcgaccttgtgacgagaaagatgtgttaggctcgtccctaaatcatagttctcttggaggaattcaagagaagactttgggtacgactcaacaatggtttatcatgaatgtccctttgtcttcttcatctaccaccggcaaaaaactaccaacgattgagatgtgcatgagagaattggatagagagaaggctgcacaatactacaaagatagagacgacggcagaaccatgattgataagtcaggtatataatcataccttgattaatgtttcttgactgatttctgcttattgagtctcctgagcttatctttttacgtttcttgtgtttcgctctttgctaaattgtaaattgttgccgtgaaaagtagtatagttctctagtttctttctttctgactttcatattaacttatcagaattgtgtgacttttctcttttaggtgttgggcaaattttcccagaggctactgttcatgcccatgagttcgagccctttgggttttctatgaacactgtagaaggatttgcaatttcgaccattcatgtgtccccacagccagaatcaagttatgctagtttcgaagcagttgggtatgatatcagcacagatgagaagctgaacttggtgattgaaagggtcttgagctgcttcagaccaaagcaatttactgtggctatctacaatggtggagagatttacccccaacttcagggctacaactgtacggaaaaaatcattctcccacttggcccaggtggtccagtctccttttttacattcttggctgtctaa

SEQ ID NO: 152942 - DNA, 858 bp, Arabidopsis thaliana landsberg
gcaccaatcgaaagagccaagcttttattgcagacacaagagagcaatatcgcaatcgttggagacgaaggtcacgcagggaagagaaggtttaaaggaatgtttgattttatcttccgtactgttagagaagaaggtgttttatctttatggagagggaatggaagcagtgtgcttcgttattatccttctgttgctcttaatttctctcttaaggatctatatagaagcattcttagaaacagtagctctcaagagaatcatatcttctctggtgcattagctaatttcatggctggttctgctgctggttgtactgctttgattgttgtttatccgcttgatatcgcgcatactcgtttagctgctgacattgggaagcctgaggctcgtcagtttagaggaatccatcatttcttgtcaacgattcataagaaagatggggttagaggaatctatagaggcttacctgcgtctctacatggtgtgattattcaccgtggcttatactttggagggtttgatacagttaaggagattttctcagaggatactaaacctgagttggcattgtggaagagatgggttttggctcaagctgtgactacatctgctggtttggcttcttacccgttggatacagttcgtagacggataatgatgcaatccgggatggagcgtccgatgtacagtagcacattggattgttggaagaagatatataggagtgaagggttggcttcgttttaccgtggagcactctctaatatgtttaggagcaccggttcggctgctatcttggttttttatgatgaagtgaagaggttcttgaattggggagggatctaagattaacaa

SEQ ID NO: 152943 - DNA, 2611 bp, Arabidopsis thaliana landsberg
  unsure (1)..(2611): unsure at all n locations
tgataagttatgaaaatgaaatgtttctcaatgctttgatgtcttatttgcaggaagaacatgagcgaataaacaagaatcccagagggaatggccacgagagatcaaaatcagtgtcagagagcagacaaagagaaattgctgaccagattccgtcacgttcctcgtcagtagatctatcttctgtgtttcatctcccggagggcatttctgattctgcgcccaacacttctttgtctgggctggagcactgtgctaatgtgtttataactgataccaatgagagctcgaagctgtcaagtaacggtcagcacaataatggagaggccaagtctatgcctttacaaattgacaatctttcggaaaatgcttcgcctcgagcctctgtgaatagtcaagatttgaccagtgatcaggaaccagagagtatagttgagaaatcaagaaaggtgaagtctgttcgatcatcctcggatattaaccggagcaatagccggttgagtttattcagtgaaagaaaagaggctaaggtgtatccaaattctacacacgacacaactttggagagcaaaatcacgaacttggaaagtagagtaaagaagcttgagggtgagttatgcgaggctgcagccattgaagcagctctctactccgtggttgcagagcatggaagttcatcaagtaaagtccatgcgcctgctagacgtcttttgaggctgtatcttcatgcttgtagagaaacccatctctcaagaagagccaatgcagctgaaagtgctgtctccgggttagttcttgttgccaaagcgtgtggaaacgatgtccccaggtatggtaatatctttctttgcataattactattctgagtgaactttctcagagttaaattttgtccgtgaattgcagattgacattttggttgtcaaacactatcgttctgaggacaatcattagtgatactagtgcagaagaggaactgcctgtttctgctggtcctggaccaagaaaacagaaggctgaaagagaaaccgagaaacgatcgtccttgaagtggaaagattcccctttgagcaaaaaggacattaagagttttggtgcctgggatgaccctgtaactttcataacagcgcttgagaaggtcgaagcttggatcttctcacgcgtcgtagaatcaatttggtggcaggtaatgttgctctgttctccctgtttcatcttttcattctctgaaccaattataattcacatgctctttttctttggttgcagactttgacaccacgtatgcagtcttcggcagcatcaactagagagtttgataaaggaaatggctctgcatcaaagaaaacttttggtaggactccgagtagtacgaaccaagaactaggtgacttctcattagagctttggaaaaaggctttcagggaggcacacgaacgtttatgccctctgcgaggtagtgggcatgaatgtggctgcttgcccatacctgcgcgtctggtaaacatttctccttttgagtttgtcacttttggaccttactcttgatttcacaaacgaatgtccacgatttgtaacgcagattatggaacagtgtgtggctcggctagatgttgctatgttcaatgctatccttcgtgattctgatgacaatttcccaacagaccctgtatctgatcccattgcagacttgagagtcttgccaattccttctacaacatcaagttttggttctggtgcccagctgaaaaactcggtcagtgtactcaactcaatagcttggcaatgcttattatactgtggtctctgtaaagctcatgcatttctaatttcaaacagataggaaactggtcaaggtggctcactgatctgttcggcattgatgacgaagatgatgacagcagcgatgagaatagctatgttgaaaaatcgttcaagacattcannnnnnnnnnnnnnnnnnnnnnnnnaatgatgcttccaaaagatatgctcctcaacagttctgtgagaaaagaggtgcaaatgcaacataaaactcacaacacttttttttatatagtcttctttcttttacttgatataatatatttcttctcattgtgaaggtttgcccgatgtttggtgccccgttgattaagagagtgttgaataattttgtcccagatgagttttgccctgacccagttcctgatgctgtactgaaatctcttgaatccgaggtgagaccatttttataatgatggatctaaggctaagcagctaattttgctaacggaaacgtgatggcccttgtaggaagaagctgagaagagtatcatcacaagctatccatgcactgcaccttctccagtgtactgtccaccttcacggacttcaatctccaccatcattggaaactttggacagcctcaagcgccgcagttaagcagaatcaggtcttcaattacaagaaaagcgtacacaagcgatgacgagcttgatgagctgagttcaccgttggctgttgttgttcttcaacaagcaggttctaagaagatcaataatggtgatgcagatgagacaatcaggtatcaacttctcagggagtgttggatgaacggcgaatga

SEQ ID NO: 152944 - DNA, 1147 bp, Arabidopsis thaliana landsberg
tttcttgattccttcctccattacacttacgagtctttcaccgggagcctccacattgcttatcgccacactaagctcacctctggtaaatgggttgcttgggctgtgaacccaacgtctacgggaatggtgggagctcaagccatcgttgcttatccacaatcagatggtactgtcagggtttacacttctcccatcagaagctaccagacgagtctactagagggtgatctgagtttcaatgtctctggtttgtctgcaacttaccagaacaatgagatcgttgtgttggcaagtctgaagcttgcacaggatcttgggaatggtggaaccattaacacagtgtggcaagatgggtcaatgtctgggaacagtcttctgcctcatccaacttctggcaacaatgttcgatcagtgtcaactctcaatctggtctccggtgtttcagcagctgcaggaggagctggaggaagttccaagcttcgcaaacgcaatgtgagttgaatcttttgtggacacacatctctttccctaattttttatttggcaacaacgaataatgattgattttggtaaaaaaatggttggcagattcatggaatattgaatggagtgagctggggaatcatgatgccactaggggcaatcattgctcgatacttgagagtagccaaatcagcagaccctgcttggttctacattcacgttttctgccaggcttctgcttacatcattggtgttgccggttgggcgaccggtctcaaactgggcaacgaatcagccgggattcagtttacctttcaccgtgctgttgggatcgctctcttctgcctcgcaacaattcaggtaggttttagttaacagtacagagagtattacacttgtcatgaatatgttgcaattactaagttgcttgtttcacacgttaggtgtttgcaatgtttttgagacccaaaccagagcacaagtacagagtctactggaacatttatcaccacactgtaggctattcagtgatcattcttgcggtggtaaacgtttttaaaggactagacatcttgagccctgagaagcagtggagaaacgcttacaccgccataatcgtagtactaggtatagtcgcggttgtgctcgaagggtttacttg

SEQ ID NO: 152945 - DNA, 667 bp, Arabidopsis thaliana landsberg
gttttcctcatttttgttagcatacacatcatcaaccaatattgtgtttccttgacctttattaataaactgtggctacataggcatttttgttcaatgactattggaaggatattggaaccataggttcattcttgatgccaatttagcctccacggaacaggttttcaccgcttctttattgtttcatctccagtgcagggtggtgactcagtgaaacctaatcatgctatttgtttctgttttggcagcctcctaaattccaattctacgatcaaaaaacaccctttttcacttctccaagattcttgccacctaccaaagttgataaatgcagggtacaatatcttgaattcgattatcccgttgtttcagctaatgattcatcgatcctcatgttgtaaagtgtattatggaattgcagatacttgattccatagtttcacatggatgcttcatgagagaatgcagtgtgcagcactcaatcgttggcatacgatcacgtctcgagtctggagtagagcttcaggatacaatgatgatgggagctgatttctaccaaactgaagctgagatcgcgtctcttttggcggaagggaaagttccggtaggggttggccagaacacaaaaatcaagaactgtatcattacaagaacgccaaggtcg

SEQ ID NO: 152946 - DNA, 3205 bp, Arabidopsis thaliana landsberg
aattggagaatgatttcatgatatctcttcaggctgaggttaattcatgactcttctcttttatagtctctcattaataagaagcactcagatttgttttccttacttaggctatagagagtggtgaattggaggctatcaagcctctgccttggtatcctaagaatcttgcttggcattctaatttttcacgcaaggagattaggaaaaaccagacacttgagaggtacattttcactgacatatgaatgcttctagtcactttatattattagaatgacctattcaggttacttaggcaattatagagactctgtgaacggttaaggaactagtgtgtttgttgtgctatacacatgatgggttcttctttgtggtctattcaggtttcatgagtttctgaagactagaaaatgaagttggaaatattactaggcaggaagctgttagcatggtaagatagcttcaaactcgcttcggcctttagtacttctttgttggtacaagagaacttataaacccgtgttaaatttaatcatgcaggtacctcctctcttccttgatgtacatccagatcattatgttctcgacagtgagtgaactgtattcaacattattacagatggctatggacttgaggagtaatataggtaactgattcacttgtctgaacagtgtgtgctgcacctgggtccaagacatttcagctgcttgaaataatacatgaatcatcagaaccaggatctctacctaatggaatggtttgtaatactctctcatctttactcatttctttggtggatagatcatgtttatttctaattttgtttggttgaatcaggtggtggcgaatgatgttgattataaaagatctaatcttcttattcaccaaacgaaaagaacatgtacgaccaatttgatggtcactaacaacgaaggtcaacatttccccagttgcaacaccaagagaaccttgtctgtagcatctgagactaatcctcatcccatcgatcagcttctttttgatcgtgtcttatgtgatgtcccgtgtagtggtgatggtactctgcgcaaggctccagacatatggcgaagatggtttctctatttatgagtttttaaattgacatgtgttgattccaattgcttcaagattcttacttgttttcctcggtttctgcacaggaattctggatctggcaatggacttcatagtctacaggttgtgcttgccatgagaggtaagcttttttctcagatgatccgagtctcagaatcttatgttttgatttttatctgcattgtatggtttcaggtttatctctgctaaaagttggtgggagaatggtatactcaacctgctcaatgaacccaattgaagatgaagctgttgttgctgaagtaatttgatagtttcttcttctttctccgttgacctattcttctggatactgatatattgttagtattcttcagattctaaggaggtgtggagactctgttgaacttttagatgtttccgataagcttcctgaacttatacgaagaccaggacttaaggcatggaaggtcggtttctaccttcattaacgagtgaacaaaccctcagctctagaatctaatgggattactcatcttttttttccttgtctttgttaaatctaggtgcgtgataaaggtgggtggtttacttcttacaaagatgttccacaaaaccggagaggtggagttcttgtgagcatgtttccttctgggaaatacctcaaggactcaactgaaaccacggaaaagaacgagaatggtgatgttaatggctgtgaggatggactcaaagaaacagatatttctgtggtggatgctactcctgaagaacaagctgaggaagtctctgatcttccacttgaacgttgcatgaggataatacctcatgatcagaacaccggagccttcttcattgcggtccttcaaaaaaaatctcccttaccaggtgaactttctttttttcttggtgaacttcagattcttacattaacagctatggttctgtagaacttataaatagtttactcacagaatttcaggagaaaccaaatacgaaaaggaactcaactgctaagtctactgactcgacagaaaagtctccgagtaaagaatctgttgttacagtggatgctggtgtaccagatgagagtgcagtggagaaagttattgaagcagattcaaacattgagaaaaatgatagcttggagcctgagaagaaaatcacagaaggagaaagcatcacggaagataaagaggccaattcgagtaatgcggtaggcaagagaaaagtaccgatgcaagggaagtggaaaggctttgacccagttgttttcgtgaaagatgaaacagtaatcaatggcatcaaggaattctacggtatcaaagatgaatcatttccattacatggtcatctcgtggcaagaaacaccgatcacaagcagcgttaagaggatttactatgtttcaaaatcagttaaggaagttcttcagttgaattttgcagtcgggcagcagcttaagatcgcttctgttggcctcaaaatgtttgtaagtaaaaaattcttttccccacttatcatttcggttgattaagcacaagctccagaagtgaaacttaagaatatttgcaactaattgaaacgcaggagagacaatcggcaaaagaaggttcaagcacgctgtgcccattccgtatatcatccgagggactacctgtgattcttccatacattaccaaacaagtactttatactccaatggcagacttcaaacttctcctgcaagacaaatcaatcaagtttcacgattttgtcaatccacagttggcccagaaagcaactgaccttgttatgggaagctgcgtggtgattctcagcgatggtgcgtattgattggtcttcatagatatacatttgaatttgatcatgcaggatgtgatttatatggttttactggtgcttcaggtgaagtaccggtgaaagcggatgcatcaacaattgccatcagttgctggagagggaaggctagtttggctgttatggccactgtcgcagattgccaggagctgctagagagatttgccgagaaaacaccaaaaacagaaggtggttcggtaaatggaagcaacggcgattcgggcggtccactagctatggagacttaa

SEQ ID NO: 152947 - DNA, 823 bp, Arabidopsis thaliana landsberg
aatctctctgtcggtcggtcgtaaccaaaagccgtctcagaagaaaactcaactgcgaagaatatggcgaccgatgatgtgaacgagcctctcccggcggcggcggaattaccggcgacagaggcggagaaacaaccacacaagctcgaaagaaagtggagtttctggttcgataaccaatcaaagaaaggcgccgcctggggagcttctcttcgtaaagcctatactttcgacaccgtcgaagatttttgggggttcgtctttctctcttctcctttgatttcaatatttgtcaatgccttgctttgtaacttctaaatctgggatttgtatagaagctatggttattgtgaatctcgatctatgtgtatggatccgaaaatctaaggatgttaattttttggttattgttagattgcacgagactatatttcagactagcaaattgacagcgaatgctgaaattcacttgttcaaagctggcgttgagccaaagtgggaagatccagagtgcgcttatggaggaaagtggacttgggtttgttactgctaataggaaggaagctttagacaaaggctggcttgaaactgtattacattctaaccctaaccctaaccttttactcttctgtgttttgatagatgatatgtggcctttggcgactggttctatttcttatgatattgtagttgatggctttgattggagagcattttgatgaaccatatgagattttgtggtgtggttgctagtgttcgtccacagtcgaagcaagacaagctctccttgtggactaggacgaaacctaatgaagcttgcctg

SEQ ID NO: 152948 - DNA, 5075 bp, Arabidopsis thaliana landsberg
tcgacggagaaggacgagagagatgaaagaaaagagcaatgaaggcagatcgagaaagagggaataacagagaaacgaaggagatagcaaaaaaaacaaaaacgtgatttttctacttctacaaaacaaagcgcagtaaataataaaggaggagagaagttaccttaagagttgtgtgagttgatgtgacgtcaagtttcccggaggactacaagaaggacatagcgatccacctcttggagggcgatgcgcataactggtggcttgcggttgataaacgcaagggtgagcgtgtcgaggaccttcaaggacttagaggacgagttctacaggatgtactttccgtccgaggcatgggaccggctagagagtaatttcctgtatcttgtccagggtcatcgtaccgtccgtgagtacgaggaggagttcgacaaactcacgcacgacgtggggagagaactcgaggacgaagcgatgcaagtccgtcgattcctctgaggccttagggttaagttgaggactctttgctcggtctgtaccttcaacacgatctcggaactggttaaaaaggcggcattgatcgaggtgaatctcgatgaggaggaaaggatccgcccgaagtggtaatctgtagaatgaaaagaaaagaaagttcgaccaactcgacgataagaagaaatcgtcgggaagtcgggacgaatgctctcagtgcggaaagaggtacttgggcgaatgctggaaagcaaagggggcatgtgagaggtgtggcaatatgagtcacgacacccagcattgctcgcggacaggacaaaggcagacgagagggacgcgtgatgatgaaaagttgtgctaccgctgtggtaagacggggcattacataagggagtgcccgcaactacgggcggaagggctagttggtgagaaagtcaaccgcagaggtggtgagccatccgaacaggccaagagagccgctgtggcaccccgtgtgaatgaactgatgaaggaaactggcgaggccagtaacttcaatgcgttcttcggtaagtcactaagccatcctagtcaaatataaacattgcatggcatgtttggggtagggtactcagcattgaaggcgatgtatagggaccctacaaattggtggtattgagaccatggtcctattcgactccggggttacgcatagtttcgtgagcccgcggatgatcggaaaagggaagttccagaaggaaccaagaatggacccgaccgtagtgaatgcggcgggcggacaggctatgatccctgagggacaagtctgtgggataccggtgagtatcaaaggcatagaaatgccggttgacttgatcatcataccgcttgaaaaacatgaagtaatcttgggtatggattggttgggcaagtataaagcaacgttgaactgtcaccgaggaaaggtgcggttcgaacgagaaggagggaagttggaattccaaggaatccgacccgcctcgggaaagctagtagtgtccgcagtccaagccgagagaatgctccggaacggacgcgaggcctacttggccacaataactaccacggatggtggaacgagttcggaattggaggacataccggtggcaaaagacttcgcggacgtgttccagtccttgtcttgggtacccccagaccggtcagatccgttcacgatagaacttgagccgggcacctcatctctccaaggctccatatcggatggctccgccagaaatggccgagctaaagaaacaactggacgacctattggagaaagggttcatacaaccgagcagttcgccgtggggagcaccggtgttattcgtcaaaaagaaggacgggagtttccgtctatgtatcgactataggggaatcaatcgggttacggtgaaaaataagtataagtcgagttatttacgatagcccaagccatgaccaagttgactcggaaagaagcaaaattcacttagtccaaggaatgcgaaaagagcttcgccaagttgaagaatatgcttacgagcgctccggttctggttctgccggaagccgacgagccctatgtagtatacacagatgcttcaataaccgggctggggtgtgtactcatgcaaagggaaaaggtgattgcctatgcctctcggcagttgcggaagcacgagggcaattacccaacccatgacttggagatggcggcggtgatattcgcacttaaaatatggagatcctatctctatgactctaaggtgcagatattcaccgaccacaagagtcgtaagtacatattcacccagccggagttgaatctaaggcaaagaaggtggatggaacttgtggcggattacgacttggatatagcgtaccatccgggcaaggccaaccaagtcgccgacgccctgagtaggaggcgttcggaagttgaggcggaacggagccaagtggacttggttaacatgatggggacattgcatgtgaatgccttgtctaaagaagttgaacccttagggttaggagccgccgatcaggccgacctgcttagcaggatccggctggctcaggaacgggacgaggagataaaaggatgggcactaaacaataagaccgagtaccaaacctcgaataatggtacaatcgtggtaaacggtcgagtatgtgtgccgaacgatagggcattaaaggaggagatcctaagagaggcccatcaatcgaagttctcaatccatcctgggtcgaacaagatgtaccgcgaccttaaaaggtactaccattgggtaggaatgaagaaagacgtggccagatgggtggccaagtgcccgacttgtcaactggtcaaagcggagcatcaagtaccaagtgggttgttacaaaacctacctataccggaatggaaatgggaccacataacgatggacttcgtcaccggactgccaacggggatcaagtccaaacacaatgcggtatgggttgtggtagaccgattgactaagtctgcgcacttcatggcgatctcggataaagatggagcagaaatcattgccgagaagtatatagacgagatcgtgcggttacatgggattccggttagtatagtgtcagaccgagacacaaggttcacgtcaaagttttggaaggctttccaaaaggccttaggaactcgagtgaacctaagtactgcctaccacccacagacggacggacagtccgaacgaacgattcaaaccctcgaggacatgttgagggcatgcgtcttgaattggggaggaaactgggaaaaatatctaaggttagtagagtttgcatacaataacagttttcaagctagtataggtatgtctccctatgaggcgttgtttggcagagcttgtagaacaccgttgtgttggacgccaatgggcgaacatcggttgttcggacctacaatcgtggaagaaaccacggagagaatgaagttcttaaaaatcaagttaatggaagccacagatcgacagaaaagctacgccaacaagcgtcgaaaggaattggcattccaagtaggagatttggtgcacttaaaggcgatgacctacaaaggggcgattcacctcaaggaaaaagttaagcccaaggtatgttggctcgtactttgtgatcgaacgagtaggggcggtggcatacaaacttgaccttcctcccaaactaaacgcgtttcacaacgtcttccatgtgtcacaattacggaagtgtttaagtgatcaagaagaaagcgtggaagatatacctcccgggttaaaggagaacatgacggtggaagcatggccggtacggatcatggaccgaatgacgaaagggactcggggaaaatcaagggatttgttaaaagtcttgtggaattgtggaggccgtgaggaatacacttgggaaaccgagaataagatgaaggccaattttccggagtggttcaaggagatgggtaaagatcaacttgatgcggatttgaggacgaatccaattcaaggggggggagacttgtaacgcctgcaatcctcaataggatcgttgactaggacttggtccgagagaaaaaggtggagtctcggacaagtgagaaggagctggccataagctcggacaaaggggaaatcatgcaggctaagctaggatcgtaaagaaatcagctgggtcagctcgcccaaagctcaagctcagctggaaggagtgacggttactcaggtcgagtgacagtccagctcgggcagctggacgagtgacggttgagctcgaggtagctggacgagtgatggctgagctcgaggtagctggacgagtgacggatgagctcgaggtagctggacgagtgacggactagctgggcggttatgggcgaaaagatacaactctttggaaaggtgcaactcttcggaagggcacaactcttcccaaaggtgcaactctttggaaaggtgcaaggaacggatgtgttgattcgggaagcatccattcgccccctatataagggaggacgcccaaggcatcaacaacaacatccagacaccacaaaacattctcaaaacagtcccaacacatcctgaagttgttggtcggaaagggggtgcggctcggcgtgtataagtcgaccgaactgatgcgcatgctacctcctggtccaacggttcgatggagggtagaggatggagagggtagaccattcgccttagagacgaatcggatctggtagaccgatcgtcggttcagatcggccagactgatcgtcggatagatcggatcggccagacggatcggatctgacagaccgatcgtcagacgggtcagctgggacagtccgatcgtctgacggaacgggtcggacagaccgatcgtcggatgagatggatcgagaaaattgttcgaggaagcacaaggataagtgcattcgaacacacccaagggtcgcccatggatgcaatcttaccgataaagggagaaagcaccaagaatgggtaaggaacgtgattcaccatataggatcaacatcgcggccgccttcatgtatttatctcctcagtcatggtgaaaccgatcagagatcg

SEQ ID NO: 152949 - DNA, 642 bp, Arabidopsis thaliana landsberg
atgccctcacgaaaatctcaaaaactcacacggatccaaaattcagattcaccggattcgcacgaagaacatcatcgtcctcctccaaagaggagctttcatttccaaatctgtgagatctcagacactttctcctctcccgtattgttcgatcgcgttgaggttattgtaccctaaatcacgtgtaatacttatcgtcgcagataattctctcacagatcaggatcaaacatgggtttccttataacaaccctaatcttcgtcgtcgttgggataattgcttctctatgcgttagaatctgctgcaacagaggcccctccacgaatctgtatgtttccttgctttgcaaatttgatatttctgaatccttttagtaaattgacaatgttagtgagggtaatttggctacctatcattcaacggagttatgaatctctttagttccacaagatcgaaaagctgcatatcaatagttactctcttggtcttcttggaattgagaattgaacaaggaaatataaaaggctcaacatttagaggaaactccaaattctttgcattggttgcttgtcgtattaatatcttcaacgagctttcgtgatgtagacatagtactgttgtcacggtttcgtttcctgtgc

SEQ ID NO: 152950 - DNA, 2262 bp, Arabidopsis thaliana landsberg; identical to SEQ ID NO: 36830

SEQ ID NO: 152951 - DNA, 7879 bp, Arabidopsis thaliana landsberg
gtttaacgaagacccttctgttgctggcactgtccgcagcatatttaagagagatttcaaagaaccacatgttaattggacaatgacaccgcaactagtgatcactcgttggtttgaaacttttgctgtaagtgcaattggtgtcttgttatcttgtgctaatttagaaatttgagtgctttgtatttggctgttgtgtaaagatgatgtgactatgttttcttgtgttaattttttgacttgattgcactttttgatatatcttctgtctgttttgtagcaagtatacaactgggaccgtgcaataaactagagagttaggatatagtttgaagcaaagctgaaggataggatgtgcgatcaaatctctcactgtaagggaaactggaagcttgataacattgtattttactcattctagacatgtatttatcatcatttagcttagtgatcactcattttattatatcattttgcatcacatttagcttattttgcacacttaggcatttacgatcattttgtatacacattgcatgttttggtgttttcaggtgtagaaggagcttacaaggattctagtcgacccactactctatccaaccaggagagaagcagtagagaattctactcgacctattcactcgatccaggcagccacagaggaggcatcaattcactcgaccctcttactcgatcaagttaacctcagaagaagaagcagagcattttactcgccccttctactcgatcctctactcgacccatttactcgaccaagggtgaccaactctaccagacttggttatctatcaaagcgtctttgaatcctccttattccccactcaaccaaacatctaagcatacagataggagaggaagaagcatctactcgaccaattgattactcggagcatagacattaaggcgcagactttgcagcaccctctttactcgatcccgaagatcgagcactcgcccaaaccgcctcaagtctcttgtcttctagtgaatctagggttttcaacattttactataaataaatcactttgggatttgtccaaaggatctatgcttttatcctttagtttttctttgtgttcttgaatcttcaaaacttaattacttttaatctatttcttttttgcatttagttcttttagtaaagttgtttagatctacattttggtttgatttcagtaatttctgggtttgtgttcttagttatgttgcttgagtaaggattaggattcttgaagatggattagattagggtaatctctaggttactcaggtggttaagattaggttagatcccttctggattcgcttggcccctatgcggttttcgttgggtaatgtagagattcgatcatagacgttcagcgtccaaaagacgatcaagagattggctagtcttcttattggctttggtagattgttgcttaaatcctgctctactatgtttcatcgacgagagttgagattaggaagtggtagagttatgggggtctctgtcacgagagtagattgacccggtttttgaatctatcgtctagggtatctacctttcacctgttagccacctgatgaaccctagagttgcccttatgaatgaatccatccttaggacttctattcttcttagatttatttgtattcaccccctgattgcacttttatttacctgttatttgtatcccctgttgattgcattttagctcttaatactgtcacttgttggttctactcgacccaatgatcgagtagggctcttaaagagattatttttgttgtctgaatcctgaccacaattgttactagaaacagaccatctctataatctggcttgacttagttgcttatgtgcacatcttgattgctagcaatacagtggactggattgacaccctctataactgcatcgacatgtttttgttttaggggaattgaactgaatcacacacccttcagcacataagtaggcctaaaaacgtacttatcaatttggcgcagttgccaattcattgttgcattgttacattcaagatatcagaaaaagttaagattaagttcttttacatttatcaagttacaaactcattatttcgtctgcttgtttttgtggtataggtactaatctttgtgcatgcaaactcggtccaaaggttctgcacacctactaccattcagagacagaattgacagaatagctcgcgagttacaagaaaccaaagcaaaggcagcatgtgatcagcaaagaccagctgctatggatcaacagaacataccatttgatgttcaagacccacctaatgttgatcaaccaagaaacattggtgctggtgatgccccaaagaatcatcaccaaagacaagggatagtgcctccaccagttcagaacaacaactttgagatcaagagaggtctcatctcaatgatccaaggaaacaagtttcatggcttacctatggaagaccccctggaccatcttgacagttttgataggctctatagccttaccaagatcaatggtgtcactgaagatatgtttaagctcagactatttgccttctctttgggagacaaggcacaccactggaaaaagactctacccccagacttcatcacttcatgggacgattgtaggaaagattttcttgccaagttcttctctaacgctcgcaccactagattgaggaacgagatctcaggcttcacacagaaaaacaatgaaactttttgtgaagcttgggagagatttaaaagctacaccactcagggcccccatcacggtttcaagaaggcttcattattaagcacactctaacgaggagctttaccaaagatcagaatgctactcgacaccacctccaatggaaactttcctgaacaaggatgaagcagaaggatgggagtttcattatggtttttagagtctttctagtctttttcgtacgttttgagtcatttcacatacactcacacatttgggaactatggagcacaataaggaattttggaagcttttcagcaataaagatcttgaaggacgtttttcagaagctggtgtcgatcgacaccagacctatgtcgatctagactcttattgctgtcaagggaattctcgttttctaccaagtctttgagaagccctgaagtcttccttatttgtaaagtagtccatgcacgtttttagtcacgaatatacctaattgtttggtcattgttagacctaagttttgttttagttcttgtgacacatttttgagagaataatccaatccttttagagaggattctgaactcctttactattattcttaattcatcaaagcaaactattcagaatatgatttatgtttctattatcatgtctgagtaatcaccttgtttggtttagggagtctcattagggatttagatggattagtagatcgaaaaccccttaagattattcttagagttcttcatcttcattattcttattgctagttttagattgatcacctagaacttgatattagataatatgtatgcctgccataggtacttgttatttgaactatcataaatgagcctagacatttaagaaagaacaggtaggctcatagaagggctctggtttagatactaggtgaactaatcaagcttattaacaatgcatgctttagcatatgatttctcgacttctctggttatctagctttaagtatagagagtttcgcggaacgcccctggctactctagaatcatagtttgagttaaagaacggtgcgttaacaatcctaatattagctagatctacgatttatctatctcccgagaccattacttagacccgacgcttaaataacttgaatctacaactcatttacttgcttatttgtcttttacattcaattacttcatctagcttattaaacaacatcataagtctattgtgtgaacatcgagagctcagtggaattcgacccttaagtgctaacgacgatctcttatttgagggagtaagcttaaggcaatttgagctatatcaaatttggcgctgttgccaaatttctattttagttcaccattagactaggtgtcattttaagtctagatacaacttttctaccacctattcacatgtttctttgtcttttggtctcttgtgtttcaggtaccttcagattgagaatcacgttcccatggcagactttcacggttatgtcgaccaacaccatcagggtgtcgatctacaccctctgcagaaccagactgctacaataggcgattttaacagaattgacctcttctacacaaaccgatcagcattcaagctacctccattagaaagagatgactttgctatacaccctgcctattatgatattgtatcaagaggaaagtttagaggagctcccgacgaatcaccattagatcatttggaagtcttcgtagacatcgtttcctctattaaagcagacgggttaccatgctgatgaccttctttgcaaactcttcccccactctctcgcgagcagaggaacatcatggttgcgtcaactggaaccaggttcattaaccaattggactgatgcaaagaatgcattcatgaatcacttcttcgatgaatccatgatagaggcaattcgtttgcaaatctcttcattcactcaggcaccaacagagtcccttagagcatcttggctccgtttcaggtcttatcagcttgaatgtccctaacatggcttccaagagacccaactcatcaacctattctacaaaggaatagacaagccataccagaatcaaattgatgtagcgagctactgtaacttcatgacaagaactactagtgaagcattactcctcatcaccaatgctttaacttgtctttcgatgcagggatttgacaaagaacgaagaatttcagctgagaaagctatcaagagcaaagagactcctgttttcgcaatttctactcctatccaagccccgcctccaccctcatcagagaccagaatggagtctatgcttgtgcatcttcttgcaggcctaacaaagcttgatagcaaatatgattctctctccacaaagcttgatatcaactatgattctctctccacagatctcaatagcaagattgacaatctatgctctcaattctacaatctttcacctacatcaacttctatcaatgcagtcacactacgtagtggaaagcagctcaacctaatacttcagcgcgaatgatcagctcagccttcatcttttccaattgcatacaatgaatcagtgccgatcgatacaccagggtgtcgatcgacaccaattactctagaagactctgtttttcctttgtcgagtggaatcgacaatttcgcggaggaggaggaaactattcccgatggtgttgatcgacacccagctcctgtcgatcgacacccagctcgttcagacaatgtgcaaattccagctgcaaccaagtcagcgaatcggcgaattctcttccccaagagtcctaaaaaatcaagacaagccttagatgatgtcaaatgcaaggctatgattgataagctaattgttgagatgcctctagttgaagctattcatctatcgcccacaatcaaaaggtatgttaagacaatggtcactgagaatttgacgaatgaatgcagtgttatgatgatttcagagcagggcggcgacatcattcaggaacgaatcccaaggaagctacctgatcctggaacttttgtacttagtgtcaccatcaatcacgattctttcccaagagctttatgtgatctcggttctagtgtgaatctgatgcctcgttcagttgctatgcgtcttgggtattccaatcttgagcctacctttatcactcttgtgttggcatatcgttccacccgaattccagatggaattcttattgatgttcccatgatgattggaaagagcatgattcttacagactttgtagtcttgccttatgagaaggaacctaaggatccattaatcctagggagatcctttttacacacagcttgagcaatcatagatgttcgacaagggaggatagggctgaatgttggtgatcttactatgcaattcgatatgaacactttggtcaagaaaccgatcatagaagggaaaaccttcttgatagattctttcacttcctcagcttcagatagtatttcagagatggagatagagtatccactatatcgagctttgttctcttccatagaggatatggcggatttggacagtgaagcttctacatacactaagatgctagatgagaccgagcatgtgatgcaactaatatttcaagaagatccttcatctatgatttcaaaactaaatactaatgccaatcgggatccaaaaaaagctcctaaagttgatctaaaatctcttcctccagggctaaggtacgcatttcttggtgacaattctatttaccctgttcattgttaatgattctttaaacaagacaaagctcactttattgctaagcaagctgcgcaagtatcacaaagctcttccctattctcttgatgatattacatgtatctctccagacttgtgtatgccctcagttgagcatcataggattcacctcaaggatgagtctaagccctcagttgagcatcagaggagactaaacccgaatctcaaggatgctgttaagaaggagatcatgaaattgtttgaagcagggatcatctatcctatttcagataatgattggggtagtccagtgcatgtggttccaaagaaaggaggtgttacagtggttaagaatgacaagaatgagttgattcctacacggactgttaccggccataggatgtgtattgactacaggaagctgaacgctgcaacaaggaaagatcattttcctctaccattcattgatcaaatgctggaaaggttagctaatcataagtactactgctttcttgatggatactcaggattctttcagataccaatccatccagatgatcaggagaagaccacattcacgtgtccctatggtactttcgcttatcgcagtatgccgtttggtctttgtaatgctcctgcgatattttagagatgtatgatgtcgatattcacagacaagattgaggatttcatggaagtctttatggatgacttttctatttatgggtcttcatttgaagcatgcttggagaagctttgcaaagttctagctagatgtgaagagaagaatttggttcttaattgggagaagtgtcatttcatggttcaggaaggtaaagttcttggtcacaaagtttcaggtgatggtattgaggttgataaagccaagatagaggttatgacaagtttcaaggcactagatagcgtgaaatctgtgaggagttttcttggacatgctggattttacaggaggttcgtcaaggatttcagtaagattgtcagaccactaacaactttgctttgtaaggatatgaagtttgacttcaattctgagtgtaatgctgcttttaatcagattaagaatgccttagtgagtgctccaatagttcaacctccgaactggaatttaccttttgagatcatgtgtgatgcaagtgattatgcggttggagctgttttgggacaaaggaaaggcaataaactacatgatatccactatgcaagtagaacacttgatgatgcacaaaggaattatgcgacaacagagaaagaattgttagtagtggtttttgcttttgagaagtttcgctcttatctggttagttcaaaggtaattgtgcatacagatcattcagcactcaagtaccttatgcaggaaaaggatgctaagccaagattactacgatggattcttcttcttcaagagtt

SEQ ID NO: 152952 - DNA, 986 bp, Arabidopsis thaliana landsberg
cgagattcttaagcataagaatctctcaagtttcatccgtcagcttaatacatatgtaaagcttttgtctttgtatctcatctctttggggattggtgtttgctgcatcgctaagattaacaacctttttgtgtttttgtttgcgtagggttttcgaaaagtagatcctgagaaatgggaattcttgaatgatgattttgttagaggtcgaccttaccttatgaagaacattcatagacgaaaaccggttcatagccactcgttagtgaatctacaagcgcaaaatcctttgacggaatcagaaagacggagcatggaggatcagatagaaagactgaaaaatgagaaagaaggccttcttgcggagttacagaaccaagagcaagaacggaaagagtttgagctgcaagtaacgacattgaaagatcggttacaacatatggaacaacatcagaaatcaatagtggcatatgtttcacaggttttgggaaaaccaggactttcactaaacctcgaaaaccatgagagaagaaaaagaagatttcaagagaactctcttcctccaagcagttcacacatagaacaggtcgaaaagttagaatcttcgctaacgttttgggagaatcttgtatcggaatcatgcgagaagagcggtttgcagtcatcaagcatggatcatgatgcagctgagtcaagtctaagtattggcgatacacgacccaaatcatcgaagattgatatgaactcagagccgcccgttaccgttactgcgcctgctccaaaaacaggcgttaacgatgacttttgggaacaatgtttgacagagaaccctggatcaaccgagcaacaagaagttcagtcagagagaagagatgtcggtaatgataataatggtaataagattggaaatcaaaggacgtattggtggaattcagggaatgtaaataacattacagagaaagcttcttgacatgaatgaggttttt

SEQ ID NO: 152953 - DNA, 389 bp, Arabidopsis thaliana landsberg
tatccaccacaaaatctcgtcgacgcaataataacaaacccaagccatccaaaaccataagcgaaaacatgttgaacaaggtcttttctggcaaaacgctaacagaaatctaccataataagataaattcacacccacttactaatccactactgtttcttgaagatcagttcgtaaaagaagaggagacgaatcaacaagaacacgggaaggtctcgaacaaagatggtaagtccataaccgcgaccaaatacggagatttgaggcgtgatgttgctcgattaagcttgttgtggtacatgaaatgttccataagccatatattaaggaaggcaagagcgttttacaatgagttttgttgtgatacttatgctgagagtaacactatg

SEQ ID NO: 152954 - DNA, 1026 bp, Arabidopsis thaliana landsberg
gtcattcccgccatcgatctttatagtttcgatccttgggagttaccaggtaatatattaacttccaaaaatctatttaaagtattaggtaacttttcaaatttttaatatttttgtgattgttactttaagacaagtcgtttctcccaaaccgggacatggaatggtacttcttctgctcaagggacaaaaaatatcctaatggttttcgtacaaatcgaggaacaaaggctggttattggaaagcaaccggaaaagatcgaaaaattacttctcgttcatcttctataattggttatagaaaaactctagttttctacaaaggccgtgccccgttaggcgatagaagcaattggatcatgcatgaatatcgactatgcgatgatgatacatcacacggatcacaaaatttaaaggtaactttataatttgatcaagttctaaaatggtttcgtttcttttgatattgaaagacgattaagaaatgaatgtgtttaactatagggagcttttgtgttatgtcgtgttgctatgaagaatgagatcaaaactaatacgaaaatccaaaaaattccaagcgagcaaacaatcggatcaggagaaagctcgggtttttcaagccgagtaacgtctcctagtcgcgatgaaacaatgccgtttcactcatttgccaatcctgtatctactgaaactgattcttccaacatttggatttcacctgaattcatcctcgattcttcaaaggtaatgtgtacacaattctaaacatactaataactaactaaaccaatgtttgttaatcgtataccggcttaataatttttgtaggactatcctcaaatccaagatgtcgcatctcagtgcttccaacaagactttgattttccgatcatcggtaaccaaaacatggattttccagcgagtacaagcttagatcagaacatggatgagtttatgcaaaacggttattggacaaattatgaatacgatcaaacgagtttattcggttactcagatttctcctag

SEQ ID NO: 152955 - DNA, 786 bp, Arabidopsis thaliana landsberg
gaacacttggaagaagatgtgcccaacaagacccctttgcttttggttctaaacccgcttcacaagaaagttgcgggtcttgtccacaatgacaaaatattactcgagtcacatctgattctcgaatacatcgatcagacgtggaagaacaatccaattcttcctcaagatccttacgagaaggccatggctcgattttgggcaaagttcatcgatgaccaggtatactaatattgatttcagattaattgataaacatttatattaggattctatgcagaacaatacatgattcgtttgcttatattgttctttacttgcagatcctaacactagggtttaggtcccttgtaaaagcagagaaaggaagagaggttgctattgaagagactcgggaactgcttacgtttcttgagaaagaagtgactggaaaagatttcttcggtggcaagacaatcggattcttggacatgatcgcaggaagtattatcccattttgtctagctagactttgggaaggtataggaattgatatgattccagaggagaagtttccggaattaaatagatggatcaagaatttggaagaagttgagatcgtgagagaatgtattcctccaagagagaaacaaattgagcgcatgaccaaaattgcagaaacaattaagtctgcctaaattaaagatacttcttgcctccgaaaatatttgatttatatgcttgcattgtttattatttttatttttattttttaaagtttttcgaaaaatagaatgaccgtaatat

SEQ ID NO: 152956 - DNA, 606 bp, Arabidopsis thaliana landsberg
gggaagatgactcgaagctggtcgatggaattactgagaagatatcaacaaagttgttctcggaaaaaccaaggaatgataatatcctaattgggatcgaccaacacatgggggaattgtatccactatttaacctgaattcgaatgaagatgttcaagtaattgggatttggggaagaggaagtaatggtagatcagcactagcaagccacgtttaccagaacatcaaacatcacttcgaagctcattgttttctcgaagacgtgagacggatttcgctacatttccgtgactctcatttacaagacgagcttctttcaaatatgcaaggagaagttttgacaacaaagaactgtcataggtgtcttaagacgatcaaagcaaggctgacgaacaagaaggttcttcttgaggcgaacgatgtagacaagcttggacaatttgatgcacttgctgaagaatttagctggtttggccctggaagcagaatcatcataaccacacaagatagacaattgcttatttcatcagtagtgaggagtgtctaccaagttaagctcttgaggtgttacccagttcgtgagctctttaggtcaaatgcccttc

SEQ ID NO: 152957 - DNA, 1391 bp, Arabidopsis thaliana landsberg
gatgctatacttctttgaaatattatgtctctatggaaattggtagctgatggatttcgttattcctgagtgtcagatggtattatttgagtagctttaagtggttttcgaggtagaactctaaaaatgtaagattgtcttcatgtttcagtcatgggacacaacgtctatatccttaacagcgggatgtgatctattcatgcgctatgtgactcgaacatctgctttagaatttgaggacttcaactctgcgaaatcccgtgtgcttgaacgtgctgagaaatttggggaaatatcttgcaaggtttgtgttctcttcgaacggaaattgtttacataaatagttagtagaagaagagtttgaacagtaactggaaattttgcaggcccgaacgataattgcaatgcttagtcaagatttcatatttgatgggtgtactatcctggtccatggtttctccagagttgtgtttgaaatactaaagacatcagcgcaaaacaagaaactctttcgagtgttgtgcacaggtacttttcgtaagacagagatcaattggatctgacatcttccagttatctcattatgattttcctaactgacaatcacatttccgttgcacccatggaaacaaaatacagagggaaggccagataaaacaggtgtactgctagctaatgagcttgcaaaacttgatattcctgtgaagcttctgatcgattcagccgtggcctatagcatggatgaagtagacatggtgtttgttggagctgacggagtagttgaaagtggcgggataattaacatgatgggaacttatcaaatcgccctcgtcgcacagagtatgaataaaccagtctatgtagctgcagagagttacaaggtaacctctcaaaactttaaaagttgtaaacttgattgcagaaacatcaatgatccatcatcctctttcttgttttcttgcaagcgaagtttgcacggctctacccgttggatcaaaaggacttagaaccagccttgcgacctattgatttcagtattcctgttcctcataaggttgaggtagaaagatctgcaagggactacactcctcctcagtacttgactctcctcttcactgatcttggtgttctcactccatctgtagtaagtgacgagctgattcagctttacttgtaactgaagctgtcttattcatatagctggtctgaaatctctcttttttttgtataaaaataaaaataaaaacaccattttttggctatacacagccatagtttgtctctgattcttactgctaatgcacatgtttttggtagtagcgagatcatcataagattgatataagtttttatcatttttattattgttagaattatttgtggtttcttgc

SEQ ID NO: 152958 - DNA, 2843 bp, Arabidopsis thaliana landsberg
  unsure (1)..(2843): unsure at all n locations
gattctttctttgagcaaaaggatgatcttgaacctgtggtaaaaaaaaggcttttgaagttccctaatgttggcaatgatttgaaccaggtaatgtgatacttctttactctagataggtttggtttacgagtagtaggatttgtagtgaaccctgaactcatagctagtcttatgcgtgcaatgtctttatgttctgatgtttcgagttttatgcacttttttgtagcttttgaaaatgattgatgatggacaagcggttgatataaagggtatttctgagagcactttgaagaagaggttgaagaagttgtttctttctttgaagttaaaggaacgtggggatagagtctttctattaccaccaggtgcttctccttctttagatgaagtggggcatcttattaaaggcggtgaagaagaagtcaagaaaagccttgatgattctgccccattgaagaacactgataagggtttgccagatgataacggtttgggatcgaattcagctgatgatgttactggtccaaagaaaaggtgatttacgctttctctttgtggttcacttgtgtgcttgatattagttagttaatcgattagatctttaagggggtctagactctcgaggataaaacataatggtgttataatttgattgtagggtgattggacctgcaatgccatcggcggagttacttgctgcagcagcaaagctaacagaagctcaagatgaacttaggtacttttatctaattatcagctcaaagtttatagtcttgttattttatatggaataattcgtttaataaatattcattaatatgcctcagagaagctgagctagaagaagattcacaatatttcattggacctgctccaccagctgttgttgcagaagttgcatcgtcaaacgaggcagagcgatttgaagaggttcttagttttccttctggcattatcaatacaattctttgttttacaaagtttctggatagcgtattcgctacagtagcaactcatacttcttgcataaacaggtgacacggattatggaagctgacgttaatagtccatatgacgtcttaggagtgaatcacaatatggctgctgataatatgaagaagaggtatgtactctgttacactttttggaatcaagaaaaatgattattagtcactaaataactgcgctcaatcatttcacacaagttaaagtaatcagttacataattgatattgacaattctggtctgtaggtactggaagctgtcgcttcttgttcacccagacaaatgttctcatccccaagcccaggaagcttttgttttactgaataaagctttcaaagaattacaagatccagaaaaggtgagataatgaatcatctactgtctgattatctttcaatatgctctcatagacttactgattcatgtggccatcaatcatttctttatgtgtgttcccttaccatctctttatttcccctttnttttaatctctaatgtattaatgtctacagagaaaagcaatggatgacaagattaaacttaaggaagaacaggaggcatttaaggttggtaattcgaccggattgatctatgtaatctttcaggataaatctgtggttttacttacatagacacgctatatttgccctgcaggttgaattacgttcaatgcaagaagcagcacagtggagaagatcacaaggtgaagatcaatcattgtgtcacgcaggctccttaatctctttgcctttatgggatgaaagaagtaatagagcttttttccggtttgcaggcatatcaatggaaggtgatgcagagctgctggcagcaaccgaagttaaacctatacctaaaagagacgagtggatgaccactctgcctcctgaaagaaaggtgagagatccacaattgattgaaaaacgcttttgaattgttgggtagggttcgaactttaaatcttatctgtggttcttctttcgcaggttggagtggctgtgcaacaatcaaccacgtttagtagaaatgctagagaaggacgcggagacactacagcctggactgatactcctatggacaaagctgaaagagcaaagatgaagtacgaacacactatttttccaatctctcgctagcacttgttacctacatttcacgatgttgttttgtcatgaaagcaaaacacattggttctttttgaagaagttcagctactaaaacttatacttaacctatacgtctactatagctagcctagtacttaatgcgcgattgttgttgttgtgagttggtaagataatagccataagttagggatggattaatagggctttctctgcataagttagggagtggattttcaaggatttggtcacttagttaaggtttcatacctttgttcttattattgttcattctggtgttgcagttacttggaggcatacaacaaggcgagtgcacttgcatcaaacgaaggggaaaatatgaaaagaagcatggatgctgagcttgtggacaagtataacaaagagaaaagagcaaagtctctggtagagaagcacagagaagagtcttcttcttcttcaagccgtctgaaaaagaagaagaaattgtcttcatccaaagagaaaaccgagaaggacgagtggatggggaaacatccgtggaagccatgggaccgtgaaaacgaccttactgctgggagacagaatgtgaaacttgatgccgatggtatggctgaaggtttggcttccaagttttcttctgggaatttccaaagaagctttctttagggcttgttgcaggaaacttgttttactatataaagtatccaaat

SEQ ID NO: 152959 - DNA, 1505 bp, Arabidopsis thaliana landsberg
gatcccccatgtactatatgtataacgagaaaattattatgtagttgtaagtttgatataaggacgaaaatttctctattttgtcttttcaggacatctgatcattctattaatttaatgagaaaaatgaatgttttgtcttgtttaacatttgttttgtttggtttgtcaaacatgtgtggatgatgcatcaacaacactaacacgaaccactacaataaaggctcaaccactgaaacgaaatgtaaacaacaattccgcctctaaaaacattcctaataaaattaagccttgaaccaaaatgaaagaaaatacaacaatataattaagccagaaaatgaagttcataaccaaaaataaataaataaacgtaatctataaccgaccttacaaaaaaacacaaaatcttgatctacaattttattccaaacctcaaaaaaatatctcaaaatcgacaaatctcaaaccctagaaattttgagaaaaatcatttgtttaaaagggaatttaaaatggatgtcaaaacgacgtcaaacacacatgttatgccgtttattaattaactcagtattaccattacgagtgggcttttttaatcatggggcccttttatttctcttacattggtttaaactatgttcattttgtggccttgtgggcttttattaaagtttgaccctttttgttgatatttgactttcttttgtatgataaattctcaatcaaatctctgagctttcagatatactctgatagagaagaagagatcagctgagcaacaatggccaccgcgatacctctcttcgcctctttcaagtacgccgatagtctcaccgtcgtcggaatctctttctgcacggcgttggtctgcgaagcaatctcgtggatcttaatctatcgcacaagctcgtacaaatcgttgaaatcttccattgacaaagcctctaagaagctcgagacgatgaagacagataatccttcctcgaagctaacaaacaagaaatcgaagacgaagaagatagatcgcgttgaatccagcttaaaggaatcgagcagagatctatcactcttcaagtttaaatctggtgccgttgtggctttggttctctttgtcgtgtttggattgttgaattcgcttttcgaagggaaagtggtagcgaagcttccgtttcatccgattacgattgtgaggaagatgagtcatagaggattgaaaggcgatgattccactgattgttccatggcttttctttatctgctttgttctattagtataaggactaatctgcagaagttcttgggtttctctccacctagaggagctgctggtgctggtggtttgttcccaatgcctgatccaaagaccaattgatcaggtttgatctgatgatgaattggactctgggttctgagctcgatgctacgctgaaattctcatagataacttcattgctctgaggtagcggtttttttttcagatcgccagatgagaaacactttcatag

SEQ ID NO: 152960 - DNA, 3165 bp, Arabidopsis thaliana landsberg
ctactattactattactactgctacttctactctcaatttcacaactctcttcctcctcctcctcctcatcttcttcctctttctcctcctcttcctcctttacttcctcttcctcctcctcactcaatgacccgtttccaaaaatctctccctgtttctcaaggtgactaatctatcttttttcttgttcttggtttattctttgcatgttttgttttttcatggcttaaaggtttaagatcctcacctatgtctgaattagtttatttttattagacgaggttttcaaggctatctcttgttcttcttgttttggtgtgctttcccacacagactctagtattgtgtaatgtctaaatggtcctccttctctgtagtctgtacaatattcactttactttaaatgttctctttctttaatgtgttaatgtctgaaaacaaactctctgtctccctttaatactctctctattggtactgatttacttgcatctttttgtaagtttctaacaacaaagtgagtggatccatagcaatagaagaagcagcattagtggttgctaaaagacctgactttggtggtcaagatggttctgttatttacctcctcgccaaccattttcttgtcaagtttgattcttcacagaggatttaccattacaacgttgagatctctcctcagccttcaaaggaaattgctcggatgatcaaacagaagcttgtggagacggaacggaatagtttctctggtgttgttccggcttttgacggtaggcaaaacatttacagccctgtggagttacaggaagataggcttgagttctttgttaatctccctatcccatcttgcaaggctgtgatgaattacggtgacttgcgtgagaagcaacctcagaagaagattgagaaactgtttagggttaatatgaagcttgtgtccaagtttgatggtaaagaacagagaaaggaaggagaggattgggctcctctgcctccagaatacattcatgctcttgatgttatcttgagagagaatccaatggagaagtgtacatcgatcggaagatcgttttactcgagttctatgggtggatctaaggagattggaggaggagctgttggactcagagggtttttccagagtcttagacagactcagcaaggtttagcacttaacatggatctctcaatcacagctttccatgaaagcattggagtaatagcttacttgcagaagcgtcttgagtttctcaaggaccttcctaggaacaaaggtagagaattgagtctagaggaaaagagagaagtagagaaagcacttaagaacataagagtctttgtttgccatagagaaacagttcaaaggtatcgagtctacgggttaacagaggagattacggagaatatatggtttccggatagagatgggaagcatctaaggcttatgagttacttcaaagatcattatggttatgagattcagttcaagaacttgccgtgtctgcaaatcagtagggcaagaccttgttaccttcctatggagctatgcatgatttgtgaaggtcaaaagtttcttgggaagcttacggatgatcaagctgcaaagatcatgaaaatgggctgccaaaaacctaatgaaaggaaagctattattgataaggttatgacaggatcggttggtccatcgaggtaattcaattaatctgagcttctatattcgagtactaaaacatcgacaaaagtttaatattttggttctttactttgacagcggaaaccaaacaagagaattcaaccttgaggtttcaagagaaatgacattactgaaaggaagaatacttcagcctccaaagcttaaacttgaccggccaaggaaccttaaagaaagtaaagttttaaaaggaactagaattgagagatgggctttgatgagtattggaggcagctctgatcagaaatctaccattcccaagttcataaacgagcttactcaaaagtgtgagcatttgggtgtcgtcttaagcaagaacacattaagcagcaccttctttgagccatcatacatactcaacaacatttcgcttcttgaatcgaaactgaaggagattcaaagagcggcatcgagcaatcttcagctgattatctgtgtaatggagaaaaaacataaagggtatggagatctaaagaggatagcagagacaagaattggtgttgtcacacaatgctgcttataccctaacatcactaagctcagttgtcagttcgtttcaaacttagctctcaagataaacgccaagatcggtggatccatgaccgagctctacaactcaataccttctcacatcccaagactgcttagacctgatgagccggttatcttcatgggagctgatgtaacgcatcctcatccattcgatgattgtagcccttcagtagcggctgtggtcgggagcataaactggccagaagctaaccgatacgtctcaagaatgagatctcagactcataggcaagagatcatacaagatcttgacttgatggtcaaggaacttcttgatgatttctacaaagctgtaaaaaagcttccgaatcgaatcatattcttcagagacggtgtgagcgagacacagttcaagaaagttctccaagaagagcttcaatccataaaaacagcttgttcaaagttccacgattacaatccaagcatcacattcgccgtggttcagaaaagacaccacacgaggctgttccggtgtgatcctgaccatgaaaacatccctcctggcacagtggttgatacagtgatagctcatccaaaagagtttgatttttatctctgtagccatttaggagtgaagggcacgagcaggccaacgcattaccatatcctgtgggacgagaacgagtttacttcagacgaattgcagagacttgtgtataacttgtgttacactttcgtgaggtgcacgaaacctatttcgattgtgccaccggcttattatgctcaccttgctgcgtacagaggaaggctttacatcgagagatcatctgaatctaatggaggatccatgaatccttcttctgtgtcaagagttggtcctccaaagacgattcctcttcctaaattaagtgataatgtcaagaatctcatgttttactgttga

SEQ ID NO: 152961 - DNA, 644 bp, Arabidopsis thaliana landsberg
tttactttttcaaaatcttatcacaaaccaaaaaaaactttctttcaaaatcgttctctgaggcattttaacgaacagatggcggacttaaacggtgcgtattacggaccatcgattccaccgccgaagaaagtctctcacagccacggcagacgcggcggtggatgcggttgtttaggtgactgtcttggctgctgcggctgctgtatcttaagcgtcatcttcaacatcctcataaccatagccgtcttattaggcatagctgctctaatcatctggctcattttcagacccaacgctatcaaattccacgtcaccgacgctaaactcaccgaattcacactcgacccaaccaacaacctccgatacaatctcgatctcaatttcacaatccgtaaccctaaccgccggatcggtgtttactatgatgaaatcgaagtcagaggatactacggtgatcagcgattcggtatgagtaacaacatctcgaagttttaccagggacataagaacacgacggtggttggaactaaactcgtgggacagcaattggtgctgcttgacggcggagagagaaaggatttgaacgaggatgtgaattctcagatctataggatcgatgccaagctgagacttaagattag

SEQ ID NO: 152962 - DNA, 1337 bp, Arabidopsis thaliana landsberg
atggcttcaagtgcttcaaagttcatcaagtgtgtgactgttggtgatggtgctgttggtaaaacctgtatgctcatctgctacaccagcaatacgtttcctacggtaacttttaatttcttagcaaacttgatatatatccagatatattttcaaattgatgttttaagatatttatgttaggctcttgagatctttgctcattttaaacgttgttcatggcaaattaataagagcctagtttcatcttttgcgtttatatttccatatccgtttaagcatatttttcctagaatcattaacgtgaaatatatctaaagctgaattcaaacccatgcttctggatttttgctatctgtttacttaagaaacatggtttaatgtatgttttttgatatataaatgatttaactatctaatttacaggattatgttccaacagttttcgacaacttcagtgcaaatgtggtggtcgacgggagtaccgtgaaccttggcctgtgggatactgccggtacgccgtatgattacttgattatactaaaactgattattaatgaatgctagttacgataaaagttattattgtggaattacaggtcaggaagattataataggcttaggcctttgagttacagaggagcagatgtgttcttactagcgttttcccttataagcaaggccagttacgagaatattcacaaaaaggtgacttttaaagtttccatccttttttttatagataagaaactatgattatatgataaaaagtatttctagaaagatttgtcgatactgaatgattaattaatctggtgattaatagtggcttccagagctgaaacattatgctcctggcatccccattgtgctcgtcggaacaaaattaggtaacgaaactttcccctttatgagttcgtaaagaaacttaatttatcaacatttgtgtcaaattagatatggtcttgagtaataatccgcagatgatacagtaataattacggaaaatggcaatatatatgggtaattttgcactaaattaggtaaatgaccatacacccttttcatttgcaaaagaaacaaaaacaattcactacaagaagctactttttttttgtaaaatagtactctattttattgataaaatctcttgttttattgataaatcttttattcagaaaaataatgttacacaaaaatgaattcagatttgagggatgacaagcagttcttgaaggatcatccaggagcagcttctataacaactgctcaggtaccataaacaaatctttaaaaagtaatctatatgaaaataaattcataaacaattatgaat

SEQ ID NO: 152963 - DNA, 880 bp, Arabidopsis thaliana landsberg
  unsure (1)..(880): unsure at all n locations
tccactctctctcaaccgccgtctctcgcctccgccgcgttttcttcatccgccgtcatgaatggtctcgaaactcacaacacaaggctctgtatcgtaggaagtggcccagcggcacannnnnnnnnnnnnnnnnnnnntagggctgaacttaaacctcttctcttcgaaggatggatggctaacgacatcgctcccggtggtcaactaacaaccaccaccgacgtcgagaatttccccggatttccagaaggtattctcggagtagagctcactgacaaattccgtaaacaatcggagcgattcggtactacgatatttacagagacggtgacgaaagtcgatttctcttcgaaaccgtttaagctattcacagattcaaaagccattctcgctgacgctgtgattctcgctactggagctgtggctaagcggcttagcttcgttggatctggtgaaggttctggaggtttctggaaccgtggaatctccgcttgtgctgtttgcgacggagctgctccgatattccgtaacaaacctcttgcggtgatcggtggaggcgattcagcaatggaagaagcaaactttcttacaaaatatggatctaaagtgtatataatccataggagagatgcttttagagcgtctaagattatgcagcagcgagctttgtctaatcctaagattgatgtgatttggaactcgtctgttgtggaagcttatggagatggagaaagagatgtgcttggaggattgaaagtgaagaatgtggttaccggagatgtttctgatttaaaagtctctgcactgttctttgctattggtcatgagacagctaacaagtttttggatggtggtgttcagttagattcggagggtt

SEQ ID NO: 152964 - DNA, 444 bp, Arabidopsis thaliana landsberg
  unsure (1)..(444): unsure at all n locations
cactcgccaaaaaccttgaaacctttaaaaaatcgaaactatggctaagctcattctcgttttcgcaactcttgccctcttcatcctcctagccaacgcatccatctaccgcacagtggtggagttcgaggaagatgatgacgtgagcaacccacaacaaggtaagtgccagagggagtttatgaagcatcagcaactaagaggttgcaagcaatggatccgcaagagagctcaacaaggaagaatcggatacgannnnnnnnnnnnnnnnntcactcttgatgtcgatcttgaggacgatgagaacccaatggggcctcaacaacagtcatctcttaaaatgtgttgtaatgaattaaggcaagtggacaagatgtgtgtgagtccaacactgaaaaaggcggctcaacaagtcagattccagggaatgcatggacagcaaca

SEQ ID NO: 152965 - DNA, 2503 bp, Arabidopsis thaliana landsberg
cccaccaacaatctccaggttttgtttgtctccacatgattctcgatttgatgatgtttgtgaaaatctcttttaacgttgttttctaatttcgcttctgatttcacatttcgtttagggatacgctccgatctgcttggcgcatgaggatttctacatccgacgattgtatcatcggattcaggtaccttctcaattcggcgtttgttccttttgtgaagtctttgtttcaatgatttggtgtttgattcttaaatttcaatgcgtcaaggactgttttggacgtcccatatcaagtgcacctgatgcttggattgatgtggttgagagagtctctgatgacaacaacaagacgctaaagtgagtccatcttcctctgattttctattgaacagttttggtttctatggtcacattaagagaatatgaaaccaaatgtaaaggttggattcatacggctgagaattggtttatcacttaggatgtcaaagaataaacctttggttgcaactctgtgcaggcgaactacaaagactagcaggtgccttaatttgggttcctacaattatcttggattttgtcctttcgatgaatattgcacgcctcgtgttatcgagtccttaaagaaattttcagcaagtacatgcagctcttccgttgatgcaggtacagtctcttttcttataaggtctcaaacaaactcttcccttttgtttcctgacatatgttgtttctgctatcaggaactacagctgtgcatggagaacttgaggaatgtgttgctaaatttgtgggaaaacctgctgctgttgtttttggcatgggctacttaacaaactcggctatcatttctgtcttgattggcaaggtaatgcatacaccttgtgatatgaacgcttatgttactaccaaaacatatgtttttagtagcttaattacacagccatgtatacagggagggttgataataagtgattctttgaaccatacttcaattatcaatggtgctcgaggttcaggagccactatccgcgttttccaacacaacagtaagcatttctatgcttcactctccatattttcatgacatacatatatatttatgccctcttgttgatggcttcgcaacacctgctcatttggaaaagtattgaaagaacatatcattgagggacaaccaaggacacacagaccgtggaagaaaactatcgttgttgttgaaggtatttatagcatggaaggggaaatctgtgatctaccggagattgtttcagtatgcagtgagtataaggtaaggtaacatggtaaaccatctttcaagatcaacattgatgagtgattaaggtagctctatcaactgaatgatcattttgtttcaggcatatgattatttggacgaagctcatagcattggagcaattggcaaaacaggacgaggtgtttgtgaactcctaggagttgacactactgaagtggacattatgatgggcactttcacgaaatctctcgggtcttgtggtggctacattgccggatccaaggttagcaatcctatacctttgttctcacttgctgatattttgtttgcacatgagtaaagtagaaagatgatgcactaaggcccttctgtatctaataatctacacaacagacacaagattgttgaggcaagttcacttcacctcaaaatcaaccaaatgctttatagcatttttgtgtttcgatctctgtaggaccttgtccaatatttgaagcaacattaccctgctcacctttacgcaacatcaatttcaactcctgctgcacaacaagtcatatcggccataaaagtcatctttggagtggacggttcaaacagaggtatctgctctttcagcatttcataatctcaagttatactctcaaacttttctaaaaaaatgggcaggggaactaaagttagcaagaataagggagaacagcaactttttcagggctgagttgcagaagatggggttcaaggttcttggagtttatgagtccccaatcatgccaataatgctttacaatccagcaaaaatcgcagccttctcaagggaatgtttgcgagaaaacgtaagtctcttatttgttttccaatatctcacttgcttccgcgcaaaagagattcacctctatgttataatgaacattttaaactttgaacagttggcaatcgtggtagtcagcttcccacctatacctctattgctagccagggctcgtatttgcaattccgcatctcacttaagagaagatcttattaaagccctgcaggttgagttcactcgctttctcagcatagtagcaatgatttgaatctactccaaaaggtgcttatagttcatgcacaaatggattcaccgtgttatgacaggttataagcagagcaggtgaccttaccgggatcaaatattttacggcagctccaaagaagcaagaagagaaaaatggcaatacttcaaagttcaaactaagaatatag

SEQ ID NO: 152966 - DNA, 735 bp, Arabidopsis thaliana landsberg
atttgactcttccatttctggattagtaagatgtgattgccattagattgcgcaagaaaggttcctcatttgctctgtttgcctttgactaaacaaattgtctgtttgattagttttggatgataggtgatgagatagtcatggttgtttatttcctccaattgcaggttagaatttgctatcggatcatctgctaagcttggtttactcttcctagaacatcgattgtatcgaggtttactattggatcaaagatgtctgcagaggagaagaaccttatagagatcttggaggaaggtcacaaagtcgatgttgttaagtacattgattatgtcagtgcccctcaagctggtgctattgcgacattctcaggcactacaagagacatgttcgagggcaagacagtgttggagttaaggtatgaagcatatgtgccaatggccacacgatgcctcagctcgatctgtacaactgctagatcaacttgggatatccacaagattgctgttgctcaccgtcttggaccagttcctgttggagaaactagcgtgctcattgcggtctcatctgttcaccgtgcagatggtttagatgcttgcaagttcttgatcgacgagttgaaggcatcggttccgatatggaagaaagaggtttacactaatggagagatttgaaggagattctgagtttatgagaaagattgagcttgagagaaagagacacatgtaaaaaact

SEQ ID NO: 152967 - DNA, 1195 bp, Arabidopsis thaliana landsberg; identical to SEQ ID NO: 9244

SEQ ID NO: 152968 - DNA, 2460 bp, Arabidopsis thaliana landsberg
ggcgagtttcaaaaggcactttaaaaccaggaaaggtaggaactatatagcttcatttatgtgagtacaaggctttgtaatgttacaaacacgtttctattgggagaggagctatacatatgatcttgatcccttcctatttgaaggttgttgcaatcaagaagatggatttacctacgtttaaaaaggctgacggagagagagaatttcgtgtggaggtggatatcttgagcagactcgaccatccaaatctggtttctctgatcggctattgtgcagatggaaaacaccggttcctagtatatgaatatatgcaaaatggaaacctgcaagatcatttgaatggtaagtcacgaaataagagtcaagtccacttaaggcaattgggaactaaacagcgtctatatcacaggtataaaagaagcaaaaataagctggccaataaggctcagaattgcacttggagcagcaaaaggactcgcatatctccattcaagttcttctgttgggattccaattgtccacagagacttcaaatccaccaacgttctactagactccgattataatgcaaaggttcttataacagttaattaaaatggacggtttatgcagcactaataccaagcatagactaaaactaagatgtgagtgtaattcttgcagatatccgactttggactagcaaagttgatgccagaaggaaaggatacttgtgtcacagcaagagttctaggaacatttggctattttgacccagaatatacatccgtaaagattcttacttatatttcacacctgattcttctgatagggtctagacactaattaaggaaatttaaaacttgctaataatggcatgaaatggcctggagaaggaactttaatcacacttacatatcagagcccataagcaacgaaagacagttttagcataacttttgttccatttcttctgtggcagacaggtaaacttactctacaaagcgacatttatgcatttggggttgtactgctagaactacttactgggcgcagagcagttgacttaactcagggccccaatgaacagaacctggtactacaggtaaaatggaccttctaggttctaagattcacaaaaagttcacagctcaagaaacttaacataggaatacactgctcaattttctctacgcttcaggttaggaatatactgaatgatagaaagaaattgcgtaaggttatagatgtcgagctgcctcggaattcatacagcatggaagctatagccatgtttgctgatttggcatcacggtgcatccgtatagagagtaaagagcgaccttcagtcatggattgtgttaaggaactgcaactaattatctacacaaactcgaagggtggtttgggtgggacgattcctacattcagaaggctctaaacactgaattctttgaaaccagtaatcagtattactgtcatttttcctaaaatgagaggtggctgatagaaaaacttattaaaaatataaacaaataatcctaattatgaattaccggaaatttaattcaacttccagctactaaactttgatcaagcaatgttatttggatatatgtactatcaagtcaataagacaatcaagcaatagatgtatctgaatagtatgctgtatttgctatgaatgttttgcttaagagaaatgataaatattaattcacgtgtgtagcctttttctttccttctttcacctaatgcctaaagaattaaccacatgtatactaacaagaaatacaatcgctgcctatacatgtagtttataacaaagataagagtgtgtgtgaagtacctttactaagatcatataaacaaaaggttgaagcaaacgggattatcaacccgtacccttggtcatgtcacatttagctcctacatgatggagccacaatttttgttataaattcagagaagctagacaaacactaaacgctaaattggtaaacagatggaaaaaactgtacccatgtttacacatttgcagaggaggtcagctcattatcagaccccaccatttctactatagggttggtgcatagtggaagaagcttcttccgcatcaaatgcttacgccgctgtaacatcagaaggaccaaaacggtatctgtcttaacaacctcgtatcctgccttcttgtacatattgaaaggagcctcatcaaccatcctacaatgcaagtatacatcttttgatggactaatctgagatatcaattcctcactcgccttcaacaaatgccacccaattcctctccttctaagatcctctttgacagtcatgttacagatataaggtgattccttaggaggagtaggagaaggaggagaagcattagcgcctcgtttctccaaacaaacctcaacagttccagccatcacagcctcctcctctccatcatcactaaactcatcaacttttttc

SEQ ID NO: 152969 - DNA, 1213 bp, Arabidopsis thaliana landsberg
  unsure (1)..(1213): unsure at all n locations
cagatctttccaattgaaagcgaaccgtgaattttgagtctctttaccggcggcgaaaaaatgcttggtggattatacggagatcttcctccaccgaccgatgatgagaaacccagtggaaactcctcttccgtctggtcaagcagtaccaaaatggctccacctacacttcgcaaaccaccagcttttgctcccccgcaaacaatcttaagacctctcaacaaacctaaacctatcgtttcggctccgtacaagcctcctcctccttcgaattcatcgcaatcggtgcttattccggcgaacgaatcagcaccttcgcatcagcctgcattggttggtgtgacttcatcggtgattgaagagtacgatccagcgagacctaacgattacgaggagtataagagggagaagaagaggaaagctacggaagctgagatgaaacgagagatggataagagaaggcaagaggatgaggaaagagataagagagaaagagaagagagggagaaggagagagagagagataacagtgatccgtctcggttgaatatctccggtgaggaagcgtggaagagacgcgctgctatgagtggtggtggaagtggtgggaagggaagatcttcgtctccgccggggaatgttgatgggtttagtattgggaaatcggagacgagtgggttaggagtaggagcaggtggacagatgacagctgctcagaggatgatggcgaagatgggatggaaacaaggacaagggcttgggannnnnnnnnnnnnnnnnnnnnnnnnnnnnnnggctaagaagactgatcgtagagctggtgtcattgtcaatgctagtgagaataaatcttcttcggcggagaagaaggttgttaagagtgttaatatcaatggtgaaccaaccagggttttgcttcttagaaacatggtatgcgtttcaataacatctcttatcagcttatggattcttcagttcttgagtttggatgccacagtcttagttgaatcagtattagtaggccaaagtcaatttagaacttattcaaatcaaacgtgttgttatactaggacacactttgctacaatgatttagaacggtctgttagaatgatattaatgtattccaacatttgatgtggtcttagttaagaaattgttactgctaattgttggcagcatgtgagggcgtagtattaattcggaaacaaaat

SEQ ID NO: 152970 - DNA, 2051 bp, Arabidopsis thaliana landsberg
aggatacacttggagtaagagatagtcttttgtggctttgtatgtttccgctggaccttttggggagcacatcctaatctgcggatgtgcatgtctctttgattgactccatgtaagtataagtgttgtgcatttatattaatgttcactacttgtgtggctcttatctacaaagagaatctgtcagctgatagtccagtgtcagccaataaacctgaggtaagaggaggagttaggagaaccacaagtggatcttctcatgttaactctgatgacgaagatgccgagacagaagcagggcaatctgaaatgactaatgatcccaatgatctgaaacgtattagaaggtatgttaggtaccaataaaaaagttagatgtaaaacactgagatagagaatcaccaattcttcttaatctttttctgtgatgtgaattcaggatgaactcaaacagggaatcagcaaagaggtcgaggagaaggaagcaagagtacttggtagatcttgagactcaggtaaggttaacaaatagcttgttggatgatttgtatcagagagtaatgttttaatggtgaccttgtgttttcttcaaggttgattctttgaaaggcgataactcaacactgtacaagcagctcatagacgcaacacaacagtttcgtagcgctggaacaaataacagagttctcaaatcagatgttgaaactctgagagtcaaggtatcatctatcacttgctctttttaatttgggaaagtaataaccggaatgtgctaagttaagtaaattctatataggtgaaactagcagaagatttggtagcgagagggtcactcactagcagcttgaatcaacttctacaaactcatctaagtccaccatcacactccatcagcagtctgcactacacgggaaatacctcgcccgccattacagtccacagtgaccaatctttgttccctggaatgacactttctggacagaactcaagccctggacttggtaatgtatccagtgaagctgttagctgcgtctcagacatctggccatgactctctttcttcagaacatgtaatgatcactcagcgaatttcctgtatgtgtttcactatagaactagacacatataatgaaagcagcatgttcgttaaataaactcaagtttcgtcaacatatactttattgctccaaatcctgcagatggtaatctggaaactgaagcatgtataggccaataaattacattccccaaggaaattgcttaaatgtgttcgcttaagtaagtatacagacaaacaaacaaaaacactgatccattacactttactttccagcaatttctattagctatttaaggcgacagctatgcatgttgtaacatgagcagacaaaacttacgtcgaaaaccaacctcagttgattagaggcgtacccatctgcgaatctgcacctatatcagttgtgaagtccttaggcaatgggatatttaattccgagcaaacaagcttcacaatattagccgttacacctcccatagacatcttgttcagtgttactgcaatggaaaatctgttgttgatgtcacagaagcctgttgatcctcctaaccctgaatgtccaaagccaaccagagacccatcttgagaaatggcgcgcttaaaaccaagcccaaactttccatcaggcactactaagccactgtagtctccagcacccatgaaagcatcatggatcctcgggttgctaaacatattatgaatatcatgttgatgatcatcgctattgatctcagttttgccagcagaactgttagtatcaactagcctggctaaactttctgtatttgactctctgctgctactagcactcataaactgtttctcatcataaagcttcctctcttgatgatcttttgatttacgcttttctgtagctgccatctccttaccctttttcttttttgttgtgtctttcaacgacgtgaatttcggaacatgggtgtggctacctagtggtggctgggataaagaggaatgtggaggtggcactagg

SEQ ID NO: 152971 - DNA, 2617 bp, Arabidopsis thaliana landsberg; identical to SEQ ID NO: 15370

SEQ ID NO: 152972 - DNA, 911 bp, Arabidopsis thaliana landsberg
cacacttgtctccgtctcgaaatctccggcgccgatccaattttcgtcaaaggcacttggcataattctcgtttcgatatctccgtcaccgatggttcctcctcttggatttgcaatggtaaacaaaaaacccctaaattcacactatcacttagcctctagcgtttttcgaatctgatttttattttggttttgctcgaaattgaagcgacggaggaggaagtggcggagagagcagcacaatgggaccagcctgtgtcagagtatttaaagctcgccgagcaatacttagggtttcgacaacctaattcgatctatagtttctccgatgctcttgagggatctaaacgggtcagttatcttcttattggatcattcgttaatgttttgaagtaagcctgagattcttgtatgtcgttgtgtctttggttgtgaattttggtgaaagctctcttggacgtttgagaaggaagggactaaacttgagtggaggtggaagtgtaaaccagcacatgatagcaagaagatcactgttgggatcttggattttcttatggaggctaacataaggctaagtgtatgactcttatactatacgttctgaattatgatgaattagagctttgttagaaatggcaatttgattcttgtttggaaggtatgtgtcaatctctcaatacttaagtgtttacacaggatgaagttgtgaacaagacgagatcgtttgagaagatgagaggtgaagctgagagatgtctagcgcaaggtgaaaaactctgcagtgaaaaaacagagtttgagaatgcaacttatgcaaaggtatgtattattcgatcaccttgtgactctgcttaatattcacagcgtgctttcttcttgctgaaactagtgtcattggtgtttatgatatg

SEQ ID NO: 152973 - DNA, 1025 bp, Arabidopsis thaliana landsberg
acaaaaccagagaaaaagaccagtctggttttttaagaagtctttatatttttttttttgtcggagaatcttataagcatggcttcaggaggatcaaagtcggcagctttcatgcttctgatgctgaatcttggtctctatttcgtcatcaccatcatcgcttcttgggctgttaatcacggcatcgagagaactcgcgagtctggtaactaacaaagataacaactgattaagtaacaattaatccaacgttagaaaatgtcatcatcaatcttctttttgtggtattttgcagcgtcgacactgtcacttccggcgaagatattcccgatatacttcccggtggggaacatggcgaccggttttttcgtaatattcacgttaatcgccggcgtcgtcggaatggccacatcactcaccggaatcatcaacgttcttcaatgggactctccgaatctccactccgccgcggcttcctctctaatctcctggtctctcactctcctcgccatggggtaaacaaacttaaccatccggtttttattaaattaaaccgggttttaatccggttcagtttcttttcattctccttaaaccaaatctaaaccgatatgatgttgatacagattggcctgcaaggagatcaacataggctggaccgaagccaatctagtgagctttttactttctgatttaaaatttaattctaagaaactgaatttgtaaactgtttttctacggatacttatcatgttttgtgttttgttgattcttttttgcagagaactcttgaagttctgactataattgtgagtgctactcagttgttgtgcaccggagctattcatgctggagtcggagaaacagtcgcctccggagaaaggcctcatcttgggagagtttgagtttcatgattcttcttaaaagcggttttacatttgcttcagatcgtgtaatttgtgtgttgcgtcttgtgtgtgtttattcttttgtttcgcatgattcttatgatcatgtacaaatga

SEQ ID NO: 152974 - DNA, 2560 bp, Arabidopsis thaliana landsberg
gcttgactttttattgttgctatttgttgacgcattttttaacagtttgtaagccccttttttattgtcaatacttaaatcttcttgtctgttacgcaggaaggcaatggtcggtacttggacttgcatgatatgtataaccagtacatcaactctaaatttggggaaagggttgaatattctgcttaccttgatgttttttctcaaccagagaaaataccgcgtaaactgaagttatcgaggtaaacacttcattggaattttcttttacttagaaagcctccaattatttttctagctgcagctgaatggctttcctttttgtattgctatttttcattttaggcaatacatgaagtatatggaagctctacttgagtacctggtctacttcttccagcgaaccgagccgttgcaagatcttgaccggatactttctaaggtttaagctcctccctttctttatcattttattgcgtttaccttgttgccttatgaaattttatgggcgtttcgaactatgcattagtacataactggtatatttattcgtgcttaagaagtttctactagtttcccaagtattaagtgtagaactttggatttgatttccttagttctaacaactggttgctttgtgagtctttcatccccctggagataatacataattttggaaaataaatggccataactagatggttgtattcaatattcattggtgcatagtttgctctaagtgcagagattgtatatcctcggaaggttttgaaccatgttatagtttgacattctggtagttctagtttggccaatgctgtgcctattgtttgatctgttgcgattaatatgtttggttcttttacaggtttgttctgattttgaagagcaatatgcagatggaatagtagaaggcctggataatgaacttattccatctcagcatactgtcatagatcttgattactacagtacagtcgaggaactggtagatgtaggacctgaaaagctaaaagaggtaatgaccatactacttcatgttaatatcctttttgaagcatattcccctaatcatatgttctttgtatgccattcaggcattgggggcattaggactgaaggttggtggtactccgcagcagcgtgccgagagacttttcctgacaaaggtttttacacttgctatataatctcctatttctttaagtttcgtcttatgagagggtacttttatcaattagtagccgcgttcttgttgttcttactgggtttggaaggaacatttagctgttatgaaacctagtttggtagttcagctcagctcttcttctaatatgaaactaaggcttttgttgtcatagttcatgttttgtagggattgaattctatttgaagcttttcttattaccttgaggttatctaattcccttaattaattcaatttttgtacagcatacgcctttggaaaagctggataagaaacattttgccagacctccacacaacggaaaacaaaacggagatgccaaatcaacacatgagtctgaaaatgctaaagagattgcactaacagaggccaaagtgaagaaactctgcaatttacttgatgaggttagttgattgaaagctcatagtgacatttttttccccctcccagatatctagttgtactttttctgttaacttttcttgttgtcaccttttatagaccatcgaaaggacaaaacaaaacattgtaaagaaacagtcgttgacatatgaagaaatggagggagaacgtgaaggggaggaagctaataccgaattagaaagtgatgacgaggacggtttgatttacaatccgctgaagctaccaataggttgggatgggaagcctataccatactggctctacaaacttcatggccttggccaggtatgtagtttatttatgagaccattgttgtatcaaaggaacatagattcacattaaatttcttgttattacgcaggagtttaaatgcgagatatgtgggaactatagctattggggaagaagggcttttgagagacattttaaagaatggcgacaccaacacggaatgcgttgcctaggaatcccaaacacaaagaacttcaacgaaatcacttcgattgaggtaataatataatatgatcaaagactttgtacagcttaaagtagtaaatagtttggtaatttgatcttgttgttgtttggtttgtttcaggaagccaaagaattgtggaagaggatacaggagaggcaaggagtgaacaaatggaggccagaacttgaagaagaatatgaagatcgtgaaggtaacatttacaacaagaagacttactctgatcttcaacgccaaggtctcatctgattgatcacatcctcttgatgaaatcttctctccttactatatccctttaaaccatattctacctttcgcctttgtaaaatcaaaccattcgtcatctttttgtgaggtttcgtctcattaaaacagtatttagtttatgtttttgaattgactatcacaatcgaggatataaaatttgtttttgt

SEQ ID NO: 152975 - DNA, 1526 bp, Arabidopsis thaliana landsberg; identical to SEQ ID NO: 25613
  unsure (1)..(1526): unsure at all n locations

SEQ ID NO: 152976 - DNA, 6561 bp, Arabidopsis thaliana landsberg
atgcgagaacttcttcgcgcctatttctctcgaagaactctcgtatcaatttacaatctcttcttcaccctctctcgtaagctcctcacttcatttcctctctctctcctcatgcccaaatccaacgatgacgacgttgcagaatctgaagccgttccgttgcttgatcttgtcaagcggtcgttacctatatcttgcccaatcaaagctcttcaagacctgaaatctcgctcttacttcgattcctttcatttccagtttaatcgctccacagtacctctccggcgagactccgactgtttaccgaatcgcccaagggttttagtctgccacgatatgaaaggagggtatgtagatgacaagtgggtacaagggtgtgaaaacgaagctggatttgcgatttggcattggtacttgatggacatttttgtttacttctctcattctctggtcactattccccctccttgctggactaatactgctcataggcatggcgttaaagtaagtcaatgtgttgacttttcaaagtttagctgatttatatagttaaagtaactcaagtttcgatcattgaatgtaagtgagtaaagtcgttgcaagtcgtagaaaaaagttgaactttgattagagaggaaatgaataagtgatagagagtttggttgtcttggtctatgaaagcagagaagtacaattatggttgttataaggaatgattcattttcttgtgtgtgttttatggaaatgttaaggtattggggactttcatcacagaatgggacgaaggaaaagctacctgcaaagagttgttggccacaaaggaatctgcgcagatgtatgcagagcgtttggctgaacttgctgctgctcttggctttgatggctggctggtgatttttctttttgctatatatggatctctttgttcagcaatattattgataatttactttgcttgtgaattgttacttgcagataaatatagagaatgtaatagatgaagttcaaattccaaatttgatggttttgtaaagccatctaacaaaagtcatgcattcatctgtacctggaggtttagttatatggtgagtgttgagaagcttttctttttgtcaaaatcattcatctgtttctagactacactgatcttttctattactttttttttgtaggtatgatagtgtcactattgatggtcatcttgcttggcaagatcagttaaccgagaataataaacctttctttgatatatgcgatggtatattcatgaactatacatggaaggtttggcctttcacttcaatcaatcacttcatcttcattcatcttatatgttttgattgtgatatgagtactgagtaggtatctctttcaggagaactaccccaaagcatcagctgaaattgccggtgatagaaaatatgatgtctacatgggaatagatgtgtttggtcggggaacttacggtggtgggcaatggactgtatgtatctttattctaacaaattcattcaaccagtagtctgcaatgttcaagctgcatataaagtttttatacgtttgttcaattcttttgtattgtaggcaaatgttgctcttgatttgctgaagagcagtaatgtatcagctgcgatatttgctcctggatgggtatacgaaaccgagcaacccccggatttttacacggcacaaaacaagtaatacttgcaaacggccaaatgatggtaaaattaatctttgcaatcttattcatcatatgttatctttctttagatggtggtcacttgttgagaagtcatggggtatagttcaaacatatcctcaagtcctacctttctactcagattttaatcaggtgaagtgaaactttgttcccagtgaatagatgcaaatgaccatggttattctatgttctgctaagttttgaaactcttttctcttgtttatttatagggccttggttctcatatctctcttggaggtcggaaattatcagacgctccctggtacaacatctcatgccaaagtctacaggttcaatggtcactccttgttctagcttttattgcactagagctcatttccttttttgtcacatttttaatctggacttatctatataccaatttgatattttcttctgctgtgttctttgtgacagccattcctagaattcaatgaaagaaggaattcagagaccattcaggtcactgttgagtgagttctgaccctaaatccctaatactagcctcatatttgattttcaagaagcttaagaagaaattgttttggcatctaacaattaagtacacatatatggtagtggtcgagaagcatcttataatggaggagggaacgtcagtttcagaggaaaactaaagagaaatgcacatttcacagcaagactattcaaacctcagcttcagctctctgctgccccaatctcaatctccttttctgtaagttaacgcataagatttgagctcctcctcatctttacaaagtttcaatctttaagttttactcatcatgtaagtctttggactggtgcaggtgaagtcagataaaatatccgagctaagcattctgctccatttttcatctccttcacatgagaaaaagtccatgcttatggtgccaaatgaatctatcaacagatttagcgacatgttcctgccatgtcttctcacatcaaaacagaccacatccggttggatggtacacgaaacaaaccttgttctagatgggcacacactgactgagatctctgccttctgctccagaccagatgatctcacagaagaaacaaacacactagagtattttgcattgcttggacatatctccatcaagagccagcaaaaagccaaggtttatcctctggcgtcatcatgggttatagaggctcatcacgtaaagtttgtaccgggtgattctggctccaagaccttaagttgtaagctagaatggagattgaagcaccctgaagaagattctgtctttccaaagtacaatgtatatgcagagaatctgagttcgagtgagtatagaccaaggaaggttatggaagaaccaagaagcgagaaagtgtttcttggaacagctcatgttgatgcttattatgtctctgaaatggtcgttggatcagatgtgaagggagtccggttcgtggttcaaacctgtggtgaagatggttcatggcaggagttggatgcttcccctaaccttgtggttgaagtagagcgtgtgagttcaaagctttgttgttgtgggttgatttgaattatggttcatttccgaacctgcgatctaataagaccattgatggtttgtttagtcagttcaaggatatgaaccatacgataatgaattaatgattataaggttgataataataacaaaccttttcatgcacagattctttgccttgtggtatatgttgttgctctttatctgaaagattcaaaggacgactactagtctcactttcattctcaacttgttcattccactcaaactgagaagtcagcgcaatgaacataagaacaaacaaaagcacccacgatctcgtcattttgcaggtaaagtggtcttttatttgatctgctacataacaaaacaccaaataccacaactcaaaatcacaaactaacaagtgtagaaaaggatccaaatcacaaagtaatatttgaacattctatttacaagaagtgtaggaaaggattaaactttcacattccaaaaccttattgtttatttatgagtcaagccaagaagattcctggagatttctgcttccatggttccaaattaataacaaatccagaagaacaatttagtgctccaaattaaacatgacaaacgagcttagcaacaaagtcaaaaaacagagcaggacaaataaaaatcaccaaaaaaattcagaccagaactatagattcgataagaacaaagacgattagcaaaaattaaggtttatacatattttagcactcaccagtcgaaatctgaaagcgtgaatctagtttttgcctaaaatgagagaagaagactaaaagtaaataataacatagctagcaacatgtatactatttaagtttttttagagtttctaagccaatcagaaggctctatttcgtacccactcgcagaaagagcgcgttgagcgagtgagagcgattctgtgggtaaaccccttttcaattcatgactttttttatcgacgcacatctctccaaattctccatcgcgtgactcttttagtttttttccacaaaaccaatgaaaccgaaccgaaatcagttttaatttcaaaaccaatgcaaaccaaaccgaatcagcaaatagtgtgaatcaacaattctggacataaattttctcaacatctcaacaacgggaaaaagagaaaacaccacaactcaaaatcacaaatcatagaaaaatatccaaaaaaatcacagtagcctttgattaaactttcaaattgcaaaaatctcagaatcaaagccaagaagaatcctgaagatttctacttccatggcatccaatagtggaagaagaacaatctactgcttcaattaaacatgaaaaacgattcaaagagcttagctttactagtttcagtaaaatttctcggcaacaaagtcaaaacagacatgaacacataaaaaaagatactaaaacagaactgtatattcgacaagaacaaggacgaattgcaataattaaacagattagactcaccagtggaaatctaaaagcatgaatctagttgtgagctcttcgtgtttgcccccctttattttctgttctttgtgtgatttcaactcacaacttttatattttactctgctgcttcgagatcaacgcattaaaagtaatggggtacattaagaatatttcgattttaaggggttgaagttgtaattttgaagaagtggaagatcaatcaaaaataatagaagaacagagacgacgaaacgaaacttgccggagaactgagcagagaaaaaaccccggcgagaatgggaaattcgaattcgtcttctgttgatcatcgcttcatttctgcttccaggtattcatcggaaccaatctccctttcactccctaagttctaaattggaaatcgatcttgtcaattgtgtgtttgtgttttgttgcagagcttttactcagaagaagcttgatgatctcaaatctctctttgtttccctcgcttccaagtctcacagcaatgaccaatacgtctcgtaccctgttttccaggttttgacgatttgtgtgttctgtgatccaagtttcattacatgttttgttgtattattattactgggtctcttgatccacttaagaacatatttcgatagaaactgaattgagattgttagattagatggggttattctctgaatgtgacacattctagtatgtcttcaggtctgatttagagtcgttcctggtggtgattttgaagagtgtgttctccactgagagttctgatgcggaatcaagtgattacaaggagatggtagatgcgctactcgatgccgctactttctcaaaatctgatgatggttctgaaaaaggaatgtcttttgaagacttcagaagctggtgcccactcgttccaactatcagaaagttcctcggaagcttgcttattcccccgggtccaggttgattctttgtcttctctcgtctttaactcatatcttgttgacaaaactggtcaaaattttccttttttcacttttttatatcctctgaaccttgttatatagtgagacctggatatcaagtcccgcatctgctatatgaagatagtgtgagttcagataggctactattaaagaaggaatacgcttggcatattggaggagctcttcctcaccacgagcttgtagagtggaagctgttgtatcacagttccttacacggtcaaagcttcaacacattcctcggacacacatcgtgagtgtttctcaacataacatcatttaaacttgaccgagtagaatcaagacataaaatataaatatattgccgccccctacaaaaaaaattcctggatccgccactggttgagttcaatgttaaatgtccttaacctgcattcgttaaatgtttaaatttgttactccatacttgagttatctatttacaaccataagggcattgtcatgatagggggatggagggatcgaacatggcctgatggatggactgcagttaccgcagatggaaaacgcagccctcagtttgagcataccctatgggtaacggagactggtgttgaggttttaacagcgaggcttccttcatcgcctgacgtatacccttggcttaccaagtgattaagtgtttggttcctttttggttgtgattcattgggtttgattcttaaacttgggaataatagtgtcatctttttgccattatagaccatttgatgttgttacctcaacaccgccactaactccactaactactagagaaatagactcgtctctctatttctctatcaaaattcacaacggcgattttgagattcttctctga

SEQ ID NO: 152977 - DNA, 1157 bp, Arabidopsis thaliana landsberg
gaatctagggttattttgaaaaaccaaattgattaagagttttcgtctgtacaagtggaattttgaaaaaagaagcagagagcgatggagaaagtggttgatctcttcggagtcggagaagctaattcccagaagctactcgaaggaggcaaagatctcagcgagatccaacaggttttcttcgtttctcttctctatctatccgtctaatttcacacttggaatttctcaggttttggagtctttaattccgaaaaatcgtttgttggatgagtttattctcagggattgttcataggatcagtagctgaagcgaataacaaggattttctcaaaagctctaatatcactcatgtcttaaccgttgctgtggccttggctcctccttatcctgatgattttgtctacaaagtcattgaaggttaggttttttttcttcaatccttagcctgtttttgaaatttttcgtttagagattttataaacttgttcttcatcgtgaagtggttgatagatccgagaccgatttgacagtatatttcgatgagtgttatagcttcatcgaccaagctattcaatctggtggtggtgttttggttcattgcttcatgggaatgtctaggaggttttgattcttttgcccttaaatctcatacattcagttattagatttagtgtttaagaatcatcaatgtgaaccaattgcaaattatgtaaccatataaaaaaagtgtatataaattgccaactgagtaaccataggaaactacagagactcagattggcaaaagtgtatatgaatcttgtagtttgctttgattcttttatagcttgctgattctggtattagtaggagttatggtagtgaacagattacatcttgttgtggacaaattaagagtttttcttgaacctgtaatttgcttattgtgtcgttctgttatatatatacttacacaatttgattggtttgagtttttctttgaagtgtgactatagtggtggcttacctgatgaaaaagcatggaatgggattctctaaagctatggaacttgtaaggagccgacgacatcaggcatatcctaatcccggtttcatttcgcagctccagcaatttgaaaaatccatccaaggtaatgcatgattgcttcagctg

SEQ ID NO: 152978 - DNA, 1552 bp, Arabidopsis thaliana landsberg
ttttttctttaatttaatcatccatatagccgaataattatgaaaaaccaaatatcaatattttttccttcttgcaataataaaattcaaggtgcggattatagtcttccggctcatttctcgcctatacattttccaatgggtaatgcggccaccggattcttcattatgtttgctttaattgctggagttgctggagctgcctcggttatctccggcatcagtcatctccaatcatggacaacgactagtctcccggcagctgtctctgccgccaccattgcttggtcgctaacacttttagccatggggtatagactttaaaactgcacttttgacttaatactcaatcattttaattatttcatcaaattcgtatataattttcacaccaaatttagcatagcaatctagtggttattaaccttcatttcttgaatgttcttgtgtagatttggttgcaaggaaattgaacttgggatgagaaatgctcgtctggtgagtaaacctcttatggtactattttattgtaaaagtttgttaccataaaaattgataaaaactaggggtgtcaaaatgggtcaaaattcatgggtcaactcaactcaactcaacccatgaaccctaatgagttgaaaattttgactcaaatgagttgatgggtcaaatgggttgatgagtcaattggtttgatgagtaaaatgagttgggttgtaatggttaatggtttcaatggtttacccaggtaaccggtcaagttttgtaaaattgaattaaaccaactaaaatctctaaaccaatgccaatttaagtttaaccaacatatttaaaccaatttaataaaattaatatttttccaaatttcttaaatatacaagcgatgacattgataaaaagtaaactcgtaatttttccactaaaaaagataaacccgtgattttcccgccaaaaacgtaaatccataattttcccgccaaaaacgtaaactcgtaattttcccgccaaaaacgcaaatccgtaattttcctgccaaaaacgtaaactcgtaattttccgccaaaaacgtaaacccgtgattttcccgccaaaaacgtaaatccgtgattttctcgccaaaaacgtaaactcataattttcccgccaaaaccgtagaatcgtatttttccgtcaaaaccgtaaaatcatattttcccgccaatatgtttggtattaataatgggtaatgatgttaaatatttgtcattcgttaaaatgaaagcatgggtattttagtcatttttatctaaatgaaaatgtggatgaactacaaaatgatcaaacaaataaatatttatttaaatgcatcatttagattaaattataaatgatgaaacaaacatcattcaaatgcatcatccaaatggatcatgtaaatggatcatttggatgtaaatgataaatgatgaaacaattagggccaaaatatataacacaaaaataaacaaataatgctataattgataaataaaaatggattccgtataatatttgatagacaaatgtttcttttaac

SEQ ID NO: 152979 - DNA, 3281 bp, Arabidopsis thaliana landsberg
caagttcctggaagtagtataatttatgttctgggattccttcattcatctgaggctgttgtttatcagattgattccaaaagtggagaggtagtggcacaaaaaagtacggtgttccctggtggattctctggcgagatttcatcagtttcaagtgataaagttgttgttcttgattcaacgaggtcaattttggttactattggcttcatagatggagatattagcttccagaagacccctatttcagatcttgttgaggattctggaacggctgagattttatcacctcttcttagcaatatgcttgctgtaaaagtcaataaacgcactatatttgtgaacgtcggtgacaaaggaaagttggaagtggtagactcattatctgatgaaacagccatgagtgattcacttccagttgcagatgatcaggaggcctttgcttcagttcatcatgaagggagcaagattcacctcatggtgaaacttgttaatgacttgaataatgtattgcttagagagaccattcagatggaccaaaataggggacgtgtccataaagttttcatgaacaactatatcaggacagacagaagtaatggatttagggcgcttattgtgatggaagatcactcactcttgttactccaacaaggagcgattgtttggagcagggaagaaggtctggcttcagtgactgatgttacgacggcagaactccctctggaaaaagatggcgtatcagtggcaaaagtggagcacactctctttgagtggcttaaggtatgagcggtcttaaacgtctggttgggttttcttaatttccgtagagttgtcttattttgttgtgtttttgatgtgttgtacttgttttctcaccctaatcagttgtttctgtttcttttggtaggggcatgtgctgaagcttaagggatccttgttgctagcaagcccagaggacgtggtagcaattcaagaattgagggtgaagagttctgggaagaacaaattgacccgtgaccataatggctttcggaaactaatcttagcacttactcgagctggaaaactttttgctctgcacactggagatgggaggattgtctggtccatgctgctaaactctccgagccaatcacaatcctgtgaacgtccaaacggtgttagcttgtaccaatggcaggtccctcatcatcacgccatggacgaaaatccctcggtgcttgtagttggcaagtgcggatcagattcaagtgcacccggtgtactttcatttgtagatgtgtacacgggaaaggagatcagctcatcagatattggtcactctgttgtgcaagttatgcctcttccaattaccgactcaaaggaacaacgtttacatctaatagctgatacagttggccacgtccacttgtatccgaaaacttcagaggctctcagcatctttcaacgcgagtttcaaaatgtatattggtacactgttgaggcagatgatggtattatcagaggacacgtaatgaagggcagttgctctggtgagactgcagatgagtactgctttacaacccgagaactttggactgttgtgtttccttcggaatcagagaaaatcatttcaacactaacacgaaaacctaatgaggtataagtcttgataatgttttttttgtcacataaatgtttaaattttttaatcatggcttacgattttttatttccaggttgttcatacacaagccaaagtcaacacagaccaagacctattgtataaatatgtatcaagaaacttactgtttgtggccaccgtttcaccaaaaggtgctggtgagattggctcagttacgccagaggagtcatcactcgtagtatacctcattgacaccatcacaggacggatactgcaccgtttgtcacatcaaggctgtcaagggccggttcatgcggtaagtcctcatgcaatttcatctcatttctttttgtcacagattcaatgcaactttcttaggcttcaaattgttttcaggtgtttagtgaaaattgggttgtttaccactatttcaatattcgagctcacaagtacgaggttacggtagttgagatctatgatcagtctagggcggtatgacttcatagttcatactcaaaaacattttttcagttgatttgatgtttgcactgcgaatttataaattttatttgcaggagaacaaaaatgtgtggaaactcattctgggaaagcacaatctaacagcacctatcacttcgtactctaggccagaggtgtttacaaagtcacagtcatacttctttgctcagtctgtgaaaaccattgcggtgacatccacagcaaagggtataacttcaaagcagcttctcattggtaccatcggggatcaggtttgtacgtttcttctcatatagagttactccatagattgaaaaaactgatactcaaaactgttgttatgaatgattagatattggcacttgataaacgatttgtggatccacgccggacacttaacccgtcccaagctgaaaaagaagaaggaattatccctctcactgatacattacccatcattcctcaggttcattcaaacccattttccttatatttgttacaactgagcaatccctggttttggttacagttagattaagtgatgtatcgattctaacgcacttgtcatattccacaggcgtatgcacacactcccacaaagtagaaggtgctaagaggcatagtaacagctccgtccaagctagagtcaacaacacacgtctttgcctatggagtggatctcttctacacaaggcttgctccttcaaagacctacgactcactaaccgacgatttcagctacgctcttctcctgatcacgattgtagcacttgttgcagccatctacatcacatgggtcctttcagagaagaaagaactaagcgaaaaatggaggtgattggaaccgtaaggtttaaaatccttcctctctttgggctttttcacattgtagaatgtttatgaaccatttttcgcactcttagagaaaaaaaaccattggcttagctaaattcttgatgttaggctttggaagttgagtactttttacagactcttgctttgtgacctttgtcacattctagagttgagctgaaccttctgaatttaaagtttatagaagcctctgtttaaccttttcttttttgtaaacagaaataaattccatgttttaagacccaaatcagcctgcattttatcgtcttcagataatgattga

SEQ ID NO: 152980 - DNA, 678 bp, Arabidopsis thaliana landsberg
gaggtgtaatacaaagtcatccaacgtccattataagctcactccaccaacgatgtcatcgatctgctagtagcacctgaatcatcagtcgatttagtcaccgtcgcacaagcccttcactgattcaacttcaccaccttttacagcaacgtgaaacacgtgctcaagaaacccaacggagtaatcgccgcctggtgctacaccaatccggaagttaacgacgccgtggacaaggtctttcaacggttttacgatgagaaacttggtcctcattgggatctagcgcgacggcttgtggaggatgggtacagaggaattgagtttccgttcgagaaagtggataatgatgagtcaacggaaagtcaaagttttccggtgaggtttgtaacggagaaagaaatggtgtttgaagagtatatgacgtatctgaggtcatcttcggcgtatcagacggctaaggagaaaggtttagagcttttgacggctgagatggaaggagagtttgctggttcgtggaaagaagatgggaaagagaagaaagttgttaggtatccgatttatctgttgatcggaagagttgcagaagaacgtgtataaattgatatctctcagttaggcatttcgtcgaacaccttgtgcttacacacaagaagacattagttttgattggttcaatgt

SEQ ID NO: 152981 - DNA, 2571 bp, Arabidopsis thaliana landsberg
ctttgttttaacatgaatctaagtgatctcgtgggtgttataggtgattggaagctgcaattagaaccagtactcgagtgctgtaacgagacatacccgaggggtaaccttcaagattctcttgacaagtcagcatgccaaagcaacaagaggctgaagctcagtgaaactcttccttctactaaaagtctgtgtcaggttagtttatggttactttaatcatttcttgttcaaagaattaagattcattgcccctatttattgcagagactcgatgatatctgtctcatgaataactgggtactaccaaactatcgtgtggctccatcagatggtaaagttttgagatcatttgccaaactcgtagttcagctccattactcccttcagatttgcatgttgatgttgatgctttgttcaaaaaggtggatatgaagctgaagtaagaatcacggggaatcatgtcgcatgtacaatacatggagaggaaaagtctgatgctgaggaagctagggaatctgcggcagcttgcttgctaacaaagttacaacacgacacagcagccaacttatcatgattatgtgagattcaagaacaactcagaaaccaaactaacttccagcatgagtagaaaacaaccctgattttgatatgtatggccattttggacgaatagcaagatttgtacaaaactccatcctctggttgagattttgagatatattacaagaagtcaaaggtattaactgatgcagaaactaaagtagaaccagaatcatgttaaaaacctaatcctaagcctcctgcatttaaaacaatcctagaaactcaaaaacccaacaaagtgctaaagagggatgaaagaaatcctaatcaaaaaaaaccctaatattgttaactagaccaaaaacctcaacaatggcctgaaagattagaccaatatgaatctcaacagacacaagaaacttgtcatgcaactaaaataggagctatactgtctcatggcaaaacagaggactccatcgcacctaaaggcccaaagacagatgtcgtcgcgagctttcagttcattagagggttattgggtttaagtggtctctgttgggcccaatggttggcccaatatttattgatttggattctgattatcccgggggtgatttcagtcatcgtctcgatcaatcttcaactctcaaattgaagtttccatgggaggccacgaaggtttcagcaaccaacgcctctcctccgccacatggttctctcatttccgtgcttcagctctccgatctaaatcactgccccctccgtcctcgcagactgccgttcgctccacctctggcgactctctggttcgtcgcctcggccttttcgacctcatactgttgggcgtcggcgcttccatcggcgccggtgtcttcgtcgtcaccggaaccgtcgctcgcgatgctggacctggtcagttgaatgaattactttttctcaccacctccttgattcgttcagaatcgcttagtgattattgctgccgttgcgtgcctaggagtcacaatcagcttcttgctagctggagcatcgtgtgtgttgaacgctctctgttatgctgaactttcatctcgtttccctgctgttgttggtggagcttacatgtactcttactcagctttcaatgagatcacagcttttcttgttttcgttcaactcatgcttgactatcatattggcgccgctagtatctcccgtagcttggccagctatgctgttgctcttcttgagctttttccagccctcaagggctctattcctctctggatgggaagcggcaaagagctcttgggagggcttctctctttgaatattttggctcccattttacttgctctcttgacccttgttctatgccaaggtgtgcgagaatcttccgctgtcaactccgttatgactgctactaaggtaagcttctttccttttaaccttctcttcttatctttaccaaaaaaaactcttcttcactatattgtttcttctgtaggtcgtgatcgttctcgttgtgatttgtgccggtgcttttgaaattgatgtagcaaattggtctccttttgcgcctaatggttttaaagcagttctcactggagctactgttgtcttcttttcatatgttggatttgatgcagttgctaattctgctgaagaatcgaagaaccctcaggtctgcctatatatatgttgaatgtacatactatctacaaagtctcttatgtctgtttaattcttgttcagcgcgatttgccaatcggaattatggggagccttctggtttgtatctcgctgtatattggcgtatgtttggtgctcaccgggatggtcccttttagcctcctcagcgaagatgctcctttagctgaagccttttcatcaaagggtatgaagttcgtctcaatcttaatcagtattggtgctggtgctggactcacaactactctgcctggtggtctttatggtcaggtgataaaaaaaaaaaggaattcctttggaaattcctttaataaggacctggaaaataagcaaacc

SEQ ID NO: 152982 - DNA, 1335 bp, Arabidopsis thaliana landsberg
ttatttttaatagtgtgtttcatgtctggtcttggatggacatcaagttatgaatcatgatggcttgtcaggtgtgagattgtaatgctacacctggtcgtttgattgatatgttggaatgtcaacacactaattgaagagagtgacttaccttgtactggatgaggctgacagaatgttagacatgggatttgaaccccaaattagaaagattgtatctcaggtatgtttgtactttctccaaagctatcatgtagtgtctttaaggaaagggtggttgaccaacattattagtcgatagattttatcttcccagtttattgttctgttgctaaataagaaccatcacggcttttgttcagaacttgagattgttccttatttttcacagatccgacctgatagacaaacacttctttggagtgcaacatggccacgagaggttgaaactcttgccaggcagtttctacgagatccatataaggtttacttgctatttagtttaacttattaggattgagtatactgttgttgaataaagtaggggatgttttatcttgtcccctgaaaacagttgttattttgtaggccattattggatcaacagatctaaaagctaaccagtctattaaccaagtaatcgagattgtaccgacgccagagaaatacgacaggttcttaatttttctaccattagataagaagcgatttatatatatatttatttgccttcttttatgatatgatacttatgccttttttctcgtttgataggctccttacactacttaaacagttaatggatgggagtaaaatcctaatttttgtggagacaaagagagggtgtgatcaagtgactagacaattgagaatggacggatggccagctcttgccatacatggtgacaagacccaatcggaaagagaccgagtcttggcagaatttaagagtggacgaagcccgataatgactgccactgatgtagcagcaaggggacttggtaggattaactgtgatacacaatagtagacattattgttagaccattcagttaacgatgggttttaaagataataaaaaaagtcgcctggctgccgctttccacagtttcctctggtattagggaaaaaagctcatagaaagaaaaaaggagcttctttgaagaatttgtttcctgcatccatctcccgggcatgaagctgattggtttttgagcagcctgggcgactgacacctgcatgcattaatagtgttataacgccgtcacgaacactccttatccctgcaagtggaggtgggcacatttacttggaaaaatgtgttgcacaagtttc

SEQ ID NO: 152983 - DNA, 1366 bp, Arabidopsis thaliana landsberg
aggttccatggttactctcctaccgtcggtcttccccaagctcgtttgtcactttcgtcttttcccttttttctgggtaaaagttggtttatctcaaccggaatcagaaataaccgattggatgactaaaccgaatttttagttaggatgattgtagaattaggttgttttgaacttctgattgcaacggaatgtttcattttttaatttctatgggagacttaacttgcaaatcaagtctcacacttttgtgtaatggtaaaaacagggcaatagcagagtatctatcgcgtgatcttccatacaaattgtcactagatgatgtgtttatcacatcgggttgcacgcaagcgatcgatgtagcattgtcgatgttagctcgtcccagggctaatatacttcttccaaggcctggtttcccaatctatgaactctgtgctaagtttagacaccttgaggttcgctacgtcgatcttcttccagaaaacggatgggagatcgatcttgatgctgtcgaatctcttgcagacgaaaacactgttgctttggttgttataaaccccggtaatccttgcgggaatgtctatagttaccaccatttgatgaaggttagctttaactttgacaatgaggaaacagaaccaaagttgttgtttggaaattgatgtatacaaatttgtgtgtttagattgcggaaagtgcgaaaaaactcgggtttcttgtgattgctgatgaggtttacggtcatcttgctttgggtagcaaaccgtttgtgccaatgggtgtgtttggatctattgttcctgtgcttactcttggctctttatcaaagagatggatagttcctggttggcgactcgggtggtttgttaccactgatccttctggttcctttaaggatcctaaggttaattaaagcttcatttttgtttgtttaaattgatgcaaagagcgcaaataagccgcttacttactgaattcttggtcattttgatcagatcattgagcggtttaagaaatactttgatattcttggtggaccagctacatttattcaggtatatatatatatatatgtatatgtcacattcaaaatcaacttctattgtttgtgattatctgaagacattaattttgttcttgattgtgttgcattaggctgcagttcccacgattttggaacagacggatgagtctttcttcaagaaaaccttgaactcgttgaagaactcttcggatatttgttgtgaaaggatcaaggagattccttgcattgattcctcgcatcgaccagaaggatccatggcaatgatggtgagcttatttataaattgtgaaaaatgttcacaaatttttacacatatta

SEQ ID NO: 152984 - DNA, 753 bp, Arabidopsis thaliana landsberg; identical to SEQ ID NO: 51865

SEQ ID NO: 152985 - DNA, 1896 bp, Arabidopsis thaliana landsberg
atgagttctagccagtctttttcgatcccgagcacctctttcgccgattccagcgactcgaatcatccagatgaccttccccccatctacaaacggcgagcagtttggacgtcctctgaagatgatgttgtgtcttcttcgagtgccccggagcagatgacctctttcacggctcgggaagatatcaatgccgatattgctagggaactggatttgcccgaaaatcccaagccgactctcgtccggaggtcccttgccctgatggctgacgaagccgggacatccaactggcgagacgtgcctgagcccttaatgccgacgataaagattgaggactttctttatttcggcccgaatgagacggaagatattctgtgtctcaacgagcatagggcttttgagaaagccgagaagaagaagaagaagaagagtaagaggacgatagtgccggatccccttggctcaacattatgcaccgagcggtccctttaggatctgagggcccgattcggtcttggtgaggtcaccttgcgtgtgccgagccccgatgagcgagccgataatccccccgtgggcttctatactctgtatgagggattcttttacggttgttttttgtggttgccagtcccgaggctggttttggagtacgtgacatcgtaccagatcgccctctcgcagatcacgatgcggtctttgagacatctgctcgggattttgattcgaagttacgagtctgagacggagataacgctggctcatctgagaaattttctcgagatcttgcgggtgccaaaatccgaagcggaccggtactacatttcccccgctaagggaaagaaaattatcgatgggttcccgagcaaagacgagccatataccgatcagttcttctttgtagccattgaagatgctattcatgaagatctcctcgggactgttctgacgagatggggaattttgggtagttgtagttagaaatttattagtacccaaggtgatgttaatttcgttctctaattgcagttttccttttgcagaacgcactctcaagtttctcgagccgattccagacgattttctttcggcttttcacgcgttgtcggctcgaaggtgcgattggctgaaacatttttctagggaacgagttgagcgtgcgcttcgtcttcttcacggcgtttcttgtcccactagttcggagtcttccgatcatcgcactcaatttttcgtggacatgcaatcgacgaaacttactttgcgggaggtctatgccaagaagaaagaggacaaggagaggcgattggcggaagagaggcgccttgttaatacgggattgatatcgccgcgggccgatcctgaggcgacccaagatgggaattttattcccgatgctatcgcgccgcagactgctcccgaggcgtctcgagatggggtcaatcccgatactgccgggccggttgacgtgacgcccgctgaggctcagggagccgagccatccgctgctgcgcccgaggcggttgtggcgttgcctgcgagtgacaaagcggcaggtaagcgcattcgggttgacgatgagtcgtcaaagaagaagaagaggaagaagaaggcatctggttccgaggcggagaaaatactccccatctttgaagatcgtactgcctcggctaatctgctcgggggatgtgttggtcccttgcttcctcctccagatacttttctggaatctcggaagtatgccgagactgcatctcattttctgcgggtacgagttctgttgcttataacctatcttggtgttatcattataaagctaacttttctcttttccaggttgttgcttcgatgaaccggatggtacattcgtatgattcggctatgcgaagcaacaggagggac

SEQ ID NO: 152986 - DNA, 1151 bp, Arabidopsis thaliana landsberg; identical to SEQ ID NO: 31163

SEQ ID NO: 152987 - DNA, 2014 bp, Arabidopsis thaliana landsberg
ttaaaagaaaacgaatgattgagtttggtttctttgtctcatctctctgtttttccgaagaactaacgcatgtcgggacctcagtgctgtgaaaacccgccaactcttaacccggtttccgggtcgggtcatgtcaagaagctgggtgggcttgatgcctacgtctccggctctgccgagtccaagctctgcgtcctcctcatttctgatatttttggtaaaatactcttctttctttgctttgatctgttttgactttctttgttttagttgaaatatgatcggagtaattagggtttttgtttttctctttttggatccgttttgttgatttgatcattgcatcattgttgactctgactttaggtacgtttttgttcttcaggttttgaagctccaaacttaaggtactactactaattcttccctcttcatcgattcaaccattaaaaatggaatctttaacttgggtttgtttctttgaaggaattagatagtatttagtagccacatatgaggtctagttagaattttcatttgagcctgcaaatagttttgttggttttggattatgtacaagatgaagcatacctatcatgtgtctttaagttgacttgtcttttctgaactcagttgataagatctaaatgtttaatttgaatcattgctttgattgcattgcattatctcaagtttatcttgtacaactatggaggaatgtttatggagtgttaagtcttaattttatgtcttaagggcgcttgcggacaaggttgcagcttctggattctatgttgtggttcctgattactttggtggagatccttataatccctctaaccaggacagacccatccctgtctggatcaaagaccatggctgtgttcgttcctcctcctctcctccttataataactgtcccatacattctcaacttctatttgaagttttgttaacaagtttgactcaatgtatgtgttattgttctgttattttgatagattccatctgaatcagttcatatcctcttttgtttttcaggataagggctttgaaaacacgaaaccagtacttgaaaccataaagaacaaaggcataactgccattggagccgcagggatgtgttggggtggtgagtttttgttagaaatctatgcctaagagatgtgacgctctctttttgtctaatggatagaacttttctctcttgtgttattcatcttcagcaaaagtagtggtggaactgtctaaagaagagcttattcaagcagctgtgttgcttcatccttcttttgtcaatgttgatgatatcaaaggttagtgactttgctacttccatcttgattcctcacatagaaccaaggaacattagttgtcatgccttgcctaatgcgttgtaacatttagagtcacctataggattgcgtaactgatctcgccatgattagatactatcattattactgtaaagaatactaattcacatttgcaaacataaaaaacactgtgattggtccggtttctttactttcaccggtctttgatgatccttatcaatttcacgggtttattgcaggtgggaaggctccaattgctatattaggagctgaaattgatcaaatgtccccaccagcactcttgaagcaatttgaggagattctatcttccaaacccgaggtaagctgctttatcaccgcaactcaacagtgtaatttaatcacctttatctaactttaaaacggatcctgtaggtgaatagttacgtgaagatacacccgaaagtgtcacacggatggacagttagatacaacatcgatgaaccagaggcggttaaagcagcagaagaagctcacaaggagatgcttgattggtttgcgacctacatcaaatgatttgagaaagaaagaaaggtattgtctattacttcatatatgcaaagaataaaaattaaagagagacaaagcaaaactcttggttggcggtacaatttcaacattctatagacttaagaagc

SEQ ID NO: 152988 - DNA, 1634 bp, Arabidopsis thaliana landsberg
tcggaacataaagttcagctttctcgcctcacttgagttttgggtcaccatcgaaaagcatgttgattcagtggtatatcaatgtagattctgagtgtttttgtgtgaatctctcgatttatctaccttaatttctcgctagcatctggttgttatgtcttttcaaaatctgcttgttgatatttccagtgatttatgtgacagattaaggaactcaactcttatgttgcactaagaaaaacgtaagtacgtctacttccaaggagcttcattgtctgtccctatatttgattttctcatataccaatccttttagcaaatgtatgtttttttatatagagatatagatcggtatgtgttaatacattcccatttgttgtgtgacttcaggtacttgaatacactcggcaacaagaaagttgaactttttgatactggagctggagtcagcggtgaacccacagctgaagaaaacgtccaaatggcttcaagtgagtctgtctaaatatgtcatctattcagttgattttcttctgcaaccagaaaaagtccaaaatttgacacattggaagcttaaactgttttctatatatcagaatgggtaggatagttagtcctgcacttttggctaatggtttggtatcatttgatgtgtttcagtaagtttctagtggagagacatatatgacagtaactgtttacctactttaccttttaatgtgtttatgttggtggtttgatgttagtaaatttctagtggaggatcatatgtggctggatttctaatatctacatgtgttccaagaataattgtccttgaactatcctgtggaaaaagtgtggaactttatgttgactcttgttttatcgtttatatatatgtagcaatgtcaaaccaagagcttgtcgatgctggaatgaaaaggatggacgagactgaccaggctattgaacgttctaaacaggtaagttacagaaagaagtatatctcactcagtctttgatgctatgtctctagtaacatccagtgtttctttccaggttgtgcatcagacactcgaagttggcactcaaactgcatctaacttaaagggacaggtaacacaaagcattcaccatctcttctcgatattcttatcaggtgtagttccaaatatgctgacctaaatattttcagacggatcaaatgggccgcgttgtaaacgacctagacacaattcagttctctcttaagaaagcttagcagctggtgaaagagataggaagacaggtttgtatgatctctcacaggacataagattctaagacactgcaaaagctaaaattgtgtctaactattatcgccgtttcctttcaacctcaattctttcttgtcacaggtagctacagataaatgcataatggcgttcctgttactgagtgtctgtggtgttatagctataatcattgtgaaggtaaccattgcactctccaacttttctcattacggcccaaataaagctatgattccttaagcaagttttaacactgcttaaataaaaacacagatcgtgaacccaaacaacaaagacatcagagacatccctggactagctcctccagaacaatcaaaaaagctcttgtacttcagagaa

SEQ ID NO: 152989 - DNA, 814 bp, Arabidopsis thaliana landsberg; identical to SEQ ID NO: 12637

SEQ ID NO: 152990 - DNA, 991 bp, Arabidopsis thaliana landsberg
tttgattaatataatttcaataaaaataataattgaaaggggatcaaatttgtatttaattttagttaaatcaaatcagcccccacaaaaacattaaagaccaatataagagagaacatgagagtccaaacttcattcaattcaagtctcagttccaagaataaaaacaaagattttgtattttcatttaaagagatgaaatcaatcttagccaacacttctctcgactcttcattctctctttctaaacgttacttcaattggaagaagaagaaagttcaagaagacgacaacgaagaagaggaagaagaagaagacgattacaacaacaacgaggaaaaagtcttgacccgtttcaatttctcctctgacccgaaccgaccggatcatttcaatacccaacagataatgaagaaaaaaaagaaaaagactctcgaaaagatccgttacgctctcgggttctctaactcgggtctgggtttccgggttgtgggtacgttattcggtaaccgtcgtggacacgtgtacttcgccgtacaagatgacccgactcgtttacctgcggtgttgatccagttaccgactccaacgagcgttcttgtccgtgaaatggcttcagggctagtgagaatcgcgctcgaaacggctgcgtataagacagattcaaagaagaagcttttagaagagtccacgtggagaacgtattgtaacggtaaaaaatgtggttacgcggcgaggaaagagtgtggagaagcggagtggaaggtgttgaaggcggttgggcctataacaatgggtgctggagttttaccggcgactacgacgacggtggatgaagaagggaatggagcggttgggtcgaaaaaggtgactcatgtatatgagagcacatttcgagagagtgattgggtcaagagactccgagacgtattacatgatgaatcctgatgggaacagtggacctgagcttagtatctttttcgtgagggtt

SEQ ID NO: 152991 - DNA, 631 bp, Arabidopsis thaliana landsberg
gactataggaaggcctttatggagtttgaggcggaagtggttgccaaactcaccgagaaagagatgaatgcaataagcatcgaatacaagatagagatgagcaaagtgagaggtgttgtggaaaacgctaaaaagatcgtagacatcaagaaagcgtttgtgtcattagagaaatacctttggggatttgtgaaccacaaaccaatctccacgaactacaagcttggacacaagattccggtcaagacatcgaagtcggagagcatcagcaaagacatggttcgtcgaggcttccggttcgtgggtcccactgtggttcactcattcatgcaagccgctggtcttacaaacgaccacttgatcacttgctgtcgccacgctccttgcactctccttgcaaccaatccctaattattaatttttattttaattgaaagtggtgtttttatttaactttcgagtgcaaaatgtaggtttaggagaaaagagattgcagttttttaaaattggcaatgtaagataaaccagctggtttgatttttttcttgtgtgtgaggtgtttaaaatcacatgtataatggtttttgatgtatgtgtggtgtggcaaattgaaatagtaattgattttcat

SEQ ID NO: 152992 - DNA, 1168 bp, Arabidopsis thaliana landsberg
gaaaatgagcattttacgtatgattgtactttcaaaactgaaaacaaaaattttggggcaattccattgacgtttacccagtaggaaggtacttctgcaaaaccacagcacgggctgaaactctatatcctgaatttcagattcttcatttgtacattatcctgaaccttaaatgccatgaatctatgattgtaggacacgggtgacacttaaaagagatggagttgttcttgacttggtacctcctctgaccaaagttcacaacctaatctttggacgaacttgggtcgattcgcctggggaaatgatcatgacaaatcagaccaccggtgacaaagtcgtgctttactttcaaccatgtggctggttcgggtaagtttttttcactgcaacctcatttcctgttatattttttccattcaaagctgaagaaatgtgcatttatggtctctacagatctggtcgatatgaagtggatggatatgtctataacgcctctgaggagcctaagatactcatgactggcaaatggaacgagtccatgagttatcagccgtgtgatggtgaaggtgaacctctcccaggcaccgaactgaaagaggtttgccaaatcttcctctgtcattgactcaattctctttttgtaaaaatctcagtttgatgaaacattttaatgctgccttttgttcataggtatggaaactcgctgatgtgccaaaggatgacaaatatcaatacactcactttgctcacaagattaatagcttcgacactgccccgaaaaagctgttgccctctgattcacggttacgacctgatagatacgcacttgagatgggcgacatgtccaaatcaggctatgagaagagcaggtatggtagcaaaaacttgtccttaggatctgaaattgaagtaaaagctaataaattgggatttttctaattcttctcctcatctttgatatgaagcatggaagagagacagagagctgaaaagagaacccgcgaagagaaaggccaagcctttactccaaaatggttcgatgtaacggaagaagtcactgctacaccatggggtgatctggaagtttaccaattcaatggaaagtactcggaacatcgtgcagctgcggataactctgaagataacaccgaccctaagtcgatac

SEQ ID NO: 152993 - DNA, 3103 bp, Arabidopsis thaliana landsberg
gacaaagagttactatgcttgtgttggagagagtacacatgcttaccagagcccttcaaaggacctatctgccatcaacaaccgcttgaacaagtaagtagaaaaatcacgtctctcatcagcttcttccataaaaccaatcactgacccaatccaatttcatctggtgtcacagcagcagcagcaaccgcaagaggacgctaaactttgacgcaaaagcagggatggtcagcgattccatggtagcaaatagccttaacctccaaaaccaaaatcaaaaccaaaatggaagcgatgcatcgtcctcaggtggtgccgcaccccttaaaaccgagccaacagattcatagatatctctctctacttgctacaccaacttctcttcagttatagcatctgtaaatccttatgttgcagagtttgcttttatgtttagctttctagtttatagtgatcacctcaggctatgagcggatggatccctttattgtttcttttttctttttttatcttagttaagtcagtcttaataagcattaataaatgtctttttcttgttcactctttctaactgtgttcggtgtcccatctactaaatttattttccactttaaaaaaaaacaatttgtgacatttacttaacttggaacatatacagtacagttaagcaattaactataaccaacaaattgtctgaacaattgtctgtcttacttttttagctctctataaatttacgccgcaaaacaacactttatgtcgatttcagaataacttactactccagcatatttctcaaaactttctcaataggttaaatttaaaacaaccttgcaacttatgaaaaaatcctcagcaaatttgccagaaaagagtgttacaatggctacaatcacattcatagattaaatatctgaaccggccagtgacgcttctgaccctttgagctcagcccagtagcctctaacgagatgtctatgctgcgatgctcatgtgctcgtgcaacactcacacgcagatgaatgcttgaggcgggacactcttcggttccgatggcttctcttctgtcattaccagacagaaccgaggccggtgccactgagattggttcttgaaaagttaagattgtctgagcccagtgtgttgggggagtgtagggtgatgtggatagtacgggggcctaagctgatgtagagaatagccgtaattatttccggttagtttcggtttacaaaaaagggtaagaaggtaattgtttttctatcccgccggggtgtctccgctttcttaaacctctctcttaagaacttggcgccgttatctttctcatggcggcgacaatggtgaagcacgagattctcaactacagcgaggatgaagaagaaaattactcagacgaaggagattggggagactggaaagctgatgataatggtatagaaggaggagaggaggaggaggaggatgatggtgacgactcggaatctgattttctgtgtttgttttgtgattctcacttcgtttcctgtgatttactcttcgaacactgtcgtctaagccacggattcgactttcatggagttagaaaggaattgaagctcgatttctactcttcttttaagctcatcaactatattcgctcacaggtttgtgtttttgcttccttcgtttttggtttctctaattttattgtttttgtttaaatttggttcctttaatgaatttaggtggctgagaacatgtgtttcagttggaagattgaagctgatgattacaaagatgttaagtttccttgggatgaagagaagtatctgaagcctttttggcaggaggattcacttttgtactcgtttgcagatgatgaggaagatgaagaagtcacgtttgacagagaggaagtgatggaggaattgcagaagcttggggatttaagcattgatgtcgaggctttaggggaaagctcaatgtcgaacagtgataaatgcaatataaatggaagtaaggatgtaacttcgctctcaaactgcaatggcctaaagcaaagttctgcggatgatttgatagtcaatgggaaagatgcagaaccaaaggtttgtgatggaaggctagttaataggaacatcagaaaggtgaatgagaactattttggatcttatagttcgtttggcattcacagggagatgctaagtgataaggtaatgcactaatcttttctggaattgtgtcataattaactaacctgcacttgcaccatatgaagaaagactatcagctgtcaggtttattcaatttgtctgatgtctgtaacaggttagaacagaagcataccgagatgcacttttgaagaatcctactctcttgaatggctctgttgtaatggatgttggttgtggaactgggatattgaggtgagtttgcagttatctttctcactctatattggccatctcatttaggtttcttctcattctctaaacgaagctttaaacatgtggttctatgtgcttcttttatttcatattctgaaggcttccttgaatttctcttgcctatatgcagattctttgattgtttaagtcaaacttttggtacttcttatttttagtttgcatgcaataaccatttatcctttgtctgcagtctttttgctgctaaagctggggcttcaagggtagttgcagttgaagctagtgagaagatggccaaagttgcaactaaggttacctttttttctacttgttacaagattttcattatttcttttttcctcatagatatcaattatttacctggtttctagcagattgcgaaggataacaaagtattcaatgataacgagcataatggggtacttgaagttgcacactcaatggtagaagagctagataaatcgatacagattcagcctcatagtgttgatgtgttagtcagcgaatggatgggatactgccttttatatgagtcaatgctcagttctgtgctctatgcaagagatcggtggttgaaacctggaggtgcaatcctccctgacacggccactatggtaaagcttatcttttgcccttcaaatgttgtctttttcatgaaatcatcttgatgagtt

SEQ ID NO: 152994 - DNA, 1391 bp, Arabidopsis thaliana landsberg
ctcttctctgccatggctcccgcactatctacttgtgtgccttgctgctccatcatggctttctcaacatccaacgcgcttcgtaaccaccatcctcaaatttctctcaggaactctcttcgcactcccaaatcgccttcttttgtcaggtactttctctttgatgctgcttttttttttccagttctcttcggaggcttttaaatcgaagaatcatcgtttgatagttccttttgttttaaggttttcataaacttacggattatgtgggtgaccgttatcttcttcattcataaacattgtcaattgaattccgacggcttaatttgtggatgagcttcttactgctgcctataaagtttacaactttcaatttcacttaagagagttccattgttgtgcttattagaccatttggtacacgttatcattgtaatgaggatgattgaaattctcaggcttcccctcggaaaggtgttacagagcaggattgtgatacgtgctgcttcgtctgcggctggtaatccacagtctgatgctgactttaatccgtatgaggtaattgatcgttagagccctataaaggacttgttttgttggtcgttgtgcattactcatgacatgagtgtgtgtaccttctcaggttcttggtgttaaccctatagagggatttgacaagatcaagcaaacttatggaagaaaactcaaagatgctcagaggagcggtgatgaagccactgctgctctagtaggttacctctctctctttctttggagtcctgtacgtgatgatttttgtttgtgtcttgttaacatgtcttgtgtttaccttttgatagctggagaaagcatatgataagctcatgtatgcccagttgatgaataggaaaaagggtgtgacttttggttcgtttaaggtaggtatcgtatcctctttcttgtcatatgctgtcttgagctctatgacctttctttctcaatcctgggtgaagttttcataattcaggtttccaaggacattaaatatgctgataagcagcccattataccatggggtccaaggtagagattctttatgagtctactcgcattattaattttcatcattcaaaagcaggatctgttactaatcatgatttacccttgttgttacaggttttccaggtcctccaaaaatgatatgttgatcaacctagcaatatcagttgtgtttgtaagtagtttttaagaaatatgaggtttgctattattagaaatgtcaattttgtttttaaacatctgtacccttaatgaatccaagacatcatgcatagatgactgaattcttgctgaaaaagtgacttgtttcgaacacatgtatgcatatatgacattttaagtacaatcagata

SEQ ID NO: 152995 - DNA, 791 bp, Arabidopsis thaliana landsberg
gcggtgaggcttttggttccacaagcaaactttgattcttcaaaacttaaagttgagttcttaggagagttattggagaacaagagtaacggatgaattattacgccgcggacttatattctttcgcattgtgacttcactgctaacttaacgttaacaatctcaaacgttatcaatctggatcaactagaaggctggtacaagaaagatgatgtggttgctgagtggaagaaggtgaatgatgagctgcgtttacatattcattgttgtgtgagtggtatgagtttattgcaggatgttgctgctgagcttaggtatcatattttctccaaggaattgcctttggttagtcttcttcatcttttgtctatttggttcttaatgaatgtgaaaatgactatctaataactctttggtgttgtgtttgagataggtacttaaagctgtggtgcatggagattcagttatgtttagagagaatcctgagctaatggatgcttatgtatgggtttatttccattcaagcacacctaagtacaatcggatcgagtgttggggacctcttaaggatgctgcgaaggtatgatctaattcgcgctggctcggcttattgtttgtcctttttatggaaatgtgaaatctttgtgtgtttttggtggtgaagggaaagcagcagggcaatcatcggggcttcttgagttcgacgaaatcgacccaataaattccccataagtctatcttccaaaccttatttacgaatcttctgtgagacaaagttgtacattctcgtg

SEQ ID NO: 152996 - DNA, 628 bp, Arabidopsis thaliana landsberg
aagagccgttggagagagacagttcgagaaagaatcttagagagaaacctgatagggtcgaatatggggtgcgatcattgggatgatgcattctgcatatttcgtcgggagatcggagattctggcttgcattaactctactctccaactcaatctctccaaagtcgaagaggtaatctattgagtaaaatcgcttctcttcctgaacctagtttcggattcggaattggatcttacgattatcgtcttctatgaacaaatacggtgaaattctgtatttgaatacggaatgggcggtttcttatctgtgttggtgatttgttgatctggaaattgaacacggatttgatgaatttattatctgtttcttctggatctgaatacggatctatggattaataggcttgttcaggccctgttcattgtcagctgatggattcggtgcatcctgggtctgatccgatgcacaaggttaactttgatgcgaagagtgaatatgagatgattcagacctataaggttcttcagcatgtgtttaataaactcgagatcactaaggtcctccctcttcttccttcatttttatcgataattgaaggttttaattcgaggaggcatacaatagaac

SEQ ID NO: 152997 - DNA, 626 bp, Arabidopsis thaliana landsberg
atgaacagcgcgtatagcgcgtttcatcaattcgggtaggttatagaccacgaaaatcgcaggattttaaatcatttgaggaaatgagctaaatgaagcgcgtctgagagatcaaaccaaacaacatgacaattgacaacgtggcattctatgggctgagtcttaatgggttgggcttattatttcaccaaattttacttttatacgttgtcgtttaattcttgtctctttttccttcttcaatcttcgtcttccaaattacacagttctcttccctccaatccttcatcggagctcgttgtcgccgcctcactgtatatcgttgccgtcgttgtatcaacatctcaaggtatatatagcttgtgatctttcaattgtagaatagtttttgtgattttgtatgtaatggctgtgattttccatgattctagttttcctttttcaaaatagtttctgagtttttagcggcctccgtttttttttttttttcaccaggaagcttcgttagatgcggaaaacgtcatggacgcgaacaataccttcgattccgtaatctcttctcacgtcttccttttctacaaaagccgttaaatcgtctcaattccacgattctaacattcttctta

SEQ ID NO: 152998 - DNA, 3800 bp, Arabidopsis thaliana landsberg
aatttttatttgattggaagagatgagaacaaaagctttaggaggattcttaagattgatagaagggaccaaaatgagttaaatttacccaacatcctacaaggtatacaaaagacgaaatgcgcgaacttaaaagacggatgattgtaggaaacgaggagtctggtggctttaaagcaatcacaacttgctatggaatcattggtaaagtctcttttactacaactgcttgttgtcctttctcattgttttggtaacgttgtgaactcatggagcaatgttgattattctggtgcagggtttgtgagattcttggagccttattatatgctgctgataacaaaacgaaagaaagtgggtgagatctgtggccatacagtttatggtatagcagagagtcaaatgatcgcgattccacatccttcaattcaatcaaaagtggctaagtctgaagccgagctgaggtattttatcgataattcttttaaacggctcgagatgaaaactttcttgtgtaaactttagtagaacacatatccgacatgtattcccctttctattataggtacaagaagctcttaagcgtggtggatcttagcaaaaacttctacttcagctacacatatcacctcatgtattcccttcagaagaacataggcaacactgagagaggaaaccctcatgacaacacaatgttcgtgtggaactccttcttaacacgcgagatcagaaagatcctgcagaattccatatggacagttgcattgatatacggattctttcaacaggtaataatcaaatgcatgcctatgtgactggtttagactgcagatttttcaaaatgtttggtaatctaaagtctattgatcctctgctttgtctagactaaatgttcagtatctggtgaaaaatttgtattcactatcattgctcggcgttcacggcattatgctggtacaaggtacttcttcagtttgaaatctttattcttctttttgaattttttttgtctcacggcctacttggtctctaacataattgtaatattggaaatatcatatttcgatactccctctgtagataagggctagtcttgatatgcctttgagcttaactcctccttgttatttgttaatgtgcagatatttaaggcgtggtgtaaatgatataggcagggtagccaatgatgttgagacagagcagattgtttccaaagtggttcctgcgggtcagaaaatcccgataacatcagttgtgcaggttcgaggctccatacccctattttggtcacaggaggcatctgttttcaacccacagcccgagattatatgtaagcaccatatgagtttgcaaaagggatccttaggtttttcttgcctcatcttgattctcttgtttttgtctttttttggttcatagtgaataagaaggacgcaaattatgaggctacccaacaccactttcagaatctgagacagaggtatgggaaccggataataattctcaacctcctaaaggtaggctctctcattttctaggaaaagtcaaattcttatgcccgttcttggattattgaaagattgagtgtatcgttgctattttgtgttgtcagactgtgacaggtgagaaaaagcaccgagaaaccatcttaaggggagagtttgcaaagacaatccgatttattaacaaaggcatggacagggagcatcgtttaaaggcaatccattttgatctaagcaaacactacaaaaagtactgcatttatgcaccttactggtttgtaataagtctgatctccgagaatttctaaccatttttccttcaatttggcagaggagctgatggtgcattcaaccacttgtgtatcttttcaaggaaatcattggaactaactgacctgttttactgtaaagctccttcaggtgtaggagctgaagaagtaatttatgattcatttttcaagtaagtttcgtatgctatgtctaatgcaaatgcagtcttcgtgtaacagctctaatccataattttgattgtattgcacgtttcttactgagtgctaatattaatgctaccatgctccagtaaccctattccaagtcaagatgaagaggcaagtagtccagaaaaagaagatatgaaggcggatatatttctgcttcaaaatggggtcttgaggacaaactgcatagactgtttagatcgcactaattttgcgcagtacgcccacggattggtttctctcgggcatcagctgcgtacattaggtatctcaggacctcctgtcgtcgatcttaataatcctctggcaatagaactgatggacgcttaccaaaagatgggtaatacacttgcgatgcagtatggtggctcggaagcacacagcaaggtgagtcattgattaccaacacatttttttcgtacgaaaggctgttgatggatctttgaactatgtgtatcaactttagaaagtttatggtatacagatgttctgtgatctgagaggtaattggaatatggtgatgaggcagcgtgatatcttcacagctgtacgtcgttactacagtaacgcgtatcaggacagtgataagcaaaacgccatcaatgtgtaagctccattttagaaactttttgtcttgttttttcgtctttacatttgctacgtgtttgcttagtgtaaagttgattgttgacaggttcttgggtcatttccggcctcgactggggaggccagcgctatgggagttggattctgaccagcacaacatcggaagatctggttctaacttagatatcgaaaatatgaggtacactacttttgttgaaaaattggctaaaccagaaattagtcatgtaactgaattaatatatggttcaatacactgatatgaattgcaggccactaattagaagatcattttccgataacattattatggactgtgatttgaatctggaggagctggtacgcgaaaattctcagcctacatatgaagggttaaacgggggtgtctcaggaaccaatttagaatttccattctatgaaactgaaccagcttctctaaggtatgaatcagagtctcattaacttgttgcaagcattcattaacatactttgtctgatttttcatcctctttctttgatcacatcttcagcttcctctcggttatgcgcaatgaagagcttatgagagaaacagggtcagggcagatgtttcaaggcagttcctctaattctgattcccacaggcccaatgatatacctggtttttcacactcatacgtaactaagttcacgccggcagaagacatatttgaacgtggcaggtaaaaacactcatccgtatagcattctgatacatttacaatattcagacatgaaacttccttctaagtaagccttgtaatgttctaaatgtttcctgcagctcaaagtctgtttcgtcagataacttgttcaccgaccgggatgaatccgtcacttctttaactaatacgaactccagttttgaggtaaatctccttcatccacatatcattcttgttgaagttaacgatttttcttccaaagcaaacaaagacactgacttgtttggtgtttcccattatttacagtttcctataatgggtggttccgatttactacctggtttctcaaatgctttcgctcggtgggtattctccgcaagagcatggtaaagagggtctggagaaagaaatgagccttgcacaggaaggtaacggtggttacttggcaggtacggcagggttgaacagagtcgtaataacaggtaaagcacaga

SEQ ID NO: 152999 - DNA, 1090 bp, Arabidopsis thaliana landsberg
tctaagttgttctggggggtttgatcagaagtcggctgcagagatctgggaaggacttcactatcatgaaagtgttaccttcaggagtctatgagtacaggttcattgtggatggacagtggaggcatgcccctgagctccctttagctagagatgatgctgggaacactttcaacattttggatcttcaggtaactccattctctttcgaattggttagttggttggtggagaaatgaaacggttaatgagagactactggaactgctaaatcagggttatagggaatgggaaagacatctatgttgattagcaagttaaaaaaccaggctttgtagttcctttttcgattttgccgtgtgaaaacagcagagatactttgatgttatgcaggactatgttcctgaagacattcaaagcatatctgggtttgagcctccgcaatctccagagaatagttacagctacttgcttctcggagctgagaactactctaaagaaccgcctgtggttcccccgcacctacaaatgacactgctgaacttgccggcagccaatcctgacattccatctccgctgccgagacctcagcatgtcattctcaatcatctttacatgcagaagggcaaaagtggtccttctgtggttgcgcttggttccactcaccgatttctagcaaagtatgtaactgtggtgctctacaaatccctgcagaggtgagtgaagatgatgcaattccaatgggtagttagcatgtggatcctcggcatgctcttatctattttggtgttaaaacgttaactcatggagtatgggtgaggctatatagaaaggagacacacgaagagagttatttccaggcaaagtattccctcgatacagcgaattttgttgtctttaaaagttgtcaataaggtttaccaacagaatgaagatgcagtattcagtcagtgtctgtgtaatcttttgatttgaagacttcatcatctgttttttttttagcatagaagaatgcaggaacgacttcacttgtaaaaccggcaaatcttttttatggttttgttttggggctttcaagttttcacaaaaa

SEQ ID NO: 153000 - DNA, 3426 bp, Arabidopsis thaliana landsberg
attgacttacaatttttttctttcttttctcttccattgaaggattcttaaaggttgatttgcatataaaccatggttaggaaaacgacgtcgaagagttattcggtggcgttggtgatcgttatggttatatatgttgctttctcctccgtctacgatcgtcaattgtttccttcgttaagtttctctcaaggtatgtacatatcaaattacttcttcgattcaaccaaataaaatctttaacttcttgtttgagtcgtaggctacgatcaaacacttttacttttatattacctattgttttaacgatcaagtcaacatttttgcaataactcacacatacttggctggatttgaatctaaatgctaacattacgaaaccgcactaattctaactttataagctccgatcaaaagaagcaactaaaagtatataataatgatttttagtctaatgaaactttgtttcttgttagtttaaaattacgtgatagtttttttttctttgtttttctttgttaaaaggttacgtgatagactgatatatagttaatccggaatgatctataaatagaataatacaagttaatatattgcatgggaattaaattcctgccaataatttacttataagcatgtgaagtgtttcttcatttaataacttttgtttttgttgaatatttttatagtaaaaacatttcttgataaaacttttttaatagttacttattgttttcttacaaatatttacgttgcgttttgactaaaaattgaaaaaagtttcctctgtaggtacgttacaacaaagatgggaatcaagaagaacaaagcaaaacccacaagtgatggctgcatcagcaaaaatcacatgtgaccgatcccacactagttacgatctttgctccatcaacggctcatgtattctcaaccccaaaaccggaactttaactctcatggacccaacatttaccacatcagcaccacttgtcgagaaaatcaggccatacccaagaaaagcagaaaagtggatcatgcctaggatcagagagctaaaactaacttcaggcccattggacctgacacgatcatgtaatataacacatgattcgccggccattgtgttcagtgctggaggttacaccggaagcatttatcatgatttaatggatggtttcatcccgcttttcatcacggccaacttggtatacccggaccgcgatttcatcctcgtggttgtgaatgcaaaggaatggtggatgccaaaatacattgatatcctaggtacgtttagcaaacacaaacccatattactactagacaaagaaagtgtttctattacacattgcttcacttcagccactgtgggcctaatttcacatgggcctatgacaatagacccaacccaaatacccaactccaaatcattagtagacttccataatctcctagacaaagccttgaacccaaatctatctattatcaaaattaacaagcctcgtctcatattggtccgtagatatggtaacattggtcgagtgatattaaacgaggaagagatcagagagatgcttgaagatgttggattcgaggtaatcacatttagaccatcaaaaacaacgagtttgagagaagcgtataaacttataaagtcaagccacgggatgatcggggttcatggtgcagcattaacccagttgttgtttcttcgaccaggttcagtgttggttcaaattgttccggttggactaggttgggtgtctaaaacgtgtttcgaaacgccggctaaagcaatgaagttggattatacggagtatcgagtaaatgtggaagaaagcagtttgatagagaagtatagtagagatgatttggttttgaaagatcctattgcttatagaggaatggattggaatgtgactaaaatgaaagtctatttaaaagaacaagatgtgaggttagatgtgaatcggtttaggaaacatatgaatgaagcatacaagaaagctaagtcgtttatggacttaaacggttgattgatttttgtgttttatcgaaatgatttgtaagttttaagctgtaaaataatatgtttgtttattttttgtgtctatgtcactatgtgggtatgagagcaccattaattattgatagttgcttaggttaattcttagaaaagtttggttataaatttaatgtttttaatcatatatttgttaagagagtctcttatataagagacaaattgaagttttcttagttttcgtttcagaaattttaaaattaattcataaaaaattcataagaactattttaagggtaatctaagaaactaccattaatgatgctcttagcacaatatcacaaaagctcttagcacatggcctagcacgatatcgaatagagcctgttgcgtagaaatctatggatacaataacttcttcattgttaccattgcgggcgagctagtgaacattttcgtgcaagctaatgggatagcggaacattttcagacacctcgatgatcttataaaagaacgagtcggttctcgggtcaagatgggttaattgttttttatattggactaaagtaataatatagcccacgagtttctgaaacagaagaaacataaagataaaagtctgaatttattcataacaaataggcctaaatgggcctagaaacatctaaaaccgcgttacgtgtaaaaaggaaaaaatccaaataaagaaaacttaaaaatgacaaccaaaagaaaaatccaacttggacgctggcttcgtctctaagtcagccccaacctctatatatatatagaatcaagaacacaagaaatatagaacaacaacaacaacaacaacatcaagaacacacgaataagaagaaaaagaagaagaagaagaagaagagaagcttatggcaggaggaggaacagaagcgtttcctgatcttggagagcattgccaagaccctgattgcaaattactcgattttctcccttttacttgcgacggctgcaaattggtaagagctttttctcagaaactttcaatttttttctacaactgaatgtttcttgattgagaagttttgtgtgtgaaggtgttttgtttggagcatagatcatacaagtcacataactgtccgaaatccgatcatgggagcagaacggtttccatctgtgaaacatgttcaatagcgattgaaacaactggttttgatgaaaaaggaatcaaatctttgcttgagaaacacgaaagatccggagattgtgatccaaacaagaaaaagaaaccaacgtgtcctgtaaaacgttgcaaagagattctgacttttgcgaataaccttacttgcaaaaattgtggagtcaagttctgtttgaaacaccggtttccgacagatcatgtctgtaacaagaagatcattaaata

SEQ ID NO: 153001 - DNA, 1602 bp, Arabidopsis thaliana landsberg
caccgggatcactctactctcatcaagattttcaacgacccttggtttatccgattctgctagtttgaccgacgaaattcagagattggaagacgagattcaggatcagatcgacgacagatccaaatccgcagccgcctctcttatcggactcgtccgttactctaagtgcgtcttatacggtccctccacgccggctccagatttccgccgccaccaatccttatctgacgctaacatccccgcggatttccggtgtccgatcacgctcgagctgatgcgggatccggtggtggttgccaccggtcaaacatacgatagagagtccatcgatctttggatccaatcggggcataacacgtgtccgaaaacaggtcaagtcctcaaacacaccagcctcgtacctaaccgtgccttgaagaacctcatcgttttgtggtgccgcgatcagaagataccgttcgaattatacggtgacggcggcggagaacctgcgccgtgcaaggaggcggtggagtttacgaagatgatggtttcgtttctcatcgagaagctctccgtggcagattctaacggtgtcgtgttcgagctccgggcgctcgcaaagtcagatactgtggcccgagcctgcatagccgaggctggagccatacccaagctggttcgttatctagccacagagtgcccgagccttcagataaacgccgttacgacgatcctaaacctatccatcctggaacagaacaaaacgaggatcatggaaactgacggagctttaaacggcgtcatcgaggttcttcgttcgggtgccacgtgggaggctaaggctaacgcagccgcgacattgttcagtttggcgggcgtctcggcctacagaagaagactcgggagaaaagcacgtgtcgtaagcggattggttgacttggctaagcaggccccacaagctctaagagagacgcgctcgtggcgatcctaaacctggtggctgagagagagaacgtggggaggttcgttgaggctggggtaatgggagccgcaggagatgcattccaggagctaccggaggaagcggtggctgtcgtggaggcggtggtcaggaggggaggactcatggcggtttctgccgctttcagtttgattcgacttttgggggaggtgatgagagaaggagcggataccacaagggagagtgcggcggcaacgctggtcacgatgtgtcggaaaggagggtcggagctagtggcggagatggcggctattccagggatagagagggttatatgggagatgataggagctggaacggccaggggagggaggaaagcggcgtcattgatgagatatctaagacggtgggccgccggagatacccataacacggcggcggaaacgcagagcattgtagtgccaacgccaagtaggatttttagtccagttttatgatttttcatttttttgttttcccctcttcttcttgtgtaaagtttaaatgttttttttttctttcctgatgatttgaaaagaaattgattcttttacaaagtattaaaagctgcaattgtaaatgtaaattcgagaaaagaacgagagattttttccctt

SEQ ID NO: 153002 - DNA, 1354 bp, Arabidopsis thaliana landsberg
agatgcatcacacatgaacatttggtatgacaccaaaaagataaccaatattgccaaaaaaaaaagaaggagagagacggcgggaaagtttgttgaggaaaaaaataaaattgggtaatatccaaacatgaaagtgaaataaaccgtaaaaaatcaatgcaatttggcatatcattgtccagggaccaggccactctgtctttcggtcatattcataactctttctggctctgaaattacacaatgaatgccgtgtcctatagaatcatatagacgtggatgcttacgtaaatgcatcaacttttctaaaatgcggtgcttgtatttttattaactaatatcatgagacttatcttgattaataaatggtgattgatttggcagatgaaagttacttgacgaaggagtacttagaagacacggttatagattttataccaaccatgaagaatctgaaactaaaggatattcctagcttcatacgtaccactaatcctgatgatgttatgattagtttcgccctccgcgagaccgagcgagccaaacgtgcttctgctatcattctaaacacatttgatgaccttgagcatgatgttgttcaggctatgcaatctatcttacctccggtttattcagttggaccgcttcatctcttagcaaaccgggagattgaagaaggtagtgagattggaatgatgagttcgaatttatggaaagaggagatgaaatgtttggattggcttgatactaagactcaaaatagtgtcatttatattaactttgggagcataacggttttaagtgcgaagcagcttgtggagtttgcttggggtttggcgggaagtgggaaagagtttttatgggtgatccggccagatttagtagcgggagaggaggctgtggttccgcgggagtttttgacggagaccaaagaccgtagtatgttagcgagttggtgtcctcatgagaaagtactttctcatcctgctattggagggtttttgacgcattgcgggtggaactcgatattggaaagtctttcgtgtggagttccgatggtgtgttggccattttttgctgaccagcaaatgaattgtaaattttgttgtgacgaatgggatgttgggattgagataggtggagatgtgaagagagaggaagttgaggcggtggttagagagctcatggatggagagaagggaaagaaaatgagagagaaggcggtagagtggcagcgcttagccgagaaagcgacggaacataaacttggttcttccgttgtgaactttgagacggttgttagcaagtttcttttgggacaaaaatcataggattaactaaaatataagcacga

SEQ ID NO: 153003 - DNA, 587 bp, Arabidopsis thaliana landsberg; identical to SEQ ID NO: 52826
  unsure (1)..(587): unsure at all n locations

SEQ ID NO: 153004 - DNA, 1361 bp, Arabidopsis thaliana landsberg
ccactctcgccgtcgccgtcaccggtactccgatcacctccgcacgattcatttcctatttgcatttttcacctctctaggtaataactccgcgccgtctcatcaatttgcttcctctcctcagatttgatttcaatcagtgaattgctctgtcgaaattattgatctacgatcttagatcttacggaaatttcgttccgatttcaatctccggtgcctgatccgatctgatcgaatcgtgttacattcaaatttactgttgcttagcgatcgcgatcgaattcatatgtttttcgattctgtgatatcttcatgactcttgattcgtgactcgattctttagcggaaagtgagtcttctggagaatgggagattgaagaagtaagagattcactgattgaggaagagagaaagttagttcagaaaaatggctccagtgagtaaagctgataagaaggcagccgtagatgctgctgcgtggatgttcaatgtcgtcacttctgttggtatcatcattgttaataaagctttaatggcgacttatggttatagctttggtaaagatttctcttttgctcttacttaagacgttttctttgaaacctgtagctattcttctaatttgtttacttatcatgttgcagctacaacgttaaccggtttacatttcgctacaacgactctgatgacgcttgttttaagatgtcttggttacattcagccttctcatcttccgtttacggagcttttgagatttattctgtttgctaatttctccattgttggaatgaatgtcagtcttatgtggaactctgttggtttttatcaggtattagacatcatctagctctgtaattgtgaaaagaaatgtattgctgattttatgattgtcctgtttttgcttgtcagattgctaagctcagcatgattcctgtatcttgtttgttggaaatggttttcgataagattcgttattccagagatacaaagcttagcataggactggttcttgtgggtgttggtgtttgcacagttactgatgttagtgtaaacactaaaggatttgtagccgctttcgttgctgtgtggagtactgctctgcaacaatacgtaagtgttctgtgctcttacggagtaacatatcgtttctttgtttaagataatactaatattggtgtggtttttacatgatgcagtatgtacattaccttcagcgcaagtactcgcttaactcattcaacctattgggacataccgctccagcccaagccgcaacattactggtagttggcccgtttcttgattattggctgacagaaaaaagagtagacatgtacgattacaacttggtttcagtggta

SEQ ID NO: 153005 - DNA, 1569 bp, Arabidopsis thaliana landsberg
atttttcttttttcatcccatgtctgaatcttttctttttaatattaaaggtagctttaaatggcttattctttttggttacttacaaagagacaacagtttcaagaaagattcacaagagtgcgaaacaccaagaattcgcaaaaccccagtaaacatgtatcttgagaagactttatcgttcaaagatttggtcgatcagaggaacaattacagagatggaaattgcggggtgaaaacgagaaaaggtataaacttgaagggtcctaaaccagataacatgattcttgatcggagtctctcgttcacgagtctagtccaagtggaaaacagaggaggagaagaagaagacgaaagaggctcgtctccgaaacgaaggaacaggggtaacttaacggcgttaagtttaccagcaccgacgccattttggtctccgagaccgtccacggagctagacgctgccgccgttacgttacaaaaggtttacaagagttatcgaacgcgtagaaatcttgctgactgtgcagttgttgttgaagaattatggtacgtttgaatttcagttttatacattttaacccaatgttgatatgaaaattatacttaagtggtgtgtttggtttaggtggaaagaattggaattggcaaagttagaaccgaacaaaaccaatgataaaccagagtctgctgtatcaaggtgggcaagagctggaacaaaagcagcaaaggtaataattaattattcactagtcatacattatcatcattaattcttactttggttaataaaatagtttgatatgcttgataggtggggaaaggattgttgaaagatgataaagcacaaaaattagcattgcgacattggttagaagccgtaagtttaggcttttatttattttactttaatgtatacatattcctttgatttatagtaatgatttttaaaaattattattacagattgatccacgacataggtacgggcataacttacacttatactatgatgtctggtcagaaagtgagagtactcagccatttttcttctggtaaattttacacaaacttagtcaaattttgatttcgaatgttccttagtaaatggagctgattttgatagcaaaccttctgaatgatactaaaggttagacattggagatggcaaggaagtaaatctcaacaaatgttcaagaactcttcttcagcgtcaatgcatcacttaccttggtccggtatgtacacatggtcttcggttatttccggttggtaaaagaaaaccgattttaattttggtttttgactaacagaaagagagacaagcttacgaagtggtcgtggaagatgggaagttagtcagcagacaaaccaagagccttgtggagactactgaaggaaccaaatggatctttgtgttgagcacgacaagaaaactgtacattggtcagaaacagaaaggtcggtttcaacactcgagctttctctccggcgccgcgattaccgccgccggtagaattgttcacacgatgagtggtaaagctgtgggcccgacaagtggtcatatctccg

SEQ ID NO: 153006 - DNA, 4808 bp, Arabidopsis thaliana landsberg
acgtaataaagacaataatattcttaacacagatagaaaaggagcggagaggaatccagagaaaaatcaaatttggttttcagagataagacactacataatacacatatgattgcagaattttatttaaaggctttttatcttttaagaggaaaaacaataatggtaataagatattcaacaataatggccccttcatcatatagtatcgtatcacctgcagatattactatataggctccaaatttaatcaatggggtatgtctctctaaatggtaaagataaaggattctactaagcaatgagaaacatataattataattaaacgaggaagacagagagacgcacccttcgttgtcctgactccgtgagcggacattgtcgcgattagtggtttgtgggctgcctctcggtctcagcgctctcttcctctgctgaaccccataattgaaggcatccttttccctctcggtagctccttcaccctctaaacacccatcttcagattctttttcactgattctgctgcgcttttcagctctttctgcctctgaatcaccatccctctctctccttttttcctttgtttctctttcgtctttttcacaattatccggttcgttctgcttcttctgctctggtgccacatattcctgctctgagggtttggcagatgcttctcccagctctttctcgttctgcgagatctctttctcagcaccagtccttggctctcttttgatatgatctttatctttctctttatttctttctcgatctttctgctccatcctctcccgttcccacctatcggattccctttcttctcttccaatctctttgggttcactcatgacactaccaacaagcacagatactcgacggtcatttctatccttgtctcggtccccccattctcgatgctttaactcttttcttttcttatctttttccttaaatctatcttcgtttttggcatcaaccttgttttctccgacggtttcacgtccttccaaatgagacccctccacaggcgcagagagatctttaggcccaacctcagttgggccttgcggattaccgcgggatacaacccacgggtccacatttgcagtcgaactttcagcaactctcttccctctatggtaatccttctgctctttccaagccaagtgagcatgcccttccttttccatcttaatctcccccttttgttcattataattttgattctccctatcaaattttgtatccctagtatagctaccggcattacttttcccgctaaaatcatcccctggacgctcaaacttggcatccctgtcactcttaggaccctgaatctccctcttagtctcaccatacatctctctcccatcattcctagtatagcttccggtattaccttttccgctaaagtcatctactgatctctcaaatttcacatctctgtctcccttaggaccctgaatctccctctttgtctcaccatatatctctctcccatcactcctattttctctactctcaaccctaatttccctgccatccttagcaccatctctcggctccatcggcacaggggcgtgagtcaaatgaggatcactagaagaaacagttgtgggcagcgacggagaccgatagacaagaggcagaggagagcgtctctctccatctctaggctcgcttctcgcaaccttaaccaccgttctagattcaacctcataaggagcagaagcagaagcagcagcagcaagtggtgaatgggagtgagaatgagaatgagggtgaggaagcgcctggaggtgaggttgaggctgagattgagattgagattggggatgctgatggggctgttgatggttatgatgaacctgagccggtggtggcgtcacaggctgatgcggcgatttagggtaagatccagaatcctcgtgagggtattttgctactgatgaagaagaagatggatgagtaacaccctcttcgtgagatctctttggaacaccactcatcactcccaaattcaataacccagaaattcactgctgcaacagatagaattgcacttaattcatacacaacctagagcaaaacacagaatttgaatcaccagactaaacattgaatccctaaaatgaacacagagccgaagatttttttaaaaaggatatttcttttaccaattgaaactgaagcagagcacgaagaagcaaacccttttggattttgccgccgggaagtaataaatggcaaactggattcggacttttgcctctctctgagtttctctgatgagtctaatttattttccgttctccttggtttgctactttattttggacaaatgtttatttttcgcgttaatatttgcttcttgtcacagaccgtcgtgctcttacaagtctccacaatttaggttttatttattgccgttatgccctcatacttattcaatctctcactttttccataaaactttctattaattgaattgttcataggatatagattttgtcgtttttaatttttttatacagtacaataaaaagtcaacggaaaacagagctcattaaattcactgagacgaaataaaataataaataaataaatcgaaggaaggagtcatatcaccttggtatttatatatctcaagcgaccatgcatgatagtgaaatattcaagtttaaagacatgatgatgatgtcttgcacagttcaaacattagtacttgttccatggtttctagtagtatttgtactcgccggtggagaagactcatccgagacgacggcaatgtttccggcgatgtttgtgttcggagactctttggtggataacggaaacaataaccactggaactcactggctaggtccaactatctcccttacgggcatcgatttcgctggaaatcaaccaaccggtcgcttctctaacggcaaaactatcgtcgatttcattggtacatattttacatatcggtctctacatgcatttggttttgaaatcagtgcatgcataaatttaatttgcacaagagattcacccttttactttttttttgttttgttaattttttagtttgttttgggttagcaattaattaattaacatgatcatggggatggatgtggatggttgcaggagagttgctagggctgccggagataccggcgtttatggacacggttgacggaggagtggatattctccagggtgtgaactatgcctcagctgccggaggaatcttagaggaaaccggtcgccatctggtacttcttcttttttttctttctaaatgtctatttttattgttcaaaacattttttggttatataggatatgtttctttttttttaccatgttagttcatatcaaaaactttgtttaacgaaattggtctaatcgattgcttatgttcatataaagaatccaagttcgaaatatccaaaactgaaaccgaaaattgaattgtactatgcttttttgttaataagcatacggttttcgatattgaaaattgaaagttatctttcgctaagtaaaaaaaaaaaaaaaaaaaaaagtgaatttggggtgcataaagtccgccggaacagtcgtcctttaaccaatagaagtagccacatttgaatcacgggaggttatttaatgtcgagtgactttgatagggtgcatgaaaaacttttgcctacgagacatgagtatttaataaccccaaaaaaaagactataataaatggggttgcattcttgcatgcatgcattgatgaagggagagagatttagcatgggaagacaagtggagaacttcgagaagacattaatggagataagtaggagcatgaggaaagagtcagtgaaggaatatatggcaaagtcattggtggtggtgtcattgggtaacaatgactacattaacaattatctgaaaccaaggctattcctctcaagctctatttacgaccctacttctttcgccgacctccttctctccaacttcaccactcatctccttgtaagtcttatttacgaatcactatcagtaatatcataaaccatatatgtgtgtgtttgtgaagtcatcgagtgcctaaaatccgtatagataattacaaatttttattttataacaataatactcatgtcaaactaaaattcgagtgttgtacaaaattttgttaggaattgtatggaaaggggtttaggaaatttgtaatagccggtgtgggtccattgggttgcataccggaccaactagccgcccgagcggctctgccaggtgaatgtgtggagacggttaacgagatggctgaaattttcaacaaccgccttgtatcgctggtggaccgtctaaattctgataacaaaaccgctagtgaagccatctttgtttacggtaatacctatggagccgccgtggatattctcaccaatccatttaattacggttaagtatctaacttatcccttgttttacattttttttttatcaaatgtttcgttttagcttagttgagagcatttttatgaaaatctaattaaacttgaaatggtttgattttgttttgttttattgtttttaggattcgaagtgacggatagaggatgctgtggagtagggagaaatagaggagaaataacgtgtctgccattagcggtaccatgcgctttcagagaccgacatgtgttctgggatgcatttcatccaacacaagcttttaatctcataattgctctcagagcctttaatggttccaaatccgattgttaccccattaacctttctcaactttctcgtctctaa

SEQ ID NO: 153007 - DNA, 1492 bp, Arabidopsis thaliana landsberg
agttgatgatggtgatgatatctcttcacttctctactccgccgctagcttttctcaaatctgattccaattccagatttctcaagaaccctaatcctaattttatccaattcaccccaaaatcccaacttctttccccccaacgtctcaatttcaacaccggaacaaatttaaaccggcgaactctgagttgctatgggattaaggattcaagtgagacaacgaagtctgcgccgtcattagactccggcgacggtggcggcggaggaggtgacggtggagatggtggtgatgatgataaaggtgaagtggaggaaaaaaacaaactttttccggaatggttggattttacctcggatgatgcacagactgtgtttgtggctatagctgtatcgttggcgtttcgttattttatcgcagaaccaagatatattccttctttgtctatgtatcctacttttgatgttggagacagattagttgcagagaaggtattgttttctttatattagtttagctttgtaatcatgagctttagtttaggaattgggaagctatggtttagttttatcagattacaatgtcaaaggttacatctttagagttaaagatgagttttttagtatgagctcaagagattctcattgattggtttttggtgtttgttactaagatgtggtgttgatgtttcaggtgagttattatttcaggaagccttgtgcaaatgatattgtcatctttaaaagtccaccagttcttcaggaagttgggtatactgatgccgatgtatttattaaacggattgttgccaaagaaggtgaccttgtggaggtatgtatgatcatatttttggctcttggcttgtaatagtgaagctgatggttattttgatttggggtaatgtgtaggtacataatgggaaactgatggttaatggtgttgctaggaatgaaaaattcatcttagagcctcctggttatgaaatgacaccaattgtaagtattatcaaaagaacctgaagcttgtggtttttcttctttttctgattttggttgcttcaacattgtcgagggtaccggaaaattcagtctttgtgatgggtgataaccggaataacagttatgattcgcacgtatggtgagaagcctatttgttcatctggttttagaattttatcacaggatttagcttcttcttggattgttccttattgtggaaaacttgtgttgtcttcaggggtcctttgcctttgaagaatattattggacggtcggtttttcggtattggccaccaaacagagtaagcgggacagtgctagaaggtggctgtgctgtggataagcaatataacatattgtaacgttttgattcggcatgtcttcatttgaaacacttgtgcagataaaaacgaaaccaatgtacctttttatgaaggagagagttggcacattttgaattagattgcagattaatgaggcaacaagaaattctt

SEQ ID NO: 153008 - DNA, 600 bp, Arabidopsis thaliana landsberg
cccactaaactaaggatattacaggaaggcattgaagatggggaggatccaaagtcagcagccatgagagagtttcaagaagaaactggtgttgtttcagctgaaatcgtctctgaggtcgctaacatttaagttaacacttacgcgaaccgatatgaatcagaggatatatttactaatgtgggttctttaatgtctaaacaggtcccaaattggttgacatatgattttccaccagcagtaaaagcaaaagttaaccgtctttggggcggtgaatggcatggtcaagctcagaaatggtaagcccttcgatactacttaatttcgtgaaagcaaagaatgtggctcattgttctgaaacttaataattcctacaggtatttagtgagactgaggaacgatgaggacgagaaagagatcaatctagcgaacaacgaagcggattcagagtttgcggagtggaaatgggcgaagccagaagaagtggtagagcaagcagtggattacaaaaggccaacctatgaagaagtcatcaagacttttggttcgttcttaaacgacacaggaagagctgctaaatgtaaatcagccaagtggtga

SEQ ID NO: 153009 - DNA, 879 bp, Arabidopsis thaliana landsberg
caaaaggaggagaggacgttaaataacagtgtttttttttttttggccccaatattttttttcgaaaaacacccccctggtaaatgaacttttttattggttaagagtaacagatggttttttggaaggttgtcacaaaaccaattgttttttcttcgggtattagtcggttgaaaaatgctggaatcgatgttactgtgagtgttgaagaagagttatgcaagaagatgaatgagggattcatccatcgaatgttaacagggaagccttttctcgccctcaggtaaagttcattgcttctcttgagtggagacaaatccgagtcaatagattgtttttaagttttgaaaatctttgcaggtattctatgtctgtcaatggttgtttgctagacaagattgggcaaggggcttcggatagtggtggatactactcgaagctattgcaggaatatgatgcgataatactttcttcctcgctatcggatgaactctcgagcatttcttcacaagaagctattaatgattcgatccaacctattcagatcatagtagctagcaatgcacaacagtctcatatgcttgcttcttcccacactgtggaagaatcgggtccaaaagttgtagttttcaccgcaaaggaatcggttgcagaatccggaatcagtagtagcggggtcgaaaccgtactattggaaaagataaacttggattccattttggattattgttacaaccgaggactatgcagtgtcttgttagatttgagggggaacgtcaaagaccttgaagttcttctgagagatggatttgagcagaaactattgcagaaagtaattattgaagccttgccggaatggagcacataagatgagagaca

SEQ ID NO: 153010 - DNA, 3043 bp, Arabidopsis thaliana landsberg
atgagcgacatcaaatcacttgtaaagatcgaacaaaaatctctgtgtggccttgagcttcactatggtattctaatgcgctatgtcacatcatctcccgcttatctagggaaagaaaccgaagccctagactttgacataacatattaccgagctaaagacccgttaacaccgcgactctacgaagatttcatcgaagaaatcgagcaaattgcattgttcaaatataacgcattgccacattggggtaagaacagaaacttggcgtttgatggagtgattagaaagtacaacaacgcacccgcattcttgaaagtaaaagatagttatgatccaaaaggtttattctcgagcgaatggacagatcagatcctaggaattaaaggaaacgcgtcaatagtaaaagatgggtgtgcattggagggtttgtgtatatgttcgaaggatgctcattgtgctccggcgaaaggctatttgtgtcgaccgggaaaagtgtacaaagaggctagggtttgtacacgtgttgatgggataataagtgttatttaaacagtaagttcttaattttcattgcttcttatatcagtaacagccatcgtctatatgcgtgggtcaatatttattgtgagcctaataatgttattgtgttgcaacaataatgttttattgattcgtgctatagtgttagtacgtaaatcatttcaatcggccgtgcggaggaggatcttttatttatttatattccacagatctattcttgttccttttactatgaaaattggaagagtagttatagtagatatttgttctggttctggctagctataggttttcctagtaaatgtgggggattttatcattttgtgcatacacagtttcttaagatgatacaattataatttttattttttatatcatatcgcatgaccacaccccaattattgttataattattaccgaatgaaaaacaaaaaccatcctccccaaaatgcgcaacgtctcgtgccttcccttgacgcccgtatagaatgggccatatatatagtcaaataagtattcccactaaactatgcaagtcgtcgtacgtctatccttttttattgaacatatatacacaatttgcaaaatattaaatatcgaaacattttttaatgataatattaaatcatggcagcgccgatgaggttatcactgacatacaaggatacggtttccataatatatgaaaccaagttaaaagaaaatatagaaaatctacatttacttgattttgcaagtctttaagaccatgtgatataaatgaaactaacattgacagctcaaaagtaatggatcgaatgttattagtcgttatatatcttacacgctagcatgatgcatctcatccagccttttatgaatttatcaaccaaacatattttatgtaaaatatcaacaagctagcatgatgcatcactgaaccggcctttaagccacaaccactatatataccaaacatttagaaacgcctccattagacaaaactcaataaaaaccatggcatttggttattctccttcctattgttcgttttggcgcacccttaaagggttatattgtttatttacacttgtgcacacggtaatctcaacaccacccgaagatcctgtcaaatgtgtgtcgggaaacacgaactgtacagttacaaactcatatggagccttcccagaccgttccacgtgtcgagccgccaatgtggcttatccaacaaccgaagccgagcttatctctgtcgtggctgcagccactaaagccgggcggaaaatgcgtgtaaccacgccgatattcccatagcatcactaagcttgcgtgtaccgacgggaccgacggtttgcttataagtacaaagtttctaaaccacacggtgcgaaccgatgcaacggccatgaccttgacggttgagagcggtgtgacacttatgcagctaatcgctgaagcggctaaagttggattggcgttgccttatgcaccatattggtggggtctaaccgtgggtggtatgatggggaccggtgctcacgggagctcattatggggtaaaggaagtgcggtccatgattacgtgaccgagatcaggattgttagtcctggttcggtcaatgacggctttgccaaggttagagttttaagagagactacaacgcctaatgaatttaacgccgctaaggtttctcttggcgttcttggggttatctctcaggttagatcaattaaaaattcatattttgttcttattacgtaacaatatcagtcatagctctaacactttttttttactcaaaaaaggtaacccttaaattgcaaccgatgtttaagagatcgttaaggtatgtcatgagaaatgattcggattttggggatcaagccgtgactttcggggaaaaacatgagtttgcagatttcttatggttaccaagccaaggcaaagtggtgtatcgaatggacgaccgagttccggtcaacacatcaggcaatggcttgctcgactttttcccattccgtccacaactctctgtagcgttagccatcattagatccttaggtaaatttattctttctttctcaagataactaatacaaaatatatttgatcatttgcataatttttttggtaaaaaatatttgatttgcatagttataatgtttcttataaacaactgcttcatgatatgaagaggagagtgaagagtcatccggagatgcaaacaacaagtgtgcgagagcagagcaaataacgtcgtttttgttttccatctcctacggtgtgactaacaatggtaaaaatattcgttcacttacttatgcatctttctattgtttccatatgtatgagactttacaactttctatcacatattcatttgtaatttccacgggcaggtatggaattcacaggctatccggtgatcggaaagcaaaaccatatgatgtcgtcgggtacatgtctagacagccatcatgacggactgatcacgtcttgtcttggggatccacggataaaagg

SEQ ID NO: 153011 - DNA, 3623 bp, Arabidopsis thaliana landsberg
  unsure (1)..(3623): unsure at all n locations
atgggagagacaattttggttttggttactctaatgatcaatgcagcgaaggtgttcgatgaaatgcgtaggagagactttcgggaaattacttcactaagtgcttttttactgatgagaactccctttaatgatagaacaagatatcaagcaaagaagccttgtggtcttatactgaattctagaatacacagtgacgtggtggtcttgtcttttgataagcctgttgttgctgtctcctctctcaatggctatctcctgcgactaaaacggtaaacctttaatctctttaggttcgtgtgtattcatcagtatctggtcaggttacaataatatattgcttattaactgatcaatctgttactgtcctgccttgcttactatagtagacagtttctgtggttttgtaatacttaggcatgtgttaactatgattagaggacttacagtgagttaaggtgtcttcgtgtgtgtttctctcaaaatgatatatttgttactctgtatatatatatatatgctcgtggaatcctgatgagaatttggttacagctttatcaatcctctaaatagttttcaacagtgcaaggttttgtgttcctctcttgaaaatatagtctctgaagtgttaacaagctatgtatgactgtttgcagagttcaggcagcaatgtaaatgagctggagaatataagcaatgataggactgagtcaatagttcaagaacgtgaaggttccgacaactaagcaaactgcttcttcaatttggttcgataactgtagataaattgtgataaaatatcttttatttgatcaatcattacattattgtagagaatcctcggccaagagattggtagctagatagataaggttgacttggagtcaacttcttgcttagagttttgataaactttatagctttcttcatttattatagtaaacgtttttaactcattttttttccagagaatctgtacccttggcgttcttgtactggttcatcgtagatgattctcgacgactagttgttatggctgaagcatttgtgtcgtttggacttgagaagctttgggatctcctgagtcgagaatcagagagattgcagggagttgatgagcaaattgatggactaaagcgtcagctgagaagtttacagtcgctgttgaaagatgcagatgccaagaaacatggaagtgatagggtgaggaacttcttggaagatgtcaaagaccttgtttttgatgctgaggatataattgaatcctatgttctgaacaaacttagaggagaaggaaaaggggtcaagaagcatgtgagacgacttgcttgcttcttaacggatcgccacaaagttgcttcagatatcgagggtatcactaagaggatctctgaagtgattggggaaatgcagagttttgggatacaacaaatcattgatggtggtcgttcgttgtctcttcaggaaagacaaagggagatccgacaaacgnnnnnnnnnnnnnnnnnnnnnnnncttgtcggggtggagcagagtgttacagaattggtttgtcatttggtggagaatgatgttcatcaagtggtttctatagctgggatgggcggtattggtaaaaccactctggctagacaagtctttcatcatgatttagtccggcgtcattttgatggattcgcatgggtctgtgtttcgcaacaatttacacagaaacatgtttggcagaggatcttgcaagaacttcagccacacgatggtgagatcttacagatggacgaatatacaatccagggtaaactctttcagttgttggaaaccggtagatatttagttgtcctcgatgatgtatggaaaaaagaagactgggatcgaataaaagcagtgtttccacggaaaagaggtgagctcttatggtacatacatgaagcactttttcttcttaattcataaaagtgattgttaaaagaaatatatagaataaatgcctttcttattccctagcatgagaaacacaaatattttgaaggttggaagatgctacttacttctcggaatgaaggtgttgggatacatgctgatccaacatgtttaacttttagagcaagcatccttaatcctgaagaaagttggaagctctgtgagagaatagtattccctaggagagatgaaactggtacatacatatcttattatataatgtttagtttctctaacttttaagaaaaatacatttacatatactaatttacatgtatatatttatatgattttataaatttttattttccttaaccaaaaagtaatatttgtatacatattgctattttttccttactattagaacaactaactaaaaacgtatggtaatccatatgctaatttaggcatgtataaaaaaaatgtcaatggtaatcttgattttgaccaaaaaataattaatttaattagcatgaacaatgagtgttgttaaggttcaaaaggacaatataattattaaacattaatttaattggataacaattaaaaaaattaactattaatcctagtacagtaagtcagtaattacgaatcttgaaaattggttttggtttttttcttcctattttttataggtttattcaaattagaaatatcgaattatctacttttatggtttattcatgattggtttgattaaaatttaacgtaataaaatcaactaaatttgaaagaaacatgtattgattaacccgtgattacacgattccttgtaataaagttcaaatagaatactaagaccaagaatctagtgtattattttaatttggcagctcacatgttgaaatgtattagcttgtgatattgtgcagaagtaaggcttgatgaagaaatggaagccatgggaaaggaaatggtcacacattgtggaggactaccattagctgttaaagcgttgggaggcttgttagctaataaacatactgttcctgagtggaaaagagtttttgacaatattggatctcaaatagtaggaggatcgggcttagatgacaacagtctcaattcggtttaccgaatattgtctctgagttatgaagatttgccaacgcatttaaagcattgtttcctttacctagcccattaccccgaagattccaagatatatacgcataatttgttcaattactgggctgcagaagggatttacgatggatcaaccatcgaagatagtggagaatactacctagaagagctagtgaggagaaatttggttattgcagacaacaagtatttgagagttcacttgaaatattgtcaaatgcatgacatgatgagagaagtatgtttatctaaagccaaagaagagaacttcctacaaattatcatagaccctacttgcacctctaccatcaatgctcaatctcctagtagatctcgcagactcagcatacatagtggtaaagcctttcatatattgggacacaaaaacaatacaaaggtgagatctcttatagtttcgggattggagaaagacttttggatacgatcagcttcagtcttccacaacttaacattgctcagggtgttgaatctttcttgggtaaagtttgaaggagggaagttaccttctagcattggagggc

SEQ ID NO: 153012 - DNA, 1398 bp, Arabidopsis thaliana landsberg; identical to SEQ ID NO: 51334

SEQ ID NO: 153013 - DNA, 545 bp, Arabidopsis thaliana landsberg
ttacttgcttttaatctcttgtgttcttgatgtgacaggcttttgggtaaagtggcattgatcactggaggagccacagggataggtgagagcattgttcgtctgttccacaagcacggtgccagagtatgcattgttgatctgcaagatgatctcggaggtgaggtgtgtaaaagtctgcttcgtggtgagtccaaggagacggcttttttcatccatggcgatgttagagtggaagatgacattagcaatgcggttgactttgcagtcaaaaattttgggacgcttgatatacttatcaacaatgcaggattatgtggagcaccgtgccctgatattcgtaattatagtttgagtgagttcgagatgacctttgatgtgaatgtgaaaggagcttttctaagcatgaaacatgcagctcgtgtaatgataccggagaagaaagggtcgatagtttccttatgtagtgtgggaggtgttgtgggaggcgttggtcacattcttatgttggttcaagcatgctgttctaggcttgactaggagtg

SEQ ID NO: 153014 - DNA, 906 bp, Arabidopsis thaliana landsberg
ctggagaaagaaaattttaggtcgtagaatgttaaatcaaaatgctttcaaagaaatcactgacaatggctcttaatcgatcgagccgaaatgaaacttacgtgatttcttttcagttctgaattcatttcattcttatagcttccaggagaaaaacaaaattagtaaacacagaatagattatttttttttctcttagaaactatattgatttgtttggctatttcattatgtcaacctacaaaatgaagagcctcgtgaagggtcttaggtatttttctcaaatatttggtgagttttatatatatatactatatactatcttctctgaatgtagcctaataattttgtaaatttctcgttttaatattacattttatgatcaatttgcataacgcagaaaacgagaaagaggcagagatgcaaattggaactccaacagatgtaaaacatgttgctcacattggttgggatggaggctctgtcaatcataatccacccagctgggtatttaatttaattttcaataattttttggtctatagtataacattaactaataaatcattatcataaagtcaaaataatgaaattcaatgtagatgaaagatttcaaagtattgggtggatattcaccggcgcttatcggaaatatcaaggaggatgcttcatgcatttttgaaggtgagctatctaatatggaatagtactaaagatatttttttttgtaaaagaagaaataattataaataaaaaatgcacatgcagattcgactcggtcacgtgatataccgagacttccaaaatggtcgagagagcgttagagcactatccatccctcaacaacaaaagaacgatcacgacaaagtgaaaattcacaatataatggaaacctcaagtttcacg

SEQ ID NO: 153015 - DNA, 534 bp, Arabidopsis thaliana landsberg; identical to SEQ ID NO: 53804

SEQ ID NO: 153016 - DNA, 1697 bp, Arabidopsis thaliana landsberg
attacttttgctaacctaggatttctctcttcgtttaggtaagtagtttgtcaagaaaagatgtttgcttcgttgtgtttgtggacgagattaccatgcaaacactttctgccgaaggccaagtacccgacggagctggattcgttggtctgtggaagttggttgtggtgaggaatcttccttacacagatatgcggagggtagggaaaataccaaaactgttaccacacagacttttcacttcggcaaggtgagactcatgtcgtaggaataggtttcaataggtctaactagcacaacattctcccgcagatacaattagccaaagttagatcgactagttgtcttgtattaatgagaatctactggagaggatattagttgtctagcatatgtatagtttccatactaagctacaaaatgcaagagtcaaaatctgaatacgttaaagtttcgatgttggaagttgttttcctaaagctctacaatttaaaacagaaactcatccgatgtgtgtgttctttaggtactcaatctggttggacagcaagttacgtctccagttggaccccctagtcattttggaatactttctgtggcgtgaagggcacgagtatgctatctccaatcactatgaccgccattgcctatgggaagaagttgcacaaaacaagaagctgaacaagtacaatcacactgtcattgatcagcagtttgagttttaccagtctgacgggctgacgagattcaatgcttcagatccccacaagcttcttcccagcagtaagttcttttcgataactgctataagacatgattacaaccctgcttagggagcgtgttctgtagtatgtggcatagctgcctgtgtttgctcataacatggacggtgaatgagattagaaagaaactggtaaacaataaacaaataccagtgtgagttgaaaagtaacaaaatcgtatcaagcatgataaagaggttgaattttttttgctaacgatttgcatctgaaactaggctgatgagtgcatgtggaatttaacattgaaaatttgccgatggtgtgcatttgtctgaaactcatgtgaaaattggtcacacgtatctgattgctgtcatctgttattccagtctgtgggttaaatgcttattatgcctccaagctatgcaatggtcgacgaatagatgttttcaatacattcatgtttttcttttctcactttgtgactataatcctcctgtgtctgcggtttgcagatgttccagaagggtctttcattgtacgggaacatacccccatgtcaaacctattctcctgtctttggttcaacgaagttgagcgcttcactccccgagatcagctaagctttgcatacacttaccagaaattaacaaggatgaatcctgacactccatttaatcttcacatgttcaaggtaagattcatgttccaataaccctccatgaaactgttacgattccacattggcctgcctgatgcttatagatatcattcgatttatcttcataaggttcataacataatcctgaatgaaacgcctatcaagaagaaaaattcatgtcttttttccttctgtgaaactttcaggattgcgagaggagaaaaatcaccaaattgtttcgtcacagatcagaggagaagcgaaaccttatacaagcagcaacaacacaataa

SEQ ID NO: 153017 - DNA, 747 bp, Arabidopsis thaliana landsberg; identical to SEQ ID NO: 14049

SEQ ID NO: 153018 - DNA, 2193 bp, Arabidopsis thaliana landsberg
gtttttgcaaaacttcagaaaaaaactagttgaagttgctagtgataaatataatttattcatgattgaggagcctaactcagaaggacctgatcctcgcggtggtgctcgtgttagctttggtttgcttcgtaaagaagtttcggagcctggaccaactacactctggcagtatgtgattgctttaatattgtttcttttgactattggttcctctgtggagttaggaattgcttctcaggtacatgtttttcgctaaagcacgaacatcatgatgtcgttgatctgttattctttaatgcaataatggaagttacttgatttaacagattaaccgcttacctcctgaggtggtaaagtatttcaccgatccaaatgctgttgaaccacctgatatggagctgctgtatccatttgtagatgctgcattgcctttagcttatggtgtattgggaattcttttgtttcatgtaagtaaaaacttatgtgtctctatcgtaatgcttttctttttatgatgttgcagacatgttccttggtagaatgataaactttcagtaattcgtttagacttgtttatttgcaggaattagggcactttcttgctgcagttccaaagaaagttaagcttagcattccatacttcattccaaacattacactcggcagctttggggcaatcacacaggtaataatcctactcatttcttttaagtttatgggacttatctcctgttgaactctaggtaagtcacatctagaagaagacatctttctacgctactatggttcaaaatgcatccatttacttctctttctcaatgcattcgtcttcctctaatgaagtgattcgataacgagagtattggctagtgtagtagcgttagtaaatcattttatttgatttgtacagtttaagtcgattcttcctgaccggagtacaaaagttgacatttcgctagctggtccatttgctggagctgcactctcagtttccatgtttgctgttggtctgttcctatctacagaaccagatgcagctaacgacctggtccaggttcccagcatgttatttcaaggttcattacttcttggactcatcagcagagcaactctgggatatgcgtaagctctccacagctagcgactgttcaccctaaacgaaaaaacctaactccaatctccatttccgttttcctattgattgcagagctttgcatgctgcgacagtttcaatccacccgcttgtaattgccggatggtagcgtcttatgccttggctcatgcttatattattcattagcaattttgacagttttctcttacattgaaatttgattgttaggtgtggcttaacaacaacagcatttaatatgcttccagtgggatgtttggatggaggaagagctgtacaggtatttgctcgtatataaggaatggtgcatactctatttgaaaactagaaacttaatggtgcattcctgactcgtatcagggatggaaagtgttgcagctgattcaagtgtatactattatataatcttgaaaagtagtgtgctttagatgaagtatgaagaaaagggtctgagatattcatataagagatcaaattgttgatattatcaatcacgtctgagacatatgggcatggatcttgtgcagggcgcatttgggaaaaatgcactggttacatttggtttgtcaacctatgtaatgcttggactcagagtggtatgttcaactgttaatgttgtagtgttgatttatacttctcgaacctgctagtttattgctctggcattttcctacttttcagctcggtggccctttggcacttccttggggactctacgtactaatctgccgggtacacaaaatttctaaactctgctacttcaaaaatacgagtcagctttaaaagatgtttctaagcagtatgttttggacatagaacacctgaaaaactgtgtctaaacgacgtgaccgaggttggaacatggaggaaggcccttgtagggattgcactaatcctagtggttttgacactcctgcctgtatgggacgaactcgcagaagaagtaggcatagggcttgtaaccacattttgatgttatcttccttctttgagcagatgttgtagttagggccaatccgaaacgagttttttttgttttggcaatatttagattgcca

SEQ ID NO: 153019 - DNA, 2649 bp, Arabidopsis thaliana landsberg
  unsure (1)..(2649): unsure at all n locations
ttgatctctgtatgctctcctggagctatcgaatcgagtttctcattgactgatgctcttggttccgaagctgtatatatgcagaggagcagtggcatcnnnnnnnnnnnnnnnnnnnnnnnnnnnnnntctttctcttcgaatggcattaacctgcctggatcaatggttcttgatggatctccttcaatgcaacacttacctcagcagcagcagcggcaactactagaacagcaagcaggacaaggttcagttccaatgagggaaaacagttattcccatgtagataagaaaccgagattagaagtgaagcaagaagacttgttgcagcagcagattttacagcagttgatccagcgccaggaccccacgggaagaaatccgcagatgcaagctttgcttcagcagcagagagtgaggcaacatcagcagatgcttcaatccatgtcaccctctcagagactccaacttcagaaacagcagaagctgagacagcagttacagcaacaaggaacccaacagatttctcctaatgtacgtccttatgaagttggcgtctgtgctcggaaattgatgatgtacttgtatcatctgcagcaacggcctgctgtaagctaatactaacctatggacttctagttatttcatcacatctattcaagttctcccatcactgataccttttctgtaggaaaattgcattacttattggaggaaatttgtggcagaatacttctcacctcgtgcaaaggagaggttgtgcttgtcacagtacgaaagtgttgggcaccatgcccttggcatgtttccacaggcagctccggtcagtatcgtctttgctctgtgtgttttggtctgttatgatatctgtgttgtgcatcagcatatctttagctatacacatctttactccacctgtactatttatgaatttcacttcactgattttttaatgaataagttcatcatcttctcattctgtttataggatatgtggcagtgtgatctttgcggcactaagtctggaaagggatttggtaagatagttgcaaatttcttgtttttacttgtatttctgtgcctttacttgagcacaatgaagcagcttacacatgctaattgctctctctttattgtttaaaactttgataatcgtattaaaaagtcttccgtcaaaatagtagctaaagtgtcatcttttcgttccgcagaggctacttttgatgtgctagccagacttattgaaataaaatttgcaagtggcatcattgatgagctcttatatcttgaccacccacgagaaaacagatttcccaatggactgatgatgctagaatatagaaaagcagttcaggaaactgtacacgagcagtttcgtgttgttcgtgagggccatcttcgtatcatattctctccagatctgaaggtatctagaaaaattccctggttaaaaatgtgtgactttcttccaattttcttttgccctgcctatttaccgaaaatatctagcaatcaccagtgtgctaatgcttacctaatcttgactgtgtttctttctagatactgtcttgggagttttgtgctcggcgtcatgaagagcttcttcttcgcaggcttattgctccgcaggtcctattctaattgcgtagcccttgcgttaactattaggagcataagattttacaaaaaccgtttgtggtcaactgtataaatctgtttccttaaacccttatgaaatgaggatatctcagaatttatgaaaccgtttgtgactatttccctaaacagtctgtatgaattagagcaaatagtttgtaaatctacttcagaacagacatatgctgcaatggttttgggaagtgtattgaaaacttattattggttatgcaggtgaaccagttgcttcaggttgctcagaaatgccagagcacgatttctgagagtggttcacagggagtttctcagcaggatatacagtcaaacagtaacatgtaagttaatccctaacactaaatttacctttgtacatccaatttggtggatgccgactattcttttatttgtatatgttctggcttttgtctctagtgctctatatcatttccggtgctaatttatgtgtcagggtcttgggagcagggnnnnnnnnnnnnnnnnnnnnnnnnnnnnnnnnnnnnnatgatcttggctatccaaaaagatatatcagaactctacaggtactcattagctcctttccttgttgttacttttgtatctgtagcctttggaaatcatgatagagtaactcgttgcgagtgacagatatctgaagtagtcaagagcatgaaggatctgatgaatttcactggcgagcacaaagtcggccctcttggtaagtctagaattcccatctacaacattcttcttgaatgagacccaaaacgaggttgcccctctggtgtaggatttctgtaactctccgatttaaaggctttgtatttgatatgattaaccttttgaagcctacttatgtcccttatgcaaaggggttaaaacagcttctggaacagacggcgacagtgaagcttcagagacagaaaatgcaagagatggagcagaatgtgacatatgtatatacaaatgggccacatcaagctcaactggagc

SEQ ID NO: 153020 - DNA, 1485 bp, Arabidopsis thaliana landsberg
aaagcatctctatttttgttttcttcattcacaccaaaacaagaaatcaaatttggtttgattgattgatacaaaatacttcttcagatatttacttcttcaattggagaagccgattaactgaaatgtcgatctccggcgctgttgatgaagctgggactccacttctcgctgttaccgtcgacggttccgtcgactacagaagtaaacccgccgtcagatcttcctccggtggctggagatccgccggattcatcatcggtaattcccgacattccctttcaatttcgccgattttcccgccaatttcgtatctccttttgacttccgccggaatttttaatttctcgatttttttttttccgatggtaggtgtggaggttgctgagcgattcgcttactacgggatatcgtcgaatctgataacgtatttgaccggaccactaggacaatcaacggcggctgcagcagctaacgtgaacgcttggtctggaacggcgtcgttacttcctctccttggtgcttttgtcgctgactcgtttctaggtcgtttccgtacaatcctcgccgcctctgctctctatatagtggtacgtagctctctctctctctctcaaatgttctgctctctctatatagattcatcaactctagagatgagtctgaagttgtatagtgatttgatggaacaacaggggcttggtgtattgactttatctgcaatgattccttcagactgcaaagtttcgaatctactctcgtcatgctctcctcgatttcaagtaattacattctttagtgcattgtatctagtagctttagctcaaggtggtcacaagccgtgtgttcaggcttttggagcggatcagtttgatgaaaaggaacctgaagagtgcaaagcaaagagttctttctttaattggtggtattttggtatgtgctttgggacgttaacaactctatgggttttgaattatatccaagataatctaagttgggcgttaggctttggtattccatgtattgctatggtagttgctttggttattttcttgcttggaacgtgcacttatcggttcagtattcggagtgaagatcgaagcccttttgtgaggattggtaatgtttatgtagcggctgtaaagaactggagtgtttcagctttagatgtagctgctgcagaggagagacttggtcttgtgtcttgcaatagctctcagcaatttaggtaacacagctttctgtctcctccgattttattgttaccacataaatacttatagtaagcatcttggttcttgttacaaccgcagttttctcaacaaagctttggtcgcaaagaatggttcttgtagtatagatgaacttgaagaagcaaaatcagtgcttaggttagctccgatatggttaacttgcttggtttatgcggtagtgtttgcgcagtctccaactttcttcaccaaacaaggagccacgatgagagat

SEQ ID NO: 153021 - DNA, 563 bp, Arabidopsis thaliana landsberg
  unsure (1)..(563): unsure at all n locations
aaacgggtcagctgtctctatgttttattcgtccaccttggctgatatattttgttttcattcatgattctaaaagctttggcaataaggtgttgatttgggttattgatcctgcagttcaagtggtcaatgactcgacatgggactctctagttcttaaagcaactgggcctgtagttgtcgacttttgggcaccatggtgtggaccttnnnnnnnnnnnnnnnnncttgtaaacgatctagcacagcattacactgggaagatcaagttctacaaattaaacactgatgaatctcctaatactcccggccagtacggagttagaagcatcccaacgatcatgatctttgtcggtggcgagaagaaggatacaatcataggtgcagtgcccaaaaccacactcacatctagcctcgacaagttcttgccatgaaatttcacttgtggagtctgtaagatctcgtatctctctgtctctcgttcttgttctcattatctctgtaactcattatcgctgaacataaagaccagaataaataatatgatgtcatgtcttatgtca

SEQ ID NO: 153022 - DNA, 1576 bp, Arabidopsis thaliana landsberg; identical to SEQ ID NO: 37125

SEQ ID NO: 153023 - DNA, 2743 bp, Arabidopsis thaliana landsberg
ctcagtgcattacctgaacaagtaatgggggttctcagtgacatcttttctttcaaattttgagtatttagtttgttattggatcattattgactaaattatcttactttgatctgaagggagttaccatcctaaagacaacatgtggaactcccaattacgttgctcctgaggtaaatcaaatatcataatgttttgaaattttatgtctttcttatcatagcttatgtgttcttctccgttttggtttaggttctcagtcacaagggttacaatggtgccgttgcagatatttggtcctgtggggtcatcctttatgttcttatggcaggatatcttccatttgatgaaatggatctaccaactttatatagtaaggcatgagctctgctgttgttgcctcttgattcttgatattttgttttgtaaagtttcttgttgctgcctagtttaattatcccaattaaacactaggattgaacaagcaatatctgcagaacctgtaatagaaatcgttatggctaaattattttcactgtagtcaagactccctttctctaaaccttccgtgttatgtgcttgtaaggcatctatgtactttctttctgatatggtttccttttcttcttattgtccaacatttttcagatcgacaaagctgagttctcttgcccctcatattttgccctgggggcaaagtccttgattaatagaattttggatccaaatccagaaactgtaagttttgagtttccgtgcagatagctttgtttagatctttttcaatcctggctactgtatttgaaagatgtgttacatgttgaaagaacagcagcttgaaaaagagatatctagattacactataatctttgaccagctccaattgaacatatcattcttttctacacttgaatagaccctagaactagtctaagcattttcttccataactgtctggaccattttggaaggtctatagaatatggataatgtgccaactgaaagaattacaggacatagttgtcgggtcaagttgtcccagttactcttttcgatgcaaagtcttgacaaatctcgccttgcttttgtttttcttcttttcctggcagcggattacaattgcagaaatcaggaaagatgagtggtttctaaaggattacactcctgtacaacttatcgattacgaacatgtaaacctggatgatgtatatgctgcttttgatgatccggaggtaggattcagctagcacaattatttgtttgctgttgagtatttgtgtataaatcatgtgtttccagagttactgttgttctaagcttatgagattattcttctgcctgcactcagcatgatctaataatttgatgttctatttaacattatacgttgcaggaacaaacatatgcacaggatggaacaagagacacaggtccactaactctaaatgcgtttgacctaattattctatctcagggcctgaacctcgcaactctttttgaccgtggaaaggtacaatactgggtgtgaccccactgtgtgcattcctattccttatttaattgttctttctcttttctacatgttatacaactaatacgctaatctttcatgtgtgttgacaggactccatgaagcaccagacaaggttcatctcacacaagccagcaaacgtggttctctcaagcatggaagttgtgtcacagtctatgggctttaagacacacattcgtaattacaaggtgaggtactatagtaagagtttggttaggcattcttatcggttgaaatcgcttcattgttttttgtgatgtgtatcttaacatttcttgagagtttatatatcatatcatcatctcagccttctcaaagtacccaacagctgttaaccgtttccattttcagatgagagtggaaggattatctgcaaataagacatctcatttctccgtcatactagaagtaacttctcttaaaaccagtccaacttttttactttggtctctctatgttcgaagtctcactaatcattttcaaatctgaaggtcttcaaagttgcaccatcaattctcatggtagacattcaaaatgcagcaggagacgcagaagaataccttaaggttagtttcggaaggagaccttagtgttataagttcaccttgagggattgtgcgactccggaatagtaaaaaccagtttatgttttgcagttctacaagactttttgtagtaagcttgatgacatcatttggaagccgccagatgcatctatgagaaatcgagtcaccaaggccaagagtaaaagacgttgaatccacgtgcgtggtattcaagcagagctttcacagaagacagttagaaacaatatttaactctctgtgtttcttaagtgctttagtcgagtgaatatgtacaagcttgttgatttggttttaatttatgaatacatagaagattgtactaaacttatacgatatcaagactaaattgagtgaaaattgctgatagtttctcctgatttgaatacggtctgatgcgatgatccatatgcttccaacataattcatttattctcatacattcaccggtctcgtccttctgagtatatatgtatactggtagggacgtccctatgttaattggctttgttccctgccacgttttgaagaagttgatgcagcatctcaaacacgtttcagtgtcattctattttccctcctttttagggattagataagagttaa

SEQ ID NO: 153024 - DNA, 2112 bp, Arabidopsis thaliana landsberg
gcttgtgtcactgaccttgataaagctttaacctttgtagagtacgcgttggaggaacgcacaacgcttctcttatctgcttgcttgcaggtgtttctgagagagcttcctcagtctcttcacaatcccaaagtgatgagattcttctgcagttccgaagcaaaagagcaattagcttttctgggttcagagtgtgtgttcctgttgtactacttcctcagccaagtaggcatggaagagaaactcacgacggacactatgctgatattgctagagagaactcgagagtttgctcgtacaaactggcaaaaggctttgtctttgcatcaaatgggatgtgttctgtttgagagaaaggattacaaagcagcccagtttcatttcagattagcttcaagcttagggcatgtctactctttggctggggtatcaagaactgaatataaacaagggaagaggtattcggcgtacaggctcatgaactttctcatctctaatcacaagccacatggatggatgtaccaggagaggtctctgtacaatgttggagttgagaaactaaaagatttagcaaccgccactgaacttgacccgacactgtcttttccgtacaagtacagagccgtaatgaaattcgaacagaagcagattaaagaagccttccaagagattgatagattaattcagttcaagcttagtccagaatgtctcgagctgagggcttggctgtgtttagccactggtgaccgggagagttgtttgagagatcttagagcagtgctgtctttagagcccaattatgttgtgtttggtgggaaaatgagagatcctttggtggaggctctgaccgaacaatgtatagaagtagagagtgaagcggattgttgggtgaggcttttcgatagatggtcagctgtggatgatgttgcgtcgttggctgttgttcatcagatgcttcagaatgatcccagcaaaaactttctgaggtttagacaatctcttcttctcttaaggtaagaagaatatcttttgtttctctggcaacctgattggtgaattcttcaggagttgacggaagctacatttttttgtgatctgtaacagattgaattgtcaaggagccgcgatgaggtgtttgcgaatggcatggaacttggctacttctgaggcagaaaggttggtctacgaagggtggcttttatacgacatgggttatgtggaagaaactcttactaaagctgaggaggcaatctctattcagcgatcctttgaagcatttttcctcaaagcatatgctctagctgacaagaatctcgatgcagacgagatctcttgtgtggttcaggttctagaggaagccctcaagtgtccttcagatgggctacgcaaaggacaggttggcattttgatgtctcgcctttctctttctcttattcacactgtaatctgattagtcgttttgttatgtttctgcaggctctgaacaaccttgggagcatctacatcaatttggggatgctagatcaagctgaaaccgcatataagaacgctatagagatcaaacacactcgtgcacgccaagggctggcgcgagtttattttttgaagaaccaacgtaaagaagcttgtgaggagatgacaaagctgatcgagaagtcgtgtagcaaagcagcagcctacgagaaacggtctgagtactgtgaacgtgaaaaagccaaagaagatcttgacatggccacaacactcgaccctctgcgaacttatccctacagataccgagctgccggtaactaactcttcctgttctgtattaacatcttataaattctagtagttaaagaagtgatcgtatgtgtggcagtgctgatggatgatcagagagagacagaagcagtggaagagctgtcaaaggcgatagctttcagaccagaactgcaaacgctgcatctcagagcagcatttcacgaggccactgggaatctgtcattggccactcaagactgtgaagctgctctctgtttggaccctaaccacaccgagacgctccatctctacagcagatccaaggatcaagcttcttccattgacaacaccatttttggcttagattaa

SEQ ID NO: 153025 - DNA, 1287 bp, Arabidopsis thaliana landsberg
caaaatttttttttgaagatgataaatctagtgatcggtctgcaacagcttctcaggttttgtttttgctcatctgactcaagtacattctcatgatccatcatcctcttgctttgacgtcgtcatggttttttggtctttgtttctcttctagtcccggttttcatacctatcagatgaagggttcaagaaaatggataatcccaagcttcggagggggctggataagcttacatcttctcttaatcagatcggtgacacttttgaaaaagcctttgaggtgttgtttctccttctctctaaatcattccgcttcttcattcttttggttgaattgcttccttgtttctctaggatggccgaacactcgttgagaacaaaacagctgatatcatccaggaaacacgaaaacttcaaaccagacgaagaggaactggtggtgaagatgagaatcagaatcaatcttatggagttagtagctcatggaaaaagtctccagagcagccaatgcagttgaatcatatggaacatgaaactcaactcaaggcatctcgcgatgtaaggtccagtcttttgatggcttggttggttggtgatttatgtatgatagctctgttcgttgatatatagtttcttctgtgagctgcaggtggcgatggccactgctgctaaagctaaactactcctccgtgagctgaaaactgtcaaagcagatcttgcatttgcgaaagagcgttgtgctcagcttgaggaagagaacaaacatctgagagagagccaccgtgagaaaggaagcaaccctgcagacgaagatttggtaaatcttttgactgagctcatgttctaatttgtgtgttgcattccatctaacaactcggtgtggaagctgttgtatcagattcggctccagctggagagcctactggcagagaaagcacggctggctcatgaaaattctgtgtatgcgagggaaaaccggttcttgagggagatagttgaataccaccagcttacgatgcaggacgttgtgtacatagacgagggcagtgaagaagtgacacaagtttcccctttcgtatcaacgttgatgacttcttcacccgctgaccgttcacagtctcctcctagtcaagagatgattaaagagatgcttgtggttgctgaagagagctctgtgtgtgcaagtgtggtttcagtttcttgaattcattattattaattatttcttcttgaatgaaatcagattgttttttgcaacggaatataaaaggcgatttcattcatatt

SEQ ID NO: 153026 - DNA, 1436 bp, Arabidopsis thaliana landsberg
caaaatgctcggctttgtaactatttgttcttttcgaaacagaattttactcacctcaacctctgaagtgtatggagatcctctcatccaccctcaaccagagagctactggggaaatgtcaaccctattggtaaacctcaaatgttctcatcttatagaggaatcttcttgcatttcagtttttacagctttgtaaacttaacctggttgctattatcaaaaggggttcggagttgctatgacgaaggcaagcgtgtagccgaaaccttgatgtttgactaccacagacaacatggcattggtcagttttctacttccctaaactcactgcatcactttttctttatccagtgattcctttaagattctcattggcctgtttgtcatttgtagaaatccgcattgctagaatcttcaacacatatggtcctcgaatgaacatcgatgatgggcgtgttgtgagcaacttcattgctcaagcactccggtaaagtcatttgctctctcaacttcattgaaaccaagttttgtttcatctctgcttagctgtgtttccattaaatgtgttgtaggggtgaggcattgacagttcagaaaccggggacacagacccgcagtttctgttatgtctccgacatggtggatggacttatccgtcttatggaaggcaatgatactggccctatcaacatcggtaacccaggtccgcctttccattccaacatttaccttaacccctgtaactagagtgtggtgtttttgtttcatttgcttctttctaaaacccctctgtttctcaggtgagttcacaatggtggaactggctgagacggttaaggaggttagagtcggtttactctaaaagctgtgataaatcctgcatttacttcatgttttggttccttaatgtgtgttgtgtttgtattaaacgcagcttattaacccaagcatagagataaagatggtggagaacacaccagatgatccaagacagaggaaaccagacattagtaaagccaaagaagtgttgggttgggagccaaaggtgaagctcagagaaggacttcctctcatggaagaagatttccgactaaggcttaacgtcccaagaaactaaaaccacaagaaaacacagacggttttgagttcacgagagttgtcagctgttgagttatatgatgatgctattatactacaaagtggtgggtttttgtttggtctcatgtgttattcatattgcttttgttcgtagaaaaataagttgggaatgggtctccttgtgaggaatggctcttctttgtttttcagtatattgtggtatggttattatttgtgtggttttaatgaaatttgttcacttaatttgctcatggaattacagttttaaaatcgttttacagtaactaaaataaatacaatttttttaaaaaaaata

SEQ ID NO: 153027 - DNA, 2418 bp, Arabidopsis thaliana landsberg
atgaacgtcctgtttgggattgcagtccccctcttgggacatttttttacttaagtcgggaagagatatcagcaatggtgggattggaagtaataatgctaccagtaatttagaatggcaaagttacttattggagccggtaagaataaaagtagacaaggagcttgagcctgaaaatttctataacccaggtgaattagtaagcttcacaagtaacacagaggtagaagatttcgagagagctgaaagctcacacagtcttgctacacatgttggagagttttatgatgcttgcgatggtactgtttcttcctactaacttttttaaccacgagatagctagaaaattcttatgatgtctgacatttctagcatcatcactttttgccagttcttggagcctcttctcctttagttttaagtgttatatgcatatatcagtatgtgattttggttgtgaagtggccttttaggcttgggattcctgtgtttatagtcatcttgaattcgtgatagttatgaatcagatttccaaagacatagaaaatctgcatgcatgattcactggtatatctaagaaactggttttaatttattcagttactgtttcttggcttccagaactatcaactgacagtggaatgcagagttcagctaacaacattgaatctgaggtaagggagatgagattgggtttactaatggaaatcgaaaggaggaggcaggcagaggcgactctagagcaaatgcaagttcattggcgtaggctccgtgaccagttggccgatgtgggtatgttccttcctcttgatcccaccagaagccaatacagcatgaacctagctgatgagctacgttgtcaacttgaggtcaccaggtttgtctccgacacactaggcagtgacttggccaagacagaggtagagatggagatggaagctgagctcgaagctaagaactttgaaatcacccggttgtctgaccgtcttcattattacgagactgtgaaccaggaaatgtcccagcgcaaccaagaggccataggtagaagaaactcaagttaaatttacaagaatgtcttatcttatttttctttatctcaatgcttcaactctctttgatatcagaggtggcaaggcgagacgggcaaaagagaaagaggaggcagaggtggatttggggatcaatagctgcaaccatcacactcgggagtggagtcttggcctggtcgtaccttcctcccggaatgttatcatcagatgaagctcaacctcagctgtctccaaaagattcataatgaggttgaatcaaagcttcaggccttgtgaataaaaataggaaaatgggttttgttttaaccttttctagagaatgtatagaacattcatgatgacgacataactcagcttcatacgatcaaggtcataccaatttggttctgtttgtgtcgcttattgacttgcaatgttattattagccagaagttccgtgcctgattcttgcttttgttatgttggttcttaaatttaacgaggggggtaactgggtaaagaaaaataaaggcggttgaaatgggaattatatttaacaaggggtgtaagtggaaataacaaattctgaaacggcgtcgtatgaagatcatatttggttccttcgctaatcactaaagaaagcacctgtgaggaaaaaccaaccagtgagagctatcaatttgaaaaaccaagtccaacaatggcggtctctccgcatatttcgcctactctttcccgctacaaattcttctctacttccgttgttgaaaaccctaatttctctccgtatcgtatctatagtcggcggagagttaccaaatcacatctccaggcgcacaacagtaccactagctatggccggacggaactctcctcctcgaagaagctatggattaggcaacgtagcttcagcgaaatggaggttgagcaagcacaattagaagatgatgaagaacaagtggagatcgatatcgtcgacgaagccagtcttctctccctgagcatgaaaccggacagaaacatggcgttgctcgacgattatgagatggaggagcttggacacacgcctaatactcatcatcggagcggtttgtttgttttctccctaaaccctattcttactgagaaattgaaatttggttattacgactgggaaactgaatttggtgattacggatgttatataggatatgtggcggtggtggggatgcccaacgtcgggaaaagcacgctttcgaatcaaatgattggtcagaaaatatcgattgttacagataaacctcaaacgacgaggcatcggattcttggtatttgttctagccctgaatatcaggtttgtttatctaagcctcattgatttttgactcttaaaaagaaccaggtgttc

SEQ ID NO: 153028 - DNA, 1691 bp, Arabidopsis thaliana landsberg
caacgatcagggagatccaatacagtggcgcggagctgagtaaccatcaccaaactcaactgggagtattctatgagatcttggagaaagcaagaaagctatgtgaaaaggttttaagatgcaataggtggaaccttaaacatgtgtaccacgcgaataagatgaaggatctcgagaaaaaaatatctcgtttcctcaacagccagattttgctctttgttcttgctgaggtatgtcatctacgggtcaatggtgacaggattgagaggaatatggatagactgttgactgagcggaatgattctttgtcgtttccggagactatgatggagattgagacggtaagcgatccggagattcagacggtattggaattggggaagaaaaaggtgaaggagatgatgtttaagtttacggatacacatttgtttgggatctctggaatgagcggttcagggaaaaccactcttgcaatagagctttcaaaggacgatgatgttcgaggtttgtgaagttttattgaattttgttttgtgttgatggtcatgagttctaatcaagatttttgtgcaggactctttaagaataaggttttgtttttgactgtgtcacggtctccgaattttgagaatttggagtcttgtatacgagaatttctttatgatggagttcatcaacggaagctagtgattcttgatgatgtttggacaagggagtccttggacaggctgatgtctaaaattcgtggaagcactactttagtagtgtcacggtccaagcttgcagatcctagaaccacctacaatgtggaattattaaagaaagatgaagcaatgtctcttttgtgtctctgtgctttcgaacaaaagtccccgccttctccattcaacaaatatttggtgaagcaggtactaatgcctttttataaatatttgaatctgtaactaaaaacacactttgcttccaaatactaaaattgttactctgtttggtaggttgttgatgagtgtaaaggtttacctttatctttgaaagttcttggtgcttcgttaaaaaacaaacctgaaagatattgggaaggcgtagtgaagaggttattaagaggagaagctgctgatgaaactcatgagagcagagtgtttgctcatatggaagaaagtctagaaaacctcgacccgaaaatccgagactgtttcttggatatgggtgctttccctgaagacaagaagatccctcttgatcttctcacgagcgtgtgggttgagaggcatgatgttgacgaggaaactgcgttttcctttgttcttcgtttagctgacaagaatctccttactatagtgaacaatccgaggtattcgctcttttatgactttgtctcttgtaccaacacttcagtgggattaatcatatcataaatttgcaggtttggcgatgtgcacattggctactatgatgtatttgtgacgcaacacgatgttttgagagacctagcccttcatatgtccaatcgtgtggacgtaaataggagagagcggttattaatgccaaaaacagagccaatgcttccaagagaatgggaaaagaataaagatgagccatttgatgccaagatagtttcccttcatacaggcaagacttctttaactttaaatgaatttggttagtgactagagtcttcaagttgatacgag

SEQ ID NO: 153029 - DNA, 1235 bp, Arabidopsis thaliana landsberg
atgtgtccaactgtccacggaaaaaatttacgtttagttaatacttttttaatactcattaaaagtgattagtgtaaatatgtaataacttaatcgctaagactcatatttaaattaggaacatgaggaaactgaagtacgtggacaacttccatcaataccacttaagcttcaagaggcattgcaaagaagggaagcttccaaactatgtggttatagaaccaaggtacttcaagattttgtcggctccagctaatgatgaccatcccaaaaacgacgtcgttgaaggccaaaatctagtcaaagaaatctacgaagccttaagagctagtcctcagtggaacgagattctcttcgttgttgtttatgatgaacatggtggttattatgaccacgtccctactccagtcattggtgtcccaaatcctgatggtctagttggacctgagccctataactttaagtttgaccggcttggtgttagggttcctgctttgctaatctcgccttggatcgaacctggaacgggtacgtatgttttgaattggaaccgagttgtgttagtttagactttagtgtggtattgtcatgttggtcaaaaccggttataataatttactggtgatgacattattttttagtgttacacgagccaaatggaccagagccaacgtcgcagttcgaacattcatcaattccggcaacactgaagaaaatattcaacctcaagagctttcttacaaagcgtgacgaatgggctggaacatctcgatgctgtcatcaaccggaccagcccaaggacggactgcccctgtaaaatatttagttggttatatagtccatattaaacgcaatatatgtttaatgagtttttggattattacacagtcacattaccggaacttcctagggcaagagacatagacattggaacacaagaagaagacgaagatctcactgattttcaaatcgaactgattcaagcagcggctgtactaaaaggagatcatatcaaagacatttacccgtttaagctcgcagataaaatgaaggttttggatgcggctaggtacgtagaagaagctttcactagattccatggtgagtccaagaaggctaaagaagaaggccgtgatgagcatgagattgttgatctttctaaaggatctactcgtcactcgactcctaagtcttttgttcagaagttattctcgtgtttgatttgtgataattga

SEQ ID NO: 153030 - DNA, 1405 bp, Arabidopsis thaliana landsberg; identical to SEQ ID NO: 626

SEQ ID NO: 153031 - DNA, 1980 bp, Arabidopsis thaliana landsberg
tattgaatggaattcaaatgcagtataaaacattttctgatgcatctgccgcgaaagaatacattcaagaacaaggggcaccgattgtgattaaagcggatggattagcagctggaaaaggagtcactgttgccatggaactagaggaggcttttgaagctgttgattctatgctggtcaaaggtgtgtttggttctgcaggatgtcaggtggtcgttgaggagtttctcgagggagaagaagcgtccttcttcgcacttgtggatggagaaaacgccattcctctagaatctgctcaggaccacaagcgtgttggagatggagataccggtcctaacacaggcggcatgggagcgtattctcctgcacctgtcttgaccaaggagcttcaggattttgtgatggagtctataattcatcccactgttaaaggaatggctgaagaaggatgtaagtttgtcggcgttctgtttgcgggtctcatgatggagaagaaatccggtttgcctaagcttattgagttcaatgtacggtttggagatccagaatgtcaggtgagaaacgccaccttttctgaaaaacccttgtttagtccccgtatgattattgctctaaccaatgcagaaaattgtttaaacacaggtattgatgatgcgtatagagtctgacctagcagaagttgtgctacctgcttgtaaaggcgagctaaacggcatatcacttgattggtcaaaagattcagccatggtggttgtaatgacaagcaatggttatcctggtgcttatgagaaaggatcaatcatcaaaaaccttgaagaagctgaaagagttgctcctggagtgaaggttttccatgcgggaacggatctagactctcaggggagtgttgtaacagactggaaagcgtgttcttggggtcacgggcgaaaggtaaaaccttgaaagaggcgcgtgaaagagcgtactcggcagtgcaacagatcaactggcctgaaggtttttttaggcgtgatattggttggagagctcttcgccagaaacaagtagcgaccaaagaagagtgatgagaaggaatttttttgtaatggtttgtaaaccaagaatccaaaaacttaaaaatgattcaaaataacatttttgtttacataatttgtgtcaagataagtaatgtaggttaaatccctcaaatccacttcgaagcacaaatgttgaacttaggaatcagcaaacactctgatctttacgaagtttcagtggtagtttcgtaaaatttcgcaaagaaacatctgaaattgtatattgtaaagtttgaggtcgaaaataaaacgaaggagagatgccaatgggtgcaaaattcacaaaccctaaatttcaaaatcccaagtctccttcctgtccagcacgaatcaatgttccccaaatccttagccgtaagtagaaaaatctcgaatttaacaaaaggagtctctggtttaagaagactctgttcttcttcagctaccatcaccgggagcccttgcccacctagatatgacgtagctgtcatcgctgatctcatagagaagcagcactggtcaaagctcggagttcatgtgacagacataaaccctaacgagctctttcgactgttgataagttctgagcttgacccagatttgtgtctcaggtactatacctggttagtgaagaacagtgacatctctgtttcgttagagctcacatttaagctcttgcattctcttgccaatgcgaaaaggtactctaagattcgatctttccttgatgggtttgtgaggaatggatctgatcatcaagttcactcgattttccatgcaatctcaatgtgtggcaatgtttgtgtcaattcgattttagctgatatgttagtattagcttatgcgaataattcgagattcgagttaggatttgaggcgtttaagcgttcaggttattatgggtataagttgtcggctttgtctt

SEQ ID NO: 153032 - DNA, 1181 bp, Arabidopsis thaliana landsberg
tcgctataggcgaagcggtgtttctgagcactggttgggctgacgcgctattttgtcggcgatatttactgcactcgatcgtattggatatatctgcgaagcttcctttgaaatcctgcacaagtacagtcatgagaaaacctcagtgctactgaccattcttcacgtttttgcttacattgctggagagaaaatggtgttgcctagtgagcatggcatatcaattgcagtgatgaaatacattgtcatgtttgtagaaaacaaacattttggtactgtggagggcagttctcgattgcacccaggcaagaacaagtgtccattctcagacaggtcttcctcgctggaggctatggcatctaagctcatggaaattcttcaggaatttactgagtctaatactttgcataaaagcttgactggttcattgggttctagccacctagagaagaccgagtttaggccggcacacaaagatttccagtgtgtattgaccagggatcaaagtatcaatctctgtgacattctatcattggtggagcttattgcttgttatacggtgcgcatttaagaaagttcaagagcatttccaactttgacataacgttttgctaatttttccatgtttattgaaccaatttgattttatatctaaatgcaggcttgggattggactagtgcgaacattgttgctccactgcttaagatgctgggaatgccattgccaatgaacctctctgttgcaatcgtctcccttcttgggcaacttagcaggtaatattattaagtttgtctctttatacagaagggaccaatctgatgcaatattatccaaaatctcatctccttttctttttgtattttccagtattggagtggatgctggtggctatgaaaacgaaggaatctcaaacttgagagtgaaactgtcagcatttctacagtgtgagacgacactaaaggccggtttcgcagtgcagatagcaactgtgagctccctcctgaagacgctgcagctgaaattcccaatagactttcaagacaaaaccaccatgattccgggtagtggcgaccaaagcttatctggttcagtcaatgtggtgaccaagtggttgtcgttgttgagcaaggaacaacgagttttcgcatttgagtttctacaaaccaatgttgttagatga

SEQ ID NO: 153033 - DNA, 3792 bp, Arabidopsis thaliana landsberg
atgcgcagttcaagtgcacgtcatagtaggcaccaagctgacatagttacatattatggagtcataatttagattttattgcttgactaccatatgttccaaatacctattttcaagtgcaattgggcccataaaggtcatggtgtgagagaagaagaaggattcacgcttgtgaacctccacttgagccaagcagcatttgtaaaagatccttacattatgccatcccaagcgagacaagtgttttactctagagaggatgatttgagtcagtggtatgtggtaatgagagcgccaccaagaggttatcatgagttagagactgaagaggagtttaatagtgcaccattttcattccaaccaattgatgattcaggaaatcaatctgatgatgacagtttttgtgctagggcagattgtgaaggggttacagtagtggattaatgtatgatttattgttaagaatacatgtttaactttggagatttgatggtttttcaggttatctgaaatggctaagaaaggtgaactgaacccacgccgtagtaagcgtcaaaaaggactagatgcgagtcctgtcatatcatccttgaagaagaaaaagaagcaacaaaaggaagtgcttattcctgtgatagaagaaagcagcaaggagacgacttttaatgatgaagatggagttcaagtagagtttgaggaagtaacccaagcttctcgtggtgctgattcattggataaaaatgaagaagctgatgaccaagaagttgagagaacagaccctattgaagaagatttggagcctcctgctcaagaagaagattttggccagccttccactgaaaggcttaaaactgcgactgctgaaacatcaacacaagtgtcagtgaccaagaaaaacagactaagaggacccacaaagctgcgaagagtggccaaaagtgcacaagacaaagttgatgtcgaatttacagaattgggagaatttgtgggatctggttcagttaaactttcatcatttcttggagcacttgtgagagagtacgtccctattattctggatgattggaggcagctagatgatataataagggacacactatgcgaggaaattcaggtaagtgtattgatcatcttattacatttacttgaaaaactaattaagtaaagaatagtgattttctatacatttgtatactaatgtaggggaggttcaatgtggaccaagaatggcaaagaagagaaattttcaaacatatgggttgtttgtttagggcttctaaatccaaccttctggcgaaagtgagagttgctaagacaaagacagacttagttcagctgaaaccaagcaacattccctctgtgatagtttggaacaattgggtgaagagtaggactagtagcagttttaaggtgatgtagactcactttttcaatgagaagtacatatttaattgtgatgattagaaattcaatagtatctttattttgtaggagcaaagtgataaatacaaacgcatgcggaagtctcagataccccacaccacaagccgcaaaggaatgatacgactagctcaggagatggtaatgctttaactaaatggttttaatcataggaagtaagagataaagtctcagatacaccacattcaattcttttaattgtagaagaacaagagttcagacccctcaaaggtgactaggagtaaggtttgggtagcaggacacacacatgcagatgggagacctttgagaccagagtttgaagagactattgtaagctttcaaattttagctttataatcttttagattctcctagttgacatcaaatatttgaaattaggaaaaaatcaaatcaattgatagtgaaatgggctccactgcgtctatgagtgttaaagacgatgctgttagtcaagtcgttgtagtattttaagtgtcaatccaaatgggtgtgatgctaacaatcaagatgtgatcagaagtcactaagtcaagccaagcataacaggttttggtgtgttctagcagtcctaagtgaacatgcagaaaacagaaaattaaacagaaacagtaaaacactcgaccaacacagctctttgcagagcactgggtgaggtcgagtgacaggttgagtaacagacagaaaatgaaacagggatactcgactgcacagtctgttgccagacaacggggtggtcgagtatcaggtcgagtaacagtaaagaattgcagaaactaagcaacagatgacaggatgcaatacacaacagtagagtaaacaataaaattaatcagataaagaattcctaaggatgggataattgagtagtttcgtttcctcagtttacaggtgattgacatcctcaataaattaaccctagaccacgagttcattaaccaaatctaagtgccaccgcaacagagactttcaagctaacctagtcccagactcaatcaccattgacgagagctaacctaacaggcattacgaatcaacaagttaaagccaaaacgctccctgcaaccaataccttggtacaggtcacgaatctctggaattagtggttcagacatttcatcgaacaccttttgggcgcggaaatgtctgggctcaaattccagttgatcagaaagcaataggcattaagaacaactaatctagaagggatctatcaatcaatactcaatcacctagcatactgagaattctacactactctaacccatcctcagaaacctattcactactcagacatcataacagaaagcataaacgttgaacaggttgaagacatgataacaacagtgtaacagtagagtgataacagaatgaacaacagtaaacgaaaatcaagaaccaaagctgaatactgaatagataaagagaaatccggattacaaaaagtctagagcacaaggtctgcggaaataaaaactaggtaaaaacttcttgtttgcgaaaatgagaagtacatgctacttatagctaaatatcccgaaaccctaatactcaaaacgacgaagtatttggacgggttaagaactgtactcgacccaggtggtcgagtgagaggtcgagtgaatagctggagtcttcttttcctccttgtgctcgagtgtctggttgagtgcggaatgaagaaggctctgaagcttgtcatcgagtatgcagtcgagtggtgtgatggaggtactcgacctctaggcagagtgatgtggtcgagtagtggtctggcagtgaaggtgaagacactcgacttcatggtcgagtgaagtgatcgagtgatggagacgagggcactcgacctcgtgttcgagtggtgaagtgaagtggtgatgtcccctactcgacctgggggtcgagtggtctcttgaggtcttgaagctcctactcgacctctgggtcgagtggtttgacatgatcaggtccgcttcttccagttagctcgtcaactgctccaaatcacctaaatcaacacaaatatgcaacatgcatgcaagcatatcctaaacatgcaaagtgatgacaaatgatgagaaatggtataaaacagtgattatatgatgctaaagtgatgacaaatggatgctcaaaacatgcaaaatacacacttatcaactcccccaaacttagtctttgcttgccctcaagcaaacaattaagaacaagctggaggtgaagtttgaaagcggggactcagagccccaacacgagataaaccagatgaaatcaatgtccaagttgagagttctgtgctgcaatatgatcgaattctactcgaaaacgtta

SEQ ID NO: 153034 - DNA, 1037 bp, Arabidopsis thaliana landsberg
  unsure (1)..(1037): unsure at all n locations
atgggtgaaattcaagaaagattgtcagtttcatcatcttcgtcttcttcatcatcctcattgtcactatcaacggcactacctaaaggagattcattgccgatagatgcagattcttggatgattgcagaggagagagctcatgagatactttgcactatccnnnnnnnnnnnnnnnnnnacagaagtaggaatgagatcattgattatgtacgaactcttatcatgagtcatgagggaattgaggttagaaactccgcttctctttgctgacatgttaaagatttatgctgttttgttaactttctatgggaacttgtttatctacaggtcttttcatttggttcagtgccactaaaaacctatctcccggacggggatatcgatctgactgtcctaactaagcaaaatatggatgacgatttttatggacaattgtgcagtaggcttcagaatgaagaaagagaatctgaattccatgcaacagatgttcagtttatccctgcacaggtctctttgtttatttactttttggtttcgtttttgtattttcttggttgcccaaattttccttaagaaagtttgctgatatatgataggtcaaggtcataaaatgcaatatcaggaacattgctgttgatatctcttttaatcaaacggcaggtctctgtgctttatgttttctggagcaggtactatcagctattcaaaatcaggctccagaggtttactaaacagattattgcctagctttgattcttagttgttggttaaactctggttttatgtattctcaggttgaccaactctttgggagagatcatcttttcaagcgtagcatcatccttgtcaaagcttggtgctattacgagagtcgaattcttggtgctaacactggattgatctcaacatatgcattggcagtactagttttgtacatcatcaacctgtttcattcatctttaatctgccctttagcggtaatcactctttttctgaaccttcagcatcctctacatatatgcaaaagatgagaa

SEQ ID NO: 153035 - DNA, 1236 bp, Arabidopsis thaliana landsberg
  unsure (1)..(1236): unsure at all n locations
gcaaaggatattggaatccttgttgtgaattgtagtctctttaatccaactccttcgttatctgtaatttttgtgaacaagtataagcttagaggtaacattagaagctacaatctaggcggtatgggttgcagcgcgggagttatcgctgtggatcttgctaaagacatgttgttggtacataggaacacttatgcggttgttgtttctactgagaacattactcagaattggtattttggtaacaagaaatcgatgttgataccgaactgcttgtttcgagctggtggctctgcggttttgctatcgaacaagtcgagggacaagagacggtctaagtacaggcttgtacatgtagtcannnnnnnnnnnnnnnnnnnnnnnnnngctttccgttgtgtttatcaagagcaggatgatacagggagaaccggggtttcgttgtcgaaagatctaatggcgattgcaggggaaactctcaaaaccaatatcactacattgggtcctcttgttctaccgataagtgagcagattctcttctttatgactctagttgtgaagaagctctttaacggtaaagtgaaaccgtatatcccggatttcaaacttgctttcgagcatttctgtatccatgctggtggaagagctgtgatcgatgagttagagaagaatctgcagctttcaccagttcatgtcgaggcttcgaggatgactcttcatcgatttggtaacacatcttcgagctccatttggtatgaattggcttacattgaagcgaagggaaggatgcgaagaggtaatcgtgtttggcaaatcgcgttcggaagtggatttaaatgtaatagcgcgatttgggaagcattaaggcatgtgaaaccttcgaacaacagtccttgggaagattgtattgacaagtatccggtaactttaagttattagcttcgtttgaggaactgttattgtgtaacttcgagactaatccatggttgttttttttcttagagaagaaacccttagatttgatctctgacaatgtcaatgtgtttgttgtttatgtgttttggagagtttgtgatatttgagttacagttcttgagctcatgttttcagatcttagatgtgtaatgacgaaatcacagaataaaattagggacattgttaaacaaaaggttgtttgtttactattattgaagtttgctccgattaaattacagaaaccaaaactttcgtttgtcc

SEQ ID NO: 153036 - DNA, 573 bp, Arabidopsis thaliana landsberg
ggcacgaacatggcagctatgcgagagatgatcttccgtatcgccgtgatgcaaccgatccatattgatcccgaggcggttaagccaccgaagaggaggaacgtcaggatctctaaagatcctcaaagcgtggcggctaggcatagaagggagagaataagccagaggattcggattttgcaacggcttgttcctggtgggacgaagatggatacagcttcgatgctcgatgaagcaattcattatgtgaagtttttaaagaaacaggtgcagtctctggaggagcaggcggtggttactggcggagggggaggaggaggaggaagggttttgatcggtggaggtggaatgacggcggcgagtggtggtggtggcggcgggggagtggttatgaaagggtgtggaacagtggggactcatcagatggtgggcaatgcacagattcttagatgatgatgatttttaattttattattattatattaatgttggagaaaaagagaaaaatgattctggagagggaagccaagtaatttatgtgagagtctttaatttaactttattttcttgttt

SEQ ID NO: 153037 - DNA, 1927 bp, Arabidopsis thaliana landsberg
ttgattcattcaatgttgtcggaatttgacataacatcatggttcctttttttgtgcagaaaggtcggctatcggaggatgaagctcggttctacactgcagaagttgtggatgctcttgagtatatacatagtatgggactgattcatcgagatattaaggtagtttctctttcgaatagcttctcttttatggtcttaacaatagctgtgctaagtgtttttcttgaaatggtagccggagaatctgttgctgacttcagatggacacattaagattgcggattttggaagtgtaaagccgatgcaggatagccagatcacagttctacctaatgcagcttctggtaacatgaccgtccataatcctttctggtatctctgagctttaaggtcttatcaataattattgtcagattctgctttaagcctgtctctgtaaaactggtgacgtatacagacgataaggcgtgcacttttgtcgggactgctgcatatgttcctccagaagttctcaactcctctcccgcaactttcgggtaagagttttctgtttctgtaatttgcgttttggttttgtggattgcgatgcctctcttactttgtacaatttctttggtactctgtggaacaccaggaatgatctttgggctctcggctgcactctctatcagatgctttcggggacttccccatttaaagatgcaagtgaatggctgattttccaaagaattatagccagagatataaagttcccaaatcatttttcagaagcagcaagagacctcatcgaccggttgctggtaagatgcatcaaaagccgttgtcaccaatcaaatgatatggcagtaactctttaaatgtgcgattctctcaggataccgagccaagcagaaggccaggtgctggctcagaaggttatgttgctcttaagagacatcctttctttaatggagttgactggaagaatctaaggtcccggactcctccaaaactagctccagatcctacggtatgtctcctcatgtactttggaattatgaggccctttattatcattattgttttactcggttattaagtcaatttttttacatctgatgcagtctcagacagcatctcccgagagggatgacacacatggttctccatggaacctgacacatattggagattctttagccacacagaacgaggggcacagtgctcctcctacatcttctgaatcatcgggttccataactcgacttgcttcaatagactcttttgattcaagatggtgggggcatttaagcttcatttgttttctgggcagcaaccttgttcaaagctcctaaaactatacttcagttagacaatctgctaatttttttcttgtgaatatttgataaacaggcaacagtttttagagccaggagaatcggttctgatgatatcagcggtgaagaagcttcagaaaataacgagcaagaaggtgcagctaatactcaccaacaaacccaagctgatctatgtcgacccgtcaaaactagttgtgaaaggaaacattatatggtctgataactcgaatgacctcaacgttgtagtcactagcccttcacatttcaagatttgcacggtactcatcatttccctattcttctatccaccaaagatcaaagatgatgaaactgaaattgtgacctcttcttgcatttgtgcagccaaagaaggttttatcatttgaagacgcaaaacagagagcttcagtgtggaaaaaggcaatcgagactcttcagaaccgctgagacaaactccactgaagaatggttctgttaatttcctcgttggtgttttgtctttccttcaagattttaaactgaccaaactccattcttcatatgttttttctatttcacgcatccttgaaaagaccagttggacacaaa

SEQ ID NO: 153038 - DNA, 334 bp, Arabidopsis thaliana landsberg; identical to SEQ ID NO: 13751

SEQ ID NO: 153039 - DNA, 5330 bp, Arabidopsis thaliana landsberg
  unsure (1)..(5330): unsure at all n locations
cttcaactttccctcttcttcttccctctgtctcttcttctcagctattgctgcctccatcttctgcttcaaagtcatttctgactcctttttctttcggtctaaacggaaccgcttttgactagggtttcatttccctgtcctctcaaaccaaagggtgatacacaactagctccaacacatgacaaacggtcagaattttctgatacaacttggtgatcttcatcaatttgactcctctctacacttggctgttctggtttgaaggagcacgagccatgactcatcgatccagtttccttgagtaaataactctgtaaacatccatgttctggttaattgcacatcatatagaacaagatanatcattatggaactaagagcttgaactgtactgtagtttcatctcttggcggacaatcagtagagtcataaaaataacgacacacaaggatgagcactactaatctgagacttaattaggatttcagattttgaccgataatttttgtggagctttttatatacatgtgtagcttgagagatgcttaatactacgacacttagacctagaatgagattttctcattagtaataacaatagtacagcttttaattgaaggtttaattgtctatttcccttttagagcatggaacgaagatatctttttttttttaatgagcgattaaaacttcaggagaaagaggttactatttagaagacattaaacataagaatacagagaaataatgaacagacctcttcaaatcgtaactcagctgacgatgcagatccaatcattttttgtaactcaacactatagtgatgtgaagatgcagatccaatcaacttctgtaactcaacgtcatagttatcgacgttgtgacatgcggcttcctccctatgatgtactgcttctctaacataatctgactcgagaatgtctccctgcaacattataaaatcccatgattcaaaaagcatcttaattacatttagcttttgacccataacttttatggaggtttttatatacatgtgtagcttgagaggtgcttaatactacgacacttagacctagaatgagattttctcattacagtaataacaatagtacagcttataattgatggtataattgtctatttcccttttagagcatggaatgaagatatctttgtttttttatgagcgattaaaacttcaggagaaagagattactatttagaagacattatacataagaatacagagaaataatgaacatacctcttcaaatcgtaactcagctgacgatgcagatccaatcattttttgtaactcaacactatagtgatgtgaagatgcagatccaatcaacttctgtaactcaacgtcatagttatcgacgttgtgacatgcggcttcctccctatgatgtactgcttccctaacataatctgactcgagaatgtctccctgcaacatataaaatcccatgattcaaaaagcatcttaattacatttagaaggaaagagcagttaaagactctcatatattgagctgtcccaagacttagggaaagaatattcacccctggacttgacgaaagctctcttctagttggtttttccaggattcttctccgcttattctgccgcatggaaccccccatgggggaactagagcagaaaaattcttgaatcgggctctctagatcatgacattcatctgcttctgtacatgttacatctcttttaattgggggaacagctttttcagaggatgtttcatgttgaggtctctttgtcaatgcatctatatggccagtgaatgtatttgactctgtaggttcattctctcccacttttaagccagggtggcttgcatacgattccatttctatgtttaacccattgtgatcttcaatgtcattcatttcattgtttgccgataaatttactccagaatcagtgagagatgggacatcaaacacccttgcggtgggtgctggggtggggaccttctccatgcttgatttttctcgactattctctggaacctcatcgaagttgtccacaaaaacagggcgatcaggggttctcagcaatgaatttccttctctaacttcaagttgtttgtcagccgatttatgattagacccatcagaaagagccttgtagtcatttgctgattcctcttctatgagtgagcttcttgccctactaattcttccatggctttggttactccccacttcggtcaatgaacccagtggctgtacttccttggacccacaactgatatcacatcttttagaatggtcaatcaatttttccggagtaccactttcattaagaatagattccaccaccactggcaaaactaccgtgatgtcagtttggcttaaacttctagattttgaaataccgctaatttcagttgactcaccattgttatcttcctccactaataaagcttcgccattaacagtaacgggcttcaacaatacactttcatcgtctgattgcttgactgagtgtctcgactgcagttcaattgaagaggactcaacaaagctcaaaagctcgatctgggatatagagtcttggattgcacccgcaaatgtggtctcatctggggagataacagtttggcttaccctttcagcacttgaacatatgttagtgtcaacacattcacccgtttcttttgattgatcgctgctagtaatattttcaactactaagccttcagcatcaacactagagggattcagtgaatcttttacatggctaccttgcagtactggaattgaatctcttggctccaagttaattgaagaagactcaacagagcctgaatgctcggtcttggatctattttctcgagcattacttctagatcttgcaatgatttcagactgaaagatgctcgttcccgcatctgtcaccatagaaacttcactagtcgtagttattgcttgaggtaattctacttcatgatcagcccagtgagagggatttgaatttgttaacagaaaattaccagaaaaggagttgcttgatttttgatgtttcctcttggagttatcttgaattgagcttttagatcttgtacttccatcgagataagctgtttcatagcaacttctgcttttgggatcatccacttgctcatctactttgccagacgcttcatcaattgtctcaatggactgtaatatatcaatgtcattcacatgaccagactcgagtagacattctggtacaatagaagcataagcatcaccacttgaagatattgacactgaatccacttcatgatgcaaggtaaaagactctgtaggtacactaatcttaatacattgatctcctcttttaccttgagaattactgttctccacttcttctcgacactcttcatcattttcatcatgcttaaataactttatctcactaacactatcagaccttaatgaagcaatcccaaagcctatatcaccacccggagaaggtttgagctcatttctactgtttgaacggctttttgacgcttttgcactactacgaagctccaaagctttttgacgtgaccttgatctctgcatcttagcaagtgataatccagggtcaatgcaagtgtctggttcaatttcctcttgacaataatcaagagatgaagatttccgcttacaaccagtagttgagacacatttgggaaccttttccccttggctacatccaggagatgtagcatcaagattagtttcaactctctgattcttggagtgttcgggagatgaacaactttgattctctctgcaatcgattgagacactttctggcaatctctctttctcatgtacatctctaggagatgcaatattaacatcctgctcatgagaatgattcgaaacttgtctgactaagttgtgtgagaggttgtgttgcggttcctctacaagcaactgctcttctagcgggttatttaccacagaggtcaggtcttgtcttactacattgtcagctagaaacctgacagcccgttggtatgaaaagggacgactgctaggacaaacgatggaaggtcttgatgaaggaaatagaagttctgatataatctcctccttatttaactctgtatacatataaacaaacatcacaataagaatcgcaaacagaaactcttctattcaatcgtaactgaaacagatatacacgcaatgtacgttaatactagccttaacaaaatgctccttaacttatcacagaaaaatcaacatcaaagtgtgattatgaaccctaacaccatttctaatctttcaattccatcttctcacagtaattcgacatcaaatttatggtaatacgctttataaactttcaatccatttcccgtttaagtatcaaacaacttcgcagcatcattactcaatagccactaagactactaatcaattttgctctaattagccaaacaaatctacatttaccatcacggacaagaaattgagcactaaaaatcagatttaacaactaccggaagtttgggaaggtagagacggagaccagagccacgacggaggagatactccggcgagtaggcatttggaagctaaatgctggtcatagagatctacttgttgctgaacctgctcgacgattcgcctcttcctctcaaagatctgaacgaaaagattctcaatcttcacattcgccgtcttccccctcggattctccttgacggaaaacatcgccgacgacctactctagagatagagcgagagagagagagagactgttagcgcggatttgaatttcaaaattttggggataaagatttcattttcgctttcgtttttcactgaaaaaaatagaatgaagcttttttagcttttttaaccttcgttacctgaacgatgcgtttagttttaaacggcttcgtattgtgtctaatatctatcttctcgttaacgtttcgttttaacaaacctttttcatacgatgtcgtttctctctatcttttaatactttcgccgtcgtcgtcttattttcgctgtccctgatcattcgccggagctaccattaagagactgagattcaatcatcagagttcaatggatgtcccgttaccagtcgagaaattatcttatggatcaaacactgagtaaattttgaagcttattctcgattttgattcccttcatttgtcttttttgtgaaaattctgattttgtaaatttgatctgcttggttacttatgatgatgagattctcaccaggtttattattaaaaattccctccgggttggttgaaatatttttcaattggtttggggcgggaaaa

SEQ ID NO: 153040 - DNA, 2768 bp, Arabidopsis thaliana landsberg; identical to SEQ ID NO: 5050

SEQ ID NO: 153041 - DNA, 684 bp, Arabidopsis thaliana landsberg
atgggtcgtctttcatcaactctctgcctcacgtttctgattttggccacagttgcatttggtgtacctcctaaaaagtccattaatgttccatttgggaggaactacttccccacttgggcttttgatcacattaagtatctcaatggtggttctgaagtgcatcttgtcctcgacaagtacactggtgagtttctctgccttgtatatttctctgacacagttttattatctaagcccttcttctgactgttcttgttcaatgagcaaaggcactggctttcagtccaaaggttcctacttgtttggccacttcagtatgcacataaagatggttgctggtgactctgctggaactgtgaccgccttctatgtaagcgaaagtcgttactcaatcattcggaacatcttcttaagtgctaactgaaagttgtatcttgctttttcgtgcagttgtcgtcccagaactcagaacatgatgagatagactttgagtttctagggaacagaactggccagccttacattttgcagactaacgtgtttacaggaggcgccggaaaccgtgagcaacgaatcaacctctggtttgatccttccaaggacaaacattccaaatcagttctttggaacatgtatcagattgtgtaagttcgcattcctcaagtataatcctttactcaa

SEQ ID NO: 153042 - DNA, 957 bp, Arabidopsis thaliana landsberg
acaaacaaaccttcccttctttcccgatttcaagccctaaaattccgagacttctgtttctcgctttaacgacagtcgccgagtgagagatatagagagagaaagatgccggtgcacgatgagcaagagcatgaggtgtacggtggagagatcccagaagaggaagaaggtgagatggatacggaagagtacgaagaacacggcggagaagaaggtgccgccgcgcggagatgaggagcttgaacctggctctagctctagggtattgtgattcttcgatctataatttacttttatccaattgagactcttcttattttttactgtatttagtctgttatttgctttgattgtttgataggacttggaggatatgaagaaacgaattaaggagattgaggaagaagctggagctttgcgtgaaatgcaagccaaggctgagaaagatatgggtgctagtcaaggtttgtacttattaactgatacgtaaaatcttgaatctttgtgcgcagcttcacattaacctttaaattgatagattaggtttagagcttgtcttgttgattatgatattgctttgggtttacatattggaatcttttagtgaatcaatgaatctgtctagaaatttactggagtttgagtatgagaaggaaatcattaatagtattgtggagtcttgtcagttagctaattgggtcaataccttttatgttgttgcatatcaatgaagacccttcaggtggtgttagtgcggctgagaaggaagaagtggattcgcgttcaatatatgttggcaatgtgaggcttgttccaccattaattttcacatgtttctcatatatgtttgtatcttttttaaagaaagtttgtgtgttttattgctttggtatcaatgaaatttggaggctgcttgttgtttatttctttatctctagtaattgctaaactaacttc

SEQ ID NO: 153043 - DNA, 1470 bp, Arabidopsis thaliana landsberg
acagttagtcggtgttagacagttactcagttggctaagaacttttgtctggtgtacagattttcaaaaatccttcgattattccagcagtagaaattgaacatccaggatgctcatacaaccctacaactgagagtcaccaggtaataatttattatgaactaagtttcacagatttgagcttgttttatcatcctagtcttgtgtgtgaatcttgcattcacacctcttttctgtattgcaggatatgttggctgaagccgtcgctcaagaaatgcagaaagtttacaaaactgagttagggcctgcacctgttcctttgactattgaaggggatacactcagtgaagatgaggtgagtcttttgcttgtatgttataatataatcgatggaaagatgagcattgaatttgatagtttaatccatatggctgttgtatttaccatctcagaggtactttcttgatgtggacaattttagtgaaggcgaagataatgaaaacgttgagagtgaagtgtcagaggctggaattaagtaagaagctctcttatttacatgataacataaatttgtccaagagaaaattataatttgttgacttactccatcagcaaagagttggatttcatgttttttgaaattcttgtactgcagattaaaggagaacccatttgtccagttaaagccatcttcaaatacaaacttgaagaaaatagaagacaaaacacctagacaagctcaaaaagtgagtaatttgatgatatgtttttttacatgtatgagatgttttgtctcgaactttttccttgggagattatcttcatatgatttctcccttctttgcagagtgttggtgacgattctgtaatggtggacttgttgggtgatgatattaaaggtttgcttagtcaattattccactttttagtttcttcgtaatcttatctttttctatgtcatgaattaacatttccgttacaaaacaaattacttgcagaagacctgaagtactttcttgaagtgggcaatgttggtgaaggtgaagataataaagatgttaagattgaagtgtcagaggctgggaacaagtaagaagctctcttatttacatatcaacataaaatcgtctaagataaaattgtaatttgttaacttactccctcagcaaaaagttggatactcatgtttttgaaattattgtactgcagtgtctcaaggaaaacaaagagggttacccgtgtggaattaaataagcgatgtaggcaaaaggcactgcgaaaaaaagagacaaaggaaaaggctaaagagaagatattaaacgaaattgacaggtatcttgtgattttaatatatcttgatgatgtctgattacttataaaatcacgcctagacaaaatcttgttttaattatttcgttcctgaaaaagcctttatagcttgcccaacatcttagaagaaataccaaaaag

SEQ ID NO: 153044 - DNA, 1320 bp, Arabidopsis thaliana landsberg
cccctatttggtcactccaactttgatgttcctgatggaggtttacttacattcctttcaggacctttttctaccttcggttgtgtctcttgctgttccactagccctcatgtctttgaccaggttaagttcttcttgcatcctcaaacgaaaaaggagactatgtttggcttcaactgtctcgtaaatgtttgcaatgtatatgctaattgatgtaagttttttttctttctcagtgaggtaaatggaaaggaacaggatcctaaagatgtattggcttctgaaaagatggctccaagagggaagctagtttttggagttggccttggagcattggtttttgttccagtctttaaagctctaactggattgcctccttacatgggtatcttgttgggtcttggagttctttggatcttgacagatgccattcattacggtgaatcagaaagacaaaagctcaaagtacctcaagccttatctcgaatagacacacaaggtgctctgtttttcctcgggattcttttatccgtaagcaggtattaaatcaactgttcatctccaaactccttatgttccattactcttaagaattcacaatcttttctgatgttgttttccttttttccagccttgaggcagctgggatactccgggagattgcaaactaccttgatgccaatatacccaacgttgagctcattgcaagtgctatcggtgttgtatcagcaatcatagacaatgttccactggttgcagcgactatggggatgtatgatctcacatcgttccctcaagattctgaattttggcaactcattgcattctgtgccggcactggtggttcgatgcttgtcattggttctgctgctggtgtagccttcatggggatggagaaagtcgatttcttttggtatttccgaaaggtaagatacattcttccggcttgtctaacgatcaacaacacaacattgcattaaccagactgaaactcaatactcttgtggctctgcgcaagaaactcagtttttttttttttttctccatgcaggttagtggttttgcttttgctggctatgctgctggtatcgcagcttatctggccgttcataatcttcatttcgagatcccaacaactgtggctcagatcccatttctcactggttcataagctccatcaatctctgtatttcttctctctgagaaaacaagaaaaaatccctggctggctgcaacaataacacatcacttcgtcgacatgccgctttggaaaaaatcaactatgtaatttgtttcatgtacactcgattgtatcattag

SEQ ID NO: 153045 - DNA, 1549 bp, Arabidopsis thaliana landsberg
ctcggattgatctaagaaagccaagatgttcagtgtattcgttactgaattgttgttacatcgtgaacagcagtctttcaaggtcaatccattctttgaagatgtaaagctgacaaagacttttacgtttctcgaagaagggacgaccataatcgcagcgacgcctatcaaatggaaagagggcacagtaaaatggatctttattgcataaagtaagttccttgtcttaagctgtcgctggtttagagattattgttaactatatgtttcaattatcaagtggcctggcgaatgcgagtgtatcatcagacgaatggacactcacgtgcacgacccaagagaggtatttctcatgtcccccaattcactgcaacccatcatagatccagttaaactcttggcaccattcttattagccattacacgtctaaggactctctatcttttacctgtcttttttcagcttctttacctggtttagtgatgctcaacacaaggaggatgttgaggatgagatgcaagacgaggtaatgatcctatattttttttatgacttgattgtaagagtaactccatgtatggcccaacttgaactcggaaattcgtcttgtagcaggttgcagatatcatcaaggaagatttgtggcccaaccctctcacctacttcaacaatgtaagctactcaccatatcatttttcagtcttgacttggtttagagcgcttaagttacttggagattttggtaaattgttaaatgtaactttgtaggacgctgatgaagaggactttgatggagacgatgatggagatgaagaggtaaaagcctcatcttatttcctttgtttggttgagttttctacttaaaaattactgcatctatgatatgctaattaatgtgcataatgagatgaaagattagatagagatatcttaagacagaacatttgtgttattattaatgcctgaaaccatttaaattctggagattccattataagttgtgcctgataagtttttcaaaaccatatctgtctctaggagaaagaaggtgactctgatgaagatgatgacgaagaagacgaagttggtgaggaatgatggcagggatacccagaaaccacatttgcttacatgtcttctctataacagagtgtgtaaagttttgtgtgttgaaaggtttttaattttaagcaaaagtggattatgacgacaacagacaagcttttaattttattttaccgtaatagttatatcttgttgtaagaaaccattttcagccttttgttggaaaatcctgcttaaatggtttttgagtcttacataatagcttcttcatcttttgtcttcttaaagagaattatatttgtaatttcatatctgttgtgtttctttgactttactgaatagagaatttgtgtgtttatggtgaaaatatagccgatctgcttgacagatgaacggagtttattttgtctggtgacatgactctgttctcttatatcaggatttttgagaaaccctttggtatctttattgtttggtctgaag

SEQ ID NO: 153046 - DNA, 1056 bp, Arabidopsis thaliana landsberg; identical to SEQ ID NO: 25933

SEQ ID NO: 153047 - DNA, 894 bp, Arabidopsis thaliana landsberg
tggagtatagttagctttatatcactaaacacatgggctttaattgtttaaaaagctacttaaactttgatgttaatttgcagagctgcaagaatgatttgaacagtttgtggatccatgagaacaaagatgagattgaatatttcaggcttagtgatctttgggactgttttgatgagccaagcgcgtatggacttggatcaaaggtcgacttaaacaatggtgaatccgatatgcagtactatgtcccgtatctatccgccattcaaatctatactaacaaatctacagccatttctaggtttgatctattacatataaagagtgttgttctatatatgtgacagtgtcaaggaacttgaggagtgaatcattggtttttgcaggattcatagtgatgtggttgattgtgagagtgaatgttggagtgatgatagtgagattgagaagttgtcaaggtcaatgagcagtggttctagcaaaatatgggattctgtttctgatgattcggttttcgatccggatggttcaccgttgctgaaagatagacttggtaaccttgactttaagtacattgaaagagatcctccgcacaagcggattcccttaaccgacaaggttctcttctctcctttcattttcatttcttagtaacctcattctcagttttgaaacgaaagtaacgttcttggttcttgttcagataaacgtattggtggagaaatatccgggactcatgaccttaaggagtgtcgacatgtctcctgcaagttggatggctgttgcgtggtaagtagttctttgttaagttaacaaaacccttccagattggataactgctagaaatagtgattgagtgatggtttgatgaatcaggtacccgatatatcacac

SEQ ID NO: 153048 - DNA, 2248 bp, Arabidopsis thaliana landsberg
atgggaaaaagagacaaagagaaagatgcaaatgtaaagctcattttaggttcggacgctcacgtggcttttacaagtggtctccccacgttcggattttggttcggagtagataaagacaaaaaccgaagccgtgttctctcgtcttttgaccaaaacgccgtaataatccgtgaaagacgatgcttgctatccgttagatctctgccacgtgtcggacactacgttgcatataaagttacacatacgatgtataaatacttgattaaaattataaacttgtacagaaataggaattttcgaaaatgaagttttggtgtattaatagaaaccataatgcttgatgcgatcaaattagtggtaaactagttccataatccacaaacattttcttcctaatacagattttcccatttctggtatcacaaaattttcagataaataacgaacacaagaaagccttttgcaatcttaggtcttggaccctgattatgaatgccatcacttttcttggaaattcaacgatgataccttcacaatgtattctccgagcgtttacaagaatctctccatctaaatacatccgagacacctcgtttcgatcctatccttctcggttctcaagctgcatcaaccaatacaggaatgcagattcagatagaatcatcagaccgacaaatgctgtgccattttgtaccgacaggcagagctctgttacagctcaggttgtttctgaggcaagaagtcactctgcttccaccacatgcgcaaatgacacgaccttggatcagatttacaccaagaacggcttaaatgtgaaacctttagttgtcgagaggttaaaaagagatgagaaagatgaagaggcggtcaatgaagatgaaaaaggcgtaaagagagatggtttcgagggtgttaagtgtaatgacgtcgaggaagaggcatggagattgctgagggattcaatagtgacatactgcgattctcctgtaggaacggtggctgctaaagatccaactgacacaacgccatcaaactacgatcaggtctttattagggattttgtaccttcggctttggcttttctcctgaagggagaaagcgaaattgttcgaaacttccttctccacacgttgcagttgcaggtattgatgcccattcgcgatgttatacactgaaacgaacacaaaatgttgtttaaaagcaaagagtttgcatttgaatgaaaggataactaagaattttttttactgcaagttaaacatttaagtaaaatcaaagatatgaaaattagtgttgttgtctgtgttgtggttccagagttgggagaaaacagttgattgttatagtccaggacaagggttaatgcctgcgagtttcaaagtcagaactttaccgcttgaagaggacaagttcgaagaggttctggatccagattttggcgaagcagctataggtcgtgttgctcccgttgattctggtcagtacttttctgcttcttcaatctgcattttccataaatagagtaagaaaagattgaattgttgattcattgtcatacataattgttgattctttcagcttggaacatataattgaacagtttaattcacacatgctggtctaaatagaaaattttcaggtttatggtggataatcttgttgagggcatacgggaaaatcacaggagattactcgcttcaagagaggatagatgtgcagacagggataaagatgattgcaaacctgtgtttagcagatgggtttgatatgtttccaacacttttggtcactgatggttcttgtatgattgatcgtcgtatgggtatccatggccaccctctcgaaatccaagtaccaactcttttgtctcattttctgtttatagcgttgatatatatctttttatgagactgattcatgatttcctctttggattcattgcagtcgttattctactcagcactaagatgctcccgtgagatgctttctgttaatgatagctctaaggatcttgtaagagccattaacaatagattaagtgctctgtcctttcatatcagagaatactactgggtggacataaaaaagatcaatgagatataccgttacaagacagaagagtattccacggatgcgactaacaagttcaacatctatcctgagcgaattccacaaaggctactggtctgaatacccgagcaaggtgggtatctccttgggagcctacagcctgcacacatgaatt

SEQ ID NO: 153049 - DNA, 637 bp, Arabidopsis thaliana landsberg
ttatggctgatccgcaaaatataaatcttttcacattgaacgtcaaaatttgagtttattaacatcttatttattatttatatgttttgatacagtttcatggttgatgatattccggtaagagaattcaagaatctacaacatatgggtatccagtatccaaaattgcagccgatgaggttatactcgagtctatggaacgcggaccagtgggctacaaggggaggtctcgttaagactgactggtccaaggcaccattcaccgcttcttacagaaactttagagcggatgcatgtgtttcctcgggcggaagatcatcttgtcctgccggttcacctagatggttctctcaaaggcttgatctaacagcggaagataagatgagagtggtgcagaggaagtacatgatctataactattgtacggacaccaaaaggtttcctcaaggatttccaaaggagtgtagacactagctacgagaattaatgtgtgatccgaaactccaaagctagtattgtataggttcgtctaaattatatatgtaatgtttatgtttatttaggttctgtaataagcaatttcccctgtttctatgtagatattctcataataaaatgggcgtgagttatgttggtt

SEQ ID NO: 153050 - DNA, 1142 bp, Arabidopsis thaliana landsberg; identical to SEQ ID NO: 67036

SEQ ID NO: 153051 - DNA, 688 bp, Arabidopsis thaliana landsberg
  unsure (1)..(688): unsure at all n locations
agaacancagtgctagcttcatgtgaagacaggaagctgcacctgtaatttttgtagtctttctcaatatcttattaaccatgtctgttgaaggacgctcgagattggtgctgataggttcaaagttcctgatgtgatgttcaacccgtccatagtccaggtacaccatttgagcacgataaattcaacagaagattctgaagacattttgtttcttatcttgagcgttttgagcctcgaattatttatcaaaggtttcttctccgtttttattgcaatttgcagacgattcctggaatggagaagtatgctgatatgattccttccgttcgtgggttaccacacatggtatatgcatggtatttagtcattgcaaagcttccatctcttaactttttctaactttactctccattttactgacttgtacaggtcatggagagcatcaacaaatgtgatgtagacatccggagagagttgtatagtagcatactggtaaaatagcaatcaatgccaactcttaaatacccctacttttagtttcgttggatgtggatgattaacatttcctttcttctcgcattatgccagcttgctggtggcacatcgtcaatgcaacagctgaaagaacgtctcgaaaaggacttgataaaagtattgtgtcctaaactcttttcctctgtcttta

SEQ ID NO: 153052 - DNA, 1107 bp, Arabidopsis thaliana landsberg
  unsure (1)..(1107): unsure at all n locations
gggcctaaacnggttttgtgacccggcccatttaatgtgagtcacaaatggagttatcttatagtttacctgtaaaaaaaaacttttgtcgtcacttagccgagaaagcaaaagagaagaagaagaaggaatcgaaaaatgaagactccgatccacgcggtttcgacatgggtgaggaggcagcctccaaaggtgaaagctttccttgccgtcgtatctggcatggcggctcttgttctcctcaaactcatcgttcacgatcacgacaatctcttcgttgccgccgaagctgttcattctattggaatctctgttcttatctataaactcatgaaggagaagacttgtgctggtataacctcatttcctgctttgacttcgttatctgtagggttcttagctttaactagagaatttcgatctgtgttgagatataaaaatgtaaactttattcaacttttgagtacccaaatctcccaaaggagttgatttagttgaatcagcattcttcttacagattaaaagtctatttacataccttttttggggggtatttgcaggattgtcattgaaatctcaggagcttacggcgatatttctagctgtgaggctttattgcagttttgtaatggaatatgatatacataccattctggacttggctactttgggaacaactctctgggttatatatatgatccgttttagcctcaaagctacttacatggaggaaaaagacaacttcgctctctattatgtggtaagtgagtcattctcggttttgatctttttacttagattctgttcatgctaggcatgttggatatataagcagcttaaaatcttttgtttttagataaacctaccctttaaggtcacatgaagatggagcttattaatgttattcacttcaagcttactgatacagcataaccagagttcctttgtataagccatcactatcaaatctattatatctgcatataacatgccttgtagaacatgggggcatctaactactggtgcaatagtttaaggatccatgaatactacacagtagcactttgggttcattgcagctggcaccctgtgttgtgctagctgtat

SEQ ID NO: 153053 - DNA, 1079 bp, Arabidopsis thaliana landsberg
agcgtggcctatagataggatctcgggtcaacattcaagggtgaacaaagccttttacaaactcgccaatttctataaacatgtaatcgatgatcatttgaagactggacaacctcaagatcactcggacatcgtcagtgtcatgttggatatgatcaataaacccacaaaagctgattcgtttaaagtcacttatgaccatcttaaaggagtcatgtcagtgagtacatataattatagtaaaatcttttgaatttctaacttgaagaacaagattataccttgggaagcaagttaacttaagttatagaaaaatattttctcttgttgataggtattatgtcaattgatcaggatgtgtttttggctggagtgaacgcgggttccatcacaatgatatggacgatgacagagttaagtagacatccgagagtgatgagaaaacttcaagaagagattcgagcagcgctcggacccaacaaagagaaaatcacagaagaagacctcgagaaagttgagtacttgaagatggtgatcgaggaagcattcagattacacccaccggctcctctcttactcccaagactaacaatgtccgacatcaatattcaaggctacagcattccaaagaacaccatgatccaaatcaacacgtacacaattggacgtgaccccaaaaactggacaaaacccgacgagttcatccccgagaggtttgtcgataaccctatcgaatacaagggtcaacattttgagctattgccgtttggagccggacgtagggtctgtcccgggatggccacggggatcaccatcgtcgagcttgggcttcttagccttctttacttcttcgattggagtttgcccaatggaatgaccactaaagatattgacatggaagaagacggagcttttgtcatcgccaagaaagtctctcttgagctcgtaccaactcttcatcgctggtgaagcatgcaactataactatgttaaataatgcccagaattctatatttatgtccactttactaccaaataaaattttgctttgttcatgtaatccgcatgtttcatgttat

SEQ ID NO: 153054 - DNA, 3993 bp, Arabidopsis thaliana landsberg
cggagagagtggagcaggaaagactgagacagcaaagatagcgatgcaatacttggctgctcttggaggtggaagtgggatcgagtatgagatactaaagactaatcccatcttggaagcatttggaaatgcaaaaacattgagaaacgataattctagtcgttttgtaagcgtccaaactccttgtttactcttatttcttttactctgtgtctttaaaacttctgggtctttatttatctcttaatctttctctgatgttaaatttgacagggtaagttgatagaaattcattttagtgaaacagggaagatttcgggtgctcaaattcaaacatgtaagcataaaccttagtgctgcttcacacatttttttcaattttcctttacaaaatctgacagcttttttcttgttgtcttaaattttgcagttttactagaaaaggtaaattcctcaatatttttgctgcttcagtttctttcatgttgaaaaatgatttttaatattgacatcctttcatgttctgttgtcacactttcatagtcaagagtggttcaatgtacggaaggagaaaggtcatatcatatattctatcaactttgtgctggggcttcacctacacttagaggtattatttggatatctgatcaacagttctcttttaaagatcttatgttggatctattgcaagtgaaaatgattagtgtgatagaaatttacatattcatatatatggttactgactaactggtggaacaatattgtttatctgacgttttgtttcgctcattgttaaatcagagaagttaaatttgacaagtgcaaaacagtataactatttgaaacaaagcaattgctattcaattaacggagttgatgacgctgaacgttttcacgccgttaaggtaactccctcattaagtcaaaccttttctctttttctttctctgcaacttcgagacatttatttcgaccttttacgttgccgtttcaggaagctttagatattgtgcatgttagtaaagaagatcaagaaaatgtatttgcaatgcttgctgcagtattatggctagggaatgtttcttttaccattattgacaacgaaaatcacgttgaacctgaaccagatgaaagtatggctcttcagtccttaatagtgatatacctgctcctttaaatttatcacgtttttctgtattttgttcgaaaatgtcacctctatagtttttgtttcattcacttggagcaaattttctgcttaatctctgtagctcatttggcagggtgcgcaatgcaaggctatataactgctgttttgtttttttgttttccaggtttgtcaactgttgctaaattgattgggtgcaacatcaatgagcttaagctagctctatcaaagcgtaatatgagagttaataatgatactattgtacagaagctaacactatcgcaggtaggccttttagaaagattttttttttcacttgattctttgtgtgtacttttattctgagtagggttggttttaacactgtaatcatgatctatgccccctcttacttatttggaatcaagccttgttcatttatttttgtggtgaaagtttttcttatttgcttccaggccattgatgcaagagatgctttagcaaaatcaatctattcgtgcctgtttgactggctggttgaacagatcaacaaatctcttgctgtgggaaagaggcgaactggcagatctatcagtattcttgatatctacggctttgaatcatttgatgtatgttcctgttctctggctctctgagctttctcctgaaaaagattacaattgctaccagctatcattagacctcagtttgcaatgataccaaacagtgccggggggtataactctatatctgggggcttttgtgtttccatttcttgatttatgtgtcttattgatttgctatacgactttcattcctctgcagaaaaatagcttcgagcagttctgtataaattatgcaaatgagagattgcagcaacactttaaccgtcatctattcaagctggagcaagaggtaaagttgctcctttataaatgaactatacgggcacatgtattaaatatactaggtcgtgcattcacatagaactacaacctaaaagctcaactttctgtcatccaagttattaatgttctttctactgtttcaggaatatatccaggatggcattgactggacaagggttgattttgaggacaaccaaaattgtctgagtctttttgaaaaggtatataatcagaaaacaatagactaggaagcgatatggataacctaattagaagatatagagtttaactattacacactataaaaccgtagttaattggttaaatgcttactttagtcaaacatttattttaaggcacttacgtctgttgtctgtgcagaaaccattggggctgctctcccttttggatgaggaatctacatacccaaatggcacagatttgacacttgcaaacaagctaaaacagcatctacagtctaattcatgtttcagaggagataaagggaagcttttcacagttgtgcattatgcaggagaggtaacagctcttgaactctctgtgactacaaacacagttttgcgttattcaaaaacaggaacctagtctcggtctgaatgcttcttgacagcttgctttttttcacttgcttctccgaatcaggttacatatgagacgactggatttctagagaagaatagagacttgttgcattcggattctattcaacttttgtcctcttgttcttgcctccttcctcaagcatttgcttctagcatgctgatccaatctgaaaaacccgttgtgggtcctttatacaaagcaggtggtgctgattcccagcgtttgagtgtagctactaaatttaaggttgggtgatttccttaaacacagcttgcttctatttctgctcttaaaatttgttgagggtttactcatcacagctttcatctcatcaacatatgttgtccatttcttgtccaaaaggcttctgcttactttagaaggaaacgtcatcttataatatttgattagtgacgatgccgggatatttttttcagggtcaacttttccaattgatgcaacgtctagggaacactaccccacattttattcgctgcataaagccaaacaatgttcagtctgccgggttgtatgagcaaggacttgtcttacagcagctaagatgttgtggtgtcctagaggtcgttcgaatatcccggtctggatttcccacgagaatgtttcatcataaatttgcccgaaggtaacaactccatctccagttggtgcactttcattgtattgcatgtcctcttataataggcttcccatactttttagttgcaataatgttgaatggtcatgctgtttttcttttgtcatactttaggtatggtttccttctgctggagaacattgcagcaaaagatcctctaagtgtttcggttgcaattctccatcagtttaatatcttgccagagatgtatcaagttggctacacaaagttgtttttcagaactggccaggtataatagcttgtcggctggtgtcaaagacttttattttataaggggcaggaataagagtctcatgtgcattgcagattggggttcttgaggacacaaggaaccgtactctccacggcattttacgtgttcaaagttcttttagaggataccaagcacgctgtctcctgaaggaacttaaaaggggaatttctattctccaatcatgtataacacttttgtctcaagtcattaccctggttttgcatcttaatctcattgtaatggagatactttgagcttacctgagatatggctcgtcccacctctttttcttcagttgttcgtggagagaagataagaaaagagtttgctgagttacgaaggaggcataaggctgctgctactatacagagccaagttaaaagca

SEQ ID NO: 153055 - DNA, 938 bp, Arabidopsis thaliana landsberg; identical to SEQ ID NO: 37417

SEQ ID NO: 153056 - DNA, 941 bp, Arabidopsis thaliana landsberg
atgttgatgcaagaaggacagcacgagaaagtccatgaggtttatactgagatgtgtaacgaaggtgactgttttccagacacgattacttactctgcgcttatatcctcgtatgaaaaactaggtcgtaatgattctgcgataaggttgtttgatgaaatgaaggataactgtatgcagcctacagagaaaatatacaccacgttgttgggaatttactttaaggtgggtaaagttgagaaagctttagatcttttcgaggagatgaaacgagcaggttgttcaccaacagtttatacgtacacggaactgataaagggacttggcaaagctgggagggtagatgaagcatatggcttatataaagacatgcttagagatggattgactcctgatgttgtgttcttaaacaatctgatgaacattttaggcaaagtgggtcgagtggaggagttgacaaatgtcttcagtgagatgggaatgtggagatgtacacccactgttgtctcatacaataccgtgattaaagctctgtttgagtcaaaagcacctgtttcggaagtaagctcttggtttgataagatgaaagcagacagtgtttcccctagtgaattcacttactcaatccttatagatggttattgtaaaacgaatagagtagagaaagctctgttgctgcttgaggagatggatgagaaaggttttccaccttgtcctgcagcgtattgcagcctcataaacgctcttggaaaggcgaaaagatatgaagcagcgaatgagctatttaaggaactaaaagaaaacttcggcaatgtaagttctcgagtatacgctgtgatgatcaaacattttgggaaatgcgggaagctcagcgaagctgtagatctcttcaatgagatgaagaaccaaggaagtggtcccgggtgtttagcctcacgccc

SEQ ID NO: 153057 - DNA, 1215 bp, Arabidopsis thaliana landsberg
  unsure (1)..(1215): unsure at all n locations
tttttcagacctcaaacagaacatattcagtaatggggtgcattaagcaaccgaatgtttttctccccacgttatttatattcttatggcaacccacaccacacccagattctgcaatgttttacttcaagtatgtcctcttccacttggttcatgccttcatggtaattggcttatttcatattctctggaatgtattaactagtctctaactagttttatttggtacaaatttcacctcagaacgaacaaactcggttttaccccggagtttctgggacgagttaaacttgtgacctcaattgcctcattgcttggagtaggactgtacaatggattcnnnnnnnnnnnnnnnnnnnnnnnnnnnnnnnnnnnnncgacaatttttggcacgggtcttgggatgactcaaggtgggttccggtccgctctttacaaaaaaaactttgccatctattacctgttacacaaccaataactcttgggaccgttcttatgttttgcaggttatcctcgtgtcaggttttaacagacagttggggattagcgacgaatggtttgctataggagactctctaatcctaacagtccttgctcaggtttacatatttgtcagcattgagtttttcaaaggctgcatgattggaatttgtgattccatagttaatggagcattattggaatttgtcaatatctatgcactgacagcttaaaatcaaactgtaacaggcttcattcatgccggttcttgtgttagcagcgagattatgtccagaaggaatggaagcaactctgttcgctacactcatgtcaatctctaacggaggcagtgttctaggtgggcttatgggtgcaggactgactcaagcattcggcattacaagagacagttttggtaacttatcaacacttattatcctctgcaatcttagctcattgctccctctgcctcttctcggtcttttaccgcgagattctccagatactcttactaaagatgacgcagacgttgagatgaagtccaattaaggaagatgatgataattatcaaaagttaaaatgttatatacctttagaggtgttctgtgtattcagttccaaccctgttattacttgaaaagaatgaagcaggcttttacatggaaactacttttacccaaaatatcatgtaaccaaaatgttgtaattcttaaaacaataaactcttttgttatt

SEQ ID NO: 153058 - DNA, 3030 bp, Arabidopsis thaliana landsberg; identical to SEQ ID NO: 6842

SEQ ID NO: 153059 - DNA, 1049 bp, Arabidopsis thaliana landsberg; identical to SEQ ID NO: 59922
  unsure (1)..(1049): unsure at all n locations

SEQ ID NO: 153060 - DNA, 850 bp, Arabidopsis thaliana landsberg
cagtgatgcccctgctatcacttcctccgatcttggctgcaagcaaggtgtgaatttgagtagttactgagaagaacattataatgtcaggggatatatatgtagcaagtcagagattgtgggttaggaaagagtttggttatgataattgggttttgtggatcaggtgaacatgaatctggatggagggaagttcccggagatgatccagaagtgaagcatgttgctgagcaggctgtcaagaccattcagcagaggtctaactccttgttcccttatgaacttctggaggttgtgcatgctaaagctgaggtatggctttaatttactatatactctatcttcgatcttaattgcacaaaatgaatttcaatagagaacttgtcagattttgacaatgtttttgcatgaatttcatctgagaaattgcaaataaacgaaatcaagtgtcagtgaaaccgaatggtgttgaagttttagaagtagaaaagactttaagcaacatattggttctccttggtatgaggactaacgtctgagttgtaatagttggtgattacaagattaatgagcttaatattaaaaacatggacacaggtaaccggcgaggctgcaaaatacaacatgctactgaagttgaagaggggagaaaaagaggaaaagttcaaggtggaagttcacaagaaccatgaaggtgctcttcatctcaaccacgcggagcaacaccatgactagtccctctcctttgtttatgtacttttgagtgtttacttactctgtaagatattttaacttctgatgtaaaactctaaaaccttaaataacaaatcaggagaataaattaagtttc

SEQ ID NO: 153061 - DNA, 650 bp, Arabidopsis thaliana landsberg
ctcgctcgcataaaaggttaacctcaaaacaagtagctcctccttccattaggatggcggcaggactctcaaccgccgttacattcaaaccactccaccgctctttctcctcctcctcctcctcctctaccgatttccgactccgcctcccgaaatccttatccggattctctccgtctcttcgatttaaacgcttttctgtctgttacgtcgtcgaagaacggagacagaattctccgattgagaacgatgagagaccggagagcacgagctccacaaacgctatagacgctgagtatctggcgttgcgtttggcggagaaattggagaggaagaaatcggagaggtccacttatctaatcgctgctatgttgtcgagctttggtatcacttctatggctgttatggctgtttactacagattctcttggcaaatggaggtataactaactaactaactaaaccaattcgaaatactgaattctcacatccttttgtttggttgcaaaaatcagggaggtgagatctcaatgttggaaatgtttggtacatttgctctctctgttggtgctgctgtaagtttcaaaacttcatcccaatttttctgattcataaacaaaaaagcttggctgacattttgggattattca

SEQ ID NO: 153062 - DNA, 557 bp, Arabidopsis thaliana landsberg
tgggctttggcttaatctagctgatcttgatgctcctttcacttgctctcaagacagagaaaaggaacactgcgtatgttgatgcggttatgactgtcccggccaaggctatgctacccataagcggaatcaacattgcttttaaccgcgagttggtgggtccagctttggtgcctgcactcagattggctggagaagggaaagtgagatgggaaacacttgaagatgtttggtgtgggatgtgtctgaaacatatctctgatcatttgggttatggtgtgaaaaccggactgccttatgtgtggagaaacgagagaggagatgcagtggagagtttgaggaagaaatgggaaggaatgaagctgatggagaaaagtgttccatttttcgattcattgaaattgcccgagactgcgcttaaagttgaagattgtgtgattgagcttgctaaagcggtgaaagagcagttaggttcagatgatcctgcctttacgcaagctgctaatgctatggttaagtgggtccagctctggaattctgttaattctagcgcttga

SEQ ID NO: 153063 - DNA, 1629 bp, Arabidopsis thaliana landsberg; identical to SEQ ID NO: 1085

SEQ ID NO: 153064 - DNA, 2486 bp, Arabidopsis thaliana landsberg
cctaacttgttttacttacaaacctctacaggaacattggtgctgatatgttctttattgcgcggctagttcgtcccatggattcagtctcttcagagaaggcaaagctggcggtcgtgagaagctgaagcaaaaaactaagttggaatcatccaaggtctctctctatatactctgttattagctgaaaacagaggattaagaaacagagcagaacccttgctgaaacatttgtattttcttcactgcttcaggaagtaaaagctgaatcaatcaagccggagacaaaaacagagagtgtcaccaccgtaagcagcaaggaagaaccagagaaagaagctaaagctgagaaagttaccccaaaagctccggtaagcttactctttctgctgttttatctacataatgatccaatctacataatgatccagtagtggtcaattgtgttaacctatggaacaggaagttgcaccggataacgagtttgagaaacggataagaccggaagtaatcccagcagaagaaattaacgtcacattcaaagacattggtgcacttgacgagataaaagagtcactacaagaacttgtaatgcttcctctccgtaggccagacctcttcacaggaggtctcttgaagccctgcagaggaatcttactcttcggtccaccgggtacaggtaaaacaatgctagctaaagccattgccaaagaggcaggagcgagtttcataaacgtttcgatgtcaacaataacttcgaaatggtttggagaagacgagaagaatgttagggctttgtttactctagcttcgaaggtgtcaccaaccataatatttgtggatgaagttgatagtatgttgggacagagaacaagagttggagaacatgaagctatgagaaagatcaagaatgagtttatgagtcattgggatgggttaatgactaaacctggtgaacgtatcttagtccttgctgctactaatcggcctttcgatcttgatgaagctatcattaggaggtctgagagaaggtataaaagaaattttggtaaaatgcaaaagctctaaatcagtctttacactattttgactgatttttgttttgtgttggatataacagaataatggtgggacttccttcgattgagagcagagagaagatcttgagaactttgttgtcgaaagagaaaacagagaatcttgatttccatgagcttgggcagataacagaaggctacagtggaagtgatctcaaggtctgtgtcttctctaaccataaccaaagactgtcgtgtaaaatcgttggaaactgactgtttgttgaacttttgtacaaacagaacttatgcatcacagctgcttatagaccagttagagagctgattcagcaggaaagattgaaagatcaggtaaaagactaagaatggccctctcttgcgctctatattcgatcaaagtctcttaggattttgaaatatcttggtggttttaggagaggaagaagagagaagaagcaggaaaaggcacagaagaatcaaaagaagaagaagcagaagcttctgaggaaagagttattacattgagacctttgaacatggaagacatgagaaaagctaaaaaccaggtctaactaaaatcttatctgtttgacaaaaaaaaaactaaaatcttatctcattttgtcaagaaaagacaagaaaactaaaaaccctaactagttatgttgtcgtgttattgcaggtagctgcgagttttgcatcataaggagcaggaatgaatgagctaaagcaatggaatgatttgtatggagaaggaggctcaaggaaaaaggaacagctcacttacttcctctgaaaattgcaaacagatattgatgtgtgtttcttgatgcacacgatatatatataacaaagagatcccgcatatcacaaagaaagagtcttcaattacttgttaggccattccatttttagataactttttaggtttcatcttattctctttctttttgtgttttatagaattttctacaaaactatgattcttttttatatgttcatatttatgtcattgtgaatgtgtagttaatgtagtaaagatattttataaaaatattatgattgtttgttacatagaaattttcatatacatttgaactagaaatcatatgaaaagaataacacaaattataccaaaccaaatattataccggttccggtttgatttggaattaagtaaattacacaaaaccgatacaatgattaaagaaccttgacgttttcgatgtttgtgtgatctccccagaaaagagaaatgaagagataccaaaatctaaaggtaggagaagctttctccaaaaatcgtatttacccatttgcttgcaatgaactaagctccatattgaatcttgcttactctctatcacccaaaaatgtcaaagctttgatcttccaagataccctctccgcttttcgtcttcttcccga

SEQ ID NO: 153065 - DNA, 1428 bp, Arabidopsis thaliana landsberg
agggacccaatgctacaacttctagttacttatctgcattttagtagattggaaggaacccaatattcttgtatttctttttgtgcaatgatatagaaaaacttgcttactgagatggaaacggttacaaatataatgagagaagttgaactaaaggagaaagatgcagagaagtcaaaggaggaagctgctaggggaggtttagatactcttcaaaaggttgaggagctcaagaagatgctggaacatgcgaaggaagcaaatgacatggtaacaagattgttacctgtaatgggctaattcattttgctttaggttcttgattttgtaattagaactaatttaccatgattttgcagcatgctggagaagtatatggagagaagtcaattttggccactgaagtaaaagagcttgaaaaccggttgctcaacttatcagaagaaagaaacaaatctcttgctatccttgatgaggcatgtttctgtctgctgattatgaagacttgtttttttttttcctcctgttaaaacgaaactgagatgtctacctctgtttcacactgtacagagatttgtctaattgtgtttctttgtagatgcgaggaagtctcgaaataagactagcagcagcactggagttgaaaaagactgctgagaaagaaaagaaagacaaagaagattctgcacttaaggcacttgctgagcaagaagccaacatggagaaagtggtccaagaatcgaagcttctacagcaggaggcagaggaaaattccaaggtactatcactgtaacaaacactagcgatgagtttcctctaaactcaaaattcttctcaatctcatatctttttttcttcgtcttctcggcccgcagcttcgagattttcttatggatcgtggtcagattgttgataccttacagcaagtcccattctcgtcccactaaccgtacattggtccattttttataacagcaatgaatcatttagcaaattttttctgcggatattcataatgatcggccatattaaatggaatttttaacctctcttggttctttgcgcagaggagaaatttctgtgatctgtcaagatgtgaagctgttgaaagaaaaatttgaaaaccgagtgcctttaaccaaatcgatctcctcaagcttcactagttcatgcggatcatctatgaaaagcttggtgctcgagaacccttctgagcgattgaatggagtgactgaaacctcaaacaacaacaagttcccagaagcagcagctttcttcatgaacaaagagaaagatgattgtagagatcttcttgaagatggatgggacatctttgacaaggagaccgaacaagttgtttggtactgaagaatgaagttattgtacatatagggttcttaaatgctaaaaataaatggattggtttcc

SEQ ID NO: 153066 - DNA, 771 bp, Arabidopsis thaliana landsberg
  unsure (1)..(771): unsure at all n locations
agagggaactgttcaaaaactgaagtagtgcctacttgtgaaggcncattaggacttactttcgagaagaaaacgggagatttgtacatatgtgatggttacttggggctcatgaaagttggaccagagggaggcttggccgagttaattgttgatgaagccgaaggtcgtaaagttatgtttgctaaccaaggggatatagacgaagaggaagatgtcttttacttcaatgatagtagtgacaagtatcatttcaggtattcaataggcttttttatacatgtacttaggaataatgatccgagcatttgcgacatagagttatatatacgacttcaatatttgtttgtttttgcaaaaatagcgtattaaattaaactttatgtgatgtgtgttggtcagggacgtatttttcgtggctgtcagtggggagcggtcgggaagagtgatcagatacgataagaagacgaaagaagccaaagttatcatggacaatctcgtttgtaacaacggtttggctctaaacaaagaccggtcttttctaattacatgcgagtccggcacaagtcttgtccaccgatactggattaaaggtcccaaagccgggactcgtgatatctttgcgaaggtcccaggttaccctgacaacatccggctgacatcaactggagacttttggattggtttacactgcaataaaaatctgatagggagattgattgtgaagtacaaatggcttgggaaattggtagaaaagacaatgaatttgga

SEQ ID NO: 153067 - DNA, 962 bp, Arabidopsis thaliana landsberg
ttaactaacttaaggaactaaccattctctcttccttttcttttttttcagatacaaaaccatgaagaacatactagcttgcatagttaccatcataaccctctcaaacctcataaccatttctcaaggaagaagggtatcacagtcatttgaaacatttgagtacacagcaattatttgcagatcccacagtgcctccataacagagtacggtggtgtaggagacggcaagacgctaaacacaaaggccttccagagcgccgttgatcatctcagccaatactcatctgaaggcggagcacagctctttgtacccgccgggaaatggctcaccggaagtttcaacctcacaagccatttcactctgtttcttcacaaagacgcaattcttctcgctgctcaagacttaaacgaatacccaattctaaaggctttgccttcgtacggacgaggacgtgacgccgccggtggaagattcgctagtctcatcttcggcactaatctctccgacgtaattatcaccggtaaaagtttcatcctttttttcttttttcaataattcgaaattagagagaaataaacatgaaccgttggatattattttacagggaacaacggcacaatcgacggtcaaggatcgttttggtggcaaaagttccacggtggcaagctaaaatacactcgcccgtacctgattgagttaatgttctcagatacaattcagatttcaaatctaacgttccttgattctccatcgtggaacatccacccagtgtatagtaggtatagttatatcctgtgtcacactctcatctaataccatgcacactcaccataccaccgtacgatttaatttattaattaaaatatcccacagtggcagcaatatcatcgtaaaagtgcgttacgatcatcgccccggtaaaatctccgaacaccgacggaatcaatccaggttcgtc

SEQ ID NO: 153068 - DNA, 3214 bp, Arabidopsis thaliana landsberg
tgatcttttaaaatacgaaaaatatagaagaaaaacacagatcaagatagaagaggaagagacgaacctgaatgccatgttcaagacagtaaagctcccagcaagcatttccgacctggataccggcctgaccaatgtggatcgaaatgcactctctcattttcgtttcgcggaagaaagaaaagatctagaaactagatttgcagggaagaagacgaagaagaagaagggcgtttatgaagacgctcttcttttagatctagatctgattttttcgatttctaggtttttacagagctgtttgatgctatatttataagcgaaagtatccatctgtatgtaacggcacgtatgatacacgtgtagtgatgtaattgggttgtcgttaaaaccacgatttgttgatatcctcgtgagttgcgtattttctaattttgaattttgattccttagattctgtttggcaatcgctttctgaccgtttctctttatttttgaaatagcaaaattccttgaattgcgtggaaatgaaccggaatttaattagaattgaaccggatcagaccaatatttaaagtaaaccgaaacgataagaaactagtattaaccaaaatcttcgaaatgggaaccaaaaattcaaagctttgagtaaatgatgagagcgctagcggcggcttcacggccactgttttccgatttgccgagtctcgttcgttcatggcttccgacttctagcttcaaatcgtttgctactgtatcttcgtctcctccgtcggatttgaatctccggaatcaatctcgcggtggccttcctcgattcttttccgatgatcttccatctcgcaaggcacacaccctatctatctctatctttatctcatataatttttgttccctttaaatctgtgtaagaatccaatcgaaatgagagtgagggtaatcactgagaagtttagaaattactgtaattcactgtaatctctaagaaatttctggtaaaatcatggtgaaatgataatattaaatgttcttgttgtttgaaatgataagctcctctttgtgtaaatcgttttatgattgtttatagggtggagttgttcgtgttcaaggctctgagttttggcatatggctaaagttcttagactgaaacaggaggacaggtaattactacattcatatatgttattgtcattttccagtgttgcattcatgaaaggcccttttaaaaattgatttgttcatgttttgtttgcttgtatccatgttgctaaaagttttatcctatctgaattatgtttgtaatgtatctggatccatcctttcatttttatgcatctttatcatgaggaattcagttgtttaagtaatgatagcatcaaaagtaaccctgaggtgagaggaggccaaccttttctttagtttaagatcactaaaccttcagtgaatgtaagtaatgacttgcacccattttctttgcaagggtagaactctttaatggcaaagggggtctagtagaaggctgtatacaaagtatagacaaaactggagttgattttatcgcacaagaagatcagaaggtgattcttcctcagggcatgcagtggcaggtgtttgcagcttttggtatgatatttgggactgctcttaattttacaatatcgccggatgttatagtctctggctctgctcgagtcatgatttctttgaaaatgtcttgtcaggaactttgaagggtggtcgagcagattggctaattgagaaatgtacagtatgtatctacttttagtatgtaactgtctaaatcacctgtgaatattgtgtcactgaatatgtgtatatgctcgtcttaggaactcggagcgagcagtgtcacaccacttttaacggaaagatcacccataatctctgaaaaccgggtcgatagattggaacgcgttagttttgctgcagctaagcaatgtaagtagcaatagtgaaagaaaacaattggttggttaatcttgctcttctttttccttggcattatagttgtttgatcagaaactatttgccttatttttcactgtcacaggccaaagacttcatcaaatggtactgaaccctccaatcaaatttgataccctcttggatcatgtatgtttgaacatttctctacgcaaactctaagatccttggtttataaaatttctgactttttgttcttctaaacttgttttgacaccttttggggttttctagattttgaagtcaaagttatgtttggttgctacagccgaagctacacctcttcttaatgcagtaaactcctcagcaaaagaatccagcggactattaatcgttggaccagaaggcggtaagaaatcttctcttcaatacatttctgatgtagttctcttttaaaatttctactgacttgctacactttcacattgtcgaaaatgaaatcatgggttaacgctcgagtagacacaaaatgaacagtagctaatggctcgtgttaatatgacttgtctcagtgatataaaaaatatgtttgttatctaacggtcaacaatgaaattgaagcagactttacgaagaaagaggtggagatgatgttggaagcaggcggcacagcagttggactggggccacaccggttgcgagttgagaccgcaaccattgctcttttggcaactctagtgatgtggtctgactctcaagagatgatctaaaagcttgttaggctttagtttttggtgcctttaggctttgtcttgtgttcagagattttgcttagttgagtctggacatcattgataagaaaacaaagaagatgtttgaatattatagcctcataataaacaaggaatcaaggatacataaaaatacataaacaccgaagaacaagctaaccgaagaaggataatcaatttggcggtcggggtaccgagtccatccaagatgggagcacaaactgtgataacataaggattcgatcgcatctctcttccaggaacccttcaggacccgacgtgtttacgggacagcaatcaccttcactagtactcccatcctatgactcttgatgaacaataaactcttgtgcctgcaagtaacccgataccaaacaaccgtgttgacgatcccacagatagacaatatcagtatcaaacggattcattgccaggggaaaacagttgacatcagatatgaaagacggcatgacgactt

SEQ ID NO: 153069 - DNA, 900 bp, Arabidopsis thaliana landsberg
  unsure (1)..(900): unsure at all n locations
gtgcttagatntatggctaaagttcaaaactttcttcacttcagagcttcttgaatggaaactatggttttgtggttttggttaatcttctgctaacactttntgccctgttttggtttgggaaagtgaaaagaaaatgtcaggatctgagacgggtttaatggcggcgaccagagaatcaatgcaatttacaatggctctccaccagcagcagcaacacagtcaagctcaacctcagcagtnnnnnnnnnnnnnnnnnnnnnnnnntggagacgacggaactgctctttacaagcagccgatgagatcagtatcaccaccgcagcagtaccaacccaactcagctggtgagaattctgtcttgaacatgaacttgcccggaggtgagtctggaggcatgactggaactggaagtgagccagtgaaaaagaggagaggtagaccgaggaaatatgggcctgatagtggtgaaatgtcacttggtttgaatcctggagctccttctttcactgtcagccaacctagtagcggcggcgatggaggagagaagaagagaggaagacctcctggttcttctagcaaaaggctcaagcttgaagctttaggtatgtatttactatatatgtaacaacacacaatgattcttctgacattttggaatcttctctccctcacgtgctgcaattagaaagttttgttttgtgtcggctgcaatctattagaatatagtaaaaatggtgaatatggtagttaaacaatgaccttgagaatcattgctattacaatagacttttatgcccttttaagcgtatctttgtcaaccatctttgctctgtaaatcccctaccaatcttggcatattttgtgtcttgctttgctatattattgacagattctttt

SEQ ID NO: 153070 - DNA, 1171 bp, Arabidopsis thaliana landsberg
ctctctcttctctcgtgttttcgacttttcctctctctcatatatattatatattttgttttagtttttttttcttcaccggatcgatcgagaagaaagaaaaagttcttcttcttcttcttcttcttcttcttcttctgattgtttgacaagttttacgacaatggcggtttacggcgagaagaagcattggtggctccgcaacaagaaggtcagtctccatctttggatgtcttcttcattgttttcgtgaattcgatatcgatctcatcaaattgcttttttatctctctctgcctcatacaacggtgataagtacatgaaagaagcaaagttttatagcgagtcagatccaaacgacgtgaatcagcttaaatcttctggaatctgcactttctgtatctcctcgttacgaactcgctctcgaactcaaagccagatcccttctttacctccgtcgatacaaagacgtcgccgatatgcttcaggattacattcctagtcttaaattagccgccggcgaagattccggtatcggttcatcggagctttcttttactcattcttctcgtgaatctgtcaaacttctcaacgatttgcctagtcatcatcaccatgactcgtcttttaaatgcttctctgtctctgatttgaagaagaaagtcatggctggtctcactaaaaactgcgacgaacaagggcaatggaggtcatttactctacaaaaaaaccatttctgattttcacccgacccggattttttgattcggatctttttcttctttctgttacagatatttggttttgggtcaagcttgttgccatttaggtttaatggaggatgcaatggttcttcttcaaaccggtaaacgcttagccaccgctgcgttccgccgtcagagtatttgttggtctgacgatagcttcattctcttctcctccgaagacggcggctcctctcctccctcctccgtcgtcgtaacttccgcatctcagccacgatccgagagcatcgctcacgtgttatctcacatcaagctacttttacgacggcgcgccgccgcactcgccgctctcgacgcaggactctacacagaatcgattcgccatttctcaaaaatcttagacagtcgccgtggcgcgccgcagggatttctcgcccagtgcttta

SEQ ID NO: 153071 - DNA, 2122 bp, Arabidopsis thaliana landsberg; identical to SEQ ID NO: 7657

SEQ ID NO: 153072 - DNA, 556 bp, Arabidopsis thaliana landsberg
atctccaatgttcagtaacgccgaacaatgcagatcttccggcgaagattccggcgtctgtaaccatcatctcgtccacgtagccatcactctcgacatcgattacctccgtggctcaatcgcagccgtcaattcgatcctccagcactcaatgtgccctcaaagcgtcttcttccacttcctagtctcctccgagtctcaaaacctagaatctctgattcgttctactttccccaaattgacgaatctcagaatttactattttgcccctgagaccgtacagtctttgatttcttcttccgtgagacaagccctggagcaaccgttgaattacgccagaaattacttggcggatctgctcgagccttgcgttaagcgagtcatctacttggattcggatctcgtcgtcgtcgatgatatcgtcaagctttggaaaacgggtttaggccagagaacaatcggagctccggagtattgtcacgcgaatttcgcgaaatactacaccggaggtttttatcagataagaggtttaacgggacgttcaaagggaggaacc

SEQ ID NO: 153073 - DNA, 1440 bp, Arabidopsis thaliana landsberg
cacaaacaaagtagcagaacaaagcatatacaaaagcttcattgcctcgagattaaacagcatcaagacaacatccaaaaattacccaggtttcttcattttcttaatatatcgtttttgtttctggatctcctttctaaatctgtagattcaggcgtgtgtagatttagtttttttgttattgtttggatgagtaaagtatgttctacaatgcactagatctaaatctcttcgagattctgatggtgtgttggtgttgtattaaattgattttggggataatctacgacaagggtttcttttaatgttccttaggaaaatggtaatgtaacgtttaaagggttttaagagttgcttaatatagctgttgagatgtctgattgattatgaatcccgatccaagagtttttttatgaatagaagagccatgtcgttcttgattgaattaatcttaatcatactgtttcgtaattcttaaactttgagcttgatgttgcgtgagaatctgggaactttaaatgtgtcggctgggttctctagtttgcttcttctttctgtatttggctctgagaaacttactagagctctaacatttgtgcttgctgataggtttttgtgtttgaaactcgaagattgttgcggattcctgaaagattaaggcttttagctccaagtttccaagagtgctgtgaatcagctcccactctgtctctgcatattgcaagacaccggttttgtttcagaagtttgtttcttcttgtctcatgatcactagttttcagcaatggggtatgtaaacgtggagaagagatgggtttttcctcttgtcatcacatctctcgtctgcgttttccttcttgcaacttctttcaacatgggactagtctcttccctccgaacaatcaacgggattttctccatcataccttcccgtctcgtcaagaaccaaacgagacttgattttgcagagtctaaagttgctagacaaacccgtgttttgcctcatgaagacaagcttccccgttttgcataccttgtttccgggtctaaaggggatgtagaaaagctttggagaacacttagagcagtgtaccatccaagaaaccagtatgttgttcacttggatcttgaatcacctgtgaatgagagattagagctggcctctcggattaataacgatcctatgtactctaaaaccgggaatgtatatatgataaccaaggctaaccttgtgacatataaaggaccaacgatggtggcaaatactcttcacgcttgtgctgttcttctcaagagaaatgcgaactgggattggtttattaaccttagtgcttcagattatcctctggtgacccaagatggtataaaaagctttgatctcactttcttattagttttgcatcaagatatttcttcagtcttgtctttgattaacttact

SEQ ID NO: 153074 - DNA, 678 bp, Arabidopsis thaliana landsberg
agctacacttggtcaatgttgtgcagtttatgctgatgggagtatatgcttggacttcctctcttataaccaatggagtccaatatacgatgtcgctgctatactaacctccattcaggtatatatacaagaaatgtcatatcgaaatgcttctcagtaaaaccgttgatgattgttgttattctgcttcctcccctgatcttttacacggatctttgatctaatctgattacattagtggctaaacaatcgccgtcctttttttatcacagtcattgctatgtgatcctaatccgaattctcctgcaaattcggaagctgcacgaatgttcagtgaaagcaagcgcgagtacaacagaagagtccgcgaggttgtcgaacaaagctggactgccgactagtaattatatcattgtagcatttgtcttcaaataacattaaacctcctctcttgtatctgatttcgaccatcacatctctgagagaagtttactctccctaccactctcttttatgtctttctgtgtttttcaaactctgtgatttgttgctcttcatgttttttttctttgtattttcgtaaccacattcatcttcataattatcatatgtatttcagtcgcagatcttcttcttttgctttatatttggtaaaacagtttacaaatttagctaata

SEQ ID NO: 153075 - DNA, 871 bp, Arabidopsis thaliana landsberg
taaggtccataattatttacctagttcaataaaagtttatgttcattagtacaaaaaccctaattgtttttcttaacactgaatttggttatttatcttttcagaaaacagagcaaaaggtttacaactgaggaagtacttaggagcggttgcgttcaacaacataacgcggctagcctttgggaagcgttttatgaacgctgaaggtgttgtggacgagcaagggcttgagttcaaggccatagtatccaacggtctgaagctaggtgcttcactgtcaatagctgaacacatcccgtggctcaggtggatgtttccggctgatgagaaggcgtttgctgagcacggggctcgtcgtgaccgcctcactcgagctatcatggaggagcatactttggcccgtcaaaagtctagtggagcgaaacagcatttcgttgatgcgttgctaacgttgaaggatcagtatgatcttagtgaggatactatcattggtcttctatgggtgagttttagtgcttttatgaaatcagttgacctaatttgtgtagatttcttgtttctcacgtttggtaaatggtgtgtgcaggatatgatcacggcagggatggacacgacagcgataacagcggaatgggcgatggcggaaatgatcaagaatccaagagtgcaacaaaaagtgcaagaagagttcgacagagtggttggacttgaccggatcttaaccgaggcagatttctcccgcttaccttacttgcaatgcgtggtgaaagagtcattcaccctgccccctccaacgcctctaatgctacctcaccgaagcaacgcagatgtcaagatcggaggcatatgatattcccaagggatcggccgt

SEQ ID NO: 153076 - DNA, 1421 bp, Arabidopsis thaliana landsberg
ctggacgggggatcgctaatggtggccttcccggtggaaagggagatcatgaaatgtcatgtgaatatgaaatctcgttccttgactctatgtacacttgcagaaatgtcagaaatgtgtgttcatcatagccttagcttgacaagatttcagtttttaatctactctcaacggatggatcctaaaatagaatcgcatttggtgattggttttcgttctcgattacaggttttcgttgtatgatttcttgattaacaattaggagacatgttatgcatttgcaggtgaagctttctggatcaattagtagtcagtacttgactgctctgctcatgtctgctcccttagctcttggagacgtcgagattgagattgtcgataaattaatttctgttccatatgttgaaatgacattgaagttgatggaacgtttcggggttagtgtcgagcatagtgatagctgggatcgtttctttgtcaagggcgggcaaaaatacaagtaggagttattcttttcttccttttctgaaatcacatcgcttagcttgacaatataatgactaaaaggtgaatgattcaggtctccgggtaatgcgtatgtagaaggtgatgcttctagtgctagttatttcttggctggtgctgccattaccggtgaaactgtcacagtcgaaggttgtggaactaccagcttgcaggtaatatttgtacactgaatcatcgacgaggctgttaagtttatagtgaaattcgtctaggtcaaagtttcatcttttgacaagttgtatataacatattcgcaagaatctaagctcaatttttgtgatgaatctctagggagatgtaaaattcgccgaggtccttgagaaaatgggatgtaaagtgtcctggacagagaacagtgtgactgtgaaaggaccacctagagatgcttttggaatgagacacttgcgggctattgatgtcaacatgaacaaaatgcctgatgtagccatgactcttgccgtcgttgctctctttgtggacggtccaaccaccattagagatggtaagtaaaaagctctctcttataaattaaggtttctcaatattcatgatcacttaatttctgtttggttaatatagtggctagctggagagtaaaggagacagaaaggatgattgccatttgcacagagcttagaaaagtaagagaatcctatctctctccttccgtctcttgacagtggtcaatttaagtaattcggtcataaattttgtgtggtttgtggtcaggtgggaggtacagtggaagaagggtcagaataatgggttaatactccggcccaaaaggttgaaacggccaaggtttaatccaattaatgtccatagaaggccaatgccattttttctgccagcctgtgctatgttccaatcaccat

SEQ ID NO: 153077 - DNA, 1190 bp, Arabidopsis thaliana landsberg; identical to SEQ ID NO: 17910

SEQ ID NO: 153078 - DNA, 1522 bp, Arabidopsis thaliana landsberg
  unsure (1)..(1522): unsure at all n locations
tatttactcgataatgttctctgcttttctttgtgtttcacaggaagtctctggtagcgtcttacaggacatcaaaggtttgaagcatctgaagactatatggattgatggagctcatgtttctnnnnnnnnnnnnnnnnnnnnnnnnnnnnnnnnnnnnnnnnnaatggagattggactgagcagatgtgttgacgtgacggatattgggatgatgggtcttgcacgcaactgcttaaacctgaaaacattgaatctggcgtgttgtggattcgtgacggatgtagccatctctgctatagctcagtcttgccggaatctagggactttaaagttagagtcttgtcatttgataactgagaaaggtcttcaatcgcttggatgttactccaagcttgttcaagaacttgatcttactgactgttatggtgtaaatgacagaggtaatagaaagatatatgtgaactcaaacctccgtttgtgttttagatattgtcatctttggtatcttacggttttttgttccgttgggaccgcagggctagaatatatctcgaagtgttcgaatcttcaaagattgaaacttggactctgcacaaatatctcagacaaagggattttccatattggttccaaatgttcgaagcttctagaacttgatctataccggtacactttcttggtggattcttgatgaaaaatgtgcaagacatgtttcgttttcttactgatttctggtttttgagtgcagctgtgccggttttggagatgatggtttagcagctttatctcgaggttgcaagagcttgaaccgactcattctatcatactgctgtgaactaactgacaccggggttgaacaaatccggcagctagaacttctaagtcacctcgaacttcgagggctaaagaatataaccggtgttggtttagcagccattgcgtccggctgcaagaaattgggttacttggacgtgaaactctgcgagaatattgatgattcgggtttttgggcgctcgcttacttctcaaaaaacctacgacaggtacaaaaaataacatttatagatggagatctggtagcatctattggaaacatgtttgattcttgtgttgtgtgttttgtttggcagataaacttgtgcaattgctcggtgtctgatacggctctatgcatgttgatgagcaatctgagtcgggttcaagacgttgacttagttcatctgagccgtgtgactgtagaagggtttgagtttgctctaagagtctgttgcaataggctcaagaagcttaaacttctcgcacctctcagattcttgctctcatcagaattgctcgagacgcttcatgctcgtggttgccgcattagatgggactgaaaacatgaagaacaacacggtttcttgtgttggttagttatactgttgtaggtttttggtgtttataatctcaatgttaaaaatcagtgaaactttagtagcggtttgttttgaatccatataagttaatcagtttaagtgaa

SEQ ID NO: 153079 - DNA, 4036 bp, Arabidopsis thaliana landsberg
  unsure (1)..(4036): unsure at all n locations
gtcactattttactgtcattatctaactaccttttttttttttctggcaggttgcatctcttaattgtggggacttctacgatatgcaatatgtcaagatgtacagcattttcatgaatcagttgcaggtagtgctgttatctttgttttgttacttctatttgttttcatggccttgttcagtgatgtcctactatagagttttacttttaattagttaatgtactccttatggtggtttactggttctgtactacatgtagattgacttcatgttactgttgcttcttgattgatgcccatacttgttttcatgtctgcaggcaattctccctttaaatttaaatatccctgaggcatattcaactggaagtagtgaagaacaggcaagtgtttttctgtgcattaggtttctggccgttccatttttactgtaacatttcgagataatgactgtatatcttctttacctttaggctcttacccagaacttggcactgtttttcacttcgatttataaaggtaattctctttctttgttgagttagatatgtcaggttgggtttatggaaattttgatatgtataatgatttgtgttaatgcttccagtaattattgtttcatcatctatttcttaactatttcactactatctctgcagtttcatattcgagtcctagaatcaacgccagaagttgtctctttgttactcgctggtctagaatatctcattaatatatcttatgttgacgacactgaagtatttaaggtacctaaattgtctttgttaatatgattgctgttgatagagttgtatgttaattttttccttaattatattcttatgtgcttttgttcgtgtctgaaagatgacgttttctgcttgcttgtggattgagcaggtttgtttggactattggaactcgttggtgttggagctatttgatgcgcatcataattctgataaccctgcagtaagtgcaagcctgatgggtttgcaggtacgttggattccttgactaatatgatcaattttttacatttatttaaggttgatactatagttatatattgtattggttaaactttccttgctttgatttggttactcaccttgggcgttgacttgcaattttcccagcctttccttcctggtatggttgatggccttggttctcaagtcatgcagcggcgtcaactttattctcacccaatgtccaaattaagagggttaatgattaaccgcatggcgaagcctgaagaagtgcttattgttgaagatgaaaatgggaacatcgttcgtgaaaccatgaaggacaatgatgttcttgtccaatataaggtatcaattcttgtccagttcatactgcttttcttcagatgtcttagatatataccaacagtgcgatgttatacaaggaattttttatttatttgaatcctctttggatatcctctttgatttcttccccatttcttgtttgaacaaatgcagataatgcgggagacattaatctacctctcacaccttgaccatgatgataccgagaagcaggtacagtgtcaccatgatgataccggtctatgcgtattaatttgtgaaatattgaggattagcagtcttatgatcaagtatgctttttatcaaatgagtttctccttgttatagtgtgaattatcatattagtactgctaactttagcaattttaacatggacctgttataagatatgagattttctggtagatatgtaagcttactttggtctgttccatgctgttttgctgatgtgaacttcggattgttcctttaaaagatgttgaggaagctaaacaaacaattaagtggggaggaatgggcatggaacaatttgaacactttgtgctgggctattgggtctatttccggatctatggcagaagatcaggtaaaatcttttgctatgcttcacctgactgcaaattcttttcataaccgtagaagttcttgtttgtaatgctgcacctctccatctgtgggctagtatgccataacttaattcaagaaagtttgacagtgtcaaccttcaatgttaattgtttctttcattaacctcccatttcatgagatatcattatcggcctgactgctccatactttgctctggaaggtttacattgttaattctgtgctaacaattgttaaattccattttttcttcaggaaaacaggtttttggtgatggtcattcgtgatttgttgaatttatgtgaaattaccaagggaaaagacaataaagccgttattgcaagcaacatcatgtaagtttgttactacagctgaatttctgcctaggttgttgtacttctatcatcttatattttctatttctttcaaggcgatgttagattttttctggttaagtatgacctctctgttctgctgtcgctgggtgcaggntatgtcgttggccagtatccaagattcttaagggcccattggaagtttttgaagacagttgtgaacaagttgtttgaattcatgcatgaaacacatcctggtgttcaggtagctggtcccaatctttatagtttatatattatgagatacagttttccaggtggaatctcagataaaatgatgtgttattcgctgttaaaatccatgaataatatatttttaagctcttggagaatatattggtagcaaaaatatgctcaagttgttaattacggtgctgtagtttatttataatcgtctcaagctatctgaagtctcttttttgactgaatattctttcatagatttatagaccttgcaccttcccaatcacagatacttgatacttatgtttccctttcaggacatggcctgtgatacattcttgaaaatagttcaaaagtgcaagcgaaaattcgttattgtacaggtatgtattgctgtatttttatccaccgttaggttttagtatatccattgtcttctgaatgagatattaattacagctcgttgttctttcaggttggagagaatgaaccatttgtatctgaacttctaacaggccttgcaacaactgttcaagatcttgagcctcatcaaatacactcattttatgaatcagtaagttttccagaaatattattcgcatgccaatcagagcaaattttcctgttgtgatctcatcgtttctcttttctccaggttggtaatatgatccaagcagaatcagatcctcagaagagagatgaatatctccagaggttgatggcactccccaaccaggtatgttaattaaaatgtggctatttttgtttacatatctggctaaaattgttcccctatacaatgtagaaatgggcagaaatcataggacaggcacgccacagtgtagaattcctcaaggatcaagttgtgatacgtacagtgctaaacatcctacaggtctgatttcttacctattcctcacaatgcattatgattccatcacgtgaattcatgtcattatagtagttaagattgtgcatctgttggtgtttacacaactgttggtttgattgtaaggtccaactaataacatgtgtttttccctgcagactaatactagtgctgctacttcactgggaacatacttcttatcccaaatttccttgattttcttggatatgttgaatgtatacaggtaaatccatgatgcatccttatagcgttaatagtcatggttctctttctctagttcttttacgtggatgatcattttattttttccatggctgcaccagaatgtacagtgagcttgtgtcaaccaacattactgagggaggaccatatgcttccaagacatcttttgtaaaactcttaaggtttggatggctttatgcaccagaaataacgttctagatgcctctgtttggaaaaactggaataatttgtattgtgattctttgctatacagatcggttaagagggaaacacttaagctgatagaaacctttttagacggagctgaagaccatccacacatagggcaacaatttgtgccgccaatgatggaatca

SEQ ID NO: 153080 - DNA, 760 bp, Arabidopsis thaliana landsberg
gaggaaggatccccactgtattacactacgccatggttaactgtatagaatacattgcagaaggatcagttgtgtcatcaggtccttgaattagatttctatgtgtttaaactctttgcatcaagagagaaggagattgctacttttacgtaatgtgttgcataacagttgttgatttcggttttacatgctataatctcaatctctctactctttttttccccacaaaattataggaaatgctgcgtccaatacctgtggcactagcgtcatgcacgagattctttgaggccatgtctgcgatgagagaatcattcgcgactcttcaagagcttcgagttggtaactctgcagtttctttaccaacaacaccaggaggtaacgaaatgacacatagagactcagattgtgtgactccacctcaagggaggatagagtcaagcttcgacgatttagctgttcataaaacaaggagacaaaacaatgatcaaaatgaagaagaagaagaagaagaagaagaagaagatggtaataacaatgggaaccggagactatcttggcctccttctgtaaaaaagagtagcgtttaaacagttgcttttgtctttgcttgagctttttaatatcgatcgtgttttgtttcatcagcattagtgttctttatggatttacttatttctatttgatagtctttgagtgaaacttaaaacagtgtatattttgttaacactggttttcatggtccatgtgactatcatat

SEQ ID NO: 153081 - DNA, 927 bp, Arabidopsis thaliana landsberg
aaagggtgtggaccaaagtgaagtgaatgcatctaaagaaatggacctcatacgatgattctactccacacacttatgttcatcaatctcttatttgcttgtcccctaaaaacttattttacatcactttattacttggtccggttggtccattcatatacacctttaattattatatgccttgtggctgtcgactcaaaaatcaacacaatctacattacacacatgctccgtaacattggtttggttaattatagtagataccaaagaggcttgatatataaatcgttaattttggaactatagacggataaagcatctatgttggatgaagtgatagagtatttgaagcaacttcaagcacaagtgagcatgatgagcagaatgaatatgccttctatgatgcttcctatggccatgcagcaacaacaacaactacaaatgtctctcatgtccaatcccatgggtttagggatgggcatggggatgcccggtctcggtctcctcgaccttaattcgtatgaaccgagctgctgcaagcgctcctaatatccatgccaacatgatgccattcccatttttgcccatgaattgtccatcgtgggatgcttcttccaatgactctcgatttcagtctcctctcatccccgatcctatgtctgcctttcttgcatgctctactcaggttgaccctttttctatatatagatatacaacttgggtctaaacaatgcttcagtaccatttatatttttatatatttggaattgcagccaacgacgatggaagcgtatagcaggatggctacattatatcagcaaatgcaacaacaacttcctcctccttcgaatccaaaatgattattactcaaacacctctatatagtttacgtctatatatgtgttagtcacatacatacatatatat

SEQ ID NO: 153082 - DNA, 1604 bp, Arabidopsis thaliana landsberg
gaatcttgccaataataagctgtccggggaacttccattcgatttcaacaagcttagtggccttttgttccttgacttgtcaaacaatactttcaagggtcaaattcccaataagcttccttcccaaatggtgggattcaatgtgtcgtataacgacctatcaggcataattccggaagaccttagaagctacccgccttcttcattttatcctggtaactccaagctaagtctcccaggacggattccagcggattcttctggtgatctgtctttacctgggaaaaaacatcattcgaagcttagcataagaatagcgattattgttgcttcagttggagctgctattatgattctttttgtcttgtttgcctatcatcgaacacagctcaaggactttcacgggaggaatagatttacagaccaagcaacgactagagacaccaagtttggacgctcttctcgtccctccttattcaacttcagctcaaatgttgagcagcagtcatcatctttgagcttctcaaacgatcacttgctcaccgcaaattcaaggtcgttatctgggatacccggatgtgaagctgaaatatccgagcagggtgcgcctgctacttctgctcctacaaacctccttgatgattatcctgcagcatctgggcgcaagtcttcttcaggaggctccccactatcctcctcaccccgttttagcgaccagcctgtgatgttagatgtttactcacctgatagattggccggagaactcttcttcttagacgtttcactaaaactcacagcagaagagttatcccgagctcctgcagaagttctaggtagaagcagccatggaacactgtacaaagcaacactggataatggacacatgttgacggtgaaatggttgagagttggcctcgtgaggcataagaaagatttcgcacgggaagccataaaaatcggctctttaaaacatcctaacattgttccgttgcgagcatactattggggtcccagagaacaagaaagacttctcctgtctgattacctgagaggagagagcttagccatgcatctttacggttagaagatcttttaattagtctttttagtcctataactacaagcctttctgtatcttgtttgaaaaaaagttaatcaccctgccaaattttctgtgcagagactactcctcggaggtattctccaatgtccttcagccaaagactaaaagttgcagttgaagtggctcagtgtcttctctaccttcatgatagagcaatgccacacgggaacttgaagccaactaacataatcctctcaagtcctgacaataccgtgcgaataactgattactgtgttcaccgtttgatgactccatctggtgtagcggaacagatactaaacatgagtgcactcggttactctgctcctgaactttcctcggcttccaaaccgataccaacactcaaatccgatgtctatgcgtttggtgtgattctcatggagcttttgactagacggagcgcaggtgacataatctcaggtcaaacaggagccgttgatctgaccgattgggtgaggttgtgtgatcaagaaggaaggag

SEQ ID NO: 153083 - DNA, 652 bp, Arabidopsis thaliana landsberg
tcttctcctgaatctctttacctttttacgttgacagtatctgatttgatcgaagaagaagaagaagacgagatcgggatttttttcgcggttgtatatcgcctaatggacgaggtgatgacagcggcggacgttggttcgttaggtggtggaaatagggcgttgtacggatctcctccgtcgcataatctgtttcctcacaatctcccaatcttctccgcttttcttgccttcgctcttgctcagttcctcaaagtcttcactaattggtccgttcaaatctttcgttttctcagattagtttgatctctgcttaagatctgtgatttaacaaatttcttactgttagggtttcgattttcgatggattaattaggatttgcaaatttttgctcatgattaggtctcagaagttgaatgttggcatttgtgtagctatagatctgttgtagttaagattgaaagaagtggaattctcagttgtttcgtgatgtatgttagatgttcaggtacaaagaaaagaggtgggactctaaacgtatgattagttctggtggaatgccttcttcgcattccgccactgtcactgccttagctgttgctattggcaattgaaaaaggagctggagcaccagctttcgctattgcagtt

SEQ ID NO: 153084 - DNA, 1282 bp, Arabidopsis thaliana landsberg
aacttctccaattgttgaaaccattttatatttatctcttcttttttctgcatggtggtttgaattaggccaccaaaaaactactggataaaaaaaaaactgagaaacagaaaaaagaaaaaacaaaacacacattctcgatttgtctgtgccacacacactctcttgcacattcttgtctcgacaatactctcaggtgcgttattggctttgctctttaagatcttactcaaaatctctgtctttggaatctatccatagatgcaaaatttgattttgaagtgattcttcatcttcttaattgggtttcaatggattagtcaaatttgggtagtaatgattggcttcgagctcagaactagaataaagtacaattcttttgctggattacgttattaacttttgtaattttcaatacccacaagttgatattgattctttgtgtctgaaattgtgttatgatatctaaagtattgatttttgttagcagaatacgatcttgaagagcaaagattgttcctttattgatgaattgagtgcaaagaggtgttatataatggctactgcagctgttataggactcaacactggcaaaagattgttgagttcatcgttttatcactcagatgttacagagaagtttctatctgtaaatgatcattgttcatcacagtatcatattgcttcaacgaaaagcgggataactgcgaaaaaggcgtcgaactatagtccgagttttccttcgtcgaatcgtcacacacaatctgctaaagctttgaaagagagtgtagatgttgcttctactgagaagccatggctacctaatggaactgataaggaattggaagaggaatgttatgatgatgatctaattggtccttctgttgaggcaattttacttctacaaaagtctatgttagagaaaagttggaatctttcgtttgagaaggcggtgtcgagtgagtctatacggaagaagaagattccgattatcacctgttcagggatttcagctcgtcaaagaaggattggtgctaagaagaaaactaatatgactcatgttaaagcagtttcagatgtttctagtggaaaacaagttagaggttatgtgaaaggtgtaataagtgaagatgtgcttagtcatgcggaagttgtacgcttgtctaagaaaatcaaatctggtcttcgtcttgatgatcataagtcaaggtaaagtaaacatactatacgtagaaaaagagctgaaagtgttttataatgtaagactaaattattctcttgt

SEQ ID NO: 153085 - DNA, 821 bp, Arabidopsis thaliana landsberg
tatggtttgcagagacaagttgtatccctcgtttgctttctgcgaaactaaggtgcaatggcgaagataaaaccgcaggctcttctaaatcaaagcaagaagaagaagggtccaagtcgcataagtatttccactattattgtctgtaatcttgtagttgctgtagtcatattatcgttggtcacaacctatcgccattggtcccaaaggtttgctttcatctttgaattgttcctttttcattacttctgttatagtagattctccttttactttatgtgattatctataaactaaaaaggatatcattggttatatctcctaggtcaagaaacacaattgaacatgaaactcggagtcagagatttgaggtattttcttgagagattttttaatgtatagcttttgagttttgatcctgatgaccttccgagcacttaggtttagagtttagggtattacacatatgtgatctggctttggtttctgcttcaggacactaatattgctgtcagggcaaaaaacttacgatcttcctggttttgctgtaagttaatctccctgtttgcttgcttaagtttcttgttttaatccttgttcttatttctcatcatggtattatgttctgttcatcagtttttgaagtaaaaaaaatgtgatgtgtcttatctgaatattgattttaatgatatcttgcttctattttcctatctcatgtaggatataaacacatcaaaaggacttataactgtcgaactcttcaaagaaggttcccctgaagttgtggacaagtttctagatctatggttagtattggaatt

SEQ ID NO: 153086 - DNA, 667 bp, Arabidopsis thaliana landsberg; identical to SEQ ID NO: 4370

SEQ ID NO: 153087 - DNA, 1290 bp, Arabidopsis thaliana landsberg; identical to SEQ ID NO: 65018

SEQ ID NO: 153088 - DNA, 287 bp, Arabidopsis thaliana landsberg
  unsure (1)..(287): unsure at all n locations
acacacgcataacatatttgtagcatccatacataaatacatacatttcgagggaaagagatgaaagatcggatggagcgattattgatattgcctttttcgttagggtgttcaacgcaatcttgcgtcgctgtggccactactcatcaacaaaagaaaccaaaccgactcatcaagagtaccatcttgctcacatttcttttgaaaaatatccttgcttcttctctctttttctttctagggaggattttctcaataaggttttcaaaggaagagaagnaagtcat

SEQ ID NO: 153089 - DNA, 1831 bp, Arabidopsis thaliana landsberg
  unsure (1)..(1831): unsure at all n locations
cgagctatggaacggtcggtttgcgatgctcggtctcgttgcgttggccttcaccgagtacgtcactggtgggactctagtctaaggctaaagctttttgtttgctagtttaaggacaaatttggagaatgattatgtaacgcatagtttgatttaatactatgagttttaaacagtgtgtcaacatgaatcaaaatttaaaaccatgaaaaaaacattataaaaatttatttgaaaaagtacttcaaaagttttcttataagataatgtgaatggagaagaagaagtaaaaaataaattttagcttctatccaaggtttgagagtttatgcattcttttgaaatgaatcaagagccaagaataattaattatgctcttccttgttattatcgaccaatagagtcatcatgtgtctgccataatgaaagtaaagcaagttccaagacgaaacgaaattgaatgcgatttctctctaacaaatcacctcatctcaattctcaagcccatgggttagtctcatcaaagcccaatcaaagcgtcaatgcttcccaagaacaaaaaaaaagaattaagatgaacaaaaaaaaataacttaaagaggaaagatatggtcaccacaacactacgagatagtacgatcgatgaatataatcggaaagatttgagtggctcaattacatattgcttatacgacgtcgttttgagtagcatcatttcgttaatatttatgttcaagactgaaacaagacagagaaaagagaatctccgaggaaaacaaaagttgatggcgacgtctaagcttcaagctctctggaatcacccggcaggaccaaagacaagtgagttatcacattgtttcatcaataatatattactctttcttcttccgtttcaattaagactctattgaaacgttactattggaaaatgttgaattgtttatagtacagttcttgaccaaaaaaaaaatctatatcactttaaatcctctaatgaataatatattctaattgtaaaaagtttctctctttttttgttgttgttgttgggtattaatcagttcatttctgggctccaacatttaagtggggtataagcattgctaacattgcagatttccagaaacctccagaaaatatttcgtaccttcagcaaattggtaaataactactactcttcagaaatctctaatctttcttgttacaatttttgttataatcatattatccataattattgtattagctgtgacatgcactggaatgatttggtgtcgttgcagcactataattactcctgtaagttttgtttgcttttcgagttttacttttgtgattggattcttggttttggtttatcgatctgattctttggacttttgtttttttttaacagaaaaactggaacctgtttagtgttaatnnnnnnnnnnnnnnnnnnnggatataccaacttactcgcaaaataaagtgagaatcaaacccacttttttgttttgcttgtgttttaacatagataacaaattcatcagcttactatataaaacatttcttttgctaagttaaacgcaatcagaaaggtttggtttggcgtttacaatcagcaaaggaaattttgcttaatatgtaatgcaaacaaagagtcgaagctattttaaactcgatttttatgatgattgtctatgatagtatgattttatcttttgatacatcaatgaaatgcttattaattttttttttgatattaggtatgattatgtatctgaagcagaggctgctgttgaaattgaaggatgatgatgatgaaaaagatgaaacatttgacatgtga

SEQ ID NO: 153090 - DNA, 1414 bp, Arabidopsis thaliana landsberg; identical to SEQ ID NO: 27390
  unsure (1)..(1414): unsure at all n locations

SEQ ID NO: 153091 - DNA, 3334 bp, Arabidopsis thaliana landsberg
caatctggaatggcttctacggaagtcgattcccgcttaggtcgagttgttatccctgctttggacaaggtcattaagaacgcctcctggcgtaagcactccaagctcgcccacgagtgcaaatccgtcatcgaacgccttagatcccctgaaaattcctctcctgttgccgactctgaatctggatcctccattcctggaccacttcacgacggaggagccgccgaatactctctcgccgagtccgagatcatcctcagccctctcatcaacgcctcctccaccggcgttctcaagattgtcgatcccgccgttgattgcatccagaagcttattgctcatggctacgttcgcggtgaggctgatcccaccggcggacctgaggcgctactcctttccaagctcattgaaaccatctgcaaatgtcacgagctagacgacgaagggctcgagttgctcgtgctgaagacgctcttgactgcggtaacttcaatttccctgaggatccatggagattctttgctacagatcgtcaggacttgttatggtatctacttgggaagcagaaacgtggttaatcaggcgactgctaaagcctcgctcgtgcagatgtctgttatcgtgttcagaagaatggaggcagattcatccaccgtccccattcagcccatcgtcgtggccgagctgatggagcccatggacaaatccgaatcagacccatctacgacgcagtctgttcaaggtttcattaccaagattatgcaggacattgacggagtcttcaattcagctaacgccaagggcacattcggcggccatgacggggccttcgagacttcattgcctggcactgccaatcctactgatttgttggattctactgataaggatatgttggatgccaagtactgggagatcagtatgtataagtcggccctcgagggaagaaaaggagagctggccgatggagaagtggagaaagacgatgattctgaagttcagattgggaataagctgagaagagacgccttcttggttttcagggcactttgcaagctgtccatgaagacgcctcccaaggaagatccagagttgatgagagggaagattgtggctctcgagttattgaagattctgcttgagaatgccggtgctgtctttagaaccagcgataggtttgttttgtttatcttcttgcattattataacccacgttaggtagattaaactatcatatctctagattcagtcttttttccctcagctttcaacattctgcttgatagttgcttggacagaatgtaatttagcttttggtgtttcttctgaaaatttggcatcaactcattatggaacaggttcttaggcgccatcaagcagtatctgtgtctctccttgctgaagaacagtgcttcaaatcttatgatcattttccagctttcctgctcgattttacttagcttggtttcgaggtttcgtgctgggctgaaggcagagattggggtgttcttccctatgattgttctaagagtattagagaatgttgctcaacctgatttccaacagaagatgatagtgcttcggttcttggacaagctctgcgttgattcacagattttggtagatatcttcatcaactatgattgcgatgtcaactcatccaatatatttgagaggtatgatctaatatcttgttgtggcttatctttacgccctgaatctatttattttgtggtatcagagctgcgatcattaactagtgcgaactatttgaagtagcattcatttctgtattggttttcttgaccttgtttttaggatggtcaatggtctccttaagactgctcaaggagtgcctcctggtacagttactaccttgttgccacctcaggaagcagccatgaagcttgaagccatgaaatgcttagttgctgttttaaggtctatgggagactgggtgaataagcagttgcgtcttccagatccttattcggcaaaaatgctggaaattgttgatagaaatcttgaagaaggaagtcatccagtagaaaatggtaagggggatggaggccatggtggttttgaaagatcagactctcagtctgaattgtccagtgggaattctgatgccttagcaatagagcagcgccgagcttacaagcttgaacttcaggtaaaagtttacctaaagtttgattcagcgctcattgacttttgtctcagtctttcagctaaaacctgattagctgatttgtttttattaatggcaggaaggtatttctattttcaaccagaaacctaagaaaggtattgaatttttaatcaaggcaaacaaggtgggggactcgccagaggaaatagcagcttttctcaaagatgcatcagggttgaacaagactttgataggggattatctgggggaaagagaagacttatctctgaaagtgatgcatgcatatgtggattctttcgaatttcaaggcatggaatttgatgaggcaattcgagcctttctccggggctttaggctgccaggagaagcacaaaaaatcgatcgtataatggaaaaatttgcagagcgattctgtaaatgcaacccaaaggatttttctagcgctgatacggcatatgtcctcgcttactcagtcattttgctcaacacagatgcacataaccctatggtgaagagcaaggtacatatttgagctgtttcgcttagaagctttctgaaatccctcttgaggaatatcttaatacgatcttgtttgaagcttgtgattggtcaaacaaagtaactcattactaaatttttcaattacaacttgcagatgacagctgatggttttattagaaacaatcgtggtatagatgatgggaaagatttgcctgaggaatatctacgtgcattatatgaaaggatatctagaaatgagataaagatgaaggatgatggtttgggtccgcagcagaagcagcctacaaactcaagtagattacttggcttagatactatcttaaatattgttgttcctaggcgtggtgacgacatgaacatggagaccagtgatgacctcatcaggcatatgcaagagagatttaaagaaaaggctcgcaaatctgagtaagaagcttcctttatttaaccttccgctttgcactcttgtgcagtgctctgctttacacatgttgattctgctatcattcttttctcgtttgggcataattcaccttatgttctgataggcactcttttggagttagtagccgggccgggcaacactgctggctcccgctcttattgaaacctcctttttccttcttttttttaatttaa

SEQ ID NO: 153092 - DNA, 1139 bp, Arabidopsis thaliana landsberg
ctttcttcttcatcttcttcttccttgataaccaacgcgtaatcctaacccttaatctacttcgtccttaattaatcagagttttctacttattatttctacttctcatctctttcaatcgcaatctgagttctggctaaagattttgtcttggaggtgagattcattgttcccaatagagtgagaaaaagacttataagattgaaaaagcaagatgcggattttgtgcgatgcttgcgagaacgcagccgcaatcatcttttgcgccgccgatgaagctgccctttgtcgcccctgcgatgaaaaagtaacttctctcccaaaaaagcttcctttgtttctttaactctcctctctatctattggttgtgctctgatgggttcgtcaaagatcaagtctttgttatctctgtctgggaattctcagttgatttggacctgagttgatgtggcttttcgataactttgagctaaagaaataagatttttgagatttggtttctagattcttaggctcttcacatgagattagatatttcgaagtgtagtgaatccgtcaaaagagttcaaatagttgaaacctcttctctcatttggtggattaagatggttcggttgatgaatttacatgtttgattacatgagtgtttgttgctgcggtttcaatgattctactctgtcatgtacattgcagggaacgttttgtctccagagtttgcatttagtagtattaacttctggagaagaaaataatcaattttctgctctttgcgcttaatccttacttcagttagatgactcttaagggtaacactttatagtccttctcgagtcattggttcatccttctctactgcaatagctcttagtagttttcggattttgatcggaaatggattacttcaaagctttgtaatgttttcttctttcaggttcatatgtgcaacaagctagctagtcggcatgtacgtgttggtttagctgaaccaagcaatgccccatgctgtgatatatgcgaaaatgcacctggtatgatctctttacaatgaacttcccacactcgtgtttaatgttttcgcatatgtacatatattgaaaaatgaagagaaatcttttgtctgcaatgttttttgttgtga

SEQ ID NO: 153093 - DNA, 844 bp, Arabidopsis thaliana landsberg
tgttgtataatgtaaggcaggcaagtagcccatcgcagcaagggagcagtatacttgtgccgggttctggtgaatcaaagaaggatcatggtaatgaaatgattgaagagatggaagctgggatgcaagatatgcttaagatagtggaagatcgaaaaagagacgcagttgctccaaaacagaaagaaattctcaaatatgttggcgggtaagttttaacataagaggaatgagagataaaagaaatgagatgggttatgctcatttagaccctttgtgattgatgactgcagctgagatcttcatgtggggcattcgcagaatagaagaggatatggttgatggctttccatatgaagtgccggaagagtatcggaacatgcctctcctcaagggaagagctagtgtggacatgaaggtcaagatcaaggacaatcccaacatcgaggactgtgtgttccgcattgttcttgatggttataacgcccctgttaccgccggaaactttgtggacttggtagagaggcatttctacgatggcatggagatccagagatgtaagacagtagcaaaatacagttttgcttttatatatgggattgaagaatgttgattaatgtgtgtttttggtttcagctgatggatttgtggtacaaacgggagatccagagggtcctgcggaaggatttatcgatccaagcacagagaaaacgaggacgggtcctctagagattatggtgactggagagaaaacgcctttttacggctcaactcttgaagtaagtctctaaaaaatctttcttgtcagagacttatattatatagtccttttaagctttgtttg

SEQ ID NO: 153094 - DNA, 2442 bp, Arabidopsis thaliana landsberg; identical to SEQ ID NO: 29702

SEQ ID NO: 153095 - DNA, 995 bp, Arabidopsis thaliana landsberg
tgagggtcctttctttattatactgcagagtattctatatataatactgtgtttgctaatcttcctggaatataagctcttctcctcatttttgacacagaagttgaatggcccatttgatttagcaagtgatgactggcttcacaacttctcaaggagcatctatctcgcacattccacttactgggcacccagctccattatctatggaatacctttctgacattgcaccggtaagtttcctttggacatccatagtcaaataagcctacaggtttataatgtttgcgaagttatcttctgatcattgactttatttttccccttttcagggataattacacaaaaatcttggaatatcttcgcgatatctggactaaagatcgaagagcggaatggtcaatatggatggtgtactccaaggttgaaatgccacatcattttataagtggaatggaggacatttcaaaccatagttcacacaaaagagtctcgactgggttgaagctgaatgatgtgagttatctagttagtgattatttttcaaattttatcagagtgccagcatggctctactcattcaaattttttctcttatgcagcctgcacaagttgcatccacccgcgctgaacttcaccgtcgaagtattgcacaaatgcgggtttgttattttagtttcgtgattcaattacctgttcgtttcgtaagttgtacaatttgattgattataactaatgtgcagataaacaaccgggcaatacaagacatgcatatatttggtgatcctatgcgggttcctatagttataattgaacgtgtttggaatgcaccaaggcgtacgttcagtgataattcgtacatgagacatgttgatagaatcgattctagcttacttaatgggcatgatgatgagagtgggacgaaaaaacataataacccacagcatactgggcgtgagctgaagattgttgtttttgttcatggtattccaggc

SEQ ID NO: 153096 - DNA, 1150 bp, Arabidopsis thaliana landsberg
gcaacaaacccacagcctagaaagcataccttgtggcattttacattttatttcactgatggccaagccagcatgaacaggtacaggcatttcatgtaattttttctgaataaatttggtgatgtcctagcttcagctaacgatagtctccctgtgatctgttaggcagcattttctgcaatgtgctcaagggataatgaacaaacattttgaaaagctcgttcaatgtgatcatcgtctgttccatctaagccgacagccggagatagctattgactctccctactttgatgcacggcaatctatttttgaggatccaagtgaatcaaaaggccatccttttgggaatttgaatcttagtacaggtccttcgatctctgggactcagaatttagcatctcctgttggggctcagtcatcatctgagcatatgtatctgtctcatgaagcaccatcacccagctcaggtattatgatgactgctcgctcattctggttgctttcataactcgttattagaatatagtttttcattttcacttttgttgaacctgattaggattgtggatttatatttctgtttgtttgcttcgttcatctctagtgatagatgctcgtgcaaatgaaggaattgggggttctgaagcagtcaattcaagaaacagaacagattgtggtcagatcgaagcacctggaatacaccaatctatgtcactgagtgatttccttgcggttctctgtgatacaaaaaacacaacggatttgaatctggctgacgacgtagatggactacaccaatctatgtcagttagtgatttcgttgcatatttatctgattcaagaaacataactgattcagatcagataaaagtacctggactacaccaatctatgtcagtgagcgatttcgttggacttctctctgattctgctggtggaagtcatccggaacatatggagaaatttgagatcatgaaacagcagttgctaagtgataatatccagttcgaggcaccagatgagaagtctctcatgccaagggttaactctttattcaacctcttgtccaaggatcccaacgtcgctgcaaactcacagcaaaataacgaaatttcggttggattgaagtctgaacccaagggaattggtt

SEQ ID NO: 153097 - DNA, 2448 bp, Arabidopsis thaliana landsberg
  unsure (1)..(2448): unsure at all n locations
tgcccctcaaggaaaccattattactcccctagccctcctcctcctcctcctcaagcaccgatcaccgctccatctcctcagcgtgactacagagaattctcacagtcaccgtctccgtctccttacgcattcactgatcactactattccgggtattattatccgcctcctccaccacgttcaatgtacgatcgtgcctccaattacggcctcccaagtggcccatctgctcccgttgatgccttctcatcgattgatcacaagcagcctcctttagctcctcctcggttttctaactacggtccaccgcctagtgggccctcagcacccgttgatgcctttctggttaacgagtacaagccacaagctccacctatgggctcgcgattgtctagctacggagtgcctaatggtccatcggcaccagtcgattactctccttatgatcacaggcagttgcagaagacgatgggtggattgagcttagaggaagagagagctgctgcagagaggtctgagagtgatttcggagctaggccaaactacagctatggccgtgattatcgccgtgaatgttgaggatggcaaaaagttgctgaatttcacaagtgtgcggcgtttctaaggctttacttatcatcagatttgttggtgttagaacaccaggaaatggctgatgacaaaatatgaatttggtgaagtatatgttatgtctatatgtatgtctcgtttgtgaattgatttgttgcttctttctagctgatattcggtgttaccccttctgtacctttgtacatgtttctaaaacatctctcatttctttccttcattcagtttcttgaatcaagctattgggttcttagggttaatgttctaatgtgaatcactttactgttgatttattgtttgaaccatgctctgattaggtatggtagtatgctctgtctcagacatgaacagtcctatatcctgcgattctgccgaatatttttgcaggctggttaaagactttggttcttatttcatgtttgatgataccaatgtgtgattttcgtttggaaccagtgatctccatattcattgagcgtttggattaatgtgtcttgaatcatgctcatcacagtgcagaaaagatgttctctctgatcgttttgggtaaaatggtatgtacacggttggtgctaagtctattgtgctcttgttataacgatgagacagagcagttttgctattgcattcttttcccttttggcattttggtaacctgctatacatatcagtcaatctcatgctatttgcatctaatcactgacaatcatgcaggtattattgttctgttctcaatggaatgttttcacatgtaaaatcactctattctccagattgtgtgatcttctatttatgtcctgacactccctggtttattatatgctttctcatattcttgtacccaccattacttgtttttttgtctttccttgatccctcctttttattgtagcggcagactcatgaaaggaatctgcatccataaaggtaagattatattggcctctcctggagtcaaaaagaaacttttttagattgttatgtaacttatgtgcacacatgagtgatcatcaaagaagaatgataccaaatggttgcttaacctttttcttcacttaaacaaagggtttattccctctgtggaccgtaaagaaaaatagaaaaaactaaacctagtcttctctttttgctcttgggcatagttctctttataaatttgtacatccactttaactacaagtctttttatatatagggtctaaaataagattgaagttacacttttttgttagttgtttatttgtttatgtcttgagtgcttaatcatggcctaagcgtaatgatgttatagataatatacatcattaatcatttcatgtcttttcccgtatttgcctgaactatcagcacaactgttctcagcaccagtccgttaaatatctctcattatcctcatattgtttcccataaacttctctcactctctcaatcttnnnnnnnnnnnnnnnnnnnnnnnnnnnnnnnnnnnnnacctcaacactagaccggttcagagagatgcttcggctaagcaaacagctatcaagggaccttatggtaagagtccgggatgcacaacaagctgcggattaaggttaccgaggaaaacagaagtcacagcagcaaaattgatcaagcatcttggatgcaaatttgcaaaaggtttgcgtctggtggtgatgaggaagaagaaaagatctccaccgtcgaaggtttcttctttttctgggaggtctcagccaccaatcatcccaataaacaatgacagtcatcgatcagaggccatagaagactgcatacagttcatcaactcatcatcctccttcaccagatcaaactctacttcttaagtgttatca

SEQ ID NO: 153098 - DNA, 2740 bp, Arabidopsis thaliana landsberg
gaaaatcatacaacaatgaggtagtaaaggaggatataaatgatagacgggaagcttgtttagatgggcatgagaacactgacaatcacggtgatgggagtaataatgatactgaaaaatctcctgtgcgcagaagtgaaagctccagtgagtcagttgacatagtcagtcatgatagctcaatatatgaaagttcttcgtttgcaccaccgtccagtccatatggctttccttccagtggtccatttgcagatgatatctttggctttccctctaagccggtcacagatgtgtttgggaggagtagtttaggcaagagaggacattataatgcagatgaagaaacttcaacgcaaagtgatttaagatcggaggatgagagaatgcacagttttcgaattgacaagaatgcagatttagttatagaaccgcatgggtcttcttataatgatgtaactgcttctattaactcagaaattgaagttgtacatcttcaatctgttgaaaagttgtctcattctgtctgcacgtcagagattgttgatggtttgagaatatcagatgtccctgaaacgccgtcggcaagggagactcatactcgtggtgggactgtaaaggaagatcgagtctctgaatggctttggacattgcaccggataggtaccacattgtgcgcatttcttttatttcaagatcttacaggaagtcttgcttttcagtttcagtctgcacattaatggtcactaatccgaattaaaaaattgctttttgtttcctcagttgttgacgtggtaaggacagatagccaccttgagttctatgaggatccaggaaatctaggtagaatgtcagatatccttgcggtctatgcttgggttgatcctgcaactggttattgccaaggtcccaaatctctcttgtgttgggtttgtaacgtgttataaaacggcgctcgtatgagttcatactaatgtaggatactaactgtctggttgcgaatctgtggacaggaatgagcgatttagtgtctccatttgtatttctttttgaagataatgctgacgccttttggtgctttgaaatgctcataagaagaacggtattccaatgcttactgatacgtaacatgtgttttagttttcccctaccagcaagtgacaaaggctgtggtgtaatatgatgttcttttgctatgtggttattactgtagcgtgctaatttccagatggagggaccaactggagtaatggatcaattgcaatcactatggcgtatattgcaactcacagataaagaaatgttttcacacctatcacgtattggtgctgaaagccttcactttgcgttccggatgctgttagtgttgtttcgacgagagttgtcttttaacaaggctctgaggatgtgggaggttggtaattcttctgctgtttgctttgtgttgccagtttcttgttcctttatcttataacccacaaagtagttaaatagttgtgataggtttcttgcggtgagcagagtagaaagttggaaatttttccttacctacaaattttgactttgatttagctgtttaaattattgtattaagattagttagggcttgattggttctccctctttcacccgcaaatgctacgtttgctggtggtagcggttgttagcgattggcaccaatcatagaaatcgctagatatcgttttggaccgctcgaaatcgcccgtttttcaaaaactcttttccgcaatcgtttgcggttgcgagcggtagcggttaggttaaaaaaaataatcattttttaattaaattaaataattgtggcttccacccaaactctaattactataattaaaataatctaatcttttatatatcttatttttattagaaaaccttaatcaatatattgtaattctattgtctcaattatggcatccgatgaaaatcaaaatcaagaatcaaacataagtatcatctatccttttattcattcattagctagtgtaattctttaactatttcatagcattgttgtttttattttattttgtattcttttgagttttttgattgaatacatgtttcgatttgttttctcgattagaaatcatttggtcggacgagatgatatattgtatttttatttggtcagaaaatcaagtcctctaatattatcaatggggggtaatatattatatttttatttcttttaatagttatatattatatttattttggttattttttatttaattactatcgcacccgctggtttaccagtcataaaactcccgcaaaagcatccattatcaaacgctcaaccagtcgttcaaaacgcttgataacgcttgaaaccgcaaccgcccgtttttgcaaactcccgcaaccgcatccgctacgtttaaaccagtcaggctattaatctttcattctacgattaaatatatgttcaaaaaataattaaactgtgcacaagactgtttgactttaggttttagtactcttttgcacacacaaaaaaaaaaagactttaggttccaggtagtacaaaaaaaagaattacctttagccatacaatttgtaaattaattgagaagagaagaatgatagaatgaaaagtcatagaataagaagcattataacagttgaattaaaattatcttatttttgaaaatagatatgttaaataaaatacaacgtgatacttttcttttggagcaaaaaatacatcgtcagggag

SEQ ID NO: 153099 - DNA, 1081 bp, Arabidopsis thaliana landsberg; identical to SEQ ID NO: 1979

SEQ ID NO: 153100 - DNA, 745 bp, Arabidopsis thaliana landsberg
atgttcttcttcttccgattcataccttttttttttccactaacttggcctgaattagatctcgtccgaagttgaatctctagttcgcgagcttttggacaacttcgaggtaaaattcgttattctctacacaacttccgattaacgcttgtgtagctactctcaactttgctgcttgatcctatctcctcttaagttgattttagctgcgaattggaaccgaattggttttatgtaaaactgttactttttttgtgcgtgtattgttaagaatgatggatctatcttcactaagcttgaaagaagttagtttctttggtaggtcttagctttgcaatgaaattgtacgaacacgatggagttgatttagaagatgggaagacattaaaatccggaggagataaaccaattccaagaaagatacataaccgggctttgttatctggtttagcttattgcatttcttcatgcagtatgatacttgtcaacaaatttgtcctctccagctacaacttcaatgctgggatcttccttatgttataccagaactttgtctcggtgatcattgtggtgggtttgagtttaatgggtctaataactacagaaccactcactttgaggttgatgaaggtctggcttccagagaatgtcatctctgttggtatgcttatcactagcatgtttagggtagaatgtgtttcttcaccttcatttgtgttggttctgtagaattatatatcgatgc

SEQ ID NO: 153101 - DNA, 616 bp, Arabidopsis thaliana landsberg
  unsure (1)..(616): unsure at all n locations
agctagctatacgtacttaacattcaagtacgttaannatatcagttgtttcaagataagttaacggtntgagtttagaaggccttaagcttggtggttatgtttctggactgcagcaatttaactgacatctcttctcatcagattcttgtggaggaaaaatgctacttttgctatttctagacattacaaacgatttgatgtcttagtggaagccgaagcaaataaagctgctggtaaatatgataatgcttctatcgactttcaagtggatttttacaagaacgaagggttaaccccttattctgtcgcaaagctcccaatcacaagcggtatgtctctttagcttattctgtctaaaatccccttttcgggatcaaacactaataatatagacaactatatggttgggctatgcagacgtacccgagggttgtgtcattttaagagagcatgttcccataagcaacctcttcacttgtctttggttcaacgaagttgaccgattcacttctagagatcaaatcagtttctcaacagtaagagataagatcgcagcaaaaacaaactggacagtaagcatgttccttgattgtaaagacgctactttgtattc

SEQ ID NO: 153102 - DNA, 1952 bp, Arabidopsis thaliana landsberg
cgagggcagatccgacattcaacgacgacgttttgggtctcatcgttttcaaggccggactcgacgaccctctctctaagctctcttcttggaactcggaagactacgatccctgcaactgggtcggttgcacatgcgaccctgccaccaatcgggtctcggagctccgccttgacgccttctctctctccggtcacatcggccgtggccttctccgtctccagttcctccacagcttggtcctctccaacaacaacctcaccggaaccctaaaccccgagttccctcacctcggcagcctccaagtcgtcgatttcagtggcaataatctctcgggtcggatcccagacgggttcttcgagcaatgcgggtccttgaggtccgtttccttggctaacaacaaactcacaggttctattcctgtctccctcagctactgttctactctcacccatcttaacctctcaagcaatcaactctctgggaggttgccccgagatatctggttcctcaagagcttaaagtcccttgatttctctcacaatttcctccaaggagatatccccgatggcctcggcggtctctacgatctccgtcatatcaacttatccaggaactggttttccggtgacgttccttccgacatcggacgatgctcttcccttaaatcgcttgacttgagtgagaactacttctccgggaatcttccggattcgatgaaaagcctgggctcttgcagctccatccgtctgcgaggaaactctctgatcggagaaatccctgattggatcggcgacattgccactctcgagattcttgatctctccgccaacaacttcaccggcactgtcccattctccctcggaaatctcgagtttttgaaggatctcaatctatccgcaaacatgctcgctggagagctcccacagactctctccaactgctccaacctaatctccattgatgtcagcaagaattcattcaccggagatgtgcttaagtggatgttcaccggaaactctgaaagttcctcgctttccagatttagcctccacaaaagatcagggaacgacaccattatgcccatcgttggattcctccaaggtctccgggtcctcgatctgtcttcaaacggcttcaccggtgaattaccgtctagcatttggattctcacaagtttgttgcagctcaacatgtccaccaactctctcttcggttccatacccaccggcattggaggattgaaagtcgctgagattcttgatcttagtagtaatcttctcaacggaacccttccttctgagatcggaggagccgtctccctgaaacaacttcatctccacagaaaccgcctctccggccagattccggcaaagatctctaactgttcggctttaaacacaatgtaagtcaactcaatctgttatctttctgttaattcactgtgtgtgttttatcgtctctcagtattaatgtagcagtaatatgcagaaatctatcggagaatgaactatccggtgcgattccggggagcattggcagtctgagcaaccttgagtacattgatctgtcgagaaacaatctctcgggaagtcttcccaaagaaatagagaaactttcgcatctcttgacctttaacatctcccacaacaacatcacaggagagctgccagctggaggtttcttcaacaccatccctctctctgctgtcaccggaaacccatccctttgtggctccgtcgttaaccgctcatgtctctctgtccaccccaaaccaatcgtcctcaaccccaactcctccaatccaacaaatggtcctgctctcacagggcagatcaggaagagcgttctgagcatatctgcgctcattgccattggcgcacgtgccgtcattgccatcggggtggtggctgtaactctgctcaacgtgcacgcccgatctagtgtttcac

SEQ ID NO: 153103 - DNA, 601 bp, Arabidopsis thaliana landsberg
taagttgataaatgtaagttcactgatctggacagatattcttctcgggatctatcagcacctatcaaggcaaatctgcatatctctctaagtagaagcgggattctcagtctagatcgagtagatgctgtaattgcaatcacagaatgggtagacgttcctaagaagaacgtgactattgatagtaacacaactacatcaacaggcaatgccactgactaggattcccaagaaaataaagaagacctgcaaaccgatgctgaaaacagcaactgcttcaaatacaacagcagaagagccagctgttgcttctctgggcgcagaaaaaaagctgaataagcggacattcagaatacctctgaaggtggtatcctgaatttattgtttccaagattttcttgattcatttcattaccaccaaccaattctgtgtgaatatataacttgtaggtagttgagaaaactgttggacctggagcaccattttcgaaagagtctcttgctgaaggtaagataaaataagaagcattggacaagaaagatagggaaagaagaagaacggctgagttaaaaagcaaccttgaatctctgtagagcacag

SEQ ID NO: 153104 - DNA, 808 bp, Arabidopsis thaliana landsberg
agggaaggagcaaaaaagccctaattttcggctggaggagcaagacgatgatgacgatgatgatacgaaggaacctcggatccgtgtgcgcgaaggtgagccgaagacatgaatcatatgaatgtttcctggtcttgttctttccagtgattgatttatttttgatggatgtttacagtttggccgcggaacgagatcctatagcactaagaggtctggccaatctaaagatagagctttctccacatgtcctcttcattggttgaggcagcagcaggattgccggaaaagggtttgatggtgtgcaaatggctaggcacaggttcagcaggttatggaggatacaaagcctgtatgtcacgaacattgatttcttttctctcctttttttctttagccttttgatgttgttcctgttgttgttgttgttgttgttaagaattgggtttttttttttttttgttccagctgagtatttttttcctattgacaacgaagagtttagggaaaaccttgaggtaaaatcctttttggattacattgagctcatttagattttaagaagtaaagactttgaattgtttgccttttccatgttccaggattgggaatctacgttgcaaagttgggagaaactgaaaaattatttggagggtatgcacaaaggacctgttggcaatcaaacaagaactcattgacgaattccaatctggtgcagagaaacttttaatcctttcatgtatctagttaagtcatgttacaagtcataatcttattatctatgtttagacacttgtgatcgtattca

SEQ ID NO: 153105 - DNA, 444 bp, Arabidopsis thaliana landsberg
  unsure (1)..(444): unsure at all n locations
gctataaatatattgtgtacttttttctcttttttagaattttcgtgaattcattaaataggaggtttttttttcccaaagggaaattttttaatttttgaagggtttgggcatgatnntacaaganntcaacataatggannnggtttgatcagggcttgcaagagctctgcaaccatcttcgtcagagaaggaagaaagatcgtgaagctgtgactgaagatgattgtttacgagctattagcaagctaaaggtttctatctcacttgtgtttttcttttttctttcagattttttgaactgatcttgctgatatcttgggattttctccttaggtattgggtagcggatttgaggttatcactattggcaagaaaaagcttgttcgtacggttcccacggagctgaacaaagaccataactagatgttggagttggctctg

SEQ ID NO: 153106 - DNA, 1316 bp, Arabidopsis thaliana landsberg
caagcttatatggaatctgagacagacaaagagtttttatcggtttttgcttcatttccctcagatgagccgtggttacagaatgcaaagacagcccccaatgtatcattgggtgaaacagtgagggcaaggatgaagcagatgaccgtcatgaacaagctcaagaaacgagcactcagggtaaaatacatattacttataaactatccgaaaatgtatatctcttctgatctaaaaagcctaacaatagtttcgtttggtcttgttacgttacctcgataggctattgctgagcatttatcagatgaagaagctttaagtatatgagaagggttccaaatcttgtgcacatgccacagagggatgattaacatcgtcgagcttaaaatcgggttgcagaaacttggtcatgctcattccgaaagatgatttacagattttgatggatgctgtgagctttgatttaccattacttttcagggccagttggggtgtgatttgaatgcagttaactgagctctggatggttttcttctactttgcagggagacatcgatagagatggatatttggactgtgacgagtttattgccatatcggtacacctaaggaaaatgggcaatgacgagcatctcaagaaagcgtttgcgttctttgatcaaaacaataacggatatatcgaaatagaggagttaagggaagccttgtctgacgaacttggtacaagtgaagaagttgttgatgccattatccgtgatgttgacaccgacaaggttggttaacttcaccatttcactctcgttttcttgttgaaaaaaatcccatctcatagagaactaaccatcatgaaaattgttttttttgtaggatggaagaataagttacgaagagtttgtaacgatgatgaaaacaggaacagattggagaaaagcttcgagtcagtactcgagagaacggtttatcagtatcagtctcaaactgatgcaagatgcgtcgttgcaggtcaatggtgatacaagatgagagaggcttaatctgtgtcactcaccagtctggaagattgaatcaaagggatgcaaatctttcttaatttcttaatttttatcttcttgggttgctttttttttatgacaccacgattaaagctttttaggcatataaagttgtaagagttgtgtgtttgatatcctggctaatgagcgagctgagtatggggatcaagagagaaaaaccgtgttggcctttggccctgtgtcgatattttgtataatcttgtgttaaaaaaaaataatatcatcaatttttcttgtgatcaa

SEQ ID NO: 153107 - DNA, 952 bp, Arabidopsis thaliana landsberg
gcccaattaaaaaagaaatattttcctcattctgttgaaaaaactttcccaaatccgaacctaagcagacaaatttctcaaaaatctccagtgactctgagagttatcaagagctccggtgctacattctccggcgacgaatcgacggtgagctctcttttcttctaatcgacgaagcgactctgttgctaccttatttctctcagttgctcttgcttagcatttttctaacctgctccagttttgaatgtgttcatgtctaattatgtttaaattgggaattttgttgatcttgttagagtctaaaattgaagcaagcaatgagcgatagaggaggaggagtagtaagaggtcgtagtagaactggagaagataggataagtttgttaccagatcattttctgtgtcagatactctcaatcttcctacaaacattgctgttaggactagtgttttgtcccagagatggaaatgtgtctgccttttggttccaattttggatttgaaaatttcagatttccgtcgttaccataaatttgtgagctttatgaccagtttcttagactactctaaggacttatgcattcacatacttaaactgtcgtttgagataaatcaccgtgatccatcttacatgacgcggtggatccacaacgcggttatgcgtttggatcttgtatgtgattggagttatttggttgctatgaagatggacctaagcgtttacacacctgtgagactctggtatccttgaaactaaggaatgtgtcattgccagattttgagtatgtttctctacctcgtctcaagatcatgcatttaaaaaacaacttttacagtaatgattatctgccaaggtagatattgatgtccatttcgatatttttgacaatcattcggctaaaaataactcctcaaagaaaattgcagtgagaaaattactcacggggct

SEQ ID NO: 153108 - DNA, 370 bp, Arabidopsis thaliana landsberg
atggaagttagagagaagaaagatgagaaaatggagatgacaagaagaaaatcatcagctctagatcatcatcgtcttcctccgtacacttactcccaaaccgccatcaaagagaaacccaccaccaaaagaaacgggtcggacccggatccggatccggatccggatcttgatactaacccaatttctatatctcatgctccaagatcatacgctaggcctcaaactacttctccggggaaggcaaggtttagagaatgccaattgaatctcgcggcgagctccggtggacacgttgtctacggttgcggcgagtatatgtcttcaggggtagaatcacggtggagtccttctttgtgcagcttgtgat

SEQ ID NO: 153109 - DNA, 851 bp, Arabidopsis thaliana landsberg
ggaaaacttataattcacctaactcatttccatcatcttcgtcttcgtttgttcccctgagatagagataagagaatttcgagagattcgagagaagagacgatgagtttccaagatctcgaagctggtactcgatctccggcgccgaatcgttttaccggtgggagacaacagagaccttcgtctcgtggggatccatctcaggaggtcgccgccgggattttcaggatcagcacggctgtcaattccttcttccgcctcgttaattcgatcggaacacctaaagatactcttgaattacgagataagctgtcagtagcaattcttaatcacactcttcttctctttgttaaatctctgttgattagggttttggttttacttattgattttggtcgatttcatttcaatttttaattgaaaaagttttctaattgttttgaagctaatcctgcattattttcccttaaccgaagaacaaatttgagtttgctgatcgatgtgagacaacattgcaaataatgcctgacaacattgcaaataatgagctttttgtgtgtgtgtgtgtgtgtgtgtgtattgagaaattgttttttttttagattggtttcatctatttgttctgtgaattgttttaaagtgttaggttcttttgttggcaggcaaaagacaaggttacagatatccgaattggtgaagaatacttcagctaaacttaaggaagctagcgaagccgaccttcatggatcagctagtgtaagcaaatgcttacttttttgtttcattcccttacgatgctatggaatgttagtgtctaagagaacattttctattgaaccagttttattttg

SEQ ID NO: 153110 - DNA, 763 bp, Arabidopsis thaliana landsberg; identical to SEQ ID NO: 15971
  unsure (1)..(763): unsure at all n locations

SEQ ID NO: 153111 - DNA, 1051 bp, Arabidopsis thaliana landsberg
agaaaaaaccatgtcttctttcttccctttcatattccttttccttttctcattcctcactagcttcagagcttctgctcaagatcctcgtttcctagcctattattgtccaaatgcaacaacttactcaagtaacagcacttacttcaccaatcttaaaacccttttgtcctctctctcttcccgcaacgcctcttactccaccggattccaaaacgccacggtgggacaagcccttgacagggtcaccggacttttcaactgccggggagacgtctcgccggaagtttgccgtaaatgcgtcacctttgccgtcaacgacaccttaactcggtgtcctaaccagaaagaagccacactttattacgatgagtgtgtacttagatactctaaccagaatattctctcgacactaataaccaccggtggagttatcttggttaacacccggaatgtgacatctaaccaactagacctgttaagtgatttggttttgcctactctgaaccaagccgccaccgtagccttgaacagttccaaaaaattcggtacgagaaaaaacaattttactgcgttgcagagtttctatggactggttcagtgcacacctgatctcacgagacaagactgttcgcgttgtctccaactggtcatcaatcaaatacctactgacagaattggtgcaagaattattaatccgagctgtacttcaagatacgagatctacgcgttttacaccgaatccgccgttccaccaccaccaccaccaccgtcaatttctactcctccagtttcagctcctccgcgatctggtcagagctctgtttttttcctctgtttttttttttgccctgatttcttgaaattggcaaaaccaatatagagagttttcttctatctgatttttaagcaaataatctttgaaatgcaggaaaagatgggaattcaaaggtgttagtgatagccattgttgtgcctattatagtggctgttctgctttttatagctggttattgtttccttacaagaagggcaaggaagagttattaca

SEQ ID NO: 153112 - DNA, 852 bp, Arabidopsis thaliana landsberg
ctgttggcacatgattgctggatggatgaaacagtcagtacctaaacttatatcctaactgttatttcctctcggtctgtaatttcactcaccaaagcaaaagtcgagatgctaaaattgtaatcttttttgaaatagggccctggattgtactatgttgataacgaaggaggacggcttaagggagacagattctctgtcggttccggttcaccatacgcttatggtgttctggacagcgggtacgtatctatttcaagatatcatcattgccctacttctcttttagtcaaatcccaaaccaaaactagatcttgctttactattataaccactcaatcttatggttctttttttgttaacagatacaaattcgatatgtcggttgaagaagcctcagagttagcaaggagatccatctaccatgctacattccgtgatggagctagtggtggagttgctagcggtaaagatcaatccttacttcttctgccaatacatcatcatcttgtgatccttttcctttaaattttgtattaaactttcttaaatctgtatgatcagtgtaccacgttgggccgcaaggatggacgaaactctctggagacgacgttggcgagctacattaccattattaccccgtggctccaatcaccgcggaacatgtgatggaagaggctgccgaataagtactgtgattcttgtctatcttactaagagttttattacatcacttatgttttgttcatcaatgaacagaatcatagattcaagtttcttttgtattgcgaatgatgtagacgttagtttggccacaatgatcacgttgcataatagataacataatagata

SEQ ID NO: 153113 - DNA, 915 bp, Arabidopsis thaliana landsberg
atgtcctcccataccaatctcccctctcccaaaccagttcctaaaccagatcaccgtatctccggtacatcccaaaccaagaaaccaccgtcttcctccgtagctcaagaccaacaaaacctaaaatgccctcgttgcgattcttccaacacaaagttctgctactacaacaactacagcctctctcaaccacggcacttttgcaaggcttgcaagaggtactggacgagaggtgggactctcaggaacgttcccgtagggggtagctaccggaagaacaaacgtgtaaagcggccatcaaccgcaaccacaaccactgcctccaccgtctcgacgactaattcttcatcccctaataaccctcatcagatctctcatttctcttccatgaatcatcatcctttgttctatggtttatcagatcatatgagcagttgtaataataatcttccattgatcccaagccgtttcagtgattcttcaaagacttgttcatcaagtggtttagagagtgagtttctctcatctggctttagcagtcttagtgctcttggattatggcttccgcatcagatgagtcatgaccacaccattaatggtagcttcatcaacaactccacaacaaacaaaccctttcttctatcgggcctattcggatcctcgatgtcttcttcttctactcttctccagcacccacataagcccatgaacaatggtggtgacatgttgggacaatcccatctccaaaccctagcatcacttcaagatttgcatgttggaggtaacaatgaagatatgaagtacaaagaaggaaagcttgatcagatctctgggaacatcaatgggttcatgtcatcatcatcatctttggatccttcaaactacaacaacatgtggaataatgcaagtgttgtc

SEQ ID NO: 153114 - DNA, 2389 bp, Arabidopsis thaliana landsberg; identical to SEQ ID NO: 5245

SEQ ID NO: 153115 - DNA, 682 bp, Arabidopsis thaliana landsberg
  unsure (1)..(682): unsure at all n locations
ttctcacccttgcagcccgagcgccgtcgttttggaatatactgaaattattacatgcattacatatgtcattcgatttcttactttcttatttatgtgtgtatttcacatgattaaaatatataacatatatatatggtcgtgtttagcggtaatttaatattggtttatgcagaccggtggacaacgctgggaagtgcccttgggacgtctcgacggccgaatctcgcaagcctcagacgtgaacttgcccggaccaagcgactccgttgctannnnnnnnnnnnnnnnnnnnnntaaaactctcaacacattagacctcgtgactcttgttggtacgttgtcattgcatatggtttaaatgtaacactttgtaagttattcagaaaataatttcctagtagctaatttctaagtgagttttggttttgaccaggcggacacacaataggaactgctggctgcggtctagtaaggggaaggttcgttaacttcaacggcacaggacaacctgacccatcaatcgacccgagttttgtgccgctgattctggctcagtgccctcaaaatggaggcacccgagtggagttagacgagggaagtgttgacaagtttgacacatcgttcctaaggaaggtgacgtcaagtcgcgtggttctccaatccgatctagtcctatgac

SEQ ID NO: 153116 - DNA, 690 bp, Arabidopsis thaliana landsberg
  unsure (1)..(690): unsure at all n locations
gtttatcatctagacttcaggnaaattgatccaacatatgtgcagaaagtagaaggagaattgagtcagacatcaggggaggtgccacgcgtacgcccattaacagaggaagactacaagatagtgattggtatagaaagattccgttgcccagagatcctgttccatccaaaccttattggtattgaccaagtaggcttagacgagatggctggcatatcaatcagaaggctaccgcacgacgagaaagagttagaggagaggctaacgagctcgatactaatgacgggcgggtgtagccttcttccagggatgaacgagcggttggaatgtgggattaggatgataagaccttgcggatcacccattaacgtggttagagctatggatccagtgctggatgcatggcgaggagcatctgcatttgctgctaatttgaacttcttggggaatgcctttactaagatggattacgacgagaaaggtgaagattggcttagaaattatcaaattcgatacaactatttgtgattcctccagttgctattaattgtggagtttcttatttgattagctttagctgtctctagatcaatgaacgatgctttaggacaaaaataccaaaatttatttggacaaatacaaaaatctataaatcataaaaaaattagaatttctaaaaataatata

SEQ ID NO: 153117 - DNA, 1083 bp, Arabidopsis thaliana landsberg
tcatctcttctccgcgagcctcccgatctcccattgcgcactctcacctgatttcgaaaaacctataacatctctggttgatctatgagagtcacccgattttcctccgtctttgtcaccaccgccgccgccagattctgttgagttgaaggtgtttggaatcgttaatgagaacggaacaatgtctgatgagtttcagattggtgattacgacgttgagtcggcggagacgttggggaatcagacggaattcgagagtagcgacgacgatgatattaaatccaccacagctagagttagtgtgaggaaatttgagatttgttcggagaatatgactgagtacattccttgtttggataatgtagaagccatcaaaaggcttaattcaacggcgcgtggtgagcgattcgaacggaattgtcctaacgatggaatgggattgaattgcaccgttccgattcctcaaggataccgtagtccgattccgtggccgagaagccgtgatgaggtatatctgtgacgctctctgttctgattttgtatttccaaaaggaaagtttctgattttggtttacaggtgtggttcaacaatgttccacatactaaacttgttgaagacaaaggtggtcaaaattggatttataaagagaatgacaaatttaagtttcctggtggtggtactcagtttatacacggagctgatcagtacttggatcagatctctcaggttaattgatttttatgtctcattgtgagaattatttgcatcacttgaatctgatattactttatttttgtggttgtatgtgtagatgattcctgatattagctttggtaaccatacacgagttgttcttgacattggatgtggtgtggcaagttttggtgcctacttaatgtcacgaaatgtcttgactatgtctatagctccaaaagatgttcacgagaaccagatacagtttgctcttgagcgtggtgttcctgcaatggtggcagcattcacaacacggagattgttgtatccaagccaagcttttgatttggtacattgttcaagatgtagaatcaactggactcgtgatg

SEQ ID NO: 153118 - DNA, 2323 bp, Arabidopsis thaliana landsberg
atgaatccctcaatggatgatatgaacttaatccagcaagcacaaaggcatcagcttgttgtaagtaatcttggggaagagattgatttggaaattggacctggagaggatgatgctgcttttgctaacaattcattgattggcgggcctccacgggagccctccactggggaacatgatgaaacaaagcatatggttttggtatctgaccttcccagtgaggatcaggatatttcaaagggtacaccggcgaagagaaagaaaaaagttgtcaaacggtggagagaggaatgggctgacacgtacaagtgggcttatgttgatatgaaggatggtacagctaggatattctgctctatttgcagagaatatggtagaaaacatcgaagaaatccttacggaaatgaaggaagtagaaacatgcagatgagtgctttagaggaacacaacaatagtttgctacacaaagaggctctgcgtctccaaacggcttccaaagataagattgttgttgacaagcccatttatgtgaagagtaagttatttacattattgtttcaagtgattgatttctttttatatgtagtgagtcaagatcatttgcaactccttttgtttcatctgaccaacctgcactgaacaacctttcagctaacagtgtgttaacatatgctttgcatttatgttggatatctttgagctttctccaattttatatcctatattagtaaactttccaggcttgagtgatgaaaaagaagcaactcttaataggaaatattttactaacagaggcttagatgcagttagttttgtgaaagggaggaagttgtagttttttttttttttttttaactcgcaagttgtacattcttggtatgctgctttccatagcttttggagtttaatatttttgtgatcaaaagataaattgtctttttccgtttctaatatgaaagaaaaaggttgactccttggttttctgtttttgggcttactcctagtgccttttcctgcttattgtttttttaactgtttgcacttttcctctcaatgaagctctcatgtcaaagagtgctggttcaattgttgagggtgccctgaaacgagatcctaatgaaattgagtttgttcaatctgtacaagaatctgtgcatgctctagagcgggtgattgcaaaaaattctcagtaagttacgattttcttctcatctttgtaaaatagttttctggaaaccgcattcaaatcacactgttccatgctgattaatttcagttatgtcaatatcatggagcggctactagaacctgaacgtatgatagtctttcgagttccatggattgatgaccgtggtgaaacacatgtaaaccgtggctttagagttcagttcaaccaagctctgggtccatgtaggggaggtatccgatttcacccatccatgaacttaagcattgccaaatttcttggctttcagcaggtactgtgatttccatcagttatattccattatatttcctctgatttctcttatttttcaccttatactgtttgtcattttccttcttctttttcccggttgccaccttaactgttcttatgattcagaattgtaatgggtttttaatctttcgcagacgttgaagaatgctctgtcaccatataaactgggaggggcttctggtggaagcgactttgatcctaaaggaaaaagtgacaatgaggtgatatcttcgccccttgcatttttccctgcaagtgatctcttacaggtgttctgatatgttgttttgcaacatcgcagattatgagattttgccaaagtttcatgaatgagatgtacagatatatgggtcctgacaaagtaagtagaatgttttttaccctttagcaagtacatcctttctgcaatgatttttaaatctattatactgtaggatcttccgtcagaggaggttggtgttggtactcgggaaatgggatatctttttggacaatatagacgacttgctggtcagtttcaggtactgagagtctgttgcctcctccttttttttttcctggcaacaaaatggcagtaaatttttgatttggttctcattcctttataagttatttcttatctagttggtctttatttgttttatcctttttgggagtaatatttgtgattttggagggaagaatatatctaaactgatctctgtgttcattctctcatttctggaacatttcagtgccaaatgtcatcgtctatactactcttatagtcatttatttgcattagtttttgctgttgggagagaagaaagagttttggatgtt

SEQ ID NO: 153119 - DNA, 1511 bp, Arabidopsis thaliana landsberg
gaaaaaaagagacattggagatttagttgatgtggtatcgtctttagacggtgatgagaaccttcaagaagatgacatgatcgccgttttatgggtaagaagtcgtatgtaattgatatagtactagctagtcacattatatttatcggtatatttgtaacggtctagttgtaatgttttttcttttgcatttagtgatggtaatattttattttttaatgtcagtataggagatgattattcgagggacagatacaacggcgttattaacggagtggaccatggccgagctagtactgaaccctgacgtgcgaacccagtttcgaaacgagatttttactgctgtgggagacggcacagacggagtcgtggcagatgctgacctggcaaaactcccgtacctatacgcagtggtgaaggaaactctaagtctgcatcctcctggaccactgctttcatgggcttgtctttccacgtcaaacgtcgtgctcagcaatggcatggtgattccaaagggaactacagccatggtcaacatgtgggctataacccacgaccagactgtatggtccgacccgctaaagtttgacccggagagattcactgggaatgctgacatggatattcgtggtggggatctaaggcttgcaccgtttggagccggtaggagagtgtgtccggggaagaacatggggctagctactgtgactcggtgggtggctgagttggtacgacggttcgagtggggtcaggatcagaccgagccagttgatcttggtgaggtcttgaagctttcttgtgagatggagcatccgttacgtgccgttgtaacggaaatattttaagtcaaaaaagggctaagtagggttttgatttttgtcaacgttttggttacttataatttttaatttaacgtttttttgttgtcgagaggtatgaattgcagaatgcttgccgttttagtattttatcgagagtttttttttctttcaattggtgacatagtgatttggtttgatatgtagtatcaatgtaccattatcttgtgggtctaaaatctaaatggagtaatgagtaagagatatcaattttggtcttttgttcttgttatgactttgtctacatactttgatttacatatttctaaaaatatcgtaatactaaatattaacccgcggtataccgcgggcctatatttttattaaataaaaaataattgaatattttttaggatgatttaataaatttatgctattgtttgatttaaatgtataattcaccgctagacgaaattttttaactcatattttaaaagttttaagttgtatttgtttattttgttaaatgtttaatattgtataattgtattttgattgttgtttctcagatttcacccgtagtacaccatcccatattaatattgaatcaaacccgtcaattctaggatttcactcttggtagtatttaattgtataataataatttgattgccattctaagatttcactcct

SEQ ID NO: 153120 - DNA, 1023 bp, Arabidopsis thaliana landsberg
tttgcttctttgattttgcattgagacaggtttggaacgttccgaggagtctgttgaagatcctcgattctaaaaagcttccagaggacaataatttgtgacggagtaactctcgaggacatggaatgcaacaaggatgaagcgaaaagggcaatggatattgctgagaggaagatgacagagaaggattacactggggcgaaaaagtttgctaacaaggctcaaaacttgtttcccgagttggatggtctgaaacaattgtttgtggcaatcaatgtttatatctcgggagagaaaacattcgccggagaagctgattggtatggtgtccttggtgtagacccctttgctagtgatgaagcactgaaaaaacaataccggaaattggttcttatgctccatccggataaaaacaagtgtaaaggcgctgaaggtgcgtttaatctggttgcagaagcttgggctctactatctgataaggataagagaatcttatataacgtaaagaggggcaaagatgtcaaagcagctcaacaaagattcccaacaacacagagagagattccatcacaccagccaacttccaacgggattccaaatgtaagagagcatgtagtttcgagtgctagggctagatataagcctgctacccgtaagcctgctgcccgtatggatagatctcgcacgggttcgcctgcttttgtttatccgacacaggagagtagtaccttttggaccatgtgcaacaaatgcgacacacaatatgagtaccagagggtttatctcaaccaaacattgctttgtccacactgccatcatggtttcgttgcagaagagaaaactccgcctacaaatattccgaagcccccagtcaacatctcatctaaccaacatcaccggagttccaaaaaccaagcgtcgaaacaagaactcaaatggttcttcttataggagagagcctgcaacatctgttacccataattttcagtgggattcatcaacaatgggtggttcttacagccg

SEQ ID NO: 153121 - DNA, 1573 bp, Arabidopsis thaliana landsberg
agttttcaactatttttagccctctaatgagtgatcatagcattagttgagcgtcttctgcggttctgccctggaaaagcggcaactgatctctcaatgggtctcaatccaataatggttgggtagtttgtagggaacgagaactgtgagtgtgagactctgtagctttggtatggtttctatgggtgattatagcattatttgggcatcttctgcggttctgccctggaaaagctgcaactgatctctcgatgggtctcaatccactaatgctttgggtagtttgtagggatcgagaactgtgagtgtgagcctctgtagcattggtatgaatgagtgaccattgcacaacaggatcttctttcgtcattaccttttattcagtttcaatttctttgcaattctagcagtgctgggtgggttttgggtggggtactgtgttgtcccaaggtttcattgtgattgtatgggaaaaaatgctccgagcaatatcgctgtatcatagcaaaactcacatctatgaagagaacctggtggacgaggatctgagatgaggggttttacatccatcttcacttttgtagtgtaaatcatttcctgagaaaagcttgctaattattacctgatatctattcctttcagccaatggaaatatatgtcgatgatgaagccaagttgactcttcatgggcttgtccaggtactcttatctggtgttaggtcttcttattcaatggaaatatagtttgttgtttgatacttaaaagaccttttactgtcatactgtaacagcactacatcaaactgagcgagatggagaaaaaccggaagttgaatgaccttcttgatgcgttggacttcaatcaagttgtcatttttgtgaagagcgtgagcagggctgctgagctgaacaagttactggtggaatgcaatttcccctcaatatgcatccactctggaatgtctcaagaagagaggtctgtacattctcttaaaaattcaatgtttttgaaggaccctacctgctcttaaagccctcatggagaggagtccaattcttaaaggctaatacgatatgttatgtaggttgactcgatacaaaagtttcaaggaagggcacaaaaggatccttgtggcgactgacttggtaggaagagggattgacatagagcgtgtcaacattgttatcaactatgacatgccagattctgctgatacctatcttcatagggtaagtatataatcctgagatttattatttgattgttgatctcactgaaagggctcttgtaactttaccgttttgctgtgtgtatgggataggttgggagagctggtagatttggaaccaagggtcttgcaatcacatttgttgcatctgcttcagattcagaggtccttaatcaggtatggtgtttgatcttttaataaattccatggaaaaagtccccatgatattgagttgggtatttagtaaagtggcaagtataaatgttggacaggttcaagagaggtttgaggtcgatataaaggagcttcctgagcagattgatacatcgacttacagtaagttt

SEQ ID NO: 153122 - DNA, 690 bp, Arabidopsis thaliana landsberg
  unsure (1)..(690): unsure at all n locations
tccacaagatgttgttgctctctctggtcagttctttaaagaactaatatatgtgtattgtgtgtgataatctaatttggttttagcttaataatttgtggggatatatatatataggagcacataccctaggagttgcacgatgctcctccttcaaggctagacttaccgtcccagactcttcattagactcgacttttgcaaacactctctctaannnnnnnnnnnnnnnnnncaatgcagagcaaccctttgatgctacgcgcaacgatttcgacaatgcttacttcaatgcgcttcagatgaaatcaggagtcctcttttcagaccaaactttattcaacacaccaaggaccaggaatcttgttaacggctatgcacttaaccaagccaagttcttctttgatttccaacaggccatgcgcaagatgagcaatcttgatgttaaacttggctctcaaggtgaagtccgtcaaaattgtcggagtattaattaggctagaccacatctacttacgatttttgtatttataataagttctctactcttgttatatgaagaatcatgaatcttctaggctactatgtaaaaattgtgtactctcgtaatatgcagttgtatacttattgcttgtgtggttcagatatccatcaaaaagtaatatactttggttgcattttcttgtccaa

SEQ ID NO: 153123 - DNA, 817 bp, Arabidopsis thaliana landsberg
tattacccaaatcctcaaatttctcacagcgtctttttcacttcaattcttctactttgtgttttatggtgctgtgaaaatgttctgcagcgtataatggctgtccagtacaagatcccggattacgttcatatatcgcaggagtgcagacaccttctctctcgcatatttgtcactaattcagctaaggtactactttctcatttatctgagttgaagctgtcttttctatatttcaatcttttgatgacatgtcataaatttatgcagagaatcacacttaaggagatcaagaatcatccgtggtacttgaagaatttgccaaaggagctgctagagtcggctcaagcggcgtattacaagagagacacaagcttctctcttcaaagcgtagaggacataatgaagatagttggagaagcaaggaatccagctccatcaactagtgctgtcaaaagctcgggatcaggagctgatgaagaagaggaagaggatgttgaagctgaagtggaagaggaagaagatgatgaagacgaatacgagaagcatgtcaaagaggcacagtcttgtcaagagtctgacaaagcttaaaaagaaaaatgctctctgtttctcttactttatttcttcttcaagaacactccttggtgagttggtgacttgcttctggtaaaaagaaaaacacatttgtcaaagccaaaggctgtaaactacgtgctggttgtttcacttttagattgatgtcgttgtactgagtaatgagcatgaaacagaaggtttatattattatatgatactatactataggttttcgtct

SEQ ID NO: 153124 - DNA, 3723 bp, Arabidopsis thaliana landsberg
actttattaattttgtcttcgttctgtatacatgtcgacagggatacaacaacatgcagttcttgccattttattttaccatcctcgtactgtttcaatatgtgcattttgtataaaaactagaaagttcgaatccacctaatggattgggaatgcagccctgcgttatcttattctattttagcatctcatttgctaacttgacaaagaaggattaatctcactgctccttttggactgcaaatttttcgttgtagtatatcagtatgtttgtgcatcagcgttggattgtcatattttgtttctttttttaggattttgtcacaaggattgcacttcgatgtctcaacacacaaatggaaatgttgaagttctggtcacctgcaaacggtgttacctttcaaaaactcgagttccaacaaatatcaatcacagacagtcaacagcaccccagttcacgatcaacgtacgacatcaaaatgcagtcattccagtcatcaaggttaagcctcctagtcaacaattatcatcccagaagccacgggagaacacttcgggagttaaacaagtcactcctgattctagtgtatctaagagtaaacagaagacactgtcctgtggagtcatatggaggaaaaagaacgtagaggacacaggtgttgatttccggaatcaaaacattctcttggccggtagatcagataaaccgagcctggaaccggtttgtgggatctgcctactgccgtataatcctgggttaacgtatattcactgtacaaaatgcgaaagtaaggaattattcactcaacaacaactgtttccaagtgtaatttcttgaaggcgtcttaaatgttatattatctaatatctgaatctcaaatgcagagtggttccacactgaagctgttaagctcaaagattcacaaattcctgaagttgttgggttcaaatgttgcaaatgtcgacgtatacgatcccctgattgcccttacatggatcccaaactcaaggaacagaagcagatcaaaagaatagtcttcacgaaccagaaacagaggcaaggaaattctgggttggattctgattctgaaagaatgtctgaacaaaaagactcgaaaccttctactccgttacctgccactcctttatatcctcctgacgatgtatttattccagaagatgatcctctcctggtatcagtttccaaagtcaaacaaatcacacccagtagtttcgatcttgaatggagcaccactgcttttgcgcctggaccccaaaagctaccagttagaaggcaagtgaaacgagaagattctgatgcagcctatcctgaactgcatcctattgtgaaacccgaggcagaggagcaagctttacctgttctaacagaatgggatttgtctggtgagctacttttcgactacgaggacatggaatttgaaccgcaaacttatttctcgttgaccgagctactgacagccgatgatagtggtggtggtcagtaccaggaaaatggagatatggttgtttcaggaaaccctcagttcgaaccaacagaaaaagaagagtgtgaagatgatatgggtccatgtcagagatgtttgcaaatggatccagcgcctgatcttttgtgcacggtttgtggattgcttatacattctcactgttctccatggtcagccttacccggaagtagctggagctgtggtcaatgccgtgagtggcagtagctggaccctttgatttcaagccccttcccaaattttaacttccacattctttgacaatgaatttgagggaaaattgtatcctcctttgtttggcttataatggcaaatgagctgtaatttctagtttttttttaggtttgtcttcgtctattttatttatcttcgtttatagagtggatacatgtttgctttcaaattcataccaagcagggatgcttacttggtggaatgattaactttcatgtattggtgatatctgattttcttattttgctctcagtgcttcgtttagagagttatatctatgacttgtttatttgcaggaattagggcactaggaagcattcctctaggaagctatggtgaaatcacacaggtggtattccttagcatttctattgcaagtctttcaagtttaggggacttatctcctgttgaactcttatgtaattaatatctagaagcagtcatctttgaaacttttttgaggaaactaggaaacgctactatgctcgaaaatgcatccatctatttctctattaaatgcatccatctacttttttctctgatgaacattttgaagtttttcgaagacaataatattggctgataagcctgatatagtagtgttagcctttagtaatccttttagttgatttgtgcagttcaagtcgattcttcctgaccggagtacaaaagttgacatttcgctagctggtccatttgctggagctgcactctcagtttccatgtttgctgttggtctgttcctatctacagaaccagatgcagctaacgacctggtccaggttcccagcatgttatttcaaggttcattacttcttggactcatcagcagagcaactctgggatatgcgtaagctctccacagctagcgactgttcaccctaaacgaaaaaacctaactccaatctccatttccgttttcctattgattgcagagctttgcatgctgcgacagtttcaatccacccgcttgtaattgctggatggtagtgtcttatgccttggctcatgcttctgtctttcattagcaatcttactttgaaatttgattgttaggtgtggtttaacaacaacagcatttaatatgcttccagtgggatgtttggatggaggaagagctgtacaggtacttccttgtatataaggaatggtgcatactctattcgaaaactagaaacttaatgttgcttagtgaaaatttgactcataccaagaaaaacgcttcttccaagtctatcttgtcattaaaacaatccaactagtatcaagtatggaaaatgttgcagttgattcaagtgtatactattttataatcttgaaaagtagtgtactttagatgaagtatgaactgaaaagggtctgagatattcatataagagatcaaattattaatactatcaatcacgtctgagacatatgggcatggttcttgtgcagggagcattcgggaaaaatgcattggttacatttggtttgtcaacctatgtaatgcttggactcagagtggtatgttcaactgttaatgttgtagtgttgttttatacttctcgaacctgctagtttattgctctggcattttcctacttttcagctcggtggccctttggcacttccttggggactctacgtactaatctgccgggtacacaaaatttctaaactctgctacttcaaaaatacgagtcagctttaaaagatgtttctaagcagtatgttttggacatagaacacctgaaaaactgtgtctaaacgacgtgaccgaggttggaacatggaggaaggcccttgtagggattgcactaatcctagtggttttgacactcctgcctgtatgggacgaactcgcagaagaagtaggcatagggcttgtaaccacattttgatgtcatcttccttctttgagcagatgttgtagttagggccaatccgaaacaaattttttgttttggcaatatttagattgcca

SEQ ID NO: 153125 - DNA, 1882 bp, Arabidopsis thaliana landsberg
ctccctgtttatgcgatgtcatgctttcagttaccgcaagatctgtgcaaaaagctcacaagtgtcatgactgaattttggtggagcagtggaaatgatcgaaataaaataccttgggtagcttggaaaaaactatgcaagaaaaaagaagacggtggccttggatttcatgatattgtcaaattcaatcaagcacttttatgcaaacaagcttggagacttttagaccagccacaatcacttctagcgagattcctaaagagccgttattttaagaaaaaatccttcttggattgtggtgtaggcaccagaccatcgtatgcttggagaagcataatccatggtcgagagttactgaaaaaaggcttgaggaaatctattggaaatggacaaaatacatgggtatggatagaaaaatggatccctgatgactacccgagaccgccgacaagtttgcaacggaacagagacgttatgctaagagtatcagatctgttggatcgtaacacgggacactgggacgaagatagagtgagacatttgtttattcgggaagatgctgattatattctctctctaagagtgtcgactgacctccaagattcatatgtttggagcttctcaaagaatggcctttataattctcaaagtggttataaactattagaagcacttcctgagcatcaagaatttccaatcacttctcttcctccaattgagaagaagttatggtcacgattatggaaagtccaaaccatgcctaagataagacatttcatgtggaaggctctagcgggagcattagcagtttcagacagattgcaatcgagaggtatccacatagacctaacttgtaaaatgtgtgggaaggaaactgaaaccatatgccatgttctcttccattgtcatgtggcaaaacaatcttggggactctctaatatccctgctcccgagatgggtttctctaaaaactcagttttcttaaacctttttcaccttcttaatcgtgctgaaagacgtgacagtctcaccaataatacacaagtttttccttggcttttgtggcatatatggaagtccagaaactcatttgtgtttgaagggaagcgatatggtgctaacagtattttggttaaagcccgagaagatgcagagacgtggatggcagccaacaaatcagatgcacctgcaacaaatacatccctcttcacatcttctcatacccatcatacttggagaagcacgatgcttagttttggtaagtgtaacattggatgctcttagattaaacaagagatgaactgtggggccgcctggattcttcgtgatcattcaggtaaacctctgttccatagtcgtcgatcatattcgaaaattgcatcacgttttgaagcggatctcttgagcctactatgggcagtagaaagcttaagtaaccttagacaaaacaagatcatctttgagatatcatcccaaaaagtagtggaagcaatgcgttacccacatagataccccctctttcgacacttgatctcagacattagaagatttttggatgcctttgagttttcagttatagttaattctgcaactgaatgtaatcgggtggctaatgaaatagcaacaagtttcacgagagatcatcgttaccaatcttatgttgcacgggaggggccattgtggctacgagaaatcatcatagaggaatctaagctcttggtttgagattcttcttcagggacttcgtgcctttacgttttactgttgcagtcctactggacttgtttttgttttgttttatcagtccatttacttagtgttcttaatttcgtcttataatggtcttgtgtttttgttatattatatttttagtctgttgttg

SEQ ID NO: 153126 - DNA, 905 bp, Arabidopsis thaliana landsberg
gcttgtctctggacagacttttatatataatctttcatgacgccggtttcgttttcgccaatgttttttaaaccatttttcatctctgtagggatcgtttgtgaaacaacttactgctgcaattccgtcgttgcaccccgttgcatgcggaaacaaaatctcgtgcgaagggccaagtgtgggacagatactgtttctgctcatgggtttaggctttcttgtggtaggcgctggtggtatcagaccgtgtaatttagcgtttggtgctgatcagttcaaccccaaatccgaatcaggaaagaaagggatcaacagtttcttcaactggtatttcttcactttcacgttcgcgcagatcatctcgctcacagcagttgtgtatatccagtcaaatgtgagttggacaatcggtttgatcattccggaggctcttatgttcttggcgtgtgtgattttctttgctggcgatagattgtatgtaaaagtgaaagcctcgggtagtccattggctggtattgctcgtgttatagcagccgcgatcaagaaacgaggtttgaagccggttaagcagccttgggtcaatctttacaaccatatcccgtctaactatgcaaatactactctaaaatacaccgaccagttcaggtaaattgatatctacttattcttggttctcttgctttatgtttctggcttttgttttgctgaaaaatgtttgtttattatgttgccagatttctagacaaagcagcaattatgacccccgaggagaagttgaactccgatggaacggcttccgatccatggaaactatgcacgttgcagcaagtgcaagaacgcgaaatgcattgtaagagtgattccaaaatggaatgcatccacgatatactaccttgcaataacta

SEQ ID NO: 153127 - DNA, 1497 bp, Arabidopsis thaliana landsberg
  unsure (1)..(1497): unsure at all n locations
acccctcatgcattccaccaagtttttacaaatgatgttgactttggtgtcctgctttccctcttggaattttacgaggtgagaacttntnatatctattcattcccccttttccttaataatttaatgtttggacttttgctgacaaattttcattcaccttttgatgcagactcttcttgcctttattaacttcaagctttaccattctctgaatgttaaatacccgccaatccttgactctcggttggaggctttggctgcaggtacgttgtcctcctccaagaagcaattattttcctcaagagatatctttcatatgggagttcatatgtaaccattagaacgtgtcacctattactctgattaatatatatttgtttatgtcttcaatgttgcagatctctatgcactgtctagatacatagatgccagctccagaggcatggcggtggaacccaaagttgatgattcatttagctcacagtcaaatgaccgtgaagagtctgaacttagacttgcacagcttcagcaccagctgccttcaagtgagcctggagcattgatgcatctggttgcagataacaataaagaggttgaagaggatgaagaaacaagagtgtgcaagtcactcttcaaggatctgaagtttttcttgagccgtgaggtatctttttgattcattctttatgagccacttcttatcactgaattttgttctaaaatagtaaatcattggcaaattttaactgttatggacaaaacatactcatttgctactaaagtgattcagtaatttaccaaataaaatggtaatttttctatagcctaaatctctgacatgttcataatgttcaaacactcttactgaaagccacaccatttgtaagcaacggcttttaaaaaaacaatgattattatacgtacttagtggtgagggacacctagtagctactgtgtagtcctaaccaaagttgtgtcaatgattgtaaattgcattccatgttctgataggtgaaagttttgtgttcatgagtgtctcctcacagttacctagaagatcattaaattgtttcatgactggggcctgtctattgtataataattttgtatttttgtgtaggttccaagagagtccctgcaattggtgattactgcttttggtgggatggtgtcttgggaaggagaaggtgcacctttcaaggaggatgatgagagtgttacacatcatgttagctatttagcttgattattaatattacgattgtgtctagatagatagacttaagaacatacattatacttttgtagatcatcgataagccgagcgctggccatttgtacctttctagggtatatgctccaccacagtggatctatgactgcgtgactgctcgcataatcttgccaactgaaaaggacttggtcggtaggtaacacactccaagactttgcttatttcttttttcactaccatgttttgctttactcaactgc

SEQ ID NO: 153128 - DNA, 1092 bp, Arabidopsis thaliana landsberg
  unsure (1)..(1092): unsure at all n locations
aagaataggcttgtgccacatcacatacatcttgcagtgataaacgatgaggagcagaggaagttgcttggtgatgtgatgattgcaaagatttgattttagcataattttgttcagaaaatgcaaatcttcttgagatatttgttttgaaattgattttattcattgcattttacgttatgactcatggagaaagcattgtaagaaatctaaggggttctgtttttagagttatctacccacacaaggtgtttgatgaattgacggtgagacagaaatcaagaaacaactctcccaacatgtcttatgcgatgtttgaagaagccttacaggaaatgtgactagactttatggaaggtcagatcccttgtccatctcagtattttttgtttaatggaagctttaaagattgaggaaggggacaaatatgttaaaatagttgaagataagaagaaacttttttcaaatttgagtcaagtcttgaagaaaatttagtcttattaatcttattttttgtttggttttgtagtgaggattaaggttcacggaggtcgttgttgattatgtgtcattgagaatgacatacctaatattgtagtcttccttattaacgtcacttataatctcagtcttccttatgaacgtcacttgtagtcttagtcttctttcaaatttattaacgtcacttataaggaagactatgagttatattacttcagtccagcgtctcgatttatgtttactaaccttgtaggtatttcctgtaacctccaagttatttttttaatcactcttttgtttttgcttttttaaatgagaattatgttagtgtagtctcttttgcannnnnnnnnnnnnnnnnnnngtatcttccccagtcttttacgtttaaaaatatgcacatgtgagacaaaatggttgaatctacttatgcgtgtacttaaagattcacctaaatgaaaagatctaaaacttggataggtatatacagtataaactctataaattaatactcgataaattaataaacacgataaattaataaagtttgccaatcccaagtcgggtcaatgtaaaaattaaccaaaatcg

SEQ ID NO: 153129 - DNA, 6415 bp, Arabidopsis thaliana landsberg
cattttctctactttcgaggtttttatgaactccattggggacaatggaaagaatctgatcttcttcttcttcttctttgtctgtttcttcaacaaaatacgtcacaataatgtctctgttcttctttctcttattatgcttctccatctctcacgctctccctcctcctcgaggtaaatttcgtttttgcgattcttatttattatttttctgatttttttttttacattttcgatcgaatcttgataatccatttacagaatttccaaaaacactcttgaatccatgcttacaattgttatagactaccctaaaacgtcgagtttcattccatgtgaaaggtttcttcttaaattgtggatcatcttcttcaacaaacctcaacgagatagaatacacaccggacgaaggattcatttccgtgggaaatacgacgaccattaagcaaaaagacctcgttccgatcctctccacactacgttactttcccgacaagtcatcgcgaaaacactgttataatttccctgtcgcaaagacctccaagtaccttattcgaaccacttactactacggtaactttgacggtaaaaacaacccacctgtgtttgatcagatcattggaggcacaaaatggagcgtcgtgaatacgtcagaggattacgccaagggtcagagttcttattacgagatcattgttggtgttcctgggaacagactaagtgtttgtctagccaagaatgcacataccctttcttcctctccttttatatcgtctttagatgtccaatctcttgaagatacaatgtacaattccacagacctcgggtcctacaagctcagcctcatagccaggaacagctttggaggagatggggagatcatcaggtgccctttttgattccatagtttggtgatctgaaaagcactttttcttgcctgacttttgatggtatgttacatgttggaaacctagctatccagatgacaaatacaaccgtttatggcaaccgttttcggaccagaagcatctgacggtgacttctcgaagcagaattaacccgtcaaacttctggaacattccacctgctgaagcctttgtggaaggtttcacagcaagtcaagggaagcctctagagcttcaatggccaccttttcctcttccggccacaaagtactatgtagctttgtattttcaggacaatcggagtccaggccccatgagctggagggcttttgatgtctcagtcaatggactttcctttttaaggaagctcaatgtgagcactaatggggttatggtttactctggccagtggccattatcgggtcagactcagatcacattgactccggccaaggatgcgccggttggacctttcattaacgccggagaagtgtttcaaattcttcctcttggtggaaccactaatattaaagatggtactgtaaatgtttccttcttcttcatgtttttgtctattttgtaataactgaagccactggaacaaaaacattctcttctgcagcaattgctatggaagatctgttagagagcatcatgaagcctccagtggattggtccggcgacccatgcctccctcgtgctaactcgtggactggcctaacttgctccaaagacaaaatcgccagagtgatttctctgtaagtcaaaactcaatactctagtgaagctttttatgcagctgtcgtcaattactaagtctaaatctccaagaacctggttctcttgctagaaatttgacaaatcttggactatctgggtctctaccaccaagcataaacaagatgactgcccttaaagatctgtaaggacttcacatcctaaaattttgtctgagattttttctttttgttaaataagactcagctgcaacttccggatttgcagatggttggggaagaacaagctcacaggaccgatcccagatttgagtccaatgacgagattggaaactctgtatgcctttttgcaaccaaacttctaagtgttgtgcaagagatttagattattggacttaccgttttgttttgtgggatgaggcagacatttagaggacaatcagttcactggagcaattcctgagtcacttgcaaagctccctagtctccgcacactgtaaacttgtctttcccctcctctctgcatttaacagcaagcctagacatgcgaatctgatagcctgaccaaaagtgttcactatagttataagagaaactaaagttttgacctgtaacacgattgcaacatcatcataactagcatcatcattgttgatgttaattgttaatctgcaggtccatcaagaacaacaagcttaaaggtacaattcctagtgtactcctccagagaaagggcctaactatccagtaagaatcataaccatgttggtaccttaaaaagaaacaccatttttcataagcattttgatgtcaaaaaatatccttacttgttggagggcgtctcctgagaacatgccaagcacaaataataccggccaatttcgggttgctaacagctgattcaagtgctcgttaatgataaatccgattctataaactacgcggtcatctttcatggcctcgaaaattgaagtgcacagatgtcatggagaaagggttcgatcaaggaagcatctgggaacgacacttctacttttgtgagtttcttctagatgaccgtattatatccttccaaatcatggaatttaagtatttatctgtttatgttatcgaaccacctttgaacccgtagagtaacttgaaccaagaggtaaagcacacaaagataattaaatggatcgtgttacagctatcttttctcttgatgtacataagtcagactgaaacagcctaaaaacacaaacaattcctgcagttcgtggtgtctcgaggtctgatacatataaaacagaaattgcctatatggggactattggtgaaagaagaagccattatctgagcaagaatcagtagtttttgtctatacctccgatcagcttgtttgggccaaacatcccaaagaagcacttatctctcttctggttatagttttgtacgtgcaacggatacacttcaataacgaacccaagcttacatgcaaaaatgggccatattcaaggtcaagatggttcattatccaaatcttccatcacttcaatgtccgtccgagatgttatcttctgcacatatcctgcaattagtttaaacttcttaagtcaattgcatgtaaaacactaaatctaaaccaaactgcaaaactcagaaagtgtggctttgtttactttttcacaaataccaatcaagaaaccaactcatagatactctagaatcttaaaactatcataggaaaaacatggaaaaagagccacactcagaaacttacctatcccttggcagggtatgcatttgcatataacctctttaccccttttcttgtaatagctgacagttccagatccttggcaacttctacactttccagtccattcataaaccacttcccggcaatcctaaaaattggtcgggttatattgtgatcagaaaaaacaatcccaaaaaggcattctaaagcaaatactgcatcaaaaagaaaatattgcctaaacacacccaaaactggggtgaagagtaactcggagcaaatctttccgaaaaaggataattcatgtcaaaatttaattcctatcttatatcgacaagagcttgcatctatatttttcatgtttttgacacacatgcttttataaaataagtccattgttgagtttcacatttcagaaacatcattcaccttccagaatctaagcttatcgctccataagaaagaccaattaaacttaatgtcattcgtcaagctacaagatcaactcatatatttgtgcatattgattggttcgaagattaaactatagagcaaatcaaacagccaatcgtcagctaaagcaattaaaatgttcatctaaattaagtgcaagtatgttgagtcttattcaatcatcaaaattagtaaatgaaagttgaagcaaagcaaaaaacctcgactacaggatcacattgcaacctccggtcaatcacatccggcgacacaggggatgtatcaggataagtcataggaagaggaagcgcgtcgccatcatctaccaagtaactctctccacttttcgaccagagcaacctcctcttcctccacttagcaccttcaccattcccaccggcggcgacggaaacatcccgagacctcgccgtgtcagaggttgaatccgcttctcgaggtaatcggattccgtcaccaaggggaatatcagcggcggcgcggcaacggagggagcgagaaggaagacgaggaaggaaaacgagaggtctgtgagaaggcagagagcaattagggtataatcggaacattgagacgagaagtttgcaggtgcggccatgaaattgggtgaagtaatcaacctcgacgaattaaaaaaattcggatatttttgtttttgtgtgtaaatacttaaaaacttggggaaaattacaaatttacaatcttcatgaaactaactgttaggaaaaattgtagcgtcccatatactctgaagaatattttagtccttttctgataaggttattttatttcaaataatttggtttttctttgtttttgtttttggttttatttcttgccgccaaaagagttttaggattggtcaaaagcggagctctgggctcgtaggtgtaacgaaaatggaggaagaagatgaagagatcttatcgtcttccgattgcgacgattccagcgatagttacaaggatgattctcaagattctgaaggagaaaacgataaccctgagtgcgaagaccttgcggtggtttctctttcatccgacgcagatcggaaatctaagaacgtaaaggatcttctgaggtgcgtaattgaatttcctagatttcaatttgaaattgaagctgaaccctaaacctgatagatgcttcgttcgcttgctgctacatatcatttggagttttagtggttcgaatttagggattttaaaggagatttagtgttctcttgttcaaattgatgattgtgaatagtctctgaagctgtatcaaacgcgtattccattgttttatggaaatggaattgatacttatgcacggttgacaggggcaatctagttgtgcaacggcagccactccttcctcgggtgctttcggtgtcagatggagcggcagtttgtaggaagcctttcaaacctccgctgttctcatggttatgattccacaggacaactttctcgtcgcctttcagctcgaaaacggtttgttccttggggttcctcaactccggttgtggttgctttacctactaagctggaagcatcaaccaatattgagagagatgaagaagaggaagttgtttgtctaccacctgatattgaacctttggtattgtggcaatctgaagaagatggaatgagcaatgtaacaactatcatggtgcattcagtgcttgtcaaatttcttcgccctcatcaaaggtattcatttctatctaagaattgacatcgtgtacagagttttttttaaggatctcaaaacttgattccaatctgtgctgtgatcttaaaaattcttaaggcattcatagtttacttgttgaaccacgtcaaaatgtgctcttcgtttaaaatcatataaccctcagtgaactgctggtgaatacaacaggccaatgagtataaaattatctctagttggcatcgaagatgtttatacaactttacttacatggtgaggtggtttttctgagactgcagagagggtgtccagttcatgttcgattgtgtttcaggattacatggttcggcaaatataaatggttgcattctggctgatgacatggggtaaaatctatcttgtccgttatgtaaaattggatctggactttttttgtttcctatgtaattttcttatttccttctaaattgatttggcagtttagggaagacattacagtccattactttactatacacacttctttgtcaaggatttgatgggacgcctatggttaaaaaggccattattgttacaccaacgagtcttgtcagtaactgggaagctgaaattaagaaatgggttggagacaggattcagcttatagccctctgtgagagcaccagagatgatgttttgtctggaatagatagtttcactcgaccaagaagcgctttgcaggtatagctgtgcatatttttttgctgactctctgagaattgcacttatcacctaactaacgttaacaggtacttatcatttcttacgagacattccgaatgcactcatccaagttctgccagagtgaatcctgtgatcttctaatatgcgatgaggctccatag

SEQ ID NO: 153130 - DNA, 505 bp, Arabidopsis thaliana landsberg; identical to SEQ ID NO: 63795
  unsure (1)..(505): unsure at all n locations

SEQ ID NO: 153131 - DNA, 1072 bp, Arabidopsis thaliana landsberg
aatcccaatgtgtcacatcttcggattcggtggttttcgcgccggggctaatcgcgttaggatggacaatcgttgttcttcctaaattcgacatggctaagcttctctcggcggtggagactcatcgttcttcgtacctttctcttgtaccgccgattgtagtagctatggttaacggagcaaatgagattaattccaagtatgatctgagctcgttgcacactgtggtggctggaggagctccgttgagtagagaggtgacggagaagttcgttgagaattatcccaaggttaagatcctacaagggtatggtttgactgagtcaacggctatagctgcttctatgtttaataaagaggagactaagaggtatggagcttctggcttactggctccgaatgtggaaggtaagattgtggatccggatacgggtcgggttttgggtgtgaatcaaacgggtgagctgtggattcgaagtcctactgtgatgaaaggtgtttgattcttgatctttagttcatatgcctgtgaaatatgtttgtttttttttgttattggtgttgtctcaaacttgttgagttgtttataggttatttcaagaataaagaagctactgcttctaccattgattcagaaggatggttgaaaactggagatttgtgttacattgacggtgatgggtttgtctttgttgttgatagattaaaggagctcatcaaatgcaatggttatcaggtaaataaataaaatgtaaccaatcaacgttagttgatctttcttaatgcatggatgatctgagtaaagttgggggttttggtaatggtgaaatgtttgttaggttgctccagctgaactagaggcattgttgcttgctcatccagagattgctgatgcagcagtataccgtagtcttgcttttacattgcccatcaagcaattcttctcttaacgatcctttttgctaattgctaagctttgacgtttgtctatggttttttaagatccccccatcccgtgggcaattccatggcataaaataaaaaagtggaagtagttatcagagcgaatcat

SEQ ID NO: 153132 - DNA, 1534 bp, Arabidopsis thaliana landsberg; identical to SEQ ID NO: 16087

SEQ ID NO: 153133 - DNA, 1196 bp, Arabidopsis thaliana landsberg
  unsure (1)..(1196): unsure at all n locations
agaaagaacatgtaggctcatagaagtgctatggtttagatactaggtgaactaatcaagcttattaacaatgcatgctttagcatatgatttatcggcttctctggttatcttagctctaggtatagagagtttcgctgaacgccaccggttactctagaatcataagtttgagttcgagaacggtgcgataacaatcctaatattagctagatctacaatttatctatctcccgagacaattcttagacccgacgctttaatcacttgagtctataactcgtttacttgcttatttgtcttttacattcaattacttcatctagcttattaaacaacatcacaagtctattgtgtgaatattgagagctcagtggaattcgacccttaagtgctacgacgatctcttatttgcgggagtaagcttaacgcaatttgagctatatcaacctctctatccagattgcacaaacaacagtaatctctactattgtttcactctttaggctaaagactcaaggtggntggtctacttgagacctggtcaaatatgctacccaatggtattgtcttgcacacatccttgtacgaggtgaataagttttttaaaacttttgatatgggttatgaaaagatacccgcttgtgtaaatgactgctgtttattcaaaaatcagtttcaggagctcgacacttgtcctaaatgcaagttttcacgatggaagattaacacccgaactggtgaggtgaagaaaggtaatcaacagaaagtacttagatactttccgatcattccacgtctcaagaggatgttcagatcaaaggacatggcgaaagacttacggtggcatttcagtaacaagagcacctatggaagaatgcatcatccgatagattttgtaacatgggatcaaatgaatcagaagtatccatcatatgctgcagaagaaaggaatattaggcttggactctccacaaatgggtttaatcctttcaacatgaagaatgttaactatagtgcatggcctgttttgttagtcaactacaacatgccacctgacaagtgtttgaaacaggagaacatcatgttgacattgttgattcctggtccaactcaacctagaaacaacatagcaccgtgtatctagaaccgctaatagataatctaaaccatcttttggaaaaggaagagttaac

SEQ ID NO: 153134 - DNA, 1188 bp, Arabidopsis thaliana landsberg
  unsure (1)..(1188): unsure at all n locations
tcattgtttagggtcttggtgtgggggaatggatactacagcggtgcaataaagacgaggaagacaactcaaccatcgaaggtgncggcggaagaggctgcgttagagaggagccaacagctcagggagctttatgagacacttttagccggagagtcaacgtcagaagcaagagcatgcaccgcattgtcaccggaggatttgacggagacagaatggttttatctaatgtgtgtgtctttctcttttcctcctccatctgggtaaacaactctctccctatactcaagtttctaaatttgttctttcttttttctcttctctaagtgaagacaaaaatagtattgtgtgttaaatgcggatatcgaaaatattgtgttgacattaaagagaaactgaggaagttgagttactagaataagaaagaaatgagagttaatgaaacgtacacacactacattttcatgaacattattgcgaccgttgagattctcattgtttggtgattgattatctaaagtagaagcatgaatagatataacataaatgcataacaaaatgggttagttatgggtatacttcatgcttttctctatgtggtaaaaaaagttcaaatataaatttgggaggtagtaatttgtaggatgccaggaaaagcgtatgcaaggaggaagcacgtatggctaagtggtgcaaatgaagttgacagtaaaactttttctagagctattctcgctaaggtaaattcttttattcattcaccaactatactatgcatctatttttacctatttatgtatacactatactatgtatctatctacttgtaaacctatttatctatacttttatacattttcactgattaacttgaataattcttcttgtcgttttatgggatgccccttttacgtcggttcctcaatgacttagagtgctaaaattcaggtaaaatttgtctttattagtttgctctttttagtaagatttgagaattgtattctgatgaaaatgtattttaaaaaagcagacagtggtttgcattccaatgcttgatggtgttgtggaactaggcacaacgaaaaaggtaacgttgtatatactctctattttatttacatgttaatgaaatatataaacaaaataaaaaagtgaatataacctatctttctttaggtttagtaatgt

SEQ ID NO: 153135 - DNA, 1628 bp, Arabidopsis thaliana landsberg
gtaaaaaagttcaagtcgtggacgaagacaagctagaagagttcatcaatgaggttgtcattctttcacagatcaaccacaggaacatcgtgaaactcttgggatgttgccttgagacaaaagtccctgttctcgtctacgagtttattcctaatggtaaccttttcgaacatcttcatgatgagtttgatgaaaacattatggctacttggaatatacgtctccgcattgctatagatattgcaggagctctctcatacttgcactcgtctgcatcgtctccaatctatcacagagacgtcaagtctacaaacataatgttggatgagaaatatcgagccaaggtgtctgattttggaacgtcaagaacggtgacagtggatcatacccacttgacaacggtagtttcaggtacggtgggatatatggatccagagtactttcagtctagccaattcacagacaaaagtgatgtctatagcttcggggtcgtgctagtggagctaataactggagaaaagtcgatttctttcttgaggtctcaagaaaacaggacattggcaacttatttcattcttgcaatgaaagaaaacaaactcttcgatattatcgatgctcgaataagagatggttgcatgttgagtcaagtgactgcaacggcaaaagttgcaaggaagtgtctcaatctgaaagggagaaaacgaccaagcatgagagaagtgtcgatggagcttgatagtattcgtatgtcttgtggagatatgcaactgcaagaatgtgttagcgaaaacgaggaagaggaagaacaaaacaaaggacttgtggaagatatcatgagggcagaatcaaggagcaacgagtttgttaccgctccagcttctcactacaatattgctgctgcctcatcttcttcgtggtcagatgttgaaccattgtttcctcttcaaacacggtgaaacttcatcttggaacacgaccgtataatatcttgtctttgcttttatatttgttttcggtgttttgcaagtgtctgtaataaggaatcttgtttgtatccatttccaaacaaacaaacaaaaacatgaaaataattttatagtttggttattatgatatgttttacgcaataatacaatagtcacatagttatttcacatacaaacctcttaaatcgtattggttccacgaaactagcagaaggctttattgactattgaagatctgaagagtttatgaatcaaatcaggacaatatgagtcgaagaatctcccctgaaaacttaaacgatttctcagtctcttccaagcaatgactcttttcttctcttgtccaccactgcccattcaaatatccacattagctattagaatacacaaacgttaatcttctttgttcaatacagtagtgtaaagttcaatacctctgcaactttgttcagtttttgcctcacattttgcaacaactgagaaagttgaccgtcccatttatagaactcaagttctttattattgagtatcttcttagatacctgcataactcgtaaactttcagaaaatattccaacttccaaatgaatatagtacctaaagttgttttctttacctttgttccaatcatttggccaccgg

SEQ ID NO: 153136 - DNA, 672 bp, Arabidopsis thaliana landsberg
gagagagtgtagtagagagaggggttaagaaatggagaaaagagtagagaagagaaggatagtgttggttccacttccattactaggacatttcactccgatgatgcaactcggccaagcccttatcttgaagggattctcaattatagttcctcagggagaattcaatcgagtaaactcttcgcagaagttccctggttttcaatttatcaccataccagattctgaactcgaggcaaatggaccagtcgggtctctaacatagttcaacaaaattatggaggcaagcttcaaggactgtataaggcagttgttgaaacaacaaggcaatgatattgcatgtatcatctacgacgagttcatgtatttttgtggagccgtagctgaggagttgaagcttcccaatttcatcttcagtactcaaactgctacacataaagcttgctgcaatgttttaagcaaacttaatgccaagaagtacttgatcgacatggaaggtatacaaaaactagcttattacccattatgcttacactccttatgttcaacataattttgttttgactttgcagagcatgacgtgcaaaacaaggtcgtggaaactatgcatccattaagatacaaagacttaccaaatgcaacatttggagaacaagaaccttttttgaggtc

SEQ ID NO: 153137 - DNA, 623 bp, Arabidopsis thaliana landsberg
ccgcatgaaactgaaaccatttgtcatttgaaatcttcctattctttctttctcagttggaggacagtgatgcagtttttactcaatcgttttggggaagttctgctgcagaacaacaacaacaacatcaacaacagcaacaaggcatgagctcttatcaatcaaaccctccaattcaggaagcaggtttcttcaagcctctacaaggcaatgtagcattgcaaatgaggtatctacaaacaaatagtcaagacccttgaattattttacctaatcagaaatacttaacatttgtttgtgcttctttattgttttgatataattagcagtcattacaatcacaatcctgcaaatgcaaccaactctgcaacaacatcacagaatgttaatggattcttccctggatggatggtctgaaaacaatacatatctatatatgtacacatatgtgtgttttatagatcaaagatcattgcttgtgtcatttgatttttgccagagaaacatagttcattattacaaaactttgttatataatcaaggctctaatgtcaaacaccagattattacttttttgttctttgttttttggctctcttgaaatataaaatattgttttggga

SEQ ID NO: 153138 - DNA, 1036 bp, Arabidopsis thaliana landsberg
ctctcttcttgtttcacaagttagccgggataaacgcagttgtgtattactccacatcggtattccgtagtgcgggaatccaatcagatgttgcagccagtgctctcgttggagcatcaaatgtctttggttcgtttccccgttatgttctcattaaattccaaaaataaccaaaaaaataacacgataaaaatctggtcgcaggcactgctgttgcttcatcgttgatggataaaatgggaaggaaaagtcttttactgacaagctttggtggaatggtacatgtttttattaaaattcttagccatattcgaaaatctcaaccctcattagtattaccacaacaggactaacttggattttatggttttgtattgaaaaggctttgtcaatgctgttactctccttgtccttcacatggaaggctcttgctgcctattctggaacccttgccgttgttggaactgttctgtaagtcaatctcctcttaacacttccttatagtctctctgtataggacttgactgactcttatgctcggttgtttaaatcagatatgtcctgtcattctcacttggtgctggcccggtaccggctcttcttcttccagagatatttgcatcccgaatcagagcaaaagccgtcgctctttctctcggcatgcactgggtatatacatatatctataggttttatgggttcagaacagagtttcttctctctgtttctaatgttttgtttctcttttgccctaacagatatcaaactttgtgatcggactatacttcttaagcgttgtgactaaattcggaatcagcagtgtctacttgggttttgctggagtctgcgtccttgcggtcctctacattgcaggaaacgtcgtcgagactaaaggtcgatcactggaggaaatagagcttgctcttacatctggagcttgaaattaaacaaaagaaatcagcagaacaaaaaccagtttgtttcatcatttagtttgtgagtctttctctaatctgctactcttaaattgtacaat

SEQ ID NO: 153139 - DNA, 739 bp, Arabidopsis thaliana landsberg; identical to SEQ ID NO: 7367

SEQ ID NO: 153140 - DNA, 1389 bp, Arabidopsis thaliana landsberg
aacgacaagtgacattatcattactctcatcgagagcgttggtctctcttctccttcacctttgagtttctcgaggctcttttcttaattttactgctaaatagtagtgtttactgtcttcagccgccgtggccggattcaattatcgaaggcgacggaagcagtatcgtagttttcgtcggaggaacctccgtttgattgtcagcgctgccgtagtattcgacgatctcccatcgtcataaggattcctcctctttttgtcgtcagatcttggtgcttcttcttcggggctcagataggatattgtgattcatgtggactagtttttgaattagtctggagatttggctttttcgatcgattcgatctgtttctcgccatttgtgtttgcttcgattctatagatagattgacatagttttggtttggaattagagaactgtagctataagcaattgaagctttggattgatatcaatacaacttcaagcatctgattggtagattaatgcagagcatttctgaatagtcgtgatttgtttttgatattagtgtgtatttgctttactttgtaggcatttgttttctatatccgaagatgggaagcagtccagctccgtttgccgatattggcaagaaagccaaaggtaactcaacattgctttggtgttggtttctgtgattgttgtggttcccatttattgaatatttgtatttcaaaacctgcagatctcctaaacaaggattacatttttgaccacaagtttactctcacaatgctgagtgctacaggaacggtaagtgtgatataacttggatccttttacttgaatggagttaatccatcttataagaaaacataatttgcttatatgaaccgttgaagattacttgaatagactatgctcaacttaccagggaagtgcttatgaatactggtattacatgctttttgaatcccaagtggttgcagtagttcgtagaagcatgctctttgactgctttatacctatttaacttaatgttcttaaactgctttatacctatttaactttatactgcacaatgttattttctttcctacaggaatttgtggctactggtttgaagaaggatgatttcttttttggcgatataagcacactatataaaggtcaaaacaccattgttgatctgaaaatcgacagccactctagtgtaagcaaatttctctagtgattttttttgcaccttaactgtcctaaaccatattactgaacatatatatcttacgcaggtgtcgacgaaagtaactctcaaaaatctcttgccatccgctaaagctgtaattagtttcaaaatacctgatcacaagtctggcaaggtcagtgcatagcccatataaaaatg

SEQ ID NO: 153141 - DNA, 6161 bp, Arabidopsis thaliana landsberg
gaaaagctaataaggtagcagatgcactaagcaggacgagaaatgatgtgaatggaacaaaagaagtaggagagcttgtttcagccttatcgagtctcaatatctgtgaagcctctgttgacgatgaagtaatgggattgaaagcagtaaaccaagctgacttactatggagaattcgtgaggcacaaaaaggagatgctgacctaagaaaatcagtggaaagtgaagttgggggttatcacaccatagagaatggaacattcatttttcgaggtcgagtttgcgttccagatgataaggatctaaaagaggagatcttgaagcaagcgcaccagtcgcgttttgcaattcatccaggttccaccaagatgtacagggacttgaagaggtattatcactggactgaaatgaagcgggaagttgctagctgggtagccaagtgcacaacttgtcagttggtcaaaaactgaacatagagctccgagtggacttttacagggtctaccgttgccagaatggaaatgggatatggttactatggactttgttactggacttccaatgacagtaactaagcgggatgcaatttgggtaattgtggatcgacttacaaagtctgctcacttcctagcagtgaataaaaagggcaccactgaacgcttagcttagaagtatatggatgaggttgtgagacgacatggagtttctgtgagcattgtttcggatagggacccaaaattcacttcattgttttggaaagcatttcagaaatgcttggggaccaaagtgcagttgagtacagcttatcaccgtcagacggatggtcaatctgagcggacgattcagacattagaagatatgcttagagcttgtatgctagattggggcggtcgttgggaaaaatactttcctttggtggagttcgcttacaataacagttatcattcgagcataggcatgccaccgtttgaagctctttatggacgaccgtgccgtacaccgctttgttggacagaagtgggagagcgccgtgacattgagccagaaataattcaagagacaactgagcaagtggaactactcagaaatagattaaaagaagctcatgatcgttagaagagttatgcagacaaaagacgaaaagatttggagtttgaagtaggagacttggtgtatctaaaaatgagaatgttcaaaggactgaaccgttgggctaagagagcaaaacttaagcctagatacatgggaccttatcctatagtgaaaagaattggagttgtggcttaccgcctagaattgccagaagaactattagcattttacgatgtatttcacatatctgttcttagaaaagttgtcactgagccagagctaattatttcgcaaccaccagaggatcctcgagttagacttatcggtaaaaggaaaaccggtatcaattataagtcgtagagaagttggtactcgaggtaagaaagccaagttagtccaagtatgttgggaaagagaagggattcaagaaatatcttgggaatccgaaaaagaaatgagagaagattatccagagctctttaaagaagaaaatggttttcaacttggaacgttgaattcgaggacgaatcattttgaagtgggggagaattgtaacacccctattttacaattagaccatgaagcccaaatccagcccgccaacgatttgagccaaagtgaaaacctaatgatcccacgagattataaaaatgaaacacaagttgcgagtcacaccataaaaaccctacgccgtcaaacacgcaccactcagaccactagagatcgttgttgtgttgagccggagccaccgcgtaaatcatcctcactggagaggtaacgcacgagaatcgattctggttttgatctcttagtttctttaggattgtttttctttaggattgttgaaccaatctaactaagtgaatggaaccatcgtagatctgtgccactccgccgttccaaccgccaagcaaactgtaagggagactcgtcgagaaaagccaccgagaaaggtaatcgggaatcttctcgtgttgttatgtgattgtgttatttggttattaaaccatgatctaaattaaaccagttaaaaccaatgaatcgtttgtttagttagaagttacgtgaaattgtgtggtgaggaagaagaagttgacttcattcattagtttagttgttagagtaccggttaattgccaaaccggaagctatcattcacgtgaatgcatggatccaattgtggacgtagtgttacgtgtagtgaatgaatcaatatttaattactagatttggttggattattttattaaattaagtctagttaatttattgaaggatatatagtttgggttgattatgaaattaattatagattattaatggaaaataatctttgatcgattatttaaaccgtcgcagattgaaatcgttattagaccttttcttgttgctgttatttcgaaaccgtgttatccaaccgagttgctaaggtgagggcgggatctgtggaaacatagtatcacctttctacttttgtacttttgaagttcatttgtataggattagacattgggtgttgattgttaattattaggaattaattgttaaaacattataaaatgtgttgtgtgatgttatgtgttaggtgttagcgtgatatacatgttgatttgcttgacgtctttaagacgtatttttaaataaatatataaagataaataaaagagaataatgatattaaagaaaggataagattgaggatgttggactgtaatggaaccgacgggttcattacaggtcattaatcgctgacgagcaatgagaggaaggatcgagctacgggccgtggtcttccataaataggcttgaggagccataaattaacgtacgttaaaaactaagaaaagaaagtaaaagatcttgcggtgagcaagacggaagcttgtctgttatagcttactacgaaagtttaagctatttgcttgttgtttgagtctatgcttatgaaatggaaattgtgtgaaagtataatcgtgttattgtgattcggtggacagttttgactgccttcactgagtaattaattactcacccccttttcttttccctcaggtgaggaagagaatgttgagtagctgctcgcttggtgttatttcggggactttgggttttatttgatttatcgatatttcttatatttctaaacacggtttctttatacatttttatccaacgattttaatttatttatgctattattttgagacaatttatttctgattcttaataaaagaaagtttcccgaaattatgatattttatttcaagatttgatttgaagaagttgaataaatgaatggaaaagatgaaagtacgccgtctcaaggttgagagagacgggtattataaatggtataggagcagaggttaaagtcaagccggtgctgacccggaagactaactatatatgtatttatttttattaagaaaaaaggtttttctgataatatatatttttagaaagcggtttaaaaaaaaaaaaaaaaaaagttttcagtattgaaatggggaaggggatttaaaaaaaaaaacaaaaaaacaaaacaaaaacaaatgagctagacttgattttaaagtagttgtgtaaagtttcggttattgtaagggtcctaatgtttagttttgtgtaaaacagaaaatgccgccaagaagagcaggacgccccgcgaacgctcgggtaaaccgagtagcgaatgcaccagttgttgggcaagaccagccacctgtggtagctcaaccagctcaggcagctcaagcagatgaggcagctcaggcagctaatgcagctcatgcagcagagattgcagcgaatcgtaccgagatgcaggatctccgaaacatgatgcgtgagattttggaacgacctgtgtatgcaccgccaccgccaccagcacctggagttgctgcacctcagtaccatcagccaccgccgccgccaccagcacctagggttgaagtaccttagtaccatcagccaccagcgccgcttgcacggaccgagtattttgggacgatgaagcttatgagtaccatgggcacagagtatttcagtggtgggtttggttaggttcgcgctgatgattggaggcagatgttggagaagaatttcaggacagcgaggtgcccggaggaatttaagaaggatttttcagtgcattacctgaggggagaagcagatcattggtggaaaaattttgagaagggcttgcctgctggatatgtgcctacctggaaggatttcttaagggagttcaataataagtactttccgcgggaagctatggaacagttagatcatgagttcatggagcttcgtcagggcacgaggaccgttcgtgagtatgatgaggagttcagctgtttaaggatgttcactatgaagaattttggagagcaggatatgattcaaagattcatgaggggactaagggctgatattcgtactcgtacctccattcgagggtgcactagcctggttgagttagttgaggaggctgctaggttggagatagaacttgtggaggaagctatggctctcaagagggctcaagcaaatgtaacaaaaggagctgaatctcagaagcgcacttgggataatcgtggagcagtaccagtccaaaattgtcagcattaagccacatgtggtaagaggcacagcggagcttgttggagtaagagtgggaattgcttcagttgtggacaagctggtcatgtatggtcgaattgtccaggaaaagacaataattgtaggaggtgtggaaagccaggtcattttgcaagggaatgtagagtgaatttgactgggggacaaccaggaaatcagaacagaggggttatgccaccaccgcaaaagaggcaagcagtgggacctcgagtgtatgccatagcaggcgaggaggatgttgatgaggatggcgcagacccgattgttggtaagtcttcttaaaaatgtattaagttattttctttccatttctggatgagtactgcttgtgcttgttttgctgctcttgtcttgcttagtttaagaacctgtgtaggatcggttcttgttggaggagtcaaagcctacactatgtttgatagtggagctacacactgttttgtgagtcctgagttggccaagtgttgggattccagaattgagtattcggaaaagcgcagaaaagttgaaaccgcagggccaggattggtgaagtcatcacggacctatcgggatgtccctgtagagattgaaggtgtggagttgtttggaaatttcctagagatggagttgaaccgttatgagataatcctcgggatgggttggttgaagagacataatgctaatttggactgcccaaggttgcgggttaattttactcgagaagagggtaacttgatgtttcagggagtcgaaactcgtagcgggccgatcctttcgatgattcaagcagataatttacagtggactggccctgaagcttacttggcaacaatctcatgacgaaggagatacatgaacaaaattagaggatattcttgtagcagcagagtactcagatgtttttaaaccgctccaaggaccgccaccaagtagaggagatgctttcatcattgagttagagctagggactgctccagtatccaagacaccttaccgattagctccaacagaaatggctgaactgaagaagcagttagaggagcttacagacaaaggatttgtgaggccaagtagttcgttgtggggagcgcctgttctttttgtgaagaagaaagatggaactttcaggctttgtattgattaccgtggcttgaataaggtgactatcaagaacaaatatcctttaccgagaattgatgaattgttggaccaacttcagggagcatcttggttttcgaagatagatttggcatcaggttaccatcagattgctatctttgtggcagatgtgagtaaaacagctttcaggacacgttatgggcattatgagtttgttgtcatgtcgtttggattgacgaatgcccctgcatacttttatgaagcataatgaataacaaattccgggcagtttttggacgagtttg

SEQ ID NO: 153142 - DNA, 967 bp, Arabidopsis thaliana landsberg
ttctctttctctttctactttttttggttctgcgatttccatcaaaaccctttccccaacaatcttggttttgtacagagaagaagaagaagaaaggcacacaaaataacccatgtctggtttatacaataactcctcttacttctctcctgctcgagctgcttctcctcagattagaagcactcctgagatcgacaggtttgttcctaaactctgatttcgagacactcttttattttggttttatgtgaaaaccgatctgtgttctgtttcttgcttgaacagctctcagtacttgacggagcttctcgctgaacatcaaaagcttactccttttatgcaggtcctacccatatgtagccgtctattgaatcaaggttcctccttttcattctgattcggatcttaatttttcaactgtatataccctttctgttttcaccagattgggatgacttaaagtttctttcttttttgtcagccaattttcttacaaaaatgttcaattttagttcattcaattagtccatgagagtgagatcaagttcattgatttgattttttccaatttctcaaattgaatccagcattacctactttagtactacccttagtgtcaattgcataatatgaatctttgttggtgtgcagagatgttcagggtctctggaatgatgtctaaccaaggatttggagattttgatagacttcgacacagaagtcccagccctatggcttcttctaatcttatgtctaatgtctctaataccgggttaggtggctggaacggcctctctcaggaggtatcatcatcatcatctactgcttttttaactcaaccatcctcttatattcagtttcatcttagagtcagtcatttagtttagcttctgcctttcgcaatgctgattgatattacctgtgcttctgctaagcatgatgagatgagctaaaacattcagtttaa

SEQ ID NO: 153143 - DNA, 588 bp, Arabidopsis thaliana landsberg
acgttaactgccgacgttcgcgattacgacgccgtttcgaaagcgattgatgaatcttttaccgatcgatgtgttgattgttaatcaaggcgtgtttattgggaaagagcttgagaaacagagtcctgaggaggttaagtttatgattgatgtgaatctgactgggagcttcaatgtgattaaggcggctttacctgctatgaaagctagggaaggtcgtggtcctgcttccatttctcttgtgtcctctcaagctggtcaggttcgtatctctatcactcttaacgccgtatcatagattcatgactcgcagattagattaagaatttagagcagcttgcctacagtttggtaattgttgaaattgagtttgtaaaaatggaagcacttgtggaagtcgagagcactttgtgatgtatcgtgtgtttttacgttttcaggcaggtatatatggttacactgcatattcagcgagcaagtttgggcttcagggtttagcgcaagcattgcagcaagaagttatttctgatgacattcatgtgactctcttgtttcctcctgacactgatacacccgggtttgaacaag

SEQ ID NO: 153144 - DNA, 916 bp, Arabidopsis thaliana landsberg
ctctctcttggcgcgagttctaccatggccgaatcagatcctatattgaggaagaagatgcgattttcgtcttcttcagttcgttatactacctctcagaaccttatggcaagcaaattacgaactcagagcaatcgttcctccgttcgatttgcatccccattgtctcacattgtcacggatcttcgtcaccatcatgcgtcaccgatcaaagggaaaattgttactcaaatgccccgaacttgttctcgtgtcaccgtgaagaatctgtgtctcagacgcgtattctctcctagttccatctctagtgattgggactttcatgtgaaagggggaaatctaaccaaggagctaaatgtggaatctccttgcgatactccgaattctaatggtaattcttattttaagctctttttcttctacaagtttttctaagaaaatttaggagaatgttgatataatgaaggtggaattaggaaatttcaatatctgtttagaaactataatgattacacaatggtgaaaacagttatgagagaaggaagcaaatatcttgttgatggattagtggctactggaggtgatttagaagtagtggaatgctcacaaacgacgccaccggattcaggaatgttcaccggtgagctttctttggtgaaaaatgaagcaggttctatcaatcaagagatcagtgaggtctctgggaagaaagttggtaccaatctcggcagcaaagtggtatgttttttactcatggttttataacaaatgatgcgtttaaactagaacattggctgctcggtggcttgattaagtccgcctcctgtgatatgaactcacagaatcgtcatacagtaaagattttcaagaaccctggctctgtgagctatagaacaatgcatccttacgttgatgg

SEQ ID NO: 153145 - DNA, 2021 bp, Arabidopsis thaliana landsberg; identical to SEQ ID NO: 30732

SEQ ID NO: 153146 - DNA, 786 bp, Arabidopsis thaliana landsberg; identical to SEQ ID NO: 25876

SEQ ID NO: 153147 - DNA, 983 bp, Arabidopsis thaliana landsberg
tgttgcgttgaaacttacctatcaatattgtttaatgcatttttaattattatttcatttattggaaattagaatgttcttaaatgtgcatgcaacacctggacgaggaatagacgattaagaatgtttaatgactttttacttattagatagaggatgtgataaagtttatgagtttttagattctttaatccttcgtgtcactgttatcaatgactatattattctctctctctctcttgtttaaatttgttgtaacagccagaccgtccggacgagctagaccggattcaagcagcgggtggtcgtgttatctactgggatggcccacgtgtccttggagtacttgcaatgtcacgagccattggtcagttaattgattacacttgacgaaaacactctgtccctatcctaatgtttgtacaaagtttttccgtactttcaataatgatgattattaactctcgtttcgccgcggatttttttcgttttttttttcaggagataattacttgaagccgtatgtaatcagcagaccggaggtaaccgtgacggaccgggccaacggagacgatttcctcattctcgcaagtgacggtctttgggacgttatttcaaacgaaactgcatgtagcgtcgttcgaatgtgtttgagaggaaaagtcaatggtcaagtatcatcatcaccggaaagggaaatgacaggtgtcggcgccgggaatgtggtggttggaggagcagatttgccagataaagcgtgtgaggaggcgtcgctgttgctgacgaggcttgcgttggctagacaaagttcggacaacgtaagtgttgtggtggttgatctaagacgagacacgtaattgtatttgtctctctcgtaatgtttgttgttttttgtcctgagtcatcgacttttgggctttttcttttaacctttttttgctcttcggtgtaagacaacgaagggtttttaatttagcttgact

SEQ ID NO: 153148 - DNA, 1546 bp, Arabidopsis thaliana landsberg
  unsure (1)..(1546): unsure at all n locations
ctgatcctgccgtttctgctgatctactttttcttcgcatatcttatatacaaaaatcaggtacgtccatatttgctctgatctcttttgcatagacctcattttgtagttgccaataagcactttaagaaattgtgacatagacacctatatccatgatcattgactactagttagctgttatgccttgatattcaaatgtttttggacttctcacaatttgatatgaaacctgattcagaagcatgaaagagtattattttattttcttgaaagatttgtaactaaattccaagaactctgtgctgaaacattgtcgtcgagaccttgcattatgttaccagctttctcatgatctatctgaagctttaccatataactttgagaactgcataagctgttgtctgactgtccctgcattcgtcgagtgcttgcttctggaaatatgattaatgtatttgtgctaatagtggtgccataggtagacaagtctgtgggtttgaagtacaatcatgtggatctgacttagttttttttttttttttttttttgcagataatcaacgtctatattacaaagtatgaaagcggtggacaatattggcctgtttttcacaacacgacaatcttttcactgatcttgtcgcaaattatagctctaggctttctcggtttaaagctatcaacggttgcttcaggttataaccatcccgttaattcttctcactcttctatttagtgagtattgccggaaacggtttgcgcccatattccagaaatatccagccgaggtatatatataaattactcatcttttcataacctcgatttgcatctcctgagagatattgacgtatgagtttctttcagattcttatcgctatggacagagcagatgagatgacaggaaagatggaagagatacataacaacttgaaagttgcatactctcagataccaacgtgttctgaggaatcgagcaaagctggttgcacttctccttgctcagatcaggagttaccagattctgaagagttgaagcctgagaaagagaatcttaaagctgattacatatgggagttccagagaagtagatctggtcttgatcttgaggtgaaatcctgtcccagtgcttcaccaacttgttattccccaggnnnnnnnnnnnnnnnnnnncgaacatagatacttgagttacaatgtatactttacaactctgcagatgaaaaggtgtttttgcagtttgagttacaattttagtagttgaaacccttatgggtgatgaaagtaagaagtggggaaagccattgaaacgtatatacagttttgcctcctaaaatgaaatgtaaatttggagttactgcaggaggaaatgaaactatccttggaaacacttgtctacatgtacaatagacgattcttttctttgtcatagttttgtgaaagacattgactttacgaaatagaaatgagcaaaagagctttctgtttctatctcatatatatgtttatagtgttcttcatgcattgtcgtatacacagcttaa

SEQ ID NO: 153149 - DNA, 886 bp, Arabidopsis thaliana landsberg
atgctaaaatttcacggcggttcgtctttaacagatttgagaagatagatgttgtgactgctgcaatgggccatgcattagccacagaaggtggattttgcactgggaatgcccgcatcatcgattaccaggtaaacatcgatcatgctgattaactaattacaaacaaaattaaaaaactaccgataatagaaacttttctctgggacgctcaaatgcacagagacttagcagttcaggatatgtgttctctgcttctttgccaccataccttgcaagtgctgctatcaccgccattgatgtcattgatcaaaaccctgatatgttagttaagctgaagcaaaatgttgctctgttatggaaaggtttgatcttcaagttttaatctaatctagcaacaattagagtttgatttagtttgttatcttcctctaattgaaaaagaaatgctgggaacaacgcaggattgtcagatatcaaggggatgtcattaacaagcaaccgggaatcacctattgttttcttaaaattagagaaatctagcggttcagctaaagatgatttgcttctacttgagaaaatggctgaccgtgtaagttcattgtttctttgcaaaaccaaatctagaccctgtccccgtttcttgacatgactagatgcatgcaggctctgaaggaagactcattgttggttgtgagttctaaaagatcatttcttgataaatgccggttacctgtgggaatcaaactctacgtctcagcgggacattcggaatccgatcttcttaaagcgtcggagtcactgaagagacttgcttcagagcttctactcaagtcctgaaacaccgaaactcttttttcttcaagaacaacaacactgaagggaa

SEQ ID NO: 153150 - DNA, 2444 bp, Arabidopsis thaliana landsberg
  unsure (1)..(2444): unsure at all n locations
atttctgaatattaagacatggaaggttgaatttacaggttctttcggattctgttaaaagaagagattatgatgagctgttaaagaaggaagaatctcggaccaagattgtctgtcagtcctcgcacgcctcttctcatcaggttagtagatataatgtgtgagattttgaatgcgtcatgtgttgctctattgttttcttataaaaggtgatgaacagattttctaatttcttcagaatagtgctgcttatcgatcagaagagtcaaggcgcatacactgtacaaaatgcgggaattcacacatttgggtatgtaccaacaggagtaaggcaaaggccagatggtgtcaggttagctaacttacacttctcattaccaaacatattgacttcaagttccttcgcagaacatctaatttgttaaatggttattgcttccattaaaattataggagtgtggtcaatatcatcaagccaaagatggtgacggatgggttgaacacaaagggactctggtattcgagaaagcacataaggtttggctttcagttctttggtccgaattttgctttttggtaatgatgaataattattgtatatatcatctcttgtagattgaaataccacgagcttttgtttgcgctgagggaaaagtctttgatgtctcagaatgggctatttgtcaggttggtatcttctcattcttaaccagtagtaaccaatgctataactctctgttcataattagctagactaatatggctcaaaaatcgaaagtttttttcgcacttagagaatatttaagataacgtctaagacttttgtgttagtgcatgtgaacatgatgatatattgatatgtatacttcaaatccattgaagggaatggcgtgtagaccaaatacacataggccaagcttccatgtgaacatggtcggtttagggaaggcaactcagagatcaaagtcgagcaggttcccgtgggatcttgatgtggagatgatggacgaggatgaggaagagtttgagttatggcttcaacaagctctagcttccggtctattctgtgaaacatcaaaacgcagaaanagctggagtcctttcaagttaaccaagaaacaatcccgaagaacatcgacttgaccaaaagaagacatcaacaaggatggcaagatcaacaacaatggctgaatggcttgttctttccaacaatggaaaatgggcgaagataagaacgaagagcataaaaaggaaacaatctttaaggtgataatgaagaagtaaaggacatgggagcttgaaaccatatgttgattgatcacttgttggatcccttctctgtaaatagaatccgtggatcctgtgtactgtgatgttgttatggtttttctctgagaaaccctaaactatgtaatgtgaaagctacaaagaagaccagttaaccagaaatctaaaggttaagtttattacaagcaaaatttctggagaaacattttagttagatccatgacccaagctcgtggtaatgcttgaaatttgatgttcttatgttttgttgttgcattgttctcatacattaaccaaagcttattaccaaatattttccctcctcgattcaactgtttgtcctcgtctgttaatcgagtattagtgaaactcgacatccattacttcaattgtcgagactagagaggaattttcaattcgctttcggacatttataaagcttctctcttccttgaatttcaacgtttctgggtaagctcgaaaaagagaacagaccccgatttttgattagccggtacgattcgtccggaggaatagaaaactcgccttgtaagtatatcacatctcattcgctttccccccgatattacactgaaattgttacacatttaccagtttagggttctgggattttgaatctgcgcgatttctgttgtttctttccatttgcagattttactttcttcctgtctcataggagcaaagcgttgatgaggtctttcgtactcaaaatagctatatagatattgtttagtagagaggaggaagatagtgaaatgagtaggctatcttttcgaccccgtccactggacatacacaagaagcttccaattttaaagtcttttaaagactttgaagacgaagataatccttcttccattactagaaactctcagttgctacgtatatctgccgtagaggttgttgacaatgaggtgaagttttttttttttttctcggtgtatcggtttggatgtgaagttgtagagtgatgattaaaagtttcttgtattcacattatcaggtgcagcctccagtgcctagtaagaaactgatttcggaaatcccaacacctcagtatcttgttgttgatacatatgaaagagactactctaggacttttaatcagcctgcttcatatttacgcgctagaggag

SEQ ID NO: 153151 - DNA, 896 bp, Arabidopsis thaliana landsberg
atccggtaaaacaatgtctgatcttttccccggcgacttcgcaggtaaaatctctctctgtctcgttttcttctccatttggtaattcatttaagtttttttttttttccttttgatggcagcggctgagacaggcatcttctgggacatagaagattgcaagatccctgatgatctcaatgctggtgatgctttgaagaacattaaatcggccctttcgagtgatggtcatcatggtacggtctcagtaagggcttatggtgatacgaccggtcttgactttccttctgagggcattaagctcaatcacttccccgcaggtaatgtgtaatgtgtaatcttactgattttgtgtatcatgatgatcagatatatcctctatatttttgtgtgtttgttttcaggagagagatacgcgagacagaccaagatgcttgaagacatcgtttcctggtcagctgaacatcctgaaccgtcaactttgttcctaatcgttggagacacctcacgagacttcctcgacgttgttcaacttttgaaatccaagaaaaattacaactttatcatatacaactttattttatatgtgtattatttaccaaagaacaaacactcgtagttagctccaaatccatccattttacgaatccaacgaagaagaagctgctaacgagaattaatgaattatagacgggaagattaataatgaaaagagagagagagcttatgaacaatgtgaaggagttggttgtatttatatacacaattcaaaaaaggtagtggattttgttaggacacatagaatatttggttactagtctttatctaatatcgttttgaaacatatgatatcattctagttttttttttgcatgcattagggtattgtatcatct

SEQ ID NO: 153152 - DNA, 1161 bp, Arabidopsis thaliana landsberg; identical to SEQ ID NO: 60480

SEQ ID NO: 153153 - DNA, 437 bp, Arabidopsis thaliana landsberg
ccttgtgagataacaacgaagaacgattgagagagagagagagagagatatgatggacggcgttgaaggcggcacggcgatgtacggtggtctcgagacggtgcaatacgtacggacgcatcatcaacatctgtgcagagaaaaccagtgtacctctgctcttgtcaaacacatcaaagctcctcttcatctcgtaagcttctccaatctaccactaatttcacccttttcgtaccattttctccatgatccgtcaattttgatcccaaccatcgatttagggttttttcccccaaatctctgtttaacgattgattataattgattttttttaggtttggtcacttgtacggagatttgatcagtcgcacaaatacaaaccgtttgtgagcatatgtacagtaattggtgatcctgaaatctgcagtcttatataa

SEQ ID NO: 153154 - DNA, 841 bp, Arabidopsis thaliana landsberg; identical to SEQ ID NO: 14318

SEQ ID NO: 153155 - DNA, 857 bp, Arabidopsis thaliana landsberg
  unsure (1)..(857): unsure at all n locations
gagcttgtcatggcggcgccagacaatccatcaaacgccgtggaatgggccatggtttagatggtgaacaaaccggagattctccgtaaagcaatggaagagatcgacagagtcgtcgggaaagagagactcgttcaagaatccgacatcccaaaactaaactacgtcaaagctatcctccgcgaagctttccgtctccatcccgtcgccgccttcaacctcccccannnnnnnnnnnnnnnnnnnnnnnnnnnnnnnnatcacatccctaaaggaagtcaagtccttcttagccgatatgggctgggccgtaaccctaaagtttgggccgacccactctgctttaaaccggagagacatctcaacgaatgctccgaagttactttgaccgagaacgatctccggtttatctcgttcagtaccgggaaaagaggttgtgcggctccggcgctaggaacggcgttgaccacgatgatgctcgcgagacttcttcaaggtttcacttggaagctacctgagaatgagacacgtgtcgagctgatggagtctagtcacgatatgtttctggctaaaccgttggttatggtcggtgagcttagattgccggagcatctctacccgacggtgaagtgagatgagacgacgccgtatatattttatgaaactacttttatataatcgcccaaccaagtttggtcaattccggttaccagaagataattggtcaaattgtgaacaaacttgtgtgttggtcttggttctttttgggacacttgaattgtgtctccttttacctcttcttttgttgttttcaataaaaacttttattaccatttcaataaaaagattatcaaatt

SEQ ID NO: 153156 - DNA, 658 bp, Arabidopsis thaliana landsberg; identical to SEQ ID NO: 5270
  unsure (1)..(658): unsure at all n locations

SEQ ID NO: 153157 - DNA, 613 bp, Arabidopsis thaliana landsberg
caagctcagcttggaattggatctgtggtcctcgagtttgttcagagcttgaaaccttatggtgctttcattgacattggtggaatcaatgggcttcttcatgtcagtcagataagtcatgcccgtgtctcagatatcgcaactgttcttcagcctggggacactttgaaggtatactcttaaacgttttatttcagatgttaaaacaacagtccctaacttttaatgtacaggttatgatattgagtcacgaccgtgacagaggaagagtaagtctctccacaaagaagctggagccaacacctggtgatatgattcgtaacccaaaacttgtgttcgagaaggtaactctatttccattcaaaaaaactttccctattttcttttatgtctcaatcatttgctactttctgctgtctcaaggctgaggagatggctcagacattcagacagagaattgcgcaagcagaagccatggctcgtgcagacatgcttcgcttccaacctgaggtatcattctccacttgcctgatctcgtttatccatgcttattgatttcttattgcaatcaagttccaaaagtgtacatgtttagtaaccatctaagattttt

SEQ ID NO: 153158 - DNA, 1307 bp, Arabidopsis thaliana landsberg; identical to SEQ ID NO: 56556
  unsure (1)..(1307): unsure at all n locations

SEQ ID NO: 153159 - DNA, 1462 bp, Arabidopsis thaliana landsberg
  unsure (1)..(1462): unsure at all n locations
gtctacgcatgtggtagctccatccggaatctgcgaagatcctcctggatattcggcaggtcagttcggagatatcaggtccgctccgcgaatatctccttatcagttcctaggttgttattcgcttatctcccttcatcaggtgaccgagcttatcaggcccaagtactcattcgcgtatgtgggctcatcaactgcgtaggtcctctacttggtgggcttattgggcttttgtgggctggcctggtattttcgcaggtggattcctggaggggaatccagctccaacatttgcccccagctcattgagtgagtacgggaactcgatgagcggacatataggtcaggtaagattgcgaaagtattcttgatgagatgatagatgtgataagatcagttggttttgaggataaactcaacaaaaacgatttaatttcagattccagaaccgaaagattttgaggagatacgcgagataagttgctgctgatgtggacgactgagatggagtgtctcttcagcgcatcgcatttgacagtccaaatctcgaaaatcgtggtgatgatggctttaaataacttcccacctctccacttgacgtcacgacaactcaagcgactctcaaggtaaattctctcctcctttattatttactgcgctttgttttgtagaagtagaaaaatctcgcctttattttttttgctatctccttcgtttctctgctattccctctttctcgatctgccttcatcgctcttttctttcatctctctcgtccttctccgtcgaaacccaaagatgagcgacttcgaagattctcagaacaaaagcaaccacagttacggcgacgattcaagttcgtccgagacgaggtcggcggcgtcaccgccggagtacaaagacgcggcataaccctaggcggaatgggtccaattcgtctgccgtcaatcagagccgacaaaccgaagaagaaaaaggctgccaagcaagggagaggcacgtagatgacgaatgacgacctggtcgacctccggaggagatgccaggtttcggtggaggtacatatgatactcccaaggccgccgctgcatcctgagaacgtgccggtcgggtggtgctgcgcttatgccaatttcttcgagaaatgcggcctattttttccaattccggcgtgtatcctcaagatgctctactgtcttggcctcgcctttcccagatgtgtccgaacttcgtccgccgtgtgctggcgttattcacccaggctcgaaaataaatagagaattcagctgccaagnnnnnnnnnnnnnnnnnnnnnnnaagaccaatgctaggagtgaccaagggacgtactacatcagtgcacgtcccggatctctggtccttggcggtttgaaagcctgtcgagaaaccaatgggcgatccaagtacttctttttcagagtagatcgtcattcaggtggca

SEQ ID NO: 153160 - DNA, 1009 bp, Arabidopsis thaliana landsberg
  unsure (1)..(1009): unsure at all n locations
gtaggaaaagaaagagaggagaagaacacaactcagaccttaaggagactggtatgtcttagccagcatctatctagactgatatctttgtttggtacccaaattttaatcatataattggttataatttgtagatgagagttgcaatggtcaaatggccgagatcaatgatacaagcagtatctnnnnnnnnnnnnnnnnnnnnnnnnnnnnnnnntggataaatttgcctactggttcgaaatcttttcagtatacttaagctaagatttatctctttgaaacatttcagatagtatatgctagacaatttttttttttttttttttttatcgtgttgatctatccagagacatccattgatcatagcccgattgtggtgaataatgctgctattgccaccgatgttgaggaaagacaagcaaatgatacactaatgattttaccttttgcaaagaagtcaccgttttggaagatgtatgagacacaggaggtatgcaaaatagcaccacagagtccacatttcagcccgctgttcgaggctaaagaagaactccgcgaatggacagccgttggtatgatggtgagtttctatggtttattagaggaagtaaaaaacctgcaactcgatgtttccccaagcactctaggtagcctcagttgttcttttgccgagctagagaagcacggttttgacgttgcagcccctcagtcacgaatcaacaaaatgctgtctctccaagatgagcgagcaaagaaagcagaggaaagaaaaggtcttgagaagaagattgaagcaggagagatagaagggcacacgtatgaagaagaaatggctgagttagaactcaaaattctggagctgaagagacaacaagtggttgcgaaagagatgaaggaagctacagacaaagtgacaagtggaatgaaatcatatgcagaaatgattaatcaagagatagaagatttgaggcttgagtttcagtcaactgcttctgctccatggtaa

SEQ ID NO: 153161 - DNA, 728 bp, Arabidopsis thaliana landsberg
atgaccacatggtaggttatgtcaattagaccccacaacttctcatctcaccttctttgtccccaacctcctccacttttatcaattctgtccctctctcactagatttcgaatctcatgtgtggggtcaatgttgctttctatttaaagctaagaataactatatctaatggattacttttcttccacacatatataacttaactctctctttttctcttttgctttaaccccctcaaagaaaagataagagccttttaaagtttttttgttaccttctcttcatggacttgtctgtacttgataggcttaagtggctgcaacagcaacaaatggtttcacctgagtttcttcagatacttggctcagatgggagagaagagctcaaaagagttgagagttacttgggaaacaacaatgatgagctgcagagtttcagacattttcccgaattcggaccggattatgatactactgatggctgcatttctaggacaagtagcttccatatggagccagtgaagaataatggacacagcagagccattaccttgcagaacaagagaaaaccagaggtttgtagctcaagaaagtattgagtattagagtttagattttgtttgaaacattgtttctgatcgttttaactattggttttagggtaagacagaaaagagagagaagaagatgatcatcgcataggatgaatcatagcccggcatgaaagg

SEQ ID NO: 153162 - DNA, 1081 bp, Arabidopsis thaliana landsberg; identical to SEQ ID NO: 52242

SEQ ID NO: 153163 - DNA, 630 bp, Arabidopsis thaliana landsberg
cagttgatcgcggagtttcttggaacctactttttggtattcaccggttgtgcatcggtggttgtaaacatgcaaaacgacaatgtcgtgactcttccagggatcgctatcgtttggggactcaccattatggtcctcatttactctcttggtcacatctctggtgctcatatcaatccggccgttaccattgccttcgcctcttgtggccgtttccctctcaaacaggtccttaacacatacacaattacatatagcctttatataatgatcgatcaagttttgtattttatgtgtgtttttgagtttcatgaacaaaccaattaaagaacattagtgtattttgtttccattgatctagtttagctatcggttgcttgtattgcacacgagactttgggttattcaaatacgtagcgtttttaatgcaacgtttactatagatgagtgaagatacgtaaggataaatctacttttgctagtttccaaattaaattaaaatgttatgtaacttttgtatgtatatagtttttccacacgtccatattttgttatataaacgtcaaaatatcttccaagattgggtcccttccctagttaatgtgaactggtgaatttaaatttaacttt

SEQ ID NO: 153164 - DNA, 2398 bp, Arabidopsis thaliana landsberg
tgggttagaaggagaaaaacgaatgatagcttttacaaaaagaggaacaaggatacattcagtaagttgcttgcttgtccttccacctctagtttattgtttaccaaccagaaatagcaacaatcactagcaattgggtagctgaaaacaatggttacaacttgatgcaggatttttcttaccgatcaggcgattacctcttgttcgggtcagagacaagcggtctacctcctgaagcgctgtcagactgcaatcacgaaccatatggaggggggaccctacgtattcccatggtagaaacgtatgtgagatgtctgaatctttcggtgagtgtagggattgctctgtatgaagcgtccagacaacttaactatgagcaaatcgagtgtgcacctcaaggctgtgtgaatggtgaagaaccattgttgacagaggatatctttgcttgatacattggatggttgcaaaaaggaagacggagacgtagaggcatagccattggtggttggtaagcattcatattcatcttgaaggagtcactaccctaaaccctattgtatctgtatcccaattctctccttcagagtttattttctctttgagaacaagctaaaagcttaatttttttcctatctctgtgtaaacaaaacatcacaatggattcttcgatgtcaagaagaaaaccaaattttctgtgagaagaaaccaaacttgtctatgagagaagatacaatgtttaagaaagccctcgagctttcaactctgtgcgatatcgaagtctgtgtcatactttatagtcgtgacggagaactcatcaagacatggccggaggatcaatccaaggttcgagacatggcagagaggtttagcaaactacacgagagagagagcgacgcaagaaaagaaccaacctttctctgtttctacgtaagaagatcctcgacaacagtaagctctcggagaaagtcttagagatgaaggattcattagaaagtggtctacgggtactacaagataagcttctgttactacaacccgagaaaaaccagaccgagttaggtcagatccccgtcatcaacaatggacagaaccattggtgaatatcggtgtgtcaaacacagagcaagacctatcgacgtcaccattgagtcaacatcagagcaaattttcagtctttctctataaccatgacaactgtagcttctatcaagtccgtgcctctgtttctacttcagatatcagattatatgaggttaattgtctgatgaagagtttgtgttgaattgtatgtttttcctaagtatgaatgctatcttctcaatcctatttttgtctgagtacgaactaagaatatatatacatttcattacatagtttaatagtcaaattacccatcatctaatccagtagaaaggaatataaaacagaaaattatgccaacaagttactagtctgttatgaagtgtgatcgaacacatagcaacagtgaaagtaatacgcgaatatgttgatgaaattacaagcacaaaatgagaaacaactttgttttttttactttgttctgatgtcttattatgatatttggctttggttatataccaaaataataaaattcaaccaccaataaattaccctaatcataaaaaaaaagttacagaataactttcttcttgaaggaagaaaaagatcaaagagaatcaagaatggtagtgttgtttaaatggagacaacaacagatgacagaaggtcaacgtggcttatgtgtgttctcagtcttcttgtttgtcatagccaaaggctagctcgaaaatctgctcatattcatccacgaaatgaacttcgagcccttctttcacgtttctcgccagcttatcaaagtctttccggattgcctgtggaaatattattgttataatctgactccgcctcgccgctatagttttctctttcacctgtaacatttttgtgtacattgtcaaaaaaggaaaaaaaaagagaggctctaatagaatagagtgagagaagtccggagttacttaccccaccaataggaagaattcttccggttagtgtgacttctccagtcattgcaaggtccttcctaacgggtttcttcgtggcaagtgatagtaaagatgtgatcatggtgcagcctgcacttggaccatccttgggagtggctcctgcaggaacatggagatgaagcttggagtttgcaaagaactgattctctggttctttctctagcatgatctttctggcgactgtgtgagcaatttgtgcactttctttcatcacatcaccgagctgacccgttatattcaggccacctttaccttccccttcctccacaacagtcgtctctatgtacaatgttgaaccacccattgatgtccaa

SEQ ID NO: 153165 - DNA, 1655 bp, Arabidopsis thaliana landsberg
  unsure (1)..(1655): unsure at all n locations
ctgacagaatcgagatttttatacttattgaatagatagctgagtcggctggaccggaatgtgaaactgcgctacaagagactaataaactcttggaactagggcttaaagtgaataacagggctgttaaagctctcttcaatgccacggaggtctagcttnactgtttctgttttcttttgtttgaatcttaaggaagtaagaagtctatctccaatctgattaagtttctgaaatctgtagcttgatgttgatgctgatttcttatacttaatagcggatgcaggagttatggcggtaagcaggttcatttcatatttataaaattttcattttctttctagttttagatgtttatctggcagattcaatacggaaacccagataaactatgtgtaccactcgtggaagctcaaaagaatggtggtgatttagtggtaagttctttgtttttttagatcgctctttacttatgcttggtgtatatatattgacattcatcatatggtttgcaaacagaagaattgtatttggtgatacataacattggatgtgttaatgcaggaagcatatgctaaatatgttagagagttttgcatgggagttttcgggctaagctctaaaacatatagccggaaacatctactagacactgcggtcaccctagagagtgcagataggctttggtggttccaagtttgtactgaagtggcttatttccaggtggcacctgcaaacgatagcatccggtctcatcagatcaatacagagtatgcacagacccaagcttatatatcatattcagaattctgattttgtcgtttctatttattgtcccatttacacttcttttcatttgataggtatcatttggatctatgcaagagcctctttgggaaaggtgtctaccctgaagtcgatgcaacaaacttgtactatggaagcgataaaattgctggtatgtaatatcggaaaacttctcgacgatccttttagacttgtgcacattccaacagtttcttcgcatcttcttattctcaattttgtagcgaccaagattatcttcacaaatgggtcacaggatccatggcgtcatgcatccaaacaaacctcatctcctgaccgtaagtcttcatttagtttgatcaaaatcgcatagcaataactcaggcatagcctatgtcgttatgtagcagtattcagacaaatcctttgtctgggacactaaaaagataatgtttgatgacacagtgccttcgtacatcatgacttgtcacaactgtgggcatggaagtgatcttcgaggatgcccccaatctgcaatggtcattgaaggtatattaccggcttcttctctgtttccgatgcctgaagtcaatgacaagcatcagaacaactgttaagaaaatatgatgtcccattcttttcctgtttttttcctcccatttgcaggtgatgcccagaattgcagttcaccagatgcagtgaacaaagtgaggcaacatatgataaaacacatcgacttgtggctctctgagtgtcgtggataggttaggtcgtgcagagattaggagttccatgcagagtcacacgaactgcgttctgcaaataaataaaacatcagatgtacgctccaaacttatatctgtgtaact

SEQ ID NO: 153166 - DNA, 1067 bp, Arabidopsis thaliana landsberg
accagctagaaaaatccaaagaagcagttttccagtatatggctttacttgagaaactgcaggttatatctggtttgcgattttcattttgtatctatgtttataaaatttacgttgtatatttagttgtgaagctttcctccattcgaaaatttcaggttgaaaaagatagtatagtctggaaggaaagggagataaatataaaaaatgaactaggtgatgtttctcgaaagacgtctgctgttactgattctagaatggcttctttggattcggagatacagaaacaactggatgaaaaaatgcgaatcaagactaggctgggaaatatatcaagagagcgaggtcacaaattgattactttgacttccaattctgtatctcccacccacacctgtttcactttggagtctgattaagttattcgtatgtcaggtagaaaagaaatctttgcagatatgaatgcgttaattatttcgctccccgaggaaatgagttccatgcgtagtcaattaaacaattataaagagactgctggaggtattcattctctgcgggctgatgtccagtccctctctggggttctatgtaggaaggtgggaaataatgtgaacagtgattgatgcttattgttacagtttatgttatgcttacttaataagcttaattggtgaacagacaaaagagtatgaagcattgcaattgagatcagctgattatgcttctcagttaggtgacctgaatgctacggtatgatgcaatgtatctacctttttcagtgtactgcccatgacttatatatgttgacagtgttcatattggttattgttactttgcattatttcttggaaaaagtatagtgaaaaggcggattagcaatttaaatcttgttaaatgtctttggttggcaaagtggtagttgttatgttctttactttcaattgattggagtctgtcatgcaggtttgtgatttgaagaacagtcatgaggagttaaagttgtttctggacatgtataaacgtgagtccactgatgcgaggtaagcacaactatatataacgatatc

SEQ ID NO: 153167 - DNA, 1497 bp, Arabidopsis thaliana landsberg
atgaggcaaaggaacggagtaggcttgcggctaccaccaaaggtaccacctagatggtcgagctccatagctttgtccaccaatgtctccgccgtgagaccaaagcactgctccttccaaaaggtgtgctgataaatcttcgttcgcacaatcttctctaccagattctgcggattcgttcctcttatattctttgccaacggatctgttctgtttgccattatcgcctgaagttaatcagaaactgcctcaaaggcctagtcgtcggaataataaacgtcgagcgacgccgcttcagtgaagccggaatcgatgaaacagcttccacgaatttgccgtcgtcgaagacgaagacactctaggtctttgaagaatctgagaagttaattcatttattttattttattaatgattgctttcggtggtaaagcccacagtaagaaaatattaatgggcggataatatttgttgggcccattagagattgatataacgccgttattggaagtccgttaagaccgttagttacatcaagcaaaaaccctatcgaagaaattgcagtgtttatttcagcgaagagccccaaagagaagaacaaaatttcgaaaatagagaaaagagaagaagcagacgatggattcaaagacgaagcagatgattctttcagctctctgcaaacatttctccttggatcctgtaagtattgaagaagatgacatctcaaaagcttctgcttttttgtgaggttttgcttggtagctgagtatgtgtatgatcattttttgaattagttagtggagaaaactcgaacattatctgattgggtactgaaatcaattagaaagtttatgttttggacttatcagtgtttacgcttatgcatcaagctggtcatgaaaaaggaaaaaactttagaaattgggcttttatgattttacattgtgatgatttattggttctgtttctgaaattgatttgattcatttgtttaggaaccttttgtgggcggagcaggtgatagtgatatcaagacactttattctaatgtattgaaggcatctggaaaggaagtatctgcacaaaacaacgatgtaagtcgtttcttcttgaatttggttcctatagacataaacgccaaactcttaatgggaatttattgagttcccttctcgttgctaccacgttagagaaaaaatgaattagtatgtttgagttctgtgtaatactaaatgatgaggattcgttggctttcgtttgcataatgcgtcattgtttcacattttaaagagtaaaaacctatttcaggttttgaagtggctagattttgcggaaggtttctcttcagattcaaaggattggtttgcagctcttgaaaagttgaatttagagttagctaccaagtcagtgctcttgggaaacggattgacgccattggcagctgatgttgctgtgttttcagctctgcattctttagtggtaccacttctctatattccg

SEQ ID NO: 153168 - DNA, 1248 bp, Arabidopsis thaliana landsberg
  unsure (1)..(1248): unsure at all n locations
aaaactcaggttgcaccaatatcttcatttagcagtcttatactcactaccttgcattatagacctgacaaaggtttacttaatttaaaattttctgtatctccttttatgcttcatatgagatgctcatctcatcgtctaacaaacttccctctaattttttttttttttttnnnnnnnnnnnnnnnnnnnnnnnnnnnnngcgagttgtagaggttccagctgttatacacttaaatagaccctttcgggtaagacaactgtttttttctctctaatgtttggatacccaaagatttaattgaacttacacgggcttcaaactgagtgtaaactgttttccataggcatacttgaatctcacaaaccaaactgataggcaactgggacccttcgaggtctcactgtcacaagatgaaacacaattggagaagccggttggtattaatggtctccagactctggtaacatatctgaactttctgttttcctaaaccatgtagttagaactttgccgtacacggtgacagaattgtgaatcacgtcttggctatgcaatgtgtatggaccaaaactttgcaatggctagtcgaagctgattcatcactaaaccgtttttattatacaaggaactgacaccatcgaaactcttgcagatgttacccaggattgaagcatttggctccaatgatttccaattggtatgacaaactgaccacctcctaagagctctcatccttcttagaatgtaaaatctgatatatatctatttgcagaatcttattgcctccaagctgggagtccagaaaaatcgctgggatcacggccttggacacaagagagaaaaaaacctacgaacttgttccagagatggaggtcagtgtactaaccttttttgtatatcttctgggttctaggtccctctctttagtgaaaacaggaaattggctcaccataatcgatattgttgttggcattatactgcagatatttgtagagacagactaagttataagacagcctccccgagtggtgttcttcctcgacaggttttgttattgcacctcctctgtgttgataattgtttttgtttcttagtagaaaataatttggctcctttgtagaagaagaaaaaaactaaacggctttaacatatggactacgccgtttgtatcttgttgttacaaaccattaaacgttactgtttgatcaatatgttaattcagaactgtttggtttaaagcataa

SEQ ID NO: 153169 - DNA, 761 bp, Arabidopsis thaliana landsberg
taattacagaataaatgcatttggtgacttgcgatcaatctctttcacagagtttaagtttctaaatatgttttgaaacatctctagttttcttgtttctgattatagtcttttggtgaaatgtaaatgtttagctggatgatatgattggtgtgagaagtcatcatatgggaggatgggaaggcggtgaacagaatgttacctacgcgcatcatcaagctcagtctcagggactataccagcctcttgaatgcaatccaactctgcaaatggggtaaatctgccttgaaaaatcatctgcaaatcagtttgtgtacttaactactaagattgtccttatttaaggttctttagttgcttggtgtaaagaggatcatcaatgtgtgtgaaccttctaagttgatgttttggcgatgatgatgatgatgcaggtatgataatccagtatgctctgagcaaatcactgcgacaacacaagctcaggcgcagccgggaaacggttacattccaggatggatgctctgagaatcatgtactgtgatgaagctcacccacaaaagaccttatatatatataaagtatagatacaagacttggatttgtagacataagtggctaatataatggtcctgaggatcttctagacatttgtatcttttgggaatccttgcttatattaagaattcaaatgtgtggaacttgttttaacactgaaccatgacactggtttattgtcatgtaatgagagaaacatttgggtt

SEQ ID NO: 153170 - DNA, 747 bp, Arabidopsis thaliana landsberg
aaaaaaataagtcaaaaaaataaaagcaaagaaaaaaaaggagaatgaaccctcacctgcctcttaagaggcaagagtaaggcagaagaagaactcgcggttcaactaacactcactacaacagtaagattttcgctttatttttctcgaatcaatatctcgatttatttttataactcgaatccgactaccttttctttgaacctaggaaaggaggatcgtagtggaacaaaatcatggcagacaagacggatataatttcatcatcttccgataaagcttctccaccaccaccatctgctttcagaaactacttatcctcaggaagtaaggaagcagtgcttctcttggaatcagctggtaaggaatcttgttgcatctttagagtccctgagagcttcgtagcattgaatcctgaagcctataagcccaaagttgtttccattggtccttaccatcacggtgaaaagcacctcgaaatgattcaacagcacaagcttcggcttctacagcttttcttacgcacggcaagcgtggatagagatgtcttgtttaacgctgcagtggattgggaagatgagataaggaaatcttattctgaaggtcttgaggaaagtccagaacaactagtgtatatgatgatccttgatgggtgcttcattctcatgttgttacttatcgtgtcaagaaagatagaattgtttgaaaatgacgatccaattcttaccatcccatggattcttccgt

SEQ ID NO: 153171 - DNA, 671 bp, Arabidopsis thaliana landsberg; identical to SEQ ID NO: 11368

SEQ ID NO: 153172 - DNA, 1099 bp, Arabidopsis thaliana landsberg
attacctacccttcaaccaaatttcaatctgattagatcagttatttaatgtgggaaagaataaacaagtccaaaatgcttttgttttctttggcatttagtctcttttcactttttgttttgtcatagggagcctaatcacagtttaggattataataccatattcagcaataattacaatcatcatgttcacattataatatagtaatctggtagatcatcaaatgcttcttatatcaaaatgcagtcggttacttaaagctctcgcaagcgaaaaaaggaagtctctttactttataagataatggagacactaaagaaacagaatgcaatgatggatttctgataagataatacatcttttgttttaaaaatagaaaatgtgtttcttgtgaaatcttccatgctcatctaaaagtaaaagctttttttatatatataattttcatggggtaaagcttatcactttcaatgatatctgtttctctttgtcaactttggtaggttttgagcatgagccgacttggtggagccggtgcggttgctccacttgttactgatatgcctctttcatcatcagttgaggtaaaaactttttaagaacaaaaagtaaaaactttagtaatggggttttgattcagattttgcttaaaatgtcaataggatgaaacgggtgagggtggaaggactccgcaaccagcgtgggagaaatggtctaacgatgggactgaacgtcaagtggctaaactgatggaagagaacgttggagccgcgatgcagcttcttcaatcaaaggctctttgtatgatgccaatctcattggcaatggcaatttaccattctcagcctccggatacatcttcagtggtcaagcctgagaacaatcctccacagtaggatttctgcaataaagagtttgtacagctaatccaactgtccaacatgggtttttcttctgctctaatgactctggtttcttctctcctctctcacccacttgaaaggtaaaaaagtgaaaaaggctttgtagatggaatcaatgtaggatttgcagtagagggaaaaaaaatgtcaaaaagctcaattgatcaagtatta

SEQ ID NO: 153173 - DNA, 622 bp, Arabidopsis thaliana landsberg
  unsure (1)..(622): unsure at all n locations
cttctctgcaaaatcgactaaagttttgagtttcttcaccgtacgattaaccggagatggagtcttctcccgatccaggagagttgattaagtcgtctcagccgagtttctttgagtttcagaagcaggcgtctctaatgacgagctgcaatcttcnnnnnnnnnnnnnnnnnnnnnntttcacttccatggagcaaaacctgatgaagaaatctgaagctctgagacagatgattgaaaccctagataatcaaacgcagagctcgattgagttactcaagcatcgtgaggtgactatagaccacagcgtcgagatcgcggaggggaaagttgaggaacgcgttagagcggcgttggattcgctggagaaagctagagactgtggtgatgaagataccggagaagtcgacgacggcgacgggcttttatcggcgctgaagtcgctttgtttgaagatggacgcaagaggattttgggggcttgtgattgcgaggaagaaggaattggagaatctccgggcacagattcctgtggcgtcggtagattgtgtggatccgcgaagtgagtacttgaagctgtatctgagggttttccggggataaaagaggtggtggagagaaag

SEQ ID NO: 153174 - DNA, 734 bp, Arabidopsis thaliana landsberg
aggtcaatttggaacgacttatctatgtacagagattgcctcaggcgttgactacgcttgtaagtcaatatccaagaggaagttgatctctaaagaagatgttgaggatgttagaagggagattcagataatgcatcatttagctggtcacggtagtatcgtgacgattaaaggagcttatgaggactctttgtatgttcacattgttatggagctttgtgctggaggtgaattgtttgataggattattcagagaggacattatagtgagaggaaagctgctgagctgactaagatcattgtcggtgttgttgaagcgtgtcattcgcttggtgtgatgcatagagacttgaagcctgagaatttcttattggttaataaggatgatgatttctctctcaaggctattgattttgggctatctgtctttttcaaaccaggtaaagtgtttgaagcttttagttaatgttttgcttaactaggctggtaaaagaatcttatgaaacagaatgtgactttcaggtcaaatattcactgatgttgttggaagtccatattatgttgctcctgaggttttgatcaaacgttatgggcctgaagctgatgtgtggactgctggtgttatattgtatatattgctaagcggagtcccacctttctgggcaggtatttgtcatattccatgttagcctgtttcttagtcatgtagaaagtctaagtcaccgtgaaatgtg

SEQ ID NO: 153175 - DNA, 491 bp, Arabidopsis thaliana landsberg
gcagctcgagccctaaccaagaacctccaagttctcctccctagagtcttgcctgtcaaggaactgattcgatatgccatagttcgtgcgcttaaacgaagaaccgccgcaaagagagaacccgcgagctcagggataggtctaatcctaaaaacagggtggcaacatgtttgtattcaccccggaggaagagcgattatcgaaggagttgggaaaagcttagggctcacggaatttgacatcgagccagcgagaatggcgcttcataggttcgggaacacatcttctggtggtttatggtatgttcttggctacatggaagctaagaacagactaaagaaaggtgagaagatactaatgatgagtatgggagctggattcgagtctaataattgtgtttgggaggttctaaaggatcttgcccatcccaatgtttgggaagattcagttgataaataaaaagaattgtcgagaatccctaatccattcgt

SEQ ID NO: 153176 - DNA, 920 bp, Arabidopsis thaliana landsberg
  unsure (1)..(920): unsure at all n locations
ttttaatgttaggatccagtttttagtgaatagnagacgagcttgggatgcaaatgatctgttgctgttgatgcctaaactccaggtggaacgggacagcataacatataacatggttatcaaagggtttttccttgcgaggttccctgacatggcggaaagagtttatacagcgatgcatggtaaggggtacaaacccaatttgaagatataccagacgatgattcactatttgtgcaaggcaggaaattttgatttggcttatacaatgtgcaaggattgtatgagaaagaagtggtacccaaacttggacacagttgagatgttgctcgaagggcttgtgaaaaaggggcagcttgatcaggctaagtcgatcatggagttagttcacagaagagtacctcctttcaggtcaaaacagttgctctcccttaagtccattttgtaatgtttacatgaaatggaacaaatttgctacatgtacacgacaatgcggccaaaagaattctttctttctttctcctgagtgtcttttgtatagctgtggtggaactggaaatgggatgtagcctcatattaggaggcacacttatcttccaatcagattcaactatttgttgttcaatgtgaataaagcttaggatgatttggaaacttcaatggagggatacccagtaagtcatggatgcctctacaatcttaagttgtgatagcacagaactagtttaccttttgtaatgctacttacaaaacatgatgttgatttcagctggagagcaaaatggcatacacaaatcaaggaccatgtgctgaagaaaccaataggatcttcgtctgatgatgcaaaagctcttgagcacctggaaaatgagttatgttttaagcttcatttggccaaattaacagcactaaacatataa

SEQ ID NO: 153177 - DNA, 1066 bp, Arabidopsis thaliana landsberg
gttcgaataaggttgtctacactagaggctcacaagatctacacacattcatttccgctacttgttcttcaaccgcacggtctcaagaaaacgggggacctacaaatatctgtccgttttacaactctctctttagccaacatcatctacaattacggccacccgcttctccccaaaatgcactatcttttccctttcacggtcaaccaagtagatggtttaaggtaccaagccatgaacattgtttcaacccgccttggccgagctgagccaccacttaggaaagaggtcgtcgagtacatgctggatgtagattctcacttatggagcatgagaagaagcaaagccaacttttttcgcataatgtcgcttctttcaggttatttcttggtcgggaagtggctcgaagatgtttgcaactggagatacccggttacttcggttctggtcaatgtcttgttcttcattttggtcatgtaccctgaactgattttgcctaccatgtttctctacatgttcttcattggattgtggaacttcaggtccaggccgagacaccctcctcacatggatatgaaactctcatgggccgaggctgtaggtcctgatgagctcgatgaagagtttgacacattcccaacgtctcggtcacaagagttggtgcgtctgagatatgaccggctcagaagcgttgcgggtaggatccagactgttgttggagacattgcaacgcaaggagagaggtttcaggctttgttgagttgaagagatccgcgtgcgacttgcttgtttgtgattttttgtcttgttgctgcgatgattttgtacgtgacgcctttcaagatcatagctcttgcgggtggaatgttctggatgaggcatcctaagttcagaagcaagatgccttctgctccaagtaacttcttcaggaaattaccttcaaaagcagattgtatgctttgaattgtaaaacttcattgtggcttttaggtcttctctgctcgtaacttgtgtttcttttgtttgtgtgtttgtctgctctgttttattattttgttctgtttgc

SEQ ID NO: 153178 - DNA, 466 bp, Arabidopsis thaliana landsberg
ttgggttcgccaagcgcaccaataacctacctggtgggctttggggtccaaggagagaggttagggtcgatgcgctacagcgccaacgagatgccacgttgtagagagtggccacgtgggcgggtcccacgggacgggttgttacaaagtacatccgggtttcattcgtcttcatcaaaatccggtatgtagaaatccggtggaacctaagagattcaagtaaaaaaactgatccgtgttagatagataaaagcatcaatttgtcctatgatgatctgagtttacctcctgcatctgtacgcttggagcgtgttgaatgtatcgcaaattctccaaaatctgcactttgatcgaactgatgtacgattaggtattaagattctcctgttttcatttcaaacacacaaaatgattctcaatctctctttagatttctgttaaagcaatgaggaactatttaagttac

SEQ ID NO: 153179 - DNA, 1661 bp, Arabidopsis thaliana landsberg
  unsure (1)..(1661): unsure at all n locations
ggcgtcccgaagactctaggatgtcaacaaaccgttgatgtttacaattccttgctccatgcgctttgtgatgtgaagatgttccatggtgcttatgctttgattcggcgaatgattaggaaaggtctcaagcctgataagcggacatacgctatcttggttaacggatggtgttccgctggaaaaatgaaggaggctcaagagtttcttgatgaaatgagtaggagagggtttaatccaccggctcgtggtcgtgatttgcttattgaaggtttgttgaatgctggttacttggaatctgctaaagagatggtgagtaagatgaccaaaggagggtttgttcctgatattcaaacttttaatactttgattgaagctatatctaaatcaggggaagttgaattttgcattgagatgtattatacagcttgcaagttaggtctttgtgtagatattgatacttacaagacactaatacctgcggtttcaaagattggaaagattgatgaagcgtttcggttgttgaacaattgtgtggaagatgggcataagccgtttccgagtttgtatgctccgataatcaaaggaatgtgtaggaatgggatgtttgatgatgcatttagcttttttagtgacatgaaggtgaaggctcatccgnnnnnnnnnnnnnnnnnnncaatgctgattccaatgtgtggtcgtggtgggacatttgtgcatgcggctaattacttggttgagatgacagagatgggtttggttccgatatcacggtgctttgatatggttactgatgggttgaagaatggcgggaagcatgatttggctatgcgaatagagcagttggaagttcagcttagaggagtttgatactgctaagaaaggcttttgaggcttctcctaaactcggatacttgggattctgtagaaattcagctacttctccattgatctaccctgtatatcttgtagtcgaagcttgtctaactgttggttaggttatacttcggtttgggggttgagtttagttggtctcctgactagtttctttccagggaaagtggcgagaaacattttgttgtactactgttttttttatagatccatctgtcagatcaaatttacgtattgtgcttttcgtacagattacgacagatgaatcttcagagctcacattaccaaagaaacagtgatgcacataatacaagctctgatgttaatgcattgattcgtttgcaaaactaaggtccaagccagacagagaaataattatttaaccaatgcaaaaccgttcttcattgatactaaggtgtgtgctttgtgggcaacgcaaacaattttctacaagcttttagagccacaaaataaaagaagtaccaacaaacaaattatacgaaagcgcacaaagtaaatgatgaaactactctgcgattagcaaaaggttttggcctcggcgagaaacacccatgtatgaagatgcctttcacatgcttatatgtcagcttcaaggaagttttgagatagggttacctaaagaggaacaaaagttacatgaataaggtgtattcttaaaaggattaacaagactttacaatggtgatagatatgaaggattcagttaccttctcccctaatttgaagggtggcagacccttgtaagg

SEQ ID NO: 153180 - DNA, 758 bp, Arabidopsis thaliana landsberg
aggaaatgcgatttgaagcacccccctggggatgaaatctatcgaagctctactttgtcaatgtttgaggtaatagattgatgttttcatccttaaactgtttgctttaggcttacgatacttgtttggaagctaataaatgtatttagaattgaattttcacgacctgggagtttatttgtaatatcttacaggtggatggcaagaagaataaggtctatgcacagaacctctgttatctggcaaagttatttcttgaccacaaaactctttactatgacgttgatttgttcctgttctatattctctgtgaatgtgatgatcgtggatgccacatggttggatacttttcaaaggtatcagcacactttggctcttgggtctgttatatacatgttctgtttcaatttgattgtctgatgaaaaaaatgcaatttctgttggtacaggaaaaacactcagaagaagcttacaacttggcttgcatccttacacttcctccatatcaaaggaagggctatggcaaattcttaatagccttctgtgagtttttgtttttcattcaactcttcttatttggtctcacctctctctataaagcttacacgttatattgtgttatagcctatgaactctcaaagaaagagggcaaagtcgggacaccggaaaggccgctctctgatctagggttagtgagttacagagggtactggactcggattttattagacattttgaaaaagcacaagggaaacata

SEQ ID NO: 153181 - DNA, 354 bp, Arabidopsis thaliana landsberg
tccggtcgaaccaattcgtttaaggataaaccggttccggttaagaagcctggttttttcgctagcttcagagctattttcagaaccggtggcggttgcaaagacttatctgcgagtggagctcacgcgcctcggagggatgtcgtagtctctccgccgagagtttcggtgagaagatcgacggatattagaggacggcttccgccgggagacgtcgggaaatcctcgccgcagaggaatagtaccggttcgaggagatcaattgacggcggtgaaccggttctgcctggtttaggtgggatgactcggtttacttcagggagaagaccggatttgttggttgaagtttgacgt

SEQ ID NO: 153182 - DNA, 1892 bp, Arabidopsis thaliana landsberg
tttttaattcagattcaaagctataacttttgatggttgaactaattctataactttgaattctttaactaattctataacttttatttctgctttagtattattttgaggacagatatgatctagttaagttcatcaaggtggtacaacaagctggtctttacgttcatctcaggattggtccctatgtttgcgctgaatggaactttgggtaaactatatggtctaattaatacagattaaatttgttgaatctctttctttttgatataattattcattgaaatatgtttaaattaatggtttgcaggggatttccggtttggctcaaatatgttcctggtatggttttcagaacagataacgaacctttcaaggtacacaatggtagaaactaccaacttaagtttttcgttctttgtttattttttttttaagaattacaaagtgtaacttgatgtgatgattgaaaagattgcaatgcaaaaattcacaaagaagattgtggatatgatgaaagaagaaaagctgtttgagactcaaggaggacccatcattctctcacaggtttgtgtcttatttgcctagttgtttaaaattgatacaaaaattacaataatgtgaatgtataaaaatggacagatagagaatgagtatggaccaatgcaatgggagatgggagcagcaggaaaggcttactcaaaatggacagctgaaatggcattgggactgtccactggtgtcccatggattatgtgcaagcaagaggatgctccttaccctattgtatatttctcttttcctttttctctagcccttgattaggatgtctattttggttttggttaatcttggtttagatagcatcctagctaattaatttattgccaaaaatttgagtatggttggtagagtttctattttcgtttaaattctgctttttatcaacctatttatattgatatgaaaggttttttaaaatattaattttgcttatcagtttagttttttagttgttgcgaaaggttacatttatgttgggggttagatttatatgcttatccggatagaatcaatacattgttatcagatcaaattttgcttttgtcggcaattagatattctttaagcgaaagaagatatttgcttgttattattttgtcatttatgtattttataatttgaaaatcattacttctttccttggtgggttaacttttgaaactttttggcctttacttgaagtcaaaattctctttttcttgttagctattgttatcggtatgtagttacaataaaatatcgttttccgatttacttgcttgcaaaggccaaaaatcaaaaagaattcatggagacaatttttcttcacctttttttacctttaaatgtcttacaaaattaatttaccgtggaagtaaaaaatataacagatagacacatgcaatggattttattgtgagggtttcaaaccaaactcagacaataagccgaagttgtggacagagaactggactggttggtaagtcacaaagctattcatttatacagaatcatctttttgttttctttatatattaatctttaatagtaatgtgtgtgtgataatataattctcaggttcacggaatttggaggtgcgataccaaatagaccagtcgaagacattgcgttctccgtggctcgtttcatacagaacggtggttcttttatgaattattatatggtaaatttaagaaatttattaaatataaaatagattaatttacgatctcagagttaattaaataagagaatgctgtcacagtattatggagggaccaacttcgatagagcagccggtgttttcatcgccactagctatgactacgatgctcctattgacgaatatg

SEQ ID NO: 153183 - DNA, 729 bp, Arabidopsis thaliana landsberg
aaaacaaaaaagaagagaaaaatggagaattctcagagtcagggtaaaaacaagaagaagaggctaacacaagatcaagttagacaactggagaagtgcttcactatgaacaagaagcttgagccagacctgaaacttcaactgtcgaaccagcttggtctacctcaaagacaagtcgcagtctggttccaaaacaagcgagccaggtccaagactcagtctcttgaggtccaacactgcactcttcagtccaagctcaaagcagctctctccgacaaggcaaagttagagcatcaagtgcagtttctccaagatgagctgaagagagcaaggaatcagcttgctctgttcacaaatcaagattctcctgttgataattctaatcttggttcttgtgatgaagatcatgatgatcaagtggtggtattcgacgagctttacgcttgtttcgttagcaatggacatggatcttcatcaacctcatgggtctgattctgttttcgacgcagacaagattccaatatatatagtcttgtctctgttttgtttcgtttgatctgtttctctttgtctgaatagatttaaattttgtaattaaagtcattcagacattcactaatacaaagagatgattttctttcatttcttggtatgggtataagaatatcaagaattgcaatgttggtacaacacaagaaaccaacaactactccatggtctaatttcatc

SEQ ID NO: 153184 - DNA, 476 bp, Arabidopsis thaliana landsberg
ggattagtcaaaatctaacatcacaatcatatctttcaattatctaagggaattcgtgctgagccaagaagaagcttacgaggtcaagatagggaagcaagagtttagaagacctggagatcctccatttgaagatgtctttgacaaatttcaagctgagcaaaggaaagatcacgaagatggtgatggtaacaagaatgatcttactaaggatgaattataggtcacagaaaagcttctataatgggtagtactgaaagttcaactcttttactgaatcttacctaaacatgtttggtttttagtttccgttgaatgccgtagaatacaataaagaggaaagctttgtttcttttccaatgagtatatgcactcatttaagcttattgctaaacgtggagagctcaataacctgaatcctgggaatgcctgctgcttcagctctctctttctcagtgttgcatccccaggttcct

SEQ ID NO: 153185 - DNA, 562 bp, Arabidopsis thaliana landsberg
ttattttgcatacttaggcatttaagatcaccttgctttcccattgcatgttttggtgtgttttcaggtgcataaggagctaaaaaggactctactcgatccattcactcgatccaggcagcaaaagaagaggcatcattctactcgacctccttactcgatccaggatgctacagaggaggctgcagtttactcgaccctcttactcgatcaaggcaacctcagatgaagcagcatattgatctactcgcccctcctacttgatccactactcgatctatttactcgaccaagggtgaccatctctacaacacttgttgagctatcaaagcatcttcggatacttgataataggtttttaaatcaattaatcctaaagcactatcatgtcgttgtagtacttagggtgtcaatccaaatgggtgtgatgcaaacagatgagatgtgatcagaagacactaagtcaatccaagcaataaaagttttggggtttctaatagtcctaagcgaacatgcagaaaataagaaacaataacaaaattactaaaatcactcgaccaca

SEQ ID NO: 153186 - DNA, 616 bp, Arabidopsis thaliana landsberg; identical to SEQ ID NO: 3237

SEQ ID NO: 153187 - DNA, 573 bp, Arabidopsis thaliana landsberg; identical to SEQ ID NO: 22147
  unsure (1)..(573): unsure at all n locations

SEQ ID NO: 153188 - DNA, 497 bp, Arabidopsis thaliana landsberg; identical to SEQ ID NO: 48284

SEQ ID NO: 153189 - DNA, 706 bp, Arabidopsis thaliana landsberg; identical to SEQ ID NO: 71728

SEQ ID NO: 153190 - DNA, 573 bp, Arabidopsis thaliana landsberg
aacttgccttcacaacattacttacattatcattggcacaatctggctttgctcaatagtcccagtttctgtgttgcagcaaaaactagctcagatgctttccaggctaatcaaaattgcagaggagttcaacgttgctgtctacatgactaaccaaggtttactttacactagtttgatataatgagataaagcatcaattctttttttgtttcttggttgcactaacttagcaagtatcatctgtttcatttggtggtttgcagtcatagctgacccaggtggtggaatgttcatatcagacccaaaaaagccagcaggtggtcatgtactagctcacgcagccaccatcaggctcttgttcaggaaaggcaaaggcgatacacgtgtctgcaaagtctacgatgctccgaatctcgctgaagctgaagccatatccttttaaccaaatccacacacacacacttgctttgtttttgattatttcatataatgcaatgacttatttttttccttaactgaagaaatcacagtttccagattactcaaggaggcattgctgacgcgaaggat

SEQ ID NO: 153191 - DNA, 2996 bp, Arabidopsis thaliana landsberg
gaggagccagtttatgaagaaggtaaaaagtgttattggcatgagttaattagtgtagatataggtgctaccttagttgatatattagacatgctaaccgactcccttaggcccttgtctgtgagcacaaaattaagctcacgtatctactcattgtagatggtgtacttataggatcaaaccaaaaagctaagcctacatttaagtatgtagagatgttggcaaatcttgaaagtttttttattttccatggggtagagagtcatatttcaagacactagcacacatgagacccgctgaacgtaatctttacgtccaccgccacaaaactgctcgcggctgatcatgtcaagcttcttacaaaacaacttcagtagaaaacatttcatttgacaggtttcccgctggcgttgcaaatcttagcatttggaaacattcttggcatagttgatttgctgtcagctgatgacacctccaagactatcctgcattagaaaaggctaactcatccaaaacaattaatatatcttcctgacatttacgctctagaacaaaaccttcaggtaattgtatttacttaaggttcttctacatcatgtcttattcacttctatatctacagctgccagttgttccgctaataatggtcgaggataatggagactcatatggttcaaattacctaaaactactctctcaaataagagattaattggagtattttaggatcgaattcacagagttcttttgttcaaacagtgagttgaatgtcgagattaagctagcaaggtacgagtgaagtagtaagaaaacaaagtaagaaaacaggaggattattgtgttgtaaacgattaaataaagagctagaaacagggtattctcaggaaactattggtattgtagatctaatgaaagctaggttgttatcgaactgttcttaaactcaaactctaatcatggaataaccggtggacgtgccgcgaaactccctatatctatagctaataatactggagaagccgagaaactatcaacctaaatatgcattcttaacgagttcaattgttcatcttagtagataggctgattcttattacacacctataaaccagactcatcaaataatagatccaactgcagatacctatggcgggcatatctattgtctggattcaagatctagttaattactctagatctagcattaggcataattaaagatgaagaattctacacataacctagcaagggggcaatctactaaaaccatatgaatccctaatgagaaacgttattcctaacaagcagattactcagacatattgagtatgaaaatataaacacaacaaatagattaagggaaagaagggatctcttcactgttttaagatctgaatcaatctctgaaaacactcaatgaatagcttatgtctctcagtaacagggtttgcaaaacgcttgataagaacttgatagaaaacttgataatcaaaaactggataaacaaaacttaggtctaaacaatgtataaaaaccctataaaacgtctagggactaataatgtaaataggggaagtctttctagggcaaatttctacttctggagactagaaagcgtctaggactttgtagggccaaaaccggtgtcgaacgacaccaagagtgtgtcgatcgacaaaaagagtgtgtcgatcgacactcctcgctgattcctgaaccaaaatcgtctttagcttcctttttcttagtgtttgctccaaaatgtcttcttatctctattgttgtcccattgaatagaatatctgaaaagacactaaaaacactcgagaaataacataaagactcaaaatcttatacctaaaatatagttaaaatcggtgaaaatcggattatatcagtaatgcaagttcccaaccaatcaatgttgaagatgatggaataatgagtcgacctccgggtgtcaaggcagcaaaagcgaaaggatagaagtcagccactattaaagacggaaagaaatctgctagtattaaaggaaaagcagaccagtcatcagtcgaacattttcagagcttataggagcttaaggagaaggattgggatcacaaagagaagcaaagcaatcagagactttcaagtctctttagtgacttaagtgtcagaagttttctctctcttctcttaactctctcaaatcttttagagagaaaaaactctgaatcttgttcatatcttttgctaatccgattaacatcggatctctttagatttcgttttatgttttagctatctggctatttttcagatctatctcaaacttcttgtcggtttttcttctatactttgtttcgatttgtagtttttttgtaaagccttttgcctgttcttcaaatcaacacttctatgtcgttgaagtattaaatcattgtggtttgatgggtctttgttagctgtgtacttgattcttcgtccaattgttggtaaatcctcgcttgcccatatgggattaaattaagcgatggttcactttggtcgtttgatttcaagtggttgtagttgattgaattggagtatgtagatttggagtccctgtcgtgtttgatagtttctctgaagactgcttcgattctaatcggctaaagaagaaatccggtgagcaaagtaaatcaagtcaattacttccaatgttcattgcaaaaggcgatgggtaaaagaaaggcttaatctggtagaagctgttcgaagatgatgaagaactggaaggtaaagaaatattccggtgactggaagtaattccccgacgacaatggagttaatgaagaaacaacttttctccagacctgccacgtgcccgtgtttatcttttgttaagacatgtgtctatgagctgtattgatataagctttaatctgtgtctttggtttatattaaatatttaaatgggtcttgtactttatgtgtaatgccctttggactctttaataaaatgaagtttgacg

SEQ ID NO: 153192 - DNA, 421 bp, Arabidopsis thaliana landsberg
  unsure (1)..(421): unsure at all n locations
tcaacgtcnnnnnnnnnnnnnnnnnnnnnnnnnnnnnnnnnnnnnnnnnnnnnnnnnnggtcggatctacgtggtctccgactcaggaagcgactgtccagttagccccaagcccggaactttaatacacgccgtggtccaagacgagccactctggatcatcttccaacaagacatgacgattcagctcaaagaagagctaatcatgaactcattcaagaccatcgatggccgtggtgcttccgtacacatctctggtgggccttgtattacgatccagtacgtgaccaacattatcatccatgggattcatatccatgattgcaagcaaggtggcaacgctatggtgcggagctctccacggcatttcgggtggagacccatatcggacgccgatggtgtctctctctttgaaaaagtc

SEQ ID NO: 153193 - DNA, 479 bp, Arabidopsis thaliana landsberg
gatatacgttataacaggtcgttggaggtgtgattgggtaccacgtgacatggctcgtgaactcggcatgccatattttgggttcgtgatcatggaagactaaagacacatctcgtaacgtttggtaatcttaatattaagacgacgccccatgcatattaatctatatataaaaacgtcttagtatcgatcttgaattgtgaatgtatattgaaggtggctaagcttatttacaatgggagagagttggcacaataatcaccacgcctttgagtcatcggcgaggcaaggattggagtggtggcagatagacataacttggtatcttattcgactatttgaggttctcgggttagccactgacgtgaaattgccctcggaattccagaaacagaaactggctctgactcgttgatcatctgcatgagagatttatcagaattttatatttttagaaaattatcaaagttactataaaa

SEQ ID NO: 153194 - DNA, 1270 bp, Arabidopsis thaliana landsberg; identical to SEQ ID NO: 29174
  unsure (1)..(1270): unsure at all n locations

SEQ ID NO: 153195 - DNA, 792 bp, Arabidopsis thaliana landsberg
tcgtaaatgaagtctcctttagttatgcggaattttgattaggtctagtctaaacttgtctaagcacggctgtatctctagcatacccatatgtttctggtagcttgaaacatgtcgggctgaaagcttcatccaaaatcagtggttactatggtacttcagagtgcgtttggcactatggcgttataaagtgatctgcagttttctcgacagccatattctgaaacaccaggactcagctgcggaagaacgacaggtaatgattctatcacagaatgtttccccctctctgcgttgatctcagaaagccatccttgaacttccttttgtttcatgacattgataggtcacacaactagaatcggagagcttaatgcttcaaatggtatcgtctccttcttgacttccagtttctttcttttttctgttacagtttatcagatttagtagtccatggttatgtatacacgaaattgattgtgtaggtgctgaaacatcagaaactcattgatgaagtaatggaagagaacgaaaagcttcgaaggataatcatagaagatctcaaagtttcacccgaaaagctgaaattagtttcctcttacaattacgaaacgccaccatgcaaagattgcttagagtgtcgtagaaaacagagaagaaatagaggaagaaagctgtaagccaattccttcatttgttatgagataaagccctttttcacaatatcagacaaaacacagaataaaaagaaaagtaagttcctctgcaaactcataattatataacagaacg

SEQ ID NO: 153196 - DNA, 1073 bp, Arabidopsis thaliana landsberg
ttactgaaaactcgggtttgaacatgattcttttatctttaacgcttttgcagacatgtatagcaaatgcggggaaataggtgaagtggtgaaaatgcttcctccatcagtcaatcgatcactcccctcatggaacatactaatatcagctttgggaagacacgggtatttcgaggaagtttgtgcgactttccatgagatgcttgaaatgggaatcaagccgggccatgtcacatttgtctctcttcttacagcatgcagccacgggggattagtagacaaaggccttgcgtattacgacatgattgctagagattttggattagaaccggcgattgaacattgcatctgtgtaattgatcttcttggaagatcagggaggttagctgaagctgaaacctttatatctaagatgccaatgaaaccaaacgacctcgtgtggcgtagtttgttagcttcctgtaaaatccacgggaatttagaccgcggaagaaaagcagcggaaaatctctcgaagctagaaccagaggatgattctgtttatgtcttgtcctcaaatatgttcgcaactacaggtagatgggaagatgtagagaatgtgagaaatcaaatgggtttcaagaacatcaagaagaaacaagcttgcagttgggtgaaactaaaagacaaagtgagttcgtttggtattggagacagaactcatccacaaacaatggagatatacgcaaagctagaagacatcaagaagctgatcaaagaatctgggtatgtcgcagatactagtcaggctttgcaagacacagatgaagaacaaaaagagcacaatctttggaaccacagcgaaagactcgctcttgcttatgcactgatgagtactcctgaaggttctacggttagaatctttaaaaaccttcgcatatgcagtgattgtcactctgtttataagtttgttagtagagtcatcggacgtagaatcgtgttgagagatcagtatcggtttcaccattttgagagaggtttgtgttcttgtaaggattactggtgaaagaagagaagtctgtacagtagctagc

SEQ ID NO: 153197 - DNA, 411 bp, Arabidopsis thaliana landsberg
gcgcgacgtgcccaatcatttcttctgatccgatctgactctcttccacccacccatcaatggcgtccagatctctcaatggcgattccgacattgtgaagccgaggaagattgcactggtcaccggaatcactggccaagatggatcttacctgaccgagttcctgctcgagaaaggctacgaagttcacggcctcatccgacgatcctccacattttaacactcagcgactcaaccatatctacgttgatccccacaacgtcaacaaagctctcatgaagctccactacggtgatctctctgatgcctcctccctccgccgttggctcgacgtcatcaagcctgacgaggtctacaaccttgctgctcagtcccacgttgccgtctccttcgagatccttgattacact

SEQ ID NO: 153198 - DNA, 2474 bp, Arabidopsis thaliana landsberg
gtcgtcttcttcgtcatctccgtcgctgatcgatctcattctttcttaaggtagagctggtggtttctgtaatcgccggtggtgatggcttctaacgatccaaaaaacggcggcggtttcttcgcctctcttgcttcatccatcaccaatttcggatcggccatgagtaaatcagtgaacgggtaagaaaatcaaatctccaacacattttctcgtttaagaatcctagaatcgtcagctggattcacaagcttgttatgttaatctttgatttggtctccatgtggaaacggtggtgtaaattttgttttgggaatgttaatatcatttcatttggttgtgattcgaagtcgtgtgttaattgttgaattatggagaagatctagtgatatagttggggaagattgtgtatgttgttttgtttgatggtgttttttctcagtttgatgggatatgaagggcttgaagtgattaatccagaaggaagtacagacgatgcagaggaagaagcagggagaggaagatggaagcaagaggtatagtgctgatttactaaaatttctctctttgttcttgttgttgttacaagaattggaagaaaaaacagtactctggatttatatgttggcttgatttctcaggaacgtgatggctattggaagatgatgcagaagtatatagggtctgatgttacatctatggttactcttcctgtgatcatttttgaacccatgacaatgttgcagaaaatggctgaggtttgtggtcttagattttagattatatgaaagatcttttagcttctggtttctattgaacatgttttggtttctccatttgttgtctctgcagttgatggaatactcatatttgctagacatggctgacaaaactgaagatccttacatgcgtatggtatatgcatgtaatcacatccccactcttcttgttcttccttgtagttttttcatggtgtggctaatttcatttgatctttaatagcgtcatgggctatatctgtgtattacgcctaccagcgtacctggaagccgttcaatccaattctcggtgagacttatgagatgactaatcataatgggatcaattttatagctgaacaggtgagtgatttctttacaactcatattccaatgtgactttgggaaaaattatgagttcttagttgacatatatcaatgttttgttcctcaggtctgccatcacccaccaatgagtgctggtcatgctgaaaacgagcatttcgcttacgattgcacttcaaaactgaaaacgaaattcctaggcaactcaattgatgtctacccagtaggaaggtaatatctcctaactatgtatttatatttaagagtctccttgtgagactaaaacactgaacttttcagtcaatgaatatgtgtgcaggacacgagtgacacttaaaagagatggtgtcgttcttgatcttgtacctccactgacaaaggttcataaccttatcttcggtcgaacatgggtcgattcgccaggagagatggtcatgacgaacctgaccactggtgacaaagtggtgctttactttcaaccatgtggctggtttgggtaagttctttcttcatcaaacttaaaaaccttcaaacaaatctgatcaattgaaatctcatctccatgcttctccatttagagctgaaatgtggacctaatggacagatctggacgatatgaagtggacggttacgtgtataattcagctgaagagcccaagatgctaatgaccggaaaatggaacgagtccttgagttatcagccatgtgatgcggaaggcgaacctcttccaggcaccgaactgaaggaggttttatcaatttctctctttgtcatactctaagcaaaccctctgcataatatatctagtcacctttctaattatgttatttccacaggtgtggaaggtcgctgaagctccaaagaacgataaataccaatacacacattttgctgacaagatcaatagttttgacactgcccctaaaaacctactgtcatctgattcacgtctacgtcctgatagatacgcgctggagatgggtgatatgtccaaatctggattcgaaaagagcaggttactaactactcatagtcttttggttagcttccctaagactactaatcccaaagtaatgcaaaggctaatagaagccggtttttttttgttttgcagcctagaggatagacaaagagctgagaagaaaagcagagaagagaaaggccaaaaatttgctccaaaatggtttgatgaaacagaagaagtcactcctacaccatggggtgatctcgaagtttaccaattcaatggaaagtactcggtgcaccgcgccacagctgaaaactctgaggatacaaccgatgtgaagttgacccaattcaacccttggcaattacaagatctctctgcttaatcctttggtgccatttgt

SEQ ID NO: 153199 - DNA, 1964 bp, Arabidopsis thaliana landsberg
  unsure (1)..(1964): unsure at all n locations
ggcaaagctggacagcaatgccgcactcttgagctatactgagaaactagaagcagcttgcatggggacggtggagtctggcaaaatgaccaaggatctagctcttctgatccacggagccaagtaagactaaaacttgagagaaagttgatgaggttgatgcacttaataaaaaatgtttaaagataagtttttgtctactatttgaacagggttaggaggatcaagttgtgaatacggnnnnnnnnnnnnnnnnnnnnnnnngggagttaaaaagaagattgttaggcaacaactccaggttgtgagaagaaagaatggaaatctgaaaagcaaagagtctcagcagcgtgatgtttgatttgatgctctttcataggtgtagaacttaaagcctgaaaaggggctattgcatgaataaaaggagatagactaattgggtaatttattgaggaactcagatttcccaaagccgagactcactcctcattgattcgttaaaaattgaatctttttagcccttctttctctgtataatctctgttgtaaaagctaccaatcaacagaaatggctacgttctcgttgtcattatcttctctttccctttgtattatttatctggcaaagaaatgaatggttgagctttagttataagtgttccctcttgctccctcaagttgctatggctatgtgggattagtaagaagacgacggaggatgattttgatgataacagctcccgtttgtcctcctcaccttctcctacgccattcttctttgcttcgccatgaatcatcgatcggaaactttcatcggaagaaaaatccacgtttcagaaccgtatcatgttcttctttgttgccgcaaccgtcggttcgtccggataaggcatcggagttgaagactctgtggaagaaattctacaaagtcgcgtcgccttattggttttccgaggacaaagaccaagccaggcttcgtctcgccgccgtcttcgcccttactctcgccaccaccggcattagcgtcggcttcaatttcctcggccgtgatttctacaattctctcgccagtacgaattcttcaactctctctctcatttctcacttttcaaaaacaacttgctctgttgatcctcttttctctgtgttcaatagacaaagaccaagagcaattcaccaagcagttgttctattacctctgtgctttcgccggcggcattccggtgagttttcctcacgctcctccctctgtatccaatctcaatgaatgatgttgttcactttccctggattttgcagttctttgtgctacgagattatacaaaagagactttatcactgagatggagatcatggatgaccaaatattacctgcagcgctatctcaaagatcaaaccttttacaagatccagtctcagtctatcatcgacaatcctgatcagcgccttgttgacgatttgagttccttcactggaactgccttgtctttctctttgacgcttgttaatgccaccattgatctcatctcttttagcaacatcctcttcaccatttatcctcctctctttctcgttctcttgctctactcctttggcggtacagccatcagtgtctttcttggcaaggtacaacaatgcctcgttaagcagtgtgattgtctctattctgttccgcttcagattttggctttgttgcattaacattccctcttgtgttcagggactagtgaatctcaactttctacaagagaagaaagaggctgactttcgttacagccttgtacgagtgagggaaaatgctgaatctattgctttctatggaggcgaacagaatgaaatgcaccttctgcttcagcgattcagaagcgcttttgataatttaactgcaaaatttctcgagctttcttatccatttatatatatatctatagatcgcacaataaattacatttcaactttttcac

SEQ ID NO: 153200 - DNA, 866 bp, Arabidopsis thaliana landsberg; identical to SEQ ID NO: 26556

SEQ ID NO: 153201 - DNA, 670 bp, Arabidopsis thaliana landsberg
gataatcttgttcacatctgaggaaccgacccgatttgggatcagttgtttagaaaggtacccttgtgttgatctttatgaacagagaaaagatcgttgctttgtttccttttgtcttacttgtcaatgtttttgatatagccgcttgcttgctggaagcaaagaacttgcagaagcactaaagactacagttgttgatggccaaaatgtgtcttttatagaagcagctagatcagcaggatacgcagaagacaaagatgacgacttatcgagtgtgttcttgaagaaaggaagttattttgcttttatagagttgcatattgaacagggaccgatacttgaagacgaaggtctggttaacttcccttttctgcgtcgaagaattttgtgttttttctctctttcaatttagttaataagatcattttttgaccacaggtttagatatcggtgttgtaaccgccattgctgctccagcaagtttgaaggtggaatttgaaggcaatggaggtcatgctggtgctgtacttatgccatataggtgagctatattatgcaactgaaccatctgcttaacaactaggcactagtacactgatcactgtataatgactatttcttagaaatgatgccgggcttgcggctgcagagtggcatctagccgtgggct

SEQ ID NO: 153202 - DNA, 527 bp, Arabidopsis thaliana landsberg
cagacccttctctctctttttctccgtcaagaatctcatctccgattaaactctccaccgcctctcctcctcttcctccgccacctcctccgccaccaaacgaatcgactctctcaaacccgactcttttcgatatgatgtcagacgagcacaaccgcgagctaccaaggaggaaatctcacgcgcgcgtggctcaaatcttgacggagttcaagaacggcgtcgtttacggccacagcctcgggccaggagacgttaagctgactgtggtgggcaaagacggttacagagtcactatggatgttcatcggaaggttttatctgagaagagtaggttttttatggagaagatgaattctagaagagagaaaggagtttctcacatggtggagataagtgagtgtgatgatttagagatttatgtagagactgttgttttgatgtatagtgatgatctcaagaagaagttgatcggtgaaaatgtcatcaaaatcttggctttactcaaggtatatattgtccaactg

SEQ ID NO: 153203 - DNA, 1318 bp, Arabidopsis thaliana landsberg
aagcacgactgcaacttcaacagcaacagttgcaagcaagacagcaagcggcacaattacagcagatgaatgatatgaatgatttaacatcgaggcaggggatgaatgtcagtcgtgggatgtttcagcaacattctatgcagggtcagcgtgcgaattatcctcttcaacagttaaaaccaggagctgtttcgtcgcctcaacttctgcaaggtgcatctcctcagatgtcacaacatttgtctcctcaggttgaccagaaaaatactgtcaacaagatgggaactccattgcaacctgcaaattccccttttgttgtcccatctccttcttcaacccccttggctccgtcccctatgcaagttgactctgagaaacctggttcttcttcgttgtcaatgggaaatattgcacgccaacaagcaaccggcatgcaaggtgtagttcagtccctagcaattggcactccagggatctctgcctctcctctccttcaggagtttactagtcctgatgggaatattttaaattcttcgacaattacatctggaaaaccgagtgctactgagctgcctattgaacgccttattagagccgtaagtaaatttccaatttttaagggtatatcgcagcaggacggtgttattgctgcaaacccgttttgtaatataatcattgttctgcttatgatgtatgctttgctttcaggtgaagtccatctcaccacaagccctttcttctgcagtaagtgacatcggatctgttgtaagcatggttgatcggatagctggttcagcaccaggaaatggttcaagagcttccgttggtgaagacttggttgcaatgactaagtgccgtctccaagcaagaaacttcatgacccaagagggaatgatggcgactaagaaaatgaagcgtcacacaaccgcaatgccactaagcgttgcttcactgggaggaagtgttggtgataactacaagcagtttgctggttcagaaacatccgatctagaatctactgcgacttcggatggcaagaaggcaagaactgaggtatgatactcagttagacttcccctagctatatttgaatattgacacacactcacacacacacacacacgtaacaaagaaaatttggaagcacaaggtttcgatattcttttttttttgaagactcaatcttgaactgcagaccgagcatgcccttttggaggaaataaaggaaataaaccagcggctgatagatacagttgttgagataagtgatgataaaatgctgctgatcctagtgaggttgcaatatcaagcatagggt

SEQ ID NO: 153204 - DNA, 2726 bp, Arabidopsis thaliana landsberg
atgtccgtgtcggggttcggtaaggctaagtatcatttttcaaagtcacaagatctgatgataatgactatttctaaaattcccgaactattcgtggaagtgttctcgacacaccatgatctcgtttgtggcatgttgctagctagcttctgtctccgagtttctacggatctatcctcaaagccctttgtttatgttatctttcttatcaatgttgtaaacctttgctcaaaaactttgtatcttgtttcccctttggagattgaatgaatgaaaacatgttttgcacacacaaaaaaaagagttcttataatttaaaaacaaaaataatcatatcatgtttataaaatataaaatcagattatgtttaataaaatataaaatcctttacaccaaacaataataataaagtaattaaactttgtaaatccaactaaatgtctaataccgtaacatatatactagaagatcaccaatgacggagataaattaataaaacaacctgaattcacacaactaatatcgggtgtctcactcaccattcgattcattttttaaggcggcattgtgaagtcttcatcaaaatctaaaacatcaaataagtttaagaacttaaattttttttacaaatgatttaattaagtctaaaataccatattttattccaaaatcaagaaaatgtttaaaaccctcacccgtccggtttaactagttcactgagtcacgtgttaatgatgagtttttgtgagtttttacggttttgaacttgtcaggttttaacactaaacctaaaccaaaaaatgttcgggtcacggttcaaccagtcagaccgggcggtctgggtcgggcgtgaagatacttgtttttagagttcttttgttatttctagagtctcttatagtctttttcaggtctttacacgtttggaatgcatttggagattatggaacattctggatcaaaacagagaacttatgctgcagaaagaagtgcgaagactaaaaatcgcgtaggtgtcgaacaacaccacccctggtgtcgagcgataccaatacctaacggcaattcaagacgcaacttattgaagttttgaagattttcaaattcggcccagaacttttccttatttctaaagaaggcccatcacgtgttaggtcacatatatatattgttttaaaggtcattgtttagacctaaggttggagaggctaatctccttatctcttttgttcttgggagcaaaaccatgtggagactctttttagagaagatctttcttactctttcttttgatatatggactattgatttcttattcaaattaatgatttcttattcagactatgatttgtgtttctatgttcatgtctgagtaattcacttgttaggtttagggtttctcattagggatttagatgatttagtagattgcccccttggtaggttatctgtagagttctttatcttgattgttcttaatgctagttatagagtagctaactagaacttgatattagataataggtatgtccaccataggtacttgctatttgatccatcatagatgagcctaggcatttaagaaagaacatgtaggctcatagaagggctctggtttagatactaggtaaactaatcattctcattaacaatgcatactttagcataggatttctcggcttctctggttatcttagctttaagtatagagagtttcgcggaacgccaccggttactctataatcatagtctgagttcgagaacggtgcaataacaatcctaatattagctagatctacaatttatctatctcccgagacaattccttagacccgacgctttaatcacttgaatctacaactcatttacttgcttatttgtcttcaatattcaattactttatttagcttatcaaacaacatcataagtctattgtgtgaacatcgagaacttagtggaatacgacccttaagtgctaacgatgatctcttatttgagggagtaagcttaaggcaatttgagctatatcaaatttggcgctgttgccgaagttctcttttagttcaccattagactaggtgtccttttaagtctaaatactactttcctaccacctattcacgtgtttctttgtctattggtctcttctgtttcaggttccttcagattgagaatcacgtttccatggcagattttcacgatagtgtcgaccgacacaactatggtgtcgatcgacaccctctgcagaaccagacggctacaataggcgattttaacagaactgatctcttctacacaaaccgatcagcattcaagctacctccttttgaaagagatgactttgctatacaccctgcctattatgatcttgtatctaaaggaaagtttagaggagctcccgatgaatcaccattggatcatttggaagtctttgaggacattgtttcctctattaaagcagaaggtgtactagctgattacctactttgcaaactcttcccccactctctcgcgagcagaggaacatcatggttgcgtcaattggaaccaggttccttaaccaattggactgatacaaagaatgcattcatgaatcatttcttcgatgagtccgtgacagaggcaattcgtttgcaaatttctttgttcacccaagctccagcagaatcccttagagcatcttggctccaattcaagtcttatcagcgtgaatgtccccaacaata

SEQ ID NO: 153205 - DNA, 471 bp, Arabidopsis thaliana landsberg
gaaggagtcaccgtgactcgtcgtaatctgaaaccaatctgttcatatgatgaagaagtttctctcgttctcctccaacgcgtagaaaattctgacggcttaacgatgtggcgaagatctgttgtttctcgtttctcttcaagaatctctgtttcttcttcgttaccaaaccctagactgattccttggtcccgcgaattatgtgccgttaatagcttctcccagcctccggtctcgacggaatcaactgctaagttagggatcactggtgttagatctgatgccaatcgagtttttgccactgctactgccgccgctacagctacagctaccaccggtgagatttcgtctagagttgcggctttggctggattagggcatcactacgctcgttgttaaaagagctttctaaagctaaacttaggtatgtgtttacttttcttttctcatgaaaaatctgaaaatttccaa

SEQ ID NO: 153206 - DNA, 924 bp, Arabidopsis thaliana landsberg; identical to SEQ ID NO: 34208
  unsure (1)..(924): unsure at all n locations

SEQ ID NO: 153207 - DNA, 1168 bp, Arabidopsis thaliana landsberg
  unsure (1)..(1168): unsure at all n locations
caaaactcttctctttctctttcaaatctcttggccgcgggacttaattttccgttaccccgacccgttaaaaaaccttcaaagaggctccgattttgatttgaaacactattaaacattatttacctaaaaacatgagttcactacaatgacccgtaccgaaccaaaccggagccggagctccaattccgattccgataagaattccggtaacgtcggcggaggtagaaccaccgggatgagggttattgttccgttacaaggtgtggtacaaggtcgtggtggtttattcttaggctctgtgattccttgtgctttcttctactttcttcagttttacctaaaacgaaatcgtaaaaacgacgaatcagataattccggtgaacaaaattcctcagcttcttcttcttcttctcctaattcgggtttaccggatcccacccggtcacaatccgctggtcatctcacggagcttactggtttacctcgttctctctctcgtattctcctctcgccgagaaattccggtggagctgtttcggtttcgggtcgggttaattgtgtactcaaaggtggagattcttcgccttactacgttggtcaaaaacgggtcgaggatgatccgtatgatgagttgggtaacccggacggagttatccaacttggtttagctcaaaacaacaaggttttgtatctaaatttcttcaaaaaaaattgaaactttttgtgtgattatttcctggatttgactgatctctttcttcttataatagttgagtttggatgattgggttttagagaatccaaaagaagcaatttcagatggattgagtattagtggcattgcttcttatgagccttctgatggacttttggaactgaaaatggtttgttatctcttactctaaagttctaaacttttgtttcattaatcttattcactggagtgtcttgtttggggatttgtatgtgttcttgagagaagttttctggattatgtgataggctgtggcaggatttatgactgaagctaccaaaaactcggtgacttttgatccatcacagttagtgttaacttctggtgcatcatctgctattgagattctttccttctgcttagctgattcnggaaacgccttccttgttccactccgtgttctccgggtaa

SEQ ID NO: 153208 - DNA, 3456 bp, Arabidopsis thaliana landsberg; identical to SEQ ID NO: 68641
  unsure (1)..(3456): unsure at all n locations

SEQ ID NO: 153209 - DNA, 1571 bp, Arabidopsis thaliana landsberg
caggagaaagatattagcttaagtggggaacatgttagagagggattgacctgtatcgtctcagtcaaggttcctaatcctgagtttgaaggtcaaacaaaggtacgtgatgatgattgcgtctttagtgttgatctatgtatggtcaacatgaagcaatttcttctgtcatatttgtggaaatttaccccaactaatataattcgtctactaatcccacttccaccttgcagacaagattaggaaatccagaggtgagaaaaattgttgaccaatcagttcaggaatatctcacagagtttttggaattgcatccagatattcttgagagcattatttccaaatcccttaacgcttacaaggtatgcttttcaatgcacatatcaatatttctgcatcttcatctacaagcatgcaccaagtgtatgtttcaacccacaagaacgggtacagcagtttgtaattggctattcatgtgatttagcgtttggccttcaacgtccttcatgttatctaccccctgctctgcttattattaatgtgtcagttgctaactttcatctgcctcaccacgctttctctctctaggctgctttggctgccaagagggcaagggagttggtcaggtcgaaaagcgttttgaagtcatcatcacttcctgggaaactggctgattgctcatcaacagatcctgaagtatctggtatgtattggccatcatgaaaatgtcgtttgtttaattgattaaagctaaacatgacagaagtatctgatcttcttattgtatattccaagtgagaagttaaaaagggaaatctaggctttaattatgtggctacaacgattacaaccggtaagccattagccatgctaattcggtcaagtagtgacatccctttgcaatctctgcagaaatttttatagttgaaggagattctgctggtggcagtgcgaaacagggccgtgatagacgatttcaggtaatcacacttctacctctatttcattgtgtaactatctaagaagggcgatggttaggttttttttctttccattgttgatccatcctttaaagaacctatgtttgctttccgatcaataaggttaggattagactgatcaatacaaggagtcttctcttgaccagccaaatatgttgtattttctatgaaattaggaaacctgtacagcttgaaaggcaattcttcctttgaaagaattcaacaggtttttggtttttgtaggcaattcttcctttgagaggtaaaattctgaacattgaaagaaaggatgaagcagccatgtataagaatgaagaaattcaaaatctaattcttggccttggcctcggtgtgaaggtgatgtatccattttccatctcttgtttttccttttctctttttttttttttgggtgtatatggaaaactcaatgcaataaataacttgtttcagggagaagattttaagaaagaaaatttgcggtaccataagataatcatcttaacagatgcagatgttgatggtgcacatatccggacacttctgttgacctttttcttcagatatcag

SEQ ID NO: 153210 - DNA, 1671 bp, Arabidopsis thaliana landsberg
ttgagcatctgtgatgcagaaattgggttgactcggaagaagcatgtgggagagtgaatgagtatgtggctcgagttaaggatagtgtgcacaagggccatcacgagctgactcgctttacgaatgagacagtgccttcgtttattgattggaacaagtgggagcattggaaggtaagctggttcagctttttaacgtaattatcaaatttctgattctcaagtattgttagacttctgcttgtgttctaaaacattgagggacaaacgtatggtatttatttattttgttgttgatttaacggaagcataaattttggaggagactacaactacgcttattctagcgacatatactagtgtattaggttgtttcttaatgagggaagatgtattgtatcaggacatcaggaattgggacggtaaacgagttgctgccttgttcatatatgcttttgcgctgttactttcttgtcaaagagtttatgttgccatccaagctcctcgggtagtacgagagagaagagagttaacagagtcttttatggaggctttgatccccgagccatctcctggaaatatagaaaagtaggtgcttcctaatcctcagtttccgattgtaattttctctactgggacatggtaaaatatggttcatattcaaactatggtatcatcctttaacaagtaaatactcagctaatgaggcatttaaagcgtcaagagtgggaagactaaaagaacttctgtttatttgattttgtagaatgtcctgacttattctagtgtttcaggttcaagagaaatatgtggaggaaagcaacacctaaaggcttgaaattaaaaaggttcattgaagcgcctgatggaacacttgtccacgatagttcttatgttggagaaaatgcgtgggatgacgatctagagaccacagagggatctctcaagaaaataattggtagaaatgctaggattcagacagaggcaaagaagaaactaagccaagatctgggtgtctctggtcagtatacattcgttaggtgatacttgtttagtagtggcatgctgaagatataacaagaagtgatttattgtgcgaaacctttgtttttgacgacctaatcttatctcactaatcaagtttctttcagagcagcacttctagatccctcatctactatcattggtaacctgtgcttttgaccatctaatcctctattgcattcttctatgataggtgaaattggagacagtgtaggtaattggcgggaaaggcttgcaacctggaaggaaatgttagaacgagaaaaattatcagaacagttaaactcctcagcggcgaagtatgtggttgaatttgatatgaaagaggtagagaaaagtcttcgcgaagatgttattggaaggacatctgaaactgagggaactagagctctctggatatcaaagagatggtggcgatatcgccctaagcttccctatacctacttccttcagaagcttgattcttctgaggtacagctctaacctatactcttgtccggctttgggattgtgagtggcaagtgtcattatatccagttgaattttttaaatgataacaagtaatggtaaattcattatgagttaaaatatgatgaatatattccttttccaaagcaattaatttaag

SEQ ID NO: 153211 - DNA, 1783 bp, Arabidopsis thaliana landsberg
  unsure (1)..(1783): unsure at all n locations
tttttgccaacaatttggtctctatttcttgaatatgaaaatcgaggaatttttatatattgacaaacaagtcgattatttttgttatggtttgaactttgatgtttacaaaaaaaactcatttagtaagacacataatgttgttctactgaggaaaatattatattttcatgcaatggtttcggtttgtcacaaaactcattttatttaaaagccggatgaatttaatgggcctaatataaaaggcccaataagctactggttagagtatatgtggactggtttcaccaccgccgcaaaaagggagactgagataaattcacacagcaatcggagttactatgtggacagtgaaactggcggcgatgccggttcaatttctcatggagcaatctccgttggctatttacagccaccaccaccgcataaagtaatgatcaagaattcttctgaaaatttctgagctcaatttcttattctgtgaattgatttgtggcaagagcgactccatgggaattgccgaattggagccatctcgtctctgctgcttatgcaacaggtaacttttcaattgctagtttgtcgtttgtgtttttaatttcggttcggtttacatggttttgaaaaattcaattgatttcggttgggtttgaattggaattaaaggagaaaaacactgaaatcacgcactcgaggctttttttaaaaagagcgagggtgtttcaaaacaagccatttggtggattagaacccacagaaaacgtagacacgcgctcaacacgcgattagtgagagtgggtgtgaaatcacgtaaaaggtgagaatggggtatgacatggagcgctctgattggtttatagaatgaaaatagtagagatgttgctcctctcttccaatgtttatatttatttacttctcttttccaaagtatgaaactaatgcaattcatagaagaacacacacaccaaacacgaaaataaaagattcaaatatgaaattttaatagaaatattccaatgacaaaggtctttttagtcttgcaaacacacacaccaaacacgaaaataaaagattcaaatatgaaattgttcttaaccaacagcaacgcctccaattttttaagagatcaaagaaagaaaacaaatgatattcatattcttcaaagctttgaaagtaaaccagtctgaagannnnnnnnnnnnnnnnnctctttgacttcactctccttagtctccaattcgcatggattcggtggcacatctactgccggtgagcagttgaaaaatccatgtggctgtattttacccaaaacccaaaacattttttaaccaatcctttgtaagttttttttttcattgaaagttacagtcaaagatttaacttaccattagtgtgaaaccaatatgttcgacgggcataaccggccaatcttcaagtctaggaacatgtgtgatcccaaacacgtacctggtgacaaatgaaaattccacattgaaagtcacataatttggtaactagtagtttttaactgaatcagataagtaaaacaaggatacagaccaaagaacgacgtcagattcttccaaggagcgattctgtttcacccatgtggcaagaccttcaccagcccgtgggttttggtttgggaattctcctccaggaaacttctcgtctggggcgtaacgggtaacccagagattatgcttcaggaaagcggctcttcttagaaacttcgcctcgggtcgagctaatggcaaacaatttgaacccggaacaagtttgt

SEQ ID NO: 153212 - DNA, 486 bp, Arabidopsis thaliana landsberg; identical to SEQ ID NO: 22969

SEQ ID NO: 153213 - DNA, 420 bp, Arabidopsis thaliana landsberg
  unsure (1)..(420): unsure at all n locations
cacagttactttcgattttccgatttcgtagcttcgaaaatgttctccagcagccaattcgagcctaattccggcttctccggcggcggattcatgtcttctcaaccttctcaagcctacgaatcctcctcctccaccgctaaggtaatataatccatcttccatttcgttcaattccaccgattaggctacagatcgaaagtttccgaatcgctaaacgtttctctgtaacaatcgattttggaattgctaaatctgctctgtatatgttttgtgggaatatgcagaatcgtgatttttcaaggtcttgttccagtgacggtgaagcaaatcaccgaatgtttccaatccagtggtgaaaaatctggtctcgtcatcaatggaatctcactaacaaacgtaaataccatntctagatct

SEQ ID NO: 153214 - DNA, 723 bp, Arabidopsis thaliana landsberg
tctcaatattctgttttcttgatttcttggatctttggttcttgattcttgaaaactgaatcttttatttttggcttaattttgttgtattatacgtctatggttgttggcaggtggattaaggtaccatgggatggcaccattgatctcacatgtttatgaacaaggattcatggaagcaatttcaattcctcaaattgagtgtttccaaggtggttcttcgatcgctgaaattcctcaaatctcattaacttttgcatttgattgtaatacaaacttttcatgtttaattgtctttcaggtgctattcagtttgcaagaacagaagggatcatacccgcaccagaaccgacccacgccattgctgcaaccataagagaggctctccgatgtaaagagacgggagaagcaaaagtgatactaatggcgatgtgtggacatggtcatttcgaccttacttcttatgacaagtatttaaaaggcgagttggtagatttatcattcagcgaagagaagatacgagagtctttgtccaaggttcctcatgttgtttaagctcgaatggctccataacctcgggaaaccaatgtcccatgttccaaactagacgtgagacagaagttaggtttaatcttggcttttgaaataaagagtgagagagaggcaacttcaaaacatgaacaaaattatctcttgaaataaaaataaaaaaggcatttacag

SEQ ID NO: 153215 - DNA, 1746 bp, Arabidopsis thaliana landsberg; identical to SEQ ID NO: 64659
  unsure (1)..(1746): unsure at all n locations

SEQ ID NO: 153216 - DNA, 1394 bp, Arabidopsis thaliana landsberg; identical to SEQ ID NO: 68533

SEQ ID NO: 153217 - DNA, 1361 bp, Arabidopsis thaliana landsberg
attctcactgcagtatacttgcttcaccattgcagattggggttcttgaagatacaaggaatcgcactctgcatggcattttacgtcttcaaagttattttagagggcaccaagctcgctgtcgtctaaaagagcttaaaaccggaattactattcttcaatcatgtattgccccttgtctcatttcaatatcttggtttgtatttgttatgtcgttagaaaccatacctcacacatccttctgtttcagttgttcgtggagaaaagatgagaaaggaatacacggagttactgcagaggcatcgagcttctgctgctatacaaagccatgttaaaagcaagattgctaggatacagtataagggcatagccgatgcatctgctgtaatacaatcaggtaaaagggtttattgtattgcttagatgctgcatatcttctcattaagaaaaatgcttaagcttattcaacgttgatactgaattcttataacctttttgcagcaattcgtggttggttggttagaagatgttcaggggatattggatggttaaaatctggaggtgccaaggtaaaataattgttatatatcacattcctttcttctcactgtgtctaattattttctttcatctcataaacttttgaactatttttgctttggcattccccaaccccgcagacaaatgagttaggtgaggtgctagtgaaagcatcagtactttccgagctccaacgcaggggacttaaagcggaagctgctctgcgtaaaaaggaagaagagaacgacattcttcagcagaggcttcaacaatatgagaaccggtggtcagagtatgagacaaagatgaaatcaatggaagaaatctggcaaaagcaaatgaggtcgttgcagtccagtctttccatagcaaagaaaagcttagctgttgaggactcagcgagaaactcagatgcatctgtcaatgcgagtgatgcaacagattgggattcaagcagtaatcagttcaggagccaaacaagcaatggagtagggtcaagactacagcctatgagcgcagggctgagcgtgattgggcggttagcagaagaattcgagcagagagctcaagtgtttggtgatgatgcaaagttcttggtggaagtgaaatctggtcaggtggaagcaaacttggacccagacagagaactgaggaggctgaaacagatgtttgagacgtggaaaaaggattatggagggagattgcgggaaacgaaactgatactgagcaagctcgggagcgaagagagcagtggttcgatggagaaagtgaagagaaagtggtggggaaggagaaatagcaccaggtattgataaggagaa

SEQ ID NO: 153218 - DNA, 765 bp, Arabidopsis thaliana landsberg
ccaaacattagcactccttttcctctctatctctccctcactcaccctctttctctatatcgtctcctcaacttggatatgggtgaagccgtagaggtaatgttcggaaatgggtttccggagattctcaaagccacatcacccactcaaaccctccactctaaccagcaagactgccattggtatgaagaaacatcgatgatgatctcaagtggtcttttgccctcaacaggttttctttccggttgcaagttgacttgctcttattttaaattctcctcgtcttttattttacaattttcttttttgtcgacagtgttctccatcaaggaactagtgagtaccaagatattgctctgttggacaccaaacgttttggaaaggtacattttgtcaattattcttatgaaacaatatctttacttaaagttcatgtttattttgtatagttttgattattaaaaattccttatagtgatattataaggcggaaactaattagtaaaagttaaaacaggtgcttgcgattgatgggaaaacgcaaagtgctgagagagatgagtttatctaccatgaatgtttgatccatcccgcccttcttttccatcccaagtatgcactttattttacttcactcacaatgttttttgtaaatgaataaaaaagattttctggtattcaactgtagtgcttcatatttgaacctaaaatagcctactgattctactaatatttagaagattatttcacatgaacattttatat

SEQ ID NO: 153219 - DNA, 499 bp, Arabidopsis thaliana landsberg
gtctcatgtatcaattctggttgacccataacctgttttctctgtgtctgaaggttgggccaggacaagtagatgatgagctagaagatgaggtaggaggcgagtgtggcaaatacggtacagtcactcgtgtactgatattcgagatcactgaaccgaacttccctgtacacgaagcagtaagaatctttgttcagttttcaagacccgaggaaacaactaaagcccttgtagacctcgatgggagatactttggaggaagaaccgtacgtgcaacgttctatgatgaagagaaattcagtaagaacgagttggctccagttccaggtgaaatccctggctattaataactcctaagacaaagaagaaacttcatcttctaggagattcttgttagagaaagaaaccatagatgaggttttaaaaacatttgtaaagtacttagaaatcttgggattatctctttattgttgttcaaagtagcttcacaaggatcaag

SEQ ID NO: 153220 - DNA, 434 bp, Arabidopsis thaliana landsberg
aagctaacaatttgggatcgatgcatgcagaggaagctagaggagagaaaagcaaaagcgatggagaaaacgcaaaacaatgtggcgaaagcgcagaggaaagcggaggagagaagagcgacggcagaggcaaagagagggacagaggttgcaaaagtagttgaagttgctaatctcatgagagcccttggacgtcctcctgccaaacgctccttcttctctttctcctaatttttagttatatcaaaccattaaattaaacagtactcgttatatatctagttagtaaacaaaggggcagttttatagctcatgtacacataattgagagtgtagtactgttgtgtcatgtgtggttttgtacttttcttagttacacacaccatacaagaaaaaaagaagattataattcaacttaattttgatttttgaat

SEQ ID NO: 153221 - DNA, 1022 bp, Arabidopsis thaliana landsberg
gggccacggagaaatttgtttagggctttttgcttatcatcgtcgtctcagatctgttaaaaggaaaaattctttgttttagatttctcactctcgtcttttgatctcttgggattttcccttttggtgtcaccatcgttctcgtttcttcgatcgatcgttaagcgttaagctcgacttgggttccacagataattttaagattaggttgtaaaaatttgaatttgaatttggtgggtttggtttgatgatgttgacccaaactgttggggtatgaagtaatatggaagtggaagattaacaaagaagaagataatgacgctttatattcgccgcgaagcttccaaggttcgtcgtttttttctttctgattttgcttccttgcgatcatatttgtcgtaattggctgaattgtggtggttttgtacatttgtagctatggaggagattttgttcggaaataacaacggagattggtctcctcgctgagaactggaaataccttcttgctggtcttctctgtcaggtttccatcttttaatctgaattcgacagctttttgatcttagtgttgaatgattatggtttgttatacctattgtaactttaggctgtgggagagattaaagcacaagacttgaaatttaccctatttgttttttgtttgttagttgttggggtgtatactttttaccaacctttatgggttcttggcttcagtttagtttcccatttttgtgttagttttgacactttgatgaatgaatctgttatgtgcagtattttcatggtttagctgccaggggagttcattatattcatcggccaggaccaacgcttcaagattctggcttttttgttcttccggtttgtctcgattatttcagctggtttggttgatccctttactcttttgaatatcatacttaagctcttcttgctttgtttggggttttaggagcttggtcaagataaaggaatcataagtgaaactgtgttcacttgtgtatttctgtcatttt

SEQ ID NO: 153222 - DNA, 2354 bp, Arabidopsis thaliana landsberg
cttcactttctcgcactttccctctcattttcccgatcatagaaacagcattgtacagagatttcaaagaatgtcactttgctcttccttcaacgtattcgcttcctactcaccaaaacccaaaaccatcttcaaagattccaaattcatttcacaatttcaggtaaagtcgtctcctttagcttcaacattccacacaaatgaatcctcaacgagtcttaagtataagagagcgagactcaaaccattttcatctctagactcgggaatttcagaaatcgctacatcaccttcattcaggaacaaaagccctaaagatataaacgttttagtggttggttcaactgggtacataggtagatttgtagtgaaagagatgatcaaaagagggttcaatgtgattgctgttgcgagagagaagagtgggattagaggcaaaaacgacaaggaagagactttgaagcaattacaaggcgccaatgtgtgtttctctgatgttactgagttagatgttcttgagaaatctattgagaatctaggatttggtgttgatgttgttgtttcctgtctcgctagtcgtaatggagggattaaagattcgtggaagattgattatgaagctaccaaaaacagtcttgtagctgggaagaagtttggtgctaagcattttgttttgctctctgcgatttgtgtgcagaagcctttactggagtttcagagagcgaaactgaagttcgaagcagagttgatggatttggctgagcaacaagactctagctttacatacagcattgtgagaccaacggcttttttcaagagcttaggtggtcaagttgagattgtgaaagatgggaaaccttacgtgatgtttggagatggtaagctatgcgcttgtaaaccgatcagcgaacaagatttagcagcgtttatagcggattgcgtgttggaagagaacaagatcaatcaagttttgccaattggtggaccaggcaaggcattaacgccattagagcaaggagagattctgtttaagattcttgggagagagcctaagttcttgaaagtacctatcgagattatggattttgtgattggtgttctcgattctattgcaaagatctttccttcggttggagaggctgctgagtttgggaagattggaaggtattacgccgcagagagtatgttgattcttgatccagagactggagagtatagcgaggagaagacaccgagttacgggaaagacacgcttgaggatttctttgcgaaagtgatcagagaaggcatggcgggtcaagaactcggtgaacagttcttctagtatgaattgtttttgtgcgaaatgagtttgctgtgtagtttgtaactgatgagattataaatataaaacctgtgaatttgagagattcgttgattcaaacaacaacaaaaacacacattgcaaatatggtataacctatggatcttttgcagagagaagaaggagatgatgtaagaattgaactaccaaaaaatccctgaaaacatattatccaggtaacttttcctggatcaagaatatagagtatattatacataatcctcgcatttccaacacccaaacacaaatggaaaaatgtaacagtataagaacaacaacaaatcaaatgaagaagacaaatgtgtgttttgcttttgtgaccaatgatcaaattgatcatcaatctttttctttttctttctttgttatgatcatcaatctatgcctcagtttttttagcaacaaaaagttcttgcttgctttctggaggcaatacatgggaagatcttggttttgtcattgaggaagaacaggaggcgcaatcgctcgtgtgttgtatgatctgcaatgtccacatttctgtccgattatgtggaagtgcacttctgttgtgtcgttacaatcgttgcaaagtatccaaacctgtgatttccgcatcatcttgttagaaaggatacaactttgatgtatatctttactcttctttagttagcgctgaaacactatcgagcttaagtgacagagaaagaaacttatttaccttcttgtcacggtaatctgaaggcatagcagtggcttcgatctaaggaagttaatttaatattcttcagcaactaatttgaaagatctatcagacttaaaagattcaacaatgaattttgaactaacctcttcatcgagtctctgccatgttttagacatatcaatcactgacctcgagcaaattggacaacaaaacctactcaagattcacacattttcaaaaccatcacaatcaaccaaagaagaaaccaaactttctggttgaaacagagacataaccacaggaaaa

SEQ ID NO: 153223 - DNA, 398 bp, Arabidopsis thaliana landsberg
atgatttctattgcatacacaatgttgctgttacaggtagcggacatggcaaacagaagatttctttggatataccgattaatctggtaaccgggacgaacacaatcgatctccttagtgttaccgtagggcttgcggtacgtactatacgattttaatggcacaaaacgtttactaggcaggagtaacccaaccaatttatcttacttattccacagaattatggagctttctttgacttagtgggagcaggaataaccggacctgtgacccttagaagcgctaaaggtggtagctcaattgatgtggcttcacagcaatggacttatcaggagcgatacttgccatattactgctcctacctctggctttcaagtcttaacggttgcgattttata

SEQ ID NO: 153224 - DNA, 402 bp, Arabidopsis thaliana landsberg
ttattctgtgatacattattttcttcaaaaattatatgatccatttttatttttttttgtcaacaaaagatcctttttttaggctaaatttttttaattgttacgtcatttaaatcattagccgcaaaagcccacaatttcaaaaaataataatattaaaatgtaatatagaaagaaggattcgaaaaatcattctttccatattatatttcttcctcgtagttctaatactcgagcagattgtttagctaaaaaagctcgggttcaaaatagcatttttccatgtaagcatatcggttcttgaatggctttctttagcgcagaatcttttcccgataacttaatataaataataattgtggaaaaaaaaaagaatattaaaatatttttttccagcacatc

SEQ ID NO: 153225 - DNA, 744 bp, Arabidopsis thaliana landsberg
acacacgggtcacagtttcacagacacgcggctcctcgatggttgtcttccgccgacagccgccgcgtgtatgtccttcccatacgtaatctgccacgttgcgtttgtataatctgcctgactagggctttagcagtgtataagagacgagacgagacgcgattcaccggagagtcaaagaggcaaggaggagaaagccaatggcacatgccacgtttacgtcggaagggcagaatatggagtcgtttcgactcttgagtggccacaaaatcccagccgttggactcggcacgtggcgatctgggtctcaagccgcccacgccgttgtcactgcaatcgtcgaggtgattcgtctttacaagaatcagtatttctttttcctgattccttcaaaccatagttttggttcactttttggctcaattttgttttcagctttcattaacacagagctttacttgttattgaccagtaattactctcccattgaatttgcagggtggctataggcacatagatacagcttgggagtatggtgatcagagagaggtttctttctctatctctctttgttacttactactactactacttgttttgtctgaaagttttgagtttagaggtaaacaagttttactcttttttaaggtcggtcaaggaataaagagggcgatcacgctggccttgaaaggagggactctttgtgactcgaagctttggtacacattaattttagaaaaatga

SEQ ID NO: 153226 - DNA, 860 bp, Arabidopsis thaliana landsberg
ggttttcgattgttactggggaaatttctggtggtggtgacacaatgagtagacctaacacccgaaacaaaaacaagagacaaagaccagacgctgttgattcttcttctcagattctccggtacgataaacaaaaacccaccttcttgaatattagcttttcacaaagctagcatctttttgtttaaaaaatgtgttctttttgcaggaaaattcacgaggctaatgatgtaactgatgatgacattaaccaacttttcatgatttggaagccagtttgtcaaggttgtcgtgtaaacactcgtgacaatcctaactgcttttgtggcttggttccaccgcttaatggaagccggaaatctggtttgtggcagaaaacgtcggagattattcagtctcttggtccagatccgaccttggaccgtcgtgattctgaatctacacccgctggtctgactaatttgggtgctacttgttatgccaacagtatacttcagtgtttgtacatgaatactgctttccgagaaggagttttttctgttgaggttcatgtcttgaagcagaatccagtcttggatcagattgctcggctttttgcacagttgcatgctagccaaaagtcttttgttgattctgatgcttttgtcaagacgttggagcttggatatgggggtcaacaggatacccatgagttctcgacattgcttatttccttgctcgagcgtggcttactccatactggagccaaagccaagacaatcatgcaagatctctcaaggggtagtggctcatatgtcaccaccatagatcgaaatgatgggatattcaagaagatgcaaatggctatactgcacacttga

SEQ ID NO: 153227 - DNA, 210 bp, Arabidopsis thaliana landsberg
gccttgtggttgaaacctgatgatcaattttgtacggaaatgttgaacgtggctctcatggatgaatgtcagaacggggttgattcaaaggttgagctctgctaggaattggtcagttaaaattaaccgccttattctagttcttgttgtaatttatctgtactatcatcattgtgacgcctaacataacttataatttattccatgcat

SEQ ID NO: 153228 - DNA, 818 bp, Arabidopsis thaliana landsberg
aacggaaaaaatgtcgaagaagaacaatttagccaagagaaagaagcagcacgagtacaatctccaaagtaggtttctttaaatctctttaaacgctttcaattcaatacgcatgtgtttctcaacaaaacttggaattttttcgatttgcagaagagaaagagttacaggacaagaagatcaagaagcttcatgccaacaagaataagatgaaagtaaggaccttttctgtctctcttatctcttaattctgatatttagttcatatacattggtgttcggttaagtagcggaccgattctgttgcagagcatggtcttttctagctatatattactctagttggttaccaatggtgcaatgattgaattcgcttggattcaatttgatttcgatagtgttagtcagaagcttatgtggggtaaaaataataatattgaatcttcttagtagaacatcttacgaataagtttgagttttccaaatcatttaaatgaagtctagagtagtttatgatatctgtgagttggtttattttgttgtctaggttgatggaagtgggaagaagaagaaaggtggattttctgttggcaagaagaaattaaagacaaaactgactccaactgctaaagctaaagctgctcaggcaatggagctagacaattgacaaggaacttcgttttttttcacttgtatgtaaaattgttcttcattgatcttcgtctttattttggagaaatcatgttgaagctagcttcttcttataggttaaactcttatgtatcactctctcttttgaatgcaagattttgctatct

SEQ ID NO: 153229 - DNA, 302 bp, Arabidopsis thaliana landsberg
aattgaacaaagaatcaaagaaacatagaaatgaattagatcgtaaagaagaagctgaaatacgcaaaggggcactgagagaaatgaaagaacatacctttaggaagaggcaaatcgtttggcgacgacgacaccgttacaatgtccctctagccaatgaaagtggatgataagaaaaaattatgacaaatcggtttggttttggttttgacggagaatatatgaatcgatccacacagtttaacctagatttatttgagctgagactattaaaccccaaacatatgaatcagattccaaaa

SEQ ID NO: 153230 - DNA, 638 bp, Arabidopsis thaliana landsberg
  unsure (1)..(638): unsure at all n locations
agatattagcagatagaagagcagcttctggcaatacttcatctgttccagcccgtgtccaaaatagaaaaggtacaccgaagctgctctcattcaccagtttacaacaatgaaacgagtcttacctcttatgtgctcatcatttttttttcctattctctagattctcgggaggtgcctgtgcctcagcaccagaacaataaaccagcctctgccactgccactgccacaaacacagaaaacggcttcttaaccaggtaagcaaagagcttttgctttcgctggagatagctttaagatttgacttgttgtagcttaatgggtaannnnnnnnnnnnnnnnnnnnnnnnnnnnattgattgtacgtgaagtttgatccttgtacaactcttggatctgcagtagtttagtcaaactaatcagtcttatctaccataaagcgtgcattgttgtatgtgagtcatgaaatgagcattgtttataacacacaatattaatttccgtgggaatgtatcaggttcacaagaaacgcaaacctggttgcagcaggggtgatgaagaacatgaagagagttggtaactatgtgaaagaaactgtggatgattccttggacccatatcgcaagcgaccaaaataa

SEQ ID NO: 153231 - DNA, 866 bp, Arabidopsis thaliana landsberg
gtcttgctcgaaggaagagctgcagaagaagtgatctccggttcagatacttcaaaggcatcagtcgattatctctctgacgcctcatggctagctcgtaaaatcttaaccatgtgagaggcccaattttgcatattttcacattcccctttaaagtaaaagcttcttcttactcaagacttatatatatttggatttcagatggaacctggagaacccaatggtgatacatggcgaaccaccaccatggagaaagagacctcagttcgtgggaccacgcttagactttgaaggatctctctatgacgactatgacctcgtcgagccgccagttaacttcaacatggatgatgaagtcgcacatagaagcgaagaactcattagccagatgtataacaaaacagtttctctcctcaggcaaaaccaaaccgctctcctcaaaaccgttaaggtaatttcaaacatttaaccgcaattgcgttttcgtttgatttgttcatacttttattttcccatgtgtaggttctattgaaccagaaagagataagtggagaagcaatagactttcatacttgaccattaccctcctcagactccgttaaattctctcttacaaagagcaaaatccgggaagtcttccttttgtccctgaacatctccggcgtgaatccggcgactttgtccttgttaatcactctaccgacgtcaatgctcaagtatgattccggcgtcccagagacatcaaatcactaagcttaggtttattcattgtccgtcattgtaacttcgactcaatctctgaagtaatcagacagatatatttacagaaataaagaaaaaaacttgggtcaaagacacttctttga

SEQ ID NO: 153232 - DNA, 696 bp, Arabidopsis thaliana landsberg; identical to SEQ ID NO: 43415

SEQ ID NO: 153233 - DNA, 561 bp, Arabidopsis thaliana landsberg
cggttcactgggtaatggaggtggcctttttgttttctgcttaacaagcttttgagagttgaagagaggaatcatcaggggagattagaaggacatggagattcgacttatccgaaatactgcctattcgatgatccgttggtgagtgatggaaagtacagagatgcagggttgccatcctcttcccacatggaggtaagaccgatcaatataatttaggaaatctatattttctgtgcaacttatcgccctctttgccacattgctattaggtccctcatgtacatcagttagcttcatgggattgcggtctcgcttgtgttcttatggttctcagagcaagtggcatcgcaagctgcactcttgaggatttggctgagatatgctccacaaataggtttgtatataccttaataaatggtcctcaacagtgtaatcccattatatatattatgtgccctatctgcttcttcaagatgagaacattagatctcaatacgatacttatcatcgacttttgacatttctgcagcatttggactgtcgatctcgcatatttac

SEQ ID NO: 153234 - DNA, 1979 bp, Arabidopsis thaliana landsberg
  unsure (1)..(1979): unsure at all n locations
tgcagatgcaaagacgttgtggacatggtatgaaccatacattaaagatgatgaggtaagcagtttttatcaagttctgagagtagtatacaattatgaataccattttattattatcaagctctcgtgaaaaaccgtatgcaattgcctattcgtgcatctgggttcattaaagttgctgtgtcagttagcatcacgcttttctttcgttccctaatatggtttattaatggagaagctcttgttaggattcttactgagataatcgcacaatgaagtttggaacaatagaatagagtatgtcactgacctgaatggctacaattataccggatcttatcttttagactcttactgtcttggagatccctggaccctttttagtatgtatgagatcatgtggcctactgcttagaaaattatgtgttgtggacttgtgggttcacctagttatcagaaattcataacatgcactccaacttctttgaacatggctctgcactggtatacagttcaacgtgaattatgtttttttgtcttcagngagttttcaccaggatcaaatggacggatgacgacaatgggtgtttatgtacgtgatttgctgcttggactggtgagtcacaagtctttatattagatggtcaaattttcctgtcttctgtgaattctccatggaaaactgatttttggctgggcagacttggatgcatctgggttgtccatggggtctataaatatattttatgatactgagaatttgaagtgatattaacacaagaacttttattcgttggtaagatgctgtgtgactttacactgggctatgttttgtcaggaaagtacaaacactcttttaatgacagttgcttgtttaaaattgttcttagttaccatttgataatggtctttgatacctaaggtgtggtagtgtgaacaattcattagattggtttgccctgcgacctttatcccttaagatgattctaagctatgttacgagtgaaatgtagcaatgcaaaccaatctaataaatagcttagattctaagctagttaccattgataatggtctttgatacctaagctatgtattcgatattttttttattttctgttcgttttagtaaacatccgttagcttttgctataaatgtgtttattagtcatttatcataatactttaatgtctccatgatgccaattcctgaatctgacttactgttgttggtttttttgcagtactactttgatactttgtttcctcgtatacctgttcctgtcatgcgccagattgtatcaaaccttgagaagatgaatttaccaactaaaccttctggttcaaccggagacatgacccgtggctcagaagacactgcccgtcgtccaccatcagtaaaagcatctctctctgtttcatttggtcagcgtgcacctcatcgtgcttccaccagaggctcttctcctgttcgccgtcctccaccgactggttatgacagaaatggaggcgatgaagtacaacagcggtccccacgtagaagccagagccgagactattattctgacagagactcagatagacaacgggaaagagagagggagaaagaccgcgaaagagagagggggagggatagatacagagaaagggagagggattatggtaatgataggagatcaaggcgcgactatgatagtagaagcaggcgcaatgattatgaggacgacagaagtagacatgaccggagaagcaggagcagaagcagaagtaggagcaggagtgtgcagattgagcgtgaaccgactcctaaaagagatagtagcaacaaagagaaatcggcggtgacagtgaacagcaatctcgcaaagctaaaagatttgtatggagacgcaagtagtcagaaaagggatgaaggatttggaacaaggaaagattcaagttcagaagaagtgataaagcttggtggttcctcttggaggtga

SEQ ID NO: 153235 - DNA, 1489 bp, Arabidopsis thaliana landsberg; identical to SEQ ID NO: 62673

SEQ ID NO: 153236 - DNA, 799 bp, Arabidopsis thaliana landsberg
ggaagcgtagcttcgaggaggaagaagaagataatgatgtaaacaaagccgcaatttcagaggaagaagagaagcgaaggtcagctctaaattgaaaagcaaatctgtagggttttgattttcttcaatttatttgatgggttgttgaaaaggttcgatttttgtttgatctacagattggcgttagaggaggtgaagtttttgcagaagctgcgagagaggaaattaggtatcccagctttatcttctacggcgcaatctagcatcggaaaagtgaaaccagtggagaaaactgaaactgaaggagagaaagaggagcttgtgttgcaagatacttttgctcaagagactgctgttttgattgaagatcccaacatgtaagcaaatctctctttacaaaaattgtaacctagtttgcttggtagttaaatagattaagctagagtgagctgtctttgtctttgtctttgtaagtgttgaggattgttttgattctttagggtaaagtacattgaacaagaattggcgaagaaacggggaagaaatattgatgatgcagaggaggttgagaacgaattgaagcgagtggaagatgagttatataagatacctgatcatcttaaagtaagttgtttagtgtcgatgtttaataggggttaagattgttgtttgttactaaaagccttccttccttctcaggtcaagaagcgtagctcggaagagagctcgacgcagtggactaccggaatagcagaagtccaactcccaattgagtatgaatacattctcaatcatagat

SEQ ID NO: 153237 - DNA, 463 bp, Arabidopsis thaliana landsberg
gagaacccatatgcggaaatgttgaaatcagatgaagaattggctcgaatgttgcaggttttatattacttatggtcttcacgggaatttatcaactgattttgatgatgatgatgttttgattttatgtttcttggttttcaggcagaagaagatgctattatgtttcaacagtttgtcgctgcacgagataacggcgaattcgaagggagaattaggccttatgttagtcaagttctcatggtaaaagacttgattatttgaatctttgatggttgattgcaatttttgaatattggtttatgtgctgatgcatgattactattttgtgtgtgttcagtatgaagatccagtccgccaagatgctgctcgaaagactgttcctaaagacgagcttgaggagaaagcattggtttctctggccaaggcttgtgtttatgttcatcgattaactgaactataa

SEQ ID NO: 153238 - DNA, 1755 bp, Arabidopsis thaliana landsberg
aatattcttaatttgtttcgttgttttgtggttttagatatcaaacgatctggtttgtcggatttgatattggagcaatggctttggtgagtccaattccagcaatgggtgaaagagctggatccatgagatttcacggaattggtagcccaggatcaaggtctagtaggagcgggattatggacgaacctgtctcgcggctgattgacgagaagatcttcgttgcagtggataaacacgtggccaagagcaaatctacactcatttgggctttgcaaaacactggaggcaagaagatttgccttattcatgttcatcagccctcccaaatgatcccacttagtatgttcccttacaccttgtctctgtgctttttttccacttagtcttgtttgtggtcactgatcttgttttttcacattgattcatcctagtgggcgccaaatttccagttggtgctgtgaaggaggaagaagtcagggttttcagggaaaaggaaagggagaaagtacatatgatcctagacgactaccttcgtatatgccagcagagaggggtatgcctccatctattttccttttctttagtgttgatgttatgcccttaatagggaacttgttttacttcattggctagcactacgattatagtgtccttatgatagatagtgtatttatgattgtaggtcagggcagaaaagatgtttattgaaatggaatccatcgagaatggaattgtgcagctcatctcggagctgggaatcaggaaacttgtcatgggagcagcagcagatagacactattcaaggtatgcttatggcgagtcacgaagcattttttgggatctctacttattcatactgaatcaactcctgtagatctgtgtgcttcttactcttcaatatccttatgttttgcttcctctatcaatactttggctttcaggagaatgacggatctgaagtccaggaaagccatcttcgtacgccgagaagcacctactctttgtcaaatatggtttacttgcaaaggatacttgatacatacaaggtttggccaattcttcttctcatcacaaccgaatccttggatttcaaaatgacttgtacgaatcagccatgcataattattactctagtagtctttaagcttcccgagatctgcattggcattgaaaatgacgcatctgtggctgcttattagtaataaatattgtactatcattgcagggaagctactatggacgacactgaatcagaatatgcatctccgcgtccttccataagtgcaagtgatctacttcaaactttctctacaccggagtctgaacatcagcatatatctcgagtacagagcaccgattcagttcaacaattagtaagcaatggaagctcaactgaacaaagcgggagggtgtcggatgggtctttaaatactgatgaggaggagagagaatctgatggcagtgaagtaacgggaagtgcaacagttatgagttctggccattcatctccctccagttttccggtatgccatgttgttcctaatggaaaagcaatgcattttgattttcatataacattgtatctcagctgtccaggaaatttgtccatcattgcaggatggggtggatgattcttttaacgttaaaatccgaaaagccacgtcagaggctcacagttcaaaacaagaagcttttgcagagactcttaggcgtcagaaagccgaaaaaaacgcacttgatgcaatcagaagg

SEQ ID NO: 153239 - DNA, 418 bp, Arabidopsis thaliana landsberg
ttgagttttgtttacgatccttaataccacatagtcagaaatattaaaagaagctaagagatcaacaacaatggctgttggttcgatgaatgtcgaagaaggcactaaagcttttcctgcgaagctgacaggtcaagtgtttctttgctgcgtcattgctgctgttggtggtctcatgtttggttacgacatcggactctcaggtttgttctcctattggtttttgtctgtcagggtttgacagtttttctagtgatatcaattaatggtgatcaaaatttgcaggaggtgtgacgagtatggacactctcttgttagattttttcccacacgtgttcgagaagaaacacagagtacacgataacaactactgctaattcgatgaccagctcttgcaggtggtcactttctcactcta

SEQ ID NO: 153240 - DNA, 324 bp, Arabidopsis thaliana landsberg
ctagctcacttcggttagaaggttcttctagcgattatgctgataaactcgccgttaatgaaatctttgaggtagcttttactttaagttttgtgataactacttatggcttgtagctacaggatagtaacctcttgacccataccataggtcgcacttagtgagagtgaaggagggtcattaatattgtttctgaaagatattgagaaatctcttgtggggaacagtgatgtgtatgcaaccttgaaaagcaagcttgagactttaccggaaaatatagttgtcattgcctcgaaaacaaagttggacagccgaaaggagaaa

SEQ ID NO: 153241 - DNA, 1143 bp, Arabidopsis thaliana landsberg
ctacaaatcactgtcatttatcaaacaagcatcagccaccaattcatcatcaacacctgagttgtttgcatttcgaatctcactgtgttcgacattcatgttgtcatcagggtcctcaactttcataaagctttgtcttcctgtctgcattgttttgttaatctcatcttctacttcactttcagtcaaatccttctcatccatcaaatctattttcgttatatctttttcaaatgacttcttatctttctcttgtttagcctcaacctcctcttgatgcagttgcaagtctttctccaattggacgaccccaacatcatcacttttctcaaccattatattaccaacagaatggtcctgtagattcttttcagcttcactttctgacttctcctctccaattacttcaggcctagacccatcgtggactgaatgatcctcgctctggcttagattgacttgcgatgagcctccttcaatatcagaacttggacacttctctgtggaagccatatctctggatataggttgatgcactacggccacaccaccactactttcaactttgctttcttgagatgtaggaattctctaataaagctcaagtatttggcctcggatatctgaaaacgcaaatgataaataaaccacatcagcaaggtctacagtcatcaaagtcaataatttttaagaaaagaaaaaagctaacacataccttctaattgacaagctgtgatatcaaactcttgacacaagacctctctgtaagattgtaagtccactgttggcagctcagcagcaaggagaatagcacctgccgctatgtgatgaggctgatactgcaggcagagtgtcgttcgcagactgcaatagacttgtgattgtatgaagaaggaaaacacaaggcgtatggagaaccatcagaattcaaaaagctttcaagtaacataatcaagcataccaatcgttgacaaaattccatgcaaattgggcaagttgggtcttagcatcttcaaccatatatttcttaattgcttctacaagaggtttataagggtggctaatacagagatcaaagttcaatgtagaaagaacaagctcctctccgattaatacaagctttttctgttggtcatatacttc

SEQ ID NO: 153242 - DNA, 2425 bp, Arabidopsis thaliana landsberg
atttttttatgattttgttcttttgaatttgattgggaattaggcaggtaccttaagcatctaggatatgaagtgtcttacgttcgaaatttcacggatgtggatgacaaggtgagctaactctgcttcttggtggttagctcagagattcaggggtcttatacaacttaagctctgtttagaagtttagagacagcttctcgagttcgttcaggaaagttttttagtgagaacctcttaagattgagttttgtggtaccgttaggttaataggatgagtagccagtgtctgttatggcattcctggaccgcgtttaagttatttattttcttggcggctacatattgggcagtagagaagttgaagctgattgatcttatttctagtgtctccaatactgttatttcatctcatttacttgtgagaggcatgtaaaaggatggatcatagtgccatcaaagttgcaagatttgaacgtttagactgctaaagttattatattggtggttgaggctagtgaaaatgttgtactatgaaatgccaaaatggagaatagtcagtattttctctttgttagggagaagttcacttagttttatcctttatgtatgtgtctgctcttttacatctgcctacgtttgtgtcaccaactttgattaaccttaacacagactaattagctagaagaatagaactaattagtaatgtcctttactagatttcctccgtattgtgctacaaggatttcacaaatgttttctttatttcagcctctctctgactatattttctaggggaactttcactttttcttattgaagttgtatatggctagattctttagctacatatgcaactgactcatgaaatttcaaattttgtagattattgccagagcgaaagaattagaggaagatccaatcagtttgagcagacgtttctgtgaggaatttaatcgagatatggaacagcttcaatgtttagatccgtctgtccaaccacgagtttcagatcatatacctcaaatcatcgacctgatcaagcaggtttgaccacatttacttcactttgctcctcatgttgctaaaaatctaagatatattctcatatgctatgttttccaattcagattcttgataatggctatgcctacaaagttgatggagacatttacttctcagtcgacaaatttccaacatatggaaaattgtctgggcgaaaattagaagataaccgtgcaggtgagagagtcgcagttgacacgaggaagaaacatcccgcagattttgctctgtggaaagtacgctttttagttacgttttagccctacattgaatacttgtttactcatttaagtcttaaaagacttctgaatttttgggcaggctgcaaaagaaggggaacccttttgggagagtccgtggggaagaggaaggcccggttggcacatagagtgcagtgcgatgagcgcggcttatctcggttatagttttgacatacatggtggcggaatggatcttgtgttccctcaccatgaaaatgaaattgctcagagttgtgctgcatgtgatagcagcaacattagctattggatccataatggttttgttactgttgactccgagaagatgtcaaaatccttggggaatttcttcactatcagacaggtaaacatttctcagttttgcaattttcttcttacatccaatatttatgcctaaatttcgtgtttacaaacatggcaggttatagacctttatcatcctcttgctctgagacttttcctaatgggaactcattatcggtctcctatcaattactccgatttcctcctcgagagtgcttcggagcgcattttttatatttatcaggtaatccctcgttatatagcttttagtcggattgaagattgcattttggagtacctcacttgtttctttagcttaagatgctttaattaggctattgaaaaaacatttaagagaacattatgttcttcttcactacaatccttcgacgatgctcataagcttattgacagacagtacacgactgtgaaagcgctttaggcgaaaaagattcgcacatttgagaatggttctgttccttcagacactttgacaagcatcaacacattccgtctgaaatttgtcgcctaaatgtctaatgatcttctcacacctgtaactctggctgcaatgtcagaaccactgaaaactatcaacgatctcattcacacccgaaaggtaaatataacgtctgcttttacgtttataaacctttataaccggttaatgatatagttgatcattccattttcaggggaaaaaacaagcaagaagagaagagtcacttaaggctctagagacaccaatcagagatgttcttacaatcttagaacttatgcccacaagttactcagag

SEQ ID NO: 153243 - DNA, 603 bp, Arabidopsis thaliana landsberg
caatgcagtaatcccgctcgtatgggattattctgtaagtgacttaactttcaatatctagaaattctttgttgctggctactaaggatatttatttcctcacacatttggtctgtcctttatatgcagccacttctcaccattgatacctgggaggtataatatatgctactcatctctctctatctgaatttcacctaaagcgattggtttcttgattgctgatttagttttctttttccctctttgtgccacacagcacgcttactatctggattttgaggtaatgcccgaataaagtttcacgaaatttgaaagcaatggtctcatgcttgttgtgttttatgcagaaccgaagagctgaatacataaatacattcatggaaaagcttgtgtcatgggaaactgtaagcacaaggttggaatccgcaattgctcgagcagtgcagagagaacaagaaggaacagagacagaagatgaagagaatccagatgatgaagtaccagaggtctatttagatagtgacatcgatgtatctgaggttgactaaaacttgtgaagcaataacattagcatcttaaatgttaattacacagagcaaa

SEQ ID NO: 153244 - DNA, 293 bp, Arabidopsis thaliana landsberg
ctaaagatagaaagtacataatactaagagatatttaacgttttgaaatgtaggctgttagattagccgtcgccgtcgttcttgtattctgatacgttacgtcgtctaatgctcagatgacttcaccaccgagcggcggtgcaggaggagacgcacactcactgccgtgtattcagaaactgatgccgtgtcagccgtatcttcacttggcgactccgccgccggcgacgtgttgcatgccgttgaatgagatcgtagccaaagacgccacgtgtctctgcgctgtctttaac

SEQ ID NO: 153245 - DNA, 391 bp, Arabidopsis thaliana landsberg
gtttaccagttggactcagatagaagcttatatctgtacctgataatttgcagcaaatatggatgactggggtaagactatgctttaagtgtcctctcttatattctctatttgtatctaattatagtcttcttatttatttatagtatttgattggatatgcaagcaattttagattatttgctaatctgatgggtttcatatttgatatttcaaaatcgtatcactagcatgtgagtagtcttataatttttattttctgattccagaggacgagaaaattgcaccacttccagctaaagttgagcttaaaagtaactgggatgatgaagatgtggatgagaatgaaattaaggattcatgggaggatgatgatgatgaacctgctcag

SEQ ID NO: 153246 - DNA, 553 bp, Arabidopsis thaliana landsberg
  unsure (1)..(553): unsure at all n locations
cagctgagaccagtggtcagaaaaccagtacagtgtctgataacaacactatttctttgtctctatctgaagaacctgcattggaaactcttaaagaatctgttgatacatcagctgaggttaattcctgtctatgaattaacttttgtgattggattttggtttaggatgactatgttttaaagactcctgaaatttaatatctggtttcttctactttggatctnnnnnnnnnnnnnnnnnnnnnnnnnnnnnnnnnnnaccttcaagtatgttggaccatattgaacttgagttcgaaggtaagtcgagacctttactctgtatttgcactgttttcttaaaagtctcataattatgtctatggaagaggcttggatcaaaatattgacatgaagagtttgtttgtgtgttcttgattatagcacatatcaatgaacttaaagaagctggatctgatggtatcaacaaagttgaggaatctaaagatgatgaagaaggttaccaagaaccgaaaagaacacgtctctttgatcagaaacctaagtgctaa

SEQ ID NO: 153247 - DNA, 1711 bp, Arabidopsis thaliana landsberg
gacgagcacacggctgaagaatttgcgacagaggcgacacatagtgcacagatcatgtgggttaagtttcttagttctctttagagaacaatcgagattcttggttgtgttaagagcaaatctagagctcttgttggttcatgttatgtattttgtgatgatgttctgtttcagagtttgtgtgttggttgtatcaggagaaagaggctgggagatagagagaaagagagtctctgcgaaaactaataatgttttttcagatatctaaataataagctttttgcatacattgtattgtaaatttgtaacattcttctcctctcttccaatgatttttttttcttgttgactattcttactaaataacgatgaggtaaaatataggtaaatgattatcatttttttttttacttgctatatcatttcaactgggagaggttaaaaatacaaaaatagctttaagcctttaataacaatattggcaaagtattttactatgagatagaaaaatggtttttggtgtccactataaaaacaactagaatgatcggtcaatttgaatttacaaggaacattgaagttctcacttctaatctattctgatttactctgaaattttagttatagtttgacctactaattaaaatactctaaactaaaacgtactagttttttttttttttaaacgtactagttgaatccgagaaacgctcaactcaccgtttttttttgttttaaacaattcacacgcggccgaatgcattaaaatctcgcatgcgtttattaagttgaattttctgttaaaagtatataagatagtgttacgattacgtttattaggtagagagatatagtaagaccaaacaaataaaacaaaaaattgctaaatggttaggatgatgatgaaagtagcgttttgcaatgacgtgtcttctggttgctgtcacaatcgccgatgcagtgtaccgtccttggccgtcggagtgcgtagaagtggcgaacgtgatggtggagcagtgcaaaatgttcttcgtccatcaggagtctccgcccactgctgagtgttgccgctggttcagtagccggcgtaagtatgcgaaggagaggcggaggctttgccggtgtttggagtttctgacaacagccttcaaaaacctcaagccagatgttttggctctttccgaccagtgccatttcagttctggcttccccatgtctagagaccacacatgcgcttgtaagtgtcattgctttgatctaccaaaatttgttagccaaaccgatattccggtgtgattctgatttgattaaaccggatttgatatctctaatcaaaaagtgaaatgcttgatttcctttgtatcttaaaaggctgacgatttgtctcttgtttctctgtttctacagagtattgcagacttaaagccgacaagaactacgaagaacatctttcttttgtatcttaaggctgttgcgatttgttcttttcatttattttattttgggcggtaaaagacttcatatattttaaatttattttgtatcttaaagctgttgcgatttgttattttcatttattttatttttggcggtaaaagacttcatatattttaaatttggcttaaaaatgttgtttcaaccaaagaaaggaaaacagaaaaagaaaaaaaaaaaaaaaaagtaaaaagaaaattatcaaaaatatactacg

SEQ ID NO: 153248 - DNA, 1540 bp, Arabidopsis thaliana landsberg
atggatttgatagcgggagagagctcgaaggtgttgaggaaacaaggtttcaggtcgctgaaactgatgagtgtggacatggaacaagaactcggtaacgagcttgagccattcggggctgattatggaagactcgataatggtctcatctactatgttcgccggaactccaaaccaagaatgagagccgctctagctctcgccgttaaagtcgggtatgtcttcttcttctttttttattttggccacatttggtttcaatttgaattgaattgaacttatgaattgaaattactggaaattgagtcgaatgttgatttatttggtcactcttcagtgttgatccaactttgatttgattaatgattcttcttgttatcttttatgaatagatttgtgacatgcattgatatattcgataatacagaattgtgcgctataaatgatgctgacacaccttttggtttattggcagttcagttttggaagaggaggatcagcgtggagttgctcatatagtagagcatcttgcatttagtgctacaacgagatatacaaatcatgatattgtcaagttcttagagagcattggagcagagtttgggccctgtcaaaacgcaatgactacagcggatgagactatttatgaattgtttgtccctgttgataagcctgaattgttatctcaggctatttccattttagcagagtttagctccgaggtaatgtctctgtgactctgtctcctcctttttgttactttatttttttctttccataagaaattagttacacggtgtttttagattcgagtctcaaaggaagatttagagaaagaaagaggggctgttatggaagaataccgagggaatcggaatgctactggaaggatgcaagattcacattggcagctgatgatggaaggttcaaaggtatgtgaggtcttttgttaatcagttgtctagtttaagagagaggccaatgttttcttaaaaaagactttcatttaactgcagtatgctgaacgtttacccattgggttggagaaagtgattcgatctgttcctgctgcaactgtgaagcaattttaccagaagtggtatcatttatgcaatatggcagttgtggctgttggagattttccagatacaaaggtactactattttagtttatgactatgattatgttgtactgttagagtttgttgataatccttgtttctagactgtagttgatttgataaagacacattttgaggataaaagatcaagtagcgagcctccacagataccagtgtttcctgttccttctcatgaagagacgcggttttcttgctttgttgagtcagaggcagctggggtaagtcaaatttaactctccaaacgtcttcctgtattatcccgatgtcaactcctaagcttcttttgtggttttttttcttgtagtctgcagtaatgatcagctataagatgcccctaagctcctctgaagacagtgaaagattataaggataagacttgcagaatcaatgtttctaca

SEQ ID NO: 153249 - DNA, 1097 bp, Arabidopsis thaliana landsberg
atgggaaacgagacatcgtattacttccccgggaaaatttggatggacacacaagggaatccaattcaagcacatggcggagggattctgcttgacgtgaaatctaacacttactattggtatggagagtataaagatggaccaacttaccatgctcacaagaaaggaccagctagagtaagttccactttgtttcctttgtcctcagatgtatggtcctttgtctgtattttgggttttaatttccgatcttgtcttgtcttcaggttgatattattggtgttggttgttactcttcaaaggacttatggacatggaaaaatgaaggcattgtactcggagctgaggaaacaaacaagacccatgatttgcataaatccaatgttcttgaacgacccaaagtgatctacaatgaaaagacagaaaagtatgtgatgtggatgcatatcgacgatgcaaactacactaaagcttcagttggtgtggccattagcaatagcccgacaggtcctttcgagtatctatacagtaaacgtccacacgggttcgatagtcgggacatgactgtcttcaaagacgacgatggtgttgcttacctgatatattcgtctgaagtcaatagtgtgcttcatattggacccttgacggaagattacctcgatgtgacaccggttatgaagagagtaatggtgggacaacacagggaagctccagctatcttcaagcatcagaatatttattacatggtcacttcctggtgcactggttgggcaccaaatgaagccttggctcatgcggctgaatctataatgggtccatgggagaaattggggaacccgtgtatcggtggtaacaaagttttccggttaacaacattctttgcgcagagcacttatgtgattcctttacctggtgttcccggtgcgtttatattcatggcagataggtggaacccggctgatttgcgggattccagatacgtgtggttaccgttagttataggtggacctgctgaccagcctttggagttcaacttcgggttcccatcgtggtccagagtgtccatctactggcacagtaaatggcggctgccttaa

SEQ ID NO: 153250 - DNA, 2091 bp, Arabidopsis thaliana landsberg
aaaattacagaaatgtcaatctcatcgtcctcctttgtctctctcactttcttcttccttcttctcgtttctttatcgtcatcttccgatgacatctccgagctattcgacgactggtgccagaaacatggcaaaacgtacaattcagaagaagagaggcaacagaggattcaaatctttaaagataataacgacttcgttacccaacacaatctcatcactaacgctacttattctctatctctcaatgccttcgcggatctgactcaccacgagttcaaagcttctcgtcttggtctctctgtttccgctccgtcggtgataatggctagtaagggacagagtctcggtggtagcgtaaaggttccagattctgttgattggagaaagaagggagctgttactaatgtcaaagatcaaggaagctgcggtatttgatttaactttcttcttcatcaaaatttcagatttgattggagtttttagttctgcgacttaggatgtgattcaagatcaagactttagaatcagaactttaagattggatttagatcggagaaagtcttaaaatttagaatctttgaggatgcagattcatcttctgtggttaatgtatgttacaggaagaccaatcatgacgtagtttgtcacagtaatctaattttgcatctctttcacgctttttgtacgtattaggagtataataagtttgcctttctttttctcatatttaattatggccttatggccgagagtaatatagtgattgaactttttaggaaagtctagaagcaattatcattgtgctatcttttatgaaagttattgtttgatagagtaggcaaatgtaggaatttggtcagaaatagtaaatttgttctcagatgaatccatattgatcatttgagtgggtgatgattataggggcatgttggtcgttctcggcgactggagctatggagggaatcaaccagatagtaacaggagatctcatcagcctctctgagcaggaactgattgattgtgacaagtcctacaatgctggctgtaatggtggtctcatggactatgcttttgaatttgtcattaaaaaccatggaatagacacagagaaagactatccttatcaagaacgtgatggcacctgtaagaaggataaggtatctgtttagctgtttctccttgttttaagttctcttccctgtttgtttccttgatctttgacatcactaacgtacacaagtctcttttgttctgcagttgaaacaaaaggttgtgacaattgatagctatgctggcgtaaaatcaaatgatgagaaagcgttaatggaggctgtagcggctcagccagttagtgttggcatctgtggaagcgagagagcgtttcagctatattctagtgtaagttgtaagattagtgatcaacctactctattttctgaatgttcaacgtctcattgtttagaaattttaccttttgatgcagggaatattctctggctcgtgttcgacatcattggatcatgctgtgctcatagtaggatatggttcacagaatggtgttgattattggattgtgaaaaactcatggggaaaaagttggggaatggatgggtttatgcacatgcagcgtaacactggaaattcagacggcgtttgcggaatcaacatgcttgcttcatatcccatcaagacacatccaaacccgcctccaccgtcccctcctggccctacaaaatgcaaccttttcacgtattgttcatctggagagacttgttgctgtgcaagagaattgtttggtttatgcttctcatggaaatgctgcgagatagaatccgctgtgtgttgcaaggatggtcgtcattgttgtccacatgattaccctgtttgtgatacaaccagaagtctttgccttaaggtattttagctgtggatatatgcatactgatcacgatgcctacttctatgttttgttgactgatgaagctatttcttttctgacagaaaactggtaatttcactgcgatcaagcccttctggaagaagaattcttcaaaacaacttggccgatttgaggaatgggttatgtga

SEQ ID NO: 153251 - DNA, 116 bp, Arabidopsis thaliana landsberg
ccatatgattcaggatgatggggtcaacgttcctccacctggggagccaccgactgatgatcctattgctaaggagttcgagcccattgattctggaagcgaacttgaggaagacg

SEQ ID NO: 153252 - DNA, 651 bp, Arabidopsis thaliana landsberg
tatgtaagtcttaaacaagtttcaatttgttccccgctgttagagcttaagaaacggcttgttttgtgcgatggcgagaagcccgattaaattccctccaacctataatacgaattcgattctgatcgttacgccggagcaaacttgagagaaggggagaagaagagagctcctgcttggtacgtgactcaattgcacatttgaaaattatgtggttatctttaaattaacgaaacatttgggtgattcttaacttgtttatcttgttggtgttattaataggtgtgataggatattctggttaggaaaaggaataagccaagaatgttataagagatcggagataagaatgtccgatcaccggccggtgacttcgatttttaacgttggagttgaagtgttcgatcaccggaaacttcaaagagctcttcacgttaataacgcagctgcttctgctgttcatcctgaaccttctttttgagtctaataagtgtcttataaaaagaataataatttatacgctaatttctgcaattttttttatacatgggattcgtttgggttttgattttgttattgttttgttccggttaatctataatctaaccaaatttattttttttacttgtcaatacgagccttttaatttat

SEQ ID NO: 153253 - DNA, 494 bp, Arabidopsis thaliana landsberg
cagggctcgcaaatctctctattacaggttagatctcgattctgagcttgactttgttttagctgctatgcttgtgttgtttcctttattggttttctatcatgttgcaatatggtttgacagttattgagaagcttttattttgtaagattggtttcccatttggtatttgataccggaaaatgaattctgtcttgtgttgtgaacagattgtggaagcgacgatccagagcttaaacaagagatggagaagcaatttgtggaccttctgactgaggagctgaagctgcaagaagcagttgcagatgagcatagccgtcatatgaatgttacccttgcagaagctaaaagggttgcatctcagtatcaaaaggaggctgagaagtgcaatgccgccactgagatttgtgaatcagctagagagagagctgaagctttgttgatcaaggagaggaaaattacttctttgtgggagaagagagctcggcaatcag

SEQ ID NO: 153254 - DNA, 387 bp, Arabidopsis thaliana landsberg
tcaaagaaaccactatgggattgtttaggccaaagatacaacacacttacaaataacaattgtctttttggagccggattttttttttttgttctctgttttctcgcttctttgatgcaacatgcaaccaaccaaatagtgttgagagactaagcaaagatttaatctaaagagaaagagtaacaacaaaagtaacaacaaatgggggcatttcctccacttcagtaacgagaagttgaagaagaagaagaagcagcagcagaatctgacacggtagaagttcttgttttcctctcttcctcatattcagcatcatcagtctcaagctggaatctacagacaggccaagagttccttgttcctgaccatggcacaatacaatctccg

SEQ ID NO: 153255 - DNA, 889 bp, Arabidopsis thaliana landsberg
  unsure (1)..(889): unsure at all n locations
taagaatggtaatttcactcttgagcttgatttcgagccattcaatgcgtctatccctcgtccaacactccacaaatacattggaaatggtgttgacttccttaaccgtcatttatcggctaagctcttccatgacaaggagagtttgcttccattgcttaagttccttcgtcttcacagccaccagggcaaggtatttgatcaaatctcttctctattaaacgcagaatcttgtttgaatgatttttgttttgctgtgtagaacctgatgttgagtgagaaaattcaaaacctcaacaccctgcaacacaccttgaggaaagcagaggagtatctagcagagcttaagcccgaaacgctgtatgaagagtttgaggccaagtttgaggagattggtcttgagaggggatggggagacaatgcagagcgtgtcctggacatgatccgtcttcttttggaccttcttgaggcgcctgatccttgcactcttgagacttttcttggaagagtaccaatggtgttcaacgttgtgatcctctctccacatggttactttgctcaagacaatgtccttggttaccctgacactggtggacaggtcaggaccattatcttcttctctttctagtagagataaacttcttgttctgtctttatcgatgagctcactattttgtgatctttgcaggttgtttacattcttgatcaagttcgtgctctggagatagagatgcttcaacgtattaagcaacagggactcaacattaaaccaagaattctcattgttagttntagtaattttgcattaaaccatggattcttgtggatgtctgaatctcactgtgtgttttggttatgtttcagcttactcgacttcttcctgatgcgg

SEQ ID NO: 153256 - DNA, 1567 bp, Arabidopsis thaliana landsberg
aaggactggacgagaagggtggggaacgataggcacttgatatgcatagaggatccgtttgagacgagccatgatctgggtcgggtggtcgacaagtttagtatcagagtgttgagggaagagttcgaaagagctgcaaggattatgcatcaagatcctaacccatgtgccaagcttttggaaccatatgttcctgaagataataatggacaaggccacaactgaacttttaaaacatttgaatcgcggattcgtgtggcttgtatatatttatgggtagaagattcatgctctgttctttttgcttttttggttgtgatttgaaatcttgcttgtgacccaacaaaaagaaaggtcttagttttgaagatttttgtatgatggtgatgtgggtggatttcttaaacgtgtcgtgttatttgcgtgacttgaaaaaagaagtgagataattttgaaaacaattttttaataataatgcaaaacagatcaatctcgcaagtcgcaacgatggcgacgagctcttccaccgagaaactgccacgtgtcctcatcgtcaaacgtcccgacgccatggctgtgttaggcgacggattcgtcgcctccaccaagttcgagatcctcaaagccttcgagtctccgcttcctcttcctgaattcttggcctatcactctgactccatctccgccattatagcccctgtagctgctccggtcacagccgatctgattcgcatcctccctaatcttcgcttggttgttactactagcgccggcgttgaccacgttgacctagttgaatgccgtcgtcgaggcatctccgtcgccaacgctggctcaagcttctccgaagatgtcgcagatactgccgtcggtttactcatcgacgtcttccgccgtatctccgccgccaatcggttcgttaagcaacggttttggccagtcaaaggagattatcccctcggttctaaggtttgcaacataacttgtgaaaaaaaatcaaattagcaacaaatatttaatgttaatggttccctctaatttgcagttggggagaaagcgaatcggaatcgtgggactaggaagcattggctcgaaggtagcgacaaggctcgaggcctttggttgccaaatttcatatagctcaagaaacagaaaaccatatgctgttccatatcattattacatggatatagaggagatggtagctaactgtaatgcactcataatctgttgtgaattgaatgagaagacattgcgtttgattaataaagatgttctttctgctctgggaaagcgaggagtgatcgttaacgtggctcgtggggctataatcgacgaggaagagatggtgagatgtttgagagaaggtgagattggtggtgctggtttggatgtttttgaagatgagcctaatgttccgaaggagctttttgaattggataatgttgttttctctccacatagtgcttttatgacattggaaggtcttgaagaacttgggaaagttgtagtagggaatattgaagctttcttctccaataaacctcttttaactcctgttctttga

SEQ ID NO: 153257 - DNA, 590 bp, Arabidopsis thaliana landsberg
tatgataaagcgtgttgctggtaaatatgcaggatgcacaagcgtatgcctttctgctcaatgttctcgcacctgaacactgtgacccggctacactagatgcaaaggatcctcttgaaagagctgaattggttctcagtcatgcagagagaatgaactgcaagcgatacttgactgcagaggagatcgttgaaggatcttcaactttgaatcttgcctttgtggcacaaatcttccatgaaaggtttgtatcgtgatgcactttcatctcccaaaaagctcctagatgatggcttgtcctgtttgattaggctggtgatggtttactcaaagaacagactcttgaatgttatggaaaaaagaacggggaaatggttttcaacttttcgtactattatcaatgactcatagcttcttacctgaaatccctttacctgaatatttttccacttaagtttttttattgttttgttttctacgctctcaattttactctgcctgtctgtacctcttgcaggaatggtctaaacaaggatggtaagtatgcatttgcggagatgatgaccgaagacgtagagacttgtagagat

SEQ ID NO: 153258 - DNA, 440 bp, Arabidopsis thaliana landsberg
  unsure (1)..(440): unsure at all n locations
agaaacttcacgaacaacagaaattgaacatcgaaacgtcggattccatgtaatcacaaagaacaagaaaacaaaccggagagatttcgactcggttttaacgatatcacgcacagaaacgatcggaaacaaaactctcgtcaagctaaagcacgcggagagatccggtgaaagcaaagcaggaaaaataacttcatcaaccgtaacgnnnnnnnnnnnnnnnnnnnnnnnnnnnnnnnnnnnccttatgaatccagcgtcggatgaagaggaagaagacgatacgaaacgagcttcgctttctctcttctctctcagaagcgagagtatcactgagttgataggtacaagtaattaaacgagagagagagagacgaaacggccaaaggtataagacgatatcaatcagctagtgagcttaaagaggatgtgggtccacg

SEQ ID NO: 153259 - DNA, 2049 bp, Arabidopsis thaliana landsberg
atgagttacacgacggcgactgctgatagtgatgatggtatgcactccagcatccataatgaatcaccagctcctgatagtattagcaatggctgcagaagtagagggaaaagaagtgtcctgaagaaaggaccatggacttcaactgaagacgggattttaattgattatgtaaagaagcacggcgagggtaactggaatgctgtgcagaaacacactagcctggcccgttgtggtaaaagctgtcgtctgagatgggctaatcatctgaggccaaacttgaagaaaggagcatttagccaagaagaagaacagctcattgttgaaatgcacgccaagatgggaaataaatgggcacagatggctgaacatgtaagtagttttgtaactgcggaagctacctgatcatggtccattttcatattttgatattctttgtgagcctaaagactaattaatctctggtatgatgttttcttcttgtttaccagttacctggtcgaacagataatgagataaagaattattggaacactcgtatcaagaggagacaacgagcaggcttaccactttaccctcctgaaatctatgttgatgaccttcattggagcgaagagtatacaaagagtaatatcataagagtagatagaagaagaagacatcaagatttcttgcagttggggaattctaaagataatgtcttatttgacgatctaaattttgctgctagcttgttacctgccgcttctgacctatcagatttggttgcatgcaacatgctaggaactggcgcaagttcttcccggtatgagagctacatgccaccaatattgccttccccaaagcaaatctgggaatctggatctcggtttcccatgtgcagcagtaacataaagcatgaattccaatcgcgggaacactttcagaatacggctgtacagaagaatcccagatcttgcagtatctcgccttgtgatgttgatcatcatccttatgaaaaccaacattcgtctcatatgatgatggttcctgatagccatacagttacgtatggcatgcatcctacttctaagcccttgtttggggcagtgaagctggagctcccttcattccaatattcagaaactagtgcatttgatcagtggaagacgactccgtcacctccacactcagatctccttgactctgttgatgcctatattcaatctccaccaccatcgcaggtagaggagtcagattgtttctcttcatgcgacaccggcctactagatatgttacttcatgaggccaagatcaaaactagtgcgaagcacagtttgttgatgtcatcaccccagaagagtttcagttcaactacttgcacgaccaatgttactcagaatgtaccacgtggcagcgaaaacctgatcaaatcaggagaatatgaagattcccaaaagtatttgggtcgctccgagattacaagtccctcgcaacttagtgcaggtggtttttcatcaggtgagttgatcaaagttacttgttgattggtatcttatctactcttgttccatattgattcttatgcagctgtgttggttttcgtatatgaagcttttgcagggaatgttgtaaagacagaagagttggatcaggtttgggaaccaaagagagttgatataacacggcctgatgttttacttgcgtcgagctggcttgaccaaggctgttatggcattgttagtgacacaagcagcatgagtgatgcgcttgcacttcttggtggtgacgacattgggaacagttacgtgactgttgggtcatcatcaggtcaagcaccacgaggcgtcgggtcttatggatggaccaatatgcctcctgtttggtcgctgtaacaaaatgaaccatatcacacaatttgaatctttctgtattttcatgcacctggcttacatgacttggtggtttgttatagttgagagaagatttgtggacttggtaaaaatttggattttcttcacctgatttttcttatacttgaaggcatttatatatactcatttcttgttc

SEQ ID NO: 153260 - DNA, 469 bp, Arabidopsis thaliana landsberg
agagaaaagaaaaagccagaaattgggaaagagtacttcaaccataagaaccttgaagaaattgttaaaagctatccgtacaagataaatctacctgaggacgatgtagtcaaaggtaaagtcaggttgttctgatgttctttactttgctttgataatcactggactatcttgcatgatgactgttttttttttttcacgaactatcacagaaactcaaatccggttagctcttattgattttctgaaaggacttatggaatttgatccagcaaaacgttggtcaccttttcaggtattgaacttccttgcttaagttatctatatatttgattttgaaggcttctgttttttgctagccataatggattaacatcaacttttcatgttttaaggcagcaaagcaccctttcattactggagaaccttttacgtgcccatacaaccctccgccagaaacacctcgtgt

SEQ ID NO: 153261 - DNA, 480 bp, Arabidopsis thaliana landsberg
atttttgctgagaagccagctgttcggcaggcattcatcaattatgttccgaaaaaggtaacaaagacttcagcactctgaccatctttgtttattggtttaatcatcaaatacaatgattcataactgcctttcgtagttatttttctacgccagatgacagaaaaggacttttggacaaaatattttagagcagaatatctttacagcacaaaaaatacagcagtagctgcagcagaagctgctgaggatgaggaactcgctgtctttctgaagcctgacgagatattggctcaggaagctcgtcaaaaggtcatttcttttttataattaattatttccatgtcatttgcttaaaaggataatgattgtggtctaaccaataaccatttattttaaatgtcatgtttgtagatgagacgggttgatccaactcttgacatggacgctgaccagggagatgactacacccatcttatg

SEQ ID NO: 153262 - DNA, 1231 bp, Arabidopsis thaliana landsberg
gagaagggaaaaggggtggaacacaaactcgaggaagctagagctgctctcgaggcaaaggaagctaggatccaagaactcgaaaactcaaagattgaatctgaacttgaatgcatcttccacagaaagattgaaactgaaatcgaacatttgatgctcacaagatctctgagttcactacaagtactccaagaaactaagaagttacattctctgaaagaagatcctgtatcaaaccgtggaaacatcttaggaaaaacatgtaagctcggtttctatatcttgacacaattgatcttgctcgtctctatacttcggtttctcgtcctacaattctctcctgcttcacgattagtaataccaacttgaaaaattccttctccttgttgtgttaccgaacattttttttgtttctccagattgtaataaataaggtctctcaaggatactgtccccattgttatagttaaattacgatgtttaaatttcccatcaacaactaaagagacattattattttgtgaactagatttttgatatcgaatccgatcaccggttataatggtttgccgacggtttttgtgatttgactcaagagtgtaataaaaccttaacttaaatcttggtttttgattcaatctagattcggttaatcaaccggtccggtctggtttttaaaacaataggccattgttgtagggagtagtttaatcggggcagaggcttatgctatgggcttggactctcaggtttcgtcttaaacctaatcaaagtaatttaagccgaaaacggaagtaactaaaattggtgtcttgactaaaaataatataaaggacataaaattaaagtccccagataaaagtttgtatgatttagggcaaaatctcagaagataaaatcattcaaatttgtgtgaatttcgtttaatccttatccaatttgtcccaatttataatcttataagaaaaataaaaatctgaaatacggtggtctcaattgctcttacctttaccaagacggccataagaaaaaaaagatgtcgaccgatatttcaccaccctactctcaaactcacgtggagcccgttaatggttatccttctgacaacaagagatgcgacgattcctctgttcctgccaaatatgatgatcttgtccgtaactctgctctcttctgggaaaagctccgagctttcctcggattaaccagcaagactatgaagtcagtttct

SEQ ID NO: 153263 - DNA, 1658 bp, Arabidopsis thaliana landsberg
gacgctttttaataagctctctctcacaacgccggatctgtagacggaagatggagtgtgtattcggtcttgttgggaatggattcgccatcgttgctgctgatacatcggcggttcatagtatccttcttcacaaaaacaacgaagacaagatcatggtacttgactcacacaagcttgttgctgctagtggcgagcctggtgaccggtaatttcctcctccgatactcttctctctctctgtagctctgtaatttagcggtggaggtagtaattttgactgtcttcggattttgggattgattagggttcagtttacggagtacgttcagaagaatgtgtccttgtacaaattcagaaatggaatcccgttgactaccgccgctgctgccaatttcactcgcggagagctcgctactgctttgaggaaggtaacctcttcttcttcttcttcttttagctctgccattagggaacggttttggttatttggtcttgtggtcatagaactatgcgagatttatgaatttaggtttttttatcttaagccttatgtgcctgtgataattgaatgttaaagcaattttaagtttgtaagaatgatattgtaaagcttgaattgaagcttccctctgtgatgttgtggttatgataacattaaggttgctgataaactcatatggcctttgctctggatttccttgtttatgattggctacttattattgatggcggaaaatttgagatatctctgtgtgttttctttatgctccattgaatcagaatccgtattcggtgaatatcctgatggctggctatgacgatgagtctggtgcatcactttactacatcgactacattgcaactcttcacaaagtcgacaagggagcttttggttacggctcctacttctccctctccacgatggacaggcattaccgcagtgacatgtctgtagaagaagccattgaactagttgacaaatgcatacttgagatccggtcaagactcgttgttgcaccaccaaactttgtgatcaagattgttgacaaagatggagctcgtgattacgcttggcgtcagtccgtaaaggatgtcacaactgctgttgtctgagttggttttgtgtttggttttcagatgttatgtgtctgtgacatttgcttttgattttaagtcgggagttagtgttttgacactttttaatcgttgagcatcaatagtgtttgcgattccattaaaatgatgatgtattacttcaacaagacaaaataaatctcactcgaaacagagaacagtatacacaaaagcttattccacaaagcaatgaccaaataaatggtttctttctataatcaacgatgcataaatcaactcacataaggaatgcaaagaaacaaaaggaatcatcagtagaatttgagagctacgagggcgatgctgaagaagagaagagatggtgagagtgcgtaggcggatgaaggagtctcagaaggtcgactggtgcttcctccgtcgtctgatgttggagctccaccgtcgacggatggtgtaaatggtcgggttgtatcagactgtggtgtctgagctgccggagttggctctggaacaattggatccgtctctggtcctggagacatcgatggtccaaatgtagc

SEQ ID NO: 153264 - DNA, 1306 bp, Arabidopsis thaliana landsberg
gttataatattcatttctatatcaattaatttgataaactaattaaacatgacgttgtaatattcatggtttccatatctatagggattctcccaaatggaaacttcgagataacccctctcaaatcaaacatgaagggtcgacaaataatcggggctaactctcttcctcattgggaaatcgccgggcacgtggagctagtctccggtggacctcagcctggaggattctatttccccgttccacgtggagtccacgcggttagactcggaaacttgggcaccatctctcagaacgtgagggtgaagagtggtttggtctactctctaacgttcggagctacgaggacttgtgctcaggatgagaacatcaaagtctctgtgcctggtcaggccaatgagcttccgatccagaccgtctttagctccgacggtggagacacttacgcttgggctttcaaggcaacttctgatgtggttaaggtcactttccataaccctggtgttcaagaagaccgcacgtgtggacctctcttagatgttgtcgcaatcaaggagattcttcctctccggtataccagaggtaaatcaattaacatatccggtttagctatagctaatgtaatattttgagtttttgcagtttaatcctttatacttcagttatgtgtttatgcttagcctgtaacattgttttgttctcttaggaaacttggtaaaaaatggaggattcgagatcggtccacatgttttcgctaatttctcaaccggaatcttgattccagcaagaatccaagacttcatctctcctcttccgggatggatcgtcgaatcccttaaaccagtgaagtatatcgatagacgtcatttcaaggttccttatggacaaggggccgtcgagctagttgccggaagagaaagcgcaatagctcagatcatccgaaccatcgctggtaaaacctatatgctctcattcgcggttggtgatgcacaaaacggttgccacgggtcgatgatggtggaagcgttcgcaggaagagaaccgtttaagctttcttttatgtcagaaggtaaaggagcgttcaaaacagggcattttaggtttgttgctgattcggatcgaacgaggctaacgttttatagtgcgttttatcatacaaagcttcatgacttcggccatctttgtgggcctgttcttgatagcgttgttgttaccctggcccgttaacaacttgtggctgttaattcttattagactgaatattcgaaacactatactctattcgtaacgaatttgtggttgcact

SEQ ID NO: 153265 - DNA, 2131 bp, Arabidopsis thaliana landsberg
caatagtatattttattttctcagattgaggtgataccaaactgtagcatcttagctgcagtcggccagaaaatggctagtacacctggagttagttgtacacttttcagtgctttggcgaaggtgattattacttaaatactgtaaccagcatgatgagggatcatccatctcatatactatcgtttgcttgattgctcccttgtaattgcttgtttttgtatctcgcttgtaggctaatattaatgtccgagctatatctcaaggttgttctgagtacaatgttactgtcgttattaaacgtgaagatagcgttaaggcgttaagagctgtacactcgaggtttttcttgtcaagaacaacattagcaatgggaatcgtaggaccgggcttgattggtgcaacattacttgaccagctgcgggatcaggtgaacttcataatgttgttgagtcttttcaaaatgctacattaccttctttctggctctattggtcctttacgaagctgattaggcatttaattatgtttttcaggctgctgttctcaaacaagaatttaacattgatctgcgtgttttgggaatcacgggttcaaagaagatgttattgagtgacatgtaagaatgactaattctgtacatttcttgattctgtcgcgttgtagtattttatctgaaagacattcttattcattctgacattttcttctatatccgcagataattttctctgttttaacaccacatgtgtacctacgttttttattgcagtggtattgatttgtcgagatggagagaacttctaaacgagaagggaacagaggcggatttggataaattcactcaacaagtgcatggaaatcattttatccccaactctgtagtggttgattgtacagcagactctgctattgcaagccgttactatgattggttacgaaagggaattcatgtcattaccccaaataaaaaggctaactcaggtcccctcgatcaggtaatatattcttctcatcaagtatacttcttatgaaactctgttaaagaaactcaataggaaatgttcctgtcctgtgttggtttcttactccactgatgtttctctgtttgtgtgctcagtacttgaaactgagagatcttcaaaggaaatcctacactcattacttctacgaagccactgttggagctggtcttccaattatcagcactttacgtggtctccttgagacaggagataagatactacgcatagagggcatttgcaggtctgttaattaacagatccaccacagtttgactctgagttcttttctgatgatttctcttttggattttgtttttttgttctttcctccagtggaactttgagttatctattcaacaattttgttggagatcgaagtttcagcgaggttgtcactgaagcaaagaacgcaggtttcactgagcctgatccaagagatgatttatctggaactgatgttgcaaggaaggtacgttaactcttctatctatcaaactaacctagtaaagttctgaaactgatgatagtctctctcattgagccaaaacccttctgtttgtgcaggtgattatcctcgctcgagaatctggactgaaattggacctcgctgatctccccattagaagtctcgtaccagaacctctaaaagtataagatctctctatatgtatatctcattaacagcaaaactaacaatgtctgcactcaatgtccttcctaattctactttcagggatgcacttctgttgaagaattcatggagaaactcccacagtacgatggagacctagcaaaagaaaggctagatgctgaaaactctggggaagtaagattattcacaacaaacgttttccctttcgatcaatgtgatcatattttaaccatatatatatgtatgtaaacttgaatttaggttctgagatatgttggagtggtggacgctgttaaccaaaagggaacagttgaacttcgaagatacaagaaagaacatccatttgcgcagctcgcaggttcagacaacataatagccttcacaacgacaaggtacaaggatcatccacttatagtccgaggacctggagctggtgctcaagtcacggccggtg

SEQ ID NO: 153266 - DNA, 419 bp, Arabidopsis thaliana landsberg
  unsure (1)..(419): unsure at all n locations
atggacaaaacgagctggctgcttttttcggattacttatgtgagtatatgttgcttctttgcaggatagtcatggaattgattagaagattgttcaacaaccactgcagaagagatttatctgctgttttggaaagcatatgaaagtgtgttacattaaccacatatagagagagggaaagagagtgttgtgttactgatttattaataccgaattcttgatgttttctagagtaggctctgttttggttttgaaaaggtttctatggctacaatgcttctttgacaagaagactatcagtgaaactaagagacatttcaaaccctttcaccatcattaaagaacgttacaatgatacacatagataacannnnnnnnnnnnnnnnnnacttaaccaatgtnagcaattgagtcgaac

SEQ ID NO: 153267 - DNA, 436 bp, Arabidopsis thaliana landsberg
atattcttcggcttgatgaagcacgggccactgctcttgacgaccttaacaagattcttagtgataaggaagcgttgcagggagaaatcaatgtcttggaaatgaaattgtctgagactgatgaaaggattaaaactgctgctcaagagaaagcacatgtagagcttctggaagaacagttagagaagcttcgtcatgaaatgatctcccctatagaaagtgatggttatgttctagctcttagcaaagagcttgaaacattgaagctggagaatctatctttgagaaacgatatagaaatgcttgagtcagaacttgacagtgttaaagactccggtgaacgtgtggttgtgttgtgaaagaagtgctccggattggaatcttctgtaaagcattggaatctagtatcggtttctcagaaagagtctgcgcttct

SEQ ID NO: 153268 - DNA, 827 bp, Arabidopsis thaliana landsberg
ttctaatcatggactccaatttctctgatcattccctctaatttcggatttttgcatcttctccgatcatcttcaccactatgggtgcttcatcttctacagacgacaaagaatcatcggagaaacgagaaatcgaaagccttgctgcttcaaccggagctcttcctctgcttaaacgatccttctccaaactcgtcgattctcaaaccaatactgttccttttcaatccttgaaggtataattcgatttccgttaatctgggttttcaatagaatcgtgtataatctaacttagggttataaaaattggatctttgtttcagcaaagttttggtttgagctacgatacaattactactgaaggagagcaaaaagtttcagacttgtttcccaaattgttggagcatttaggatcatctttagtagatttgttcttcgtgcctgataaagaaggattgagttgggttgagtttgctagtggttatgtcaaatgttgtggaagaatgtcgaattcgatgtctttcaacactttgttgagagtttactatgtgacagctaaaaatgcaggcttttctccaaagcttgagtttgaatctgatgaagctgattgtaagattaacgggtcgatttcggttagtgaattgcttgtgtttctttggatgtgttggacaatgtcttgggatggtcgaagctctaaagctgctgaaatgaaagggtgtttgtttcttccggatattagtcatttgattctatcagcagtggtgtcttgcactgattctgaatctggaaatggtttgcatgtttgggataaaaatgttccggtttag

SEQ ID NO: 153269 - DNA, 614 bp, Arabidopsis thaliana landsberg
ccattatttactagtattgggtgatgagaaaatgtgccctttttgttttaggtttacggaaccacagccagattatggtgcgggtcgggaagctagctatggccactctactctggatataaagaaccgaacacacgctatataccactggaaccgcaatgatgatgggaagaaagtggcaacggatgaatttgtattacacaaccagtactggtaagttttctatttctcacgttagtaatcttagtaactgcatagatggagtactaagtgaatacaatgcgcaggggaaagaacattcgacggagaaagcttaagaagcattatatcaggagtgttgttggtggctggatcgccacttaattcactaagtctgcctcatgctttgtatcaaagtgtgtgaggatattcttttaactcggaacttattacttaatttgatgttaaatctctttcccgcttaagttttcagcaatctggaatatgaagggaattatgtattcttatcagtcttttgatgaagtgaggtctacttctgggattatcgatttggtgaataatgtattccttagaacggtgctaaggaattgtttcacatgggtgtgaattgagaa

SEQ ID NO: 153270 - DNA, 594 bp, Arabidopsis thaliana landsberg
caaaacaagttggaggaaaaagagagacaaaactcacaacaacatcaaggttttaactaaatttaattttgtcataactattcatatatagtcaaatggctaacaaagctctcattcatctcctcgtcatcttcttcttggctctatcacacatcttcttcttcccttcccatgcttcgagtaaaatcttcatctctcttaaaatcgtattttatgtatttacatcatatgttttaacttatatcatctatattttgtacgtatacaggacttgggagtttgatggagaagccaaaaattgttcgacctcaacaagatacactaatggttagttatttagctatttatctgtgttcttgagaggttaaaattaggttattaaagattttaatttggttttgttttacataatcaatgctattaggatgtgaaggaggaggtcgaagaaaggatggtgatggagttaaacgactatccaggttcgggtgcaaacaatcgccatttgccacgacaacgaggctgcgtcgttgattgctgatcgatatataaaatgacgaaaaacgaattaatatgattatagctagtatcgataaa

SEQ ID NO: 153271 - DNA, 1203 bp, Arabidopsis thaliana landsberg
  unsure (1)..(1203): unsure at all n locations
ggagttccgattgacgtaaatcatggattcagtgttgattttgtttggaaaagtacaagctttgatcgaatgcagggagcaatgaagaattttgctgtagatgaaacaagtgtgagtgggtaagtcagtcatcggaaagcctagctccttcttggtacgtgtccatttgttactgcatgctaatcaaccactgaatcactatgtttctattctttgaagttatatctaccatcagttattgggacatgaagttgaggcccagatggttcgtaacacactacctcgacgttttggggtacctggtcttccagaactgaatgcatctcaggtaatcattggctttcagcttatccagttcatgaataatgttcgtcgtaaatgtcttcacggaattttcagagtcgttttgatcccgtgttccttgttaacacgatgaataatatatgttatctatataacggatttataacaggctctattgtatccttgagcaggttaatgcggtgaaaagtgtccttcagaagcccatcagcttgatccaaggtccacctggcacaggcaaaactgtgacttctgcagcaattgtgtatcacatggcaaaacagggccagggacaggtaaagctgattgttattgattccctcaagattgctttttgtgagttgactatcagatatttattattattacctgacaggttctcgtttgtgccccaagtaatgttgctgtggaccaactagctgaaaaaattagtgctactgggttaaaggtaaacttttaaacctcctagtttttctattaaaattttgcgtaagacatggatacttcaatttattgttcatttttggaagtttctaccatcaaaatttatttaaagagtatatgacttctcttcaaactttctcttactctaatgtcaggttgttcgcctttgcgcaaaatcaagggaagctgtaagttctcctgtagagtatttgacccttcactaccaggttagttgacatggtagcacgctttggttcatttaactctctggttcatttagtcccctatctttctttgtttgaagataattcatatgaatgnnnnnnnnnnnnnnnnnnatcttgacacatctgaaaagagcgaactgcataagttgcagcagttgaaagatgaacaaggtatcacatttcagtttgttatccattgttgacatttttg

SEQ ID NO: 153272 - DNA, 1491 bp, Arabidopsis thaliana landsberg
ctttgttagagcgaaaagtgaattgtccgtggaagatgttagtgaactcgtggaaattggcttacaaatttttcattcatctgagaataagttgtatgcacaggttcgaaaaataataccagaacgaactccagctacttgctctgtttcctcatatacccttgcttttccattttttatgcttaccttttgggtgattggttggttatggtaccataggttagatggggtaatgttttagtcagactgatcaacaagtttcgtaagaagctgtctttgaaagttcagtggaggcccttgtatgataccttgattcatgctcatttcagcaggtgagtcttctttcgatatctggcaggcataagttatggatttttttttcaggtactcatgaggggtagaaattttctagctccgttggatgtcttggttttgtttcatgtataatgttttcgaactcctttcttcaataggagcccgggtcctgaaggttggaggttaagacaacgacactttatggctgttacctccctcattcgttcctgtagaagattttttccacaaggggccgcatctgagatatggtctgaattcatgtaagttgttgacacgagatcttaacactcatcatggtagtgttattacttatatacatgctttagtgtatctagtattgtcaagagaattaggaagacactatcatgatcctgtctattctagcttacattcttatatgtgaaagcacattgtttatttctgctatggacaaagaattggaaaatgtggaaggaagcattttgttcatcatacatgagtcttttatgagattggaaagtttttcattatggccaccatatttttcaccgattctctcctgtatacgatgtcctgatgtccctatgatggcacatcgctctgggtgaattgatgaataaagaccatatcagactcgtaatattaggatacatgtatagatgtctgtgattaataaaggtcgcagtcccgagcaagtcgagagttgtgccttcactagtaggggtaatgggattatattaaagcttttcattagaaaccttaaagaaaaaaagataattgagttggactttctttgtctttaagagtgtatgtgtagctagattgatggctgtaattagagtctattaaatgctatagctctgctcatcttttcgatcttcttctatccacgtccaggtctcttttggagaatccttggcataattcctcgtttgagggctgtggctttgtgagattgttccttcctacgaaccccgaaaatcaggatttcttctccgagtaagaacttttttttttttggagatcagtgatatctctgattttctcgcattttaacaagtgaatttgaacttcgttttctcttgttctgaccttgtagaaagtggataaaaaacgttctagagctgtgggattcaataccaaattgtcaattttggaatagtcaatggacatctg

SEQ ID NO: 153273 - DNA, 624 bp, Arabidopsis thaliana landsberg
acgggagtcaacaacgaacaacagtcatgaactatgaactgttatacgaataaacatatctatatttcttgcttagagtgaaggcacatgagatgtatttggcttgtaatcaagtcatcaagtcaggattataaagaaaatattacaatattaaaaaaaaaattgaacatataacatttcagcttaagaatagtatgattttaaaaaagtttcttgtgtaacaatgcaaaatagactgcgacacaactcgggtatatacactaagcttggactctgaagattatgatggtttcctatgattattgatgactgttgtttcgattatgcaggcatttgatgacccatttggtgactctcctttcaagtccttcacttctactgacaccgactcaaccccacagtagaattttggagcttctttccagccaccacctccatccttcacttcagaggtctcacatcctgatactgctcataactttgactttggggactcattttccgccgttgccaatcctgatcctgcttttcagaatgtgcaacctccataaaactaaacaggttttcctcaagagcagtttgctacatctcagagtggtattgatattctcgctggtattctcg

SEQ ID NO: 153274 - DNA, 3077 bp, Arabidopsis thaliana landsberg
atgccgagccaacaaagagacttggcagaagaggacacccgactcactctgctctcaaaccacagcacgctgatcggcaagggtaagataggattattttgtgttttagtagtgatgattcttttgcatgattgattgtttgtgacaattgtgtgtagtagaaaatctgaaatttctaccaactcattctttaagaagttgctataatatagtttccttgatactggttaaactactaaatagatctctactttacatcaaaccgcaactattccatctgctgctgcatttcacattagcgacaggaggctctgctgctttgccattacaaggagtatcgttaatcttgggcggtggttaagcagcagtagcaggagcctcaacattaccacaagcacctgaaccaccaccgccattgctattcttagggtcagaggacggtggtgcgattggagatagtgagtcccgtgagtggtagcccctgggatcatcatgtgactccttaaacgttatactgatgaccctcttgtcggtaatctttcatgtgtttgatcccactagcgtttttgtcaagcaagtcctgtaggtgtacggtctggtcaaaggtgctgacatggacctgacgtcggcaagttgatggcatggcgagcggagttgccatagaaatgtcatcaggagactctggttcaggttcccacaaaagctcggctcttttgccggttaatatcagtgttcacttctatcgtcccttcgtttgcattaaccttgatggaatgcactcctaatcataaatccaccattgctaattatatatatcagaaacggtagtaaatatatgcataatcaatcaccttcaacgtttagcatggctcgtttcacctttctcgcacattcggcacaagtacaacatttgggttccagtttaagaacacgagtctgctgtatacagaaatcaaaacgagacaaaaacagatttaccatatataaacaaaatatttgtgatcggtgtaaaaacatctcttggtcatcatgtaaaataagaaaccaactcgatggaatggggaatgacttgaaggaggatgacacaaaaatattttgtattaagtttgacacaaacgtaataatattatgtttttacataaaacaaaaatatactgatcgtgtgcttaaatcctaaaggcgcaggcttggttttaattttgaatgttaaaagaaatctattttcgaaaaccaaaaaaatttacttggaaaaaatggaataaaaagaaaaacatttaggtggttggttagttattaaggttttggtttttctggattcactaatctacttacctttgtagaaaatgcttgtttatatgaatagagacgttcgaagtaggcatgaagttttttgtttgcttaaaatttttaatttgagtgagataaaaccgttaaaagtttatcctaaaatttgatagctacgctaattttccatatgcaaattctattttgtcgttatacataactctttacttgcaatatacaacagcttccgaaaacaaaaacaaaatcaatgaatggccaaatcccaaacgattactgaaagagagggataaaaagaaagttaatgcgcaaaggaataggcgtgactgccttattggtcgtattatttaccttttttttttcatcacacgatcgattataatatatatatcttcaaacgtgggtgttgggttaacatcaatcaatcattaagcttcttatcccaatttattttattttcttcgtatctatcatgaacactttataaattaaataagtgaaaaagtttttgccaagagttcaagcgaacgctagttatacaatattcgtcttcatattaatcttcaaaatagagtttgaaataaacatttatctaacccatatatatcctttccaactctataatagaaatctctatttctctatttggagatttggattttcaatttatatctttatttttaacttcaaaatatagtagatttaggaagaaaaaaactcaactcctaaataaagatattttagagagaaaatacagatttggaaatgctctaagtatgtcacctaaatttgtaattgaaatttattgttagatggaaacaagcgagggaatatatctaagggttttcttttgatttagtatgtaaaaggtttaatatgcaaatttaaatgattaaagtataacaataagtcaataacgattatattaatgtagaaggttttattttatttttgatttaagctgtaccattttattgattttaggttgatgtattcattctttatttggagctgtgtgatataacttgagtaatcgaatgacactttcttttctaaaaatataaagaaaatttctgaaattgtactaatcaactgataagacaagaaaaaagctagatttaacaagaaacgcataagctagttggccggtttagtccaccaatttgattaaaacttatcgcaattaaataattcactcagacaaatatcttggtataccgtatacaagtttatgcaaagtgcagagtggctaaaatttaatcagagctagctttagaaaaaaattatagttgaaaataccagatgtgtaaagttctgtaaattaaatcttgactctctggggatatatacatgtatgatgtatatgtgaggttccgtattatttttagtacataggaatggaggaatcagatacgtacatggacgtgtaggagcatgcacagtacgttaccaagctcgcaagccaaattacattccaatagctatgacttgtcgctgtaagaataatctttttaaaggccctttctcggaccattatatttcttatctcatgtgaataattataatgtaataaaaaacaaaagttttctttgtgttttttttcgtcttcagatttatatgtaagtggggagagtaataagagacgttcccgggggtctttggccattgcaggtcgacaaacaattttgcctctccgtttcattaatggacggtccaatagaacctttatattattctacaaatataaacaactctatgataatatcaaaatatga

SEQ ID NO: 153275 - DNA, 1364 bp, Arabidopsis thaliana landsberg
aaatctatttcagacaagcaaaataccactgccgaagattatgcagccgggtcttctgaaagttccaaatcatgtgatcaaatagcatttaaccccaatgtcttcactgacttcacattaggtggcaatcaagaggtaggttatgttgcttataggttatatgttttaagatcatctcttaaaatttatttaactgattggatgaatcctttttgggttaaacaggagatagctgctgatgaagaaaatgtgaagaaagttagctcataccttgtggatgtggtccttccaaagtttatagaagatctttgcactctcgaagtttctccaatggatggtcagactttgacagaagcactccatgctcatggtgttaatgttcgttacattggaagagtaagtttgtcagctgtcgttatcattttgttagctatctctatgtttgagtttattaacagtagatttgctcgaccaggttgctaatggggtgaagcatttgcctcatttgtgggacctttgtctgaatgagattactgtaagatccgcaaagcacattttgaaggtaattttgactgttgtaaaagcatgccacaacaagagttagggtatctgtggacacgcttgtagtaggttataatgttatttctatgttcttacgtcgttgtgcaggacattctaagagatatagaggatcacgatattggatcagcagtctcacatttcctcaattgtttctttggaaactatcaaactgctgggggaaaagctagcgccaacagctctactgccaaaaatcaaaagaaggttgtcgtgtactatcagagtttgtttattataattccatgtttgataatctttaattaggatattacagttctttggagccgtctagaaaagtttctgatgaaacaagtcatgctttttcttttattagtttaaggtgtgaaactaaacctttaatttggataggatcaacccatcaccaagaagggtcaaggaagagggaagggaaaagcttcttcaaagaaaagtttttcatcgtatatgatggttgactccaacattctatggtctgacattcaggaatttgccaaagcgaaatatgaggtaaactgtagtcattattaagctaagcatatttatttctaagccagttaaatgtttattactataagcacctaaagctaatgagagcctattttcagtttgagttgcccgagctatcaagaactaccgctaaaaaagtatctgctcttcgtaatctttgccaaaaggtaaataattatagacacattttcattcagaatttatttaccagggaatcctgattatgtcagttcataattgttattaatcacttcatt

SEQ ID NO: 153276 - DNA, 204 bp, Arabidopsis thaliana landsberg
agaatattcacagagaagagagagcgataataatggcgtttaagggtttcgcgtgtttttcgattcttttgttgttgtctctattcgtttcctctatacgaagcgaggagacgaaggaatttgtcttgactctcgatcactctaacttcaccgaaaccatctccaagcacgatttcatcgtcgtcgagttctacgccccttggt

SEQ ID NO: 153277 - DNA, 314 bp, Arabidopsis thaliana landsberg
catttgcgagctgttattgttcaatctttacaggagctgaggttgcggttctgtgcataaccaaatcgggagaagttgtgaactaccaagctttcacaaactcaaaaggtgtctacacagttgcagagacaatgccagagagcgaacgttgggacgcttgccttgcaagacccatcagcagcttccacacaccttgcaatcgcctacaccaaactaataccggaatcaaattcacttataaccgcccttccggtttctttcatgccgtgaaaccatttgtgtatcgacctcaatatgcaccttcttattgctga

SEQ ID NO: 153278 - DNA, 1054 bp, Arabidopsis thaliana landsberg
gctgtaccaaaaaaactcttccccattttgtcttctcaaccaaaaccctaaaactctctttccttcttctccctagagatggcttcaacaatatccctaaagccgacgcaccttatcctctcctctttctccacaggcaaagtcctccaattccgccggtcccgattcagccacacaccgtcgtcgtcggcgtctcgctatcggactctcgtagctcaactcggattcagaccagattcttttgatttcatcaaggaccatgccgagaatcttctgtacacgatcgctgatgccgccgtttcgtcctctgaaacctttgaatctgtcgctggcactactaccaaaacgacccagagcaatgattggttctctggtattgctaattacatggaaactattctcaaggtattaaaagttttgtctttttttttgtttagaaagaatgaattttggtgtgttatatgattgattttggttggatttgcaggttttgaaagatgggttatcaactgtacatgttccttattcctatggctttgctatcattctattgactgtgcttgttaaggctgctacgttcccattgacgaaaaaacaggttttttgtttgtatcttttgtttcttaaattcatttttagtccatgttattgaattggtggtttgctttctataggttgaatctgccatggctatgaaatctttgacgcctcaaataaaggctattcaggaacggtatgctggtgatcaggtgaaaaagcaattcttctatactgcacacatggattttatttgtcctgatgctatactaagttatgtttgcatcaatttttagttgatagatttgaggaaatagtaggaacgagtgtgttgctatcggttccacaattgtggagtgatactaatgaatataacaaatattatagctttactatctatgaatatagtcctcttgtttaaacaaatagcttccttacttttgttcatctttgcaggagagaattcagcttgaaactgctagattgtataagcttgctggaataaatccccttgcag

SEQ ID NO: 153279 - DNA, 315 bp, Arabidopsis thaliana landsberg
cgccgatttcgtttctctttcaccggttctcgcctaccgacgtcttccttccattctttctctcatctgataaccaacctccacatgtctctctcgtcggactccaccgttcctactgtttccacggtcaccatatcctactcagagctcaaggtcagattgagccaagtccttcttcttatttgtcttctctgtgttctgtttcgtcttctaaactcttccttattacaggagagcaacatagatttgtctgcaaggattgaagaaggatttggacctaatggacatggaatcctctctgttaaagatgtatga

SEQ ID NO: 153280 - DNA, 387 bp, Arabidopsis thaliana landsberg
ctaagcaatataagcagtttttgcgctgaggtcatatcccacgttgtatccttgcatggctataaccccaatgatgacatgtgaaaaggactccttgttattctggatcgccaaacatcgaatttcagggggaccttgctgtatgaatatgttatgaatatttacgctcaactcagctcctccatcaaatttaaaaccgacatccatcttctctagcctttctatggtatccgctttgtagcacagcgttggttcatacgaaagaggtctgctgcctataagatcgtcaaacgcatccacaaatttgtagtacaaatttgtggacaaatgagacagcgtcgagcccgtgtcaacaaatacttggactgggtcgtccaaggttatttt

SEQ ID NO: 153281 - DNA, 601 bp, Arabidopsis thaliana landsberg
  unsure (1)..(601): unsure at all n locations
gatatattgaccattcatntgtcttgaagctcttggatttgtttgactctgaagaccagagagagagggaatatctaagaccatttcttcatcggatatacggganattcatggtgcaccgaccctttatcagaaaggcgatcgaacaatatcttctacagattcatttttgaaaccgaaaagcataacggtattgcagagttgcttgagatactaggaagtataatcaacggtttcgctttaccgttaaaagaagagcataagctcttcctaatccgggcattgattccactccacagacctaaatgtgcatctgcttatcatcaacagctttcttattgcattgttcagtttgtagagaaagacttcaagcttgctgatacggtcattagaggacttctaaagtattggcctgtgactaatagttcaaaggaagttatgtttcttggagagttggaagaagttttggaagcaactcaagcagctgagtttcagcgatgtatggttcctttatttcgtcaaatcgctagatgcctcaacagttcacattttcaggtgcgactctcgataagttgttcagatagtctcgcaataatgcaga

SEQ ID NO: 153282 - DNA, 1538 bp, Arabidopsis thaliana landsberg
tattgatcacaatgcgtatctggatgcggcagcacctgggataaaggattcgatggaaggagtctctgaagccatgcccatggattttaatgaagagcaggtgcgtaccatacataatgcacgagggcatacctatagttgcttaataattgtcacctgagtcacagtgcttaatgtgatatattttactttgcattatgtctgaatgtacattgcagttacagactccaaatttacgatttgtttacacagatttattggcttacttttctggtaagactattggatagtattgttatcattatttcttgtgaatctctctttttgataggttgaagatcttgctatgaataatgagttcatcgaagatgctcaagctcctcaaactcctggattagttgaggtgccaaactcgtctagtgtgagagagcagatggcatgcgatgatcacatggaggtagaggatctgaatgcagaagaaggtataaagtcctctggggagctgaatgctaatgagatgcctaaacgtggggaagacctgtcttctgaatataatgccccagaatcagcagttactcctgtggaggtagataagtcacagatagatgaaaatgtcaacacacaaaatgagccggaggagagggcagagcatgtacatgttacatctccatgttgttctcacatcaccaccgagatggaggatcctggtcaagtaatgaatgaggcaggaactaatgttgtacctgataagcccgatgctgttcctccacttgaaacccctggagaagagaaccgaggtttgttggcaaagaaaattgcaaaccttatacgacatcttagtgcctgccttatgcttataatttttattgttgccagatcattttgccattgccactgaggtcaatcaggaaacagattctagtttacaaggagatgagcaagcgtacagtagaccagatgggcagctgaataatgcacacgaaactgacgaacagttgggaaatttgactggatttaccgattctgatttccctgcacctgagaaggtattagctgtacctaacagacagggggatggaaatgatttcatggttgaatctacaccagataaagaagaccctggcacatgtaatgatgatgcggggaataataacattactgggaaaaaacgcacttttactgagagcacactaactgcagaaagtttgaactctgtggagtcagttggactgtttcagtcaaagagaactgcagattctgtccctgatgacgatgatttgttgtcttctatcttaggtatcagtttattttggatactctgtctgttcttttatacattctattgctctttgagctagctttatggatcaattatcgttgaattttttgtttttttcagttggaaagtcatcctttctgaagatgaggcctacccctgtgcttgaaccagcaactacaaaacggttacgatctgctccccgctctactgccacaaagaggaaggttctaatggatgaccctatggtcttgcatggcga

SEQ ID NO: 153283 - DNA, 523 bp, Arabidopsis thaliana landsberg
cctgagacagaagacacctcgctaaacctagagtcgtcgtcataaagccgcagaagaaagagatgacacgtggcggcggtaagaagctaaccagtttcttgaactctcttcttcgctcagctggtctaaagaagaagtcaaagtcagcgccggaggtggagacaccacgagtagaaaggatgaggaggaagagctgcgtagtgactacacagcgccgcagatgcttcgcctctcaccaatgccggcgcgtggagtttaaacgcgcgtagaagaagctttgatgagaaagatttgaagaagagtgatcagaagttgaacataagattttgtgagagtctgtattcggaccaaagggttgagacaaaagacccaaatgcaggagacaagaacgatgtaattggtggatgcgagagtgattcaagttctgaatctgatctttttgagttggatttgtttgctaaatcaaacccctaattaagaacggtccggagaataattttctaatgtaacttcagtcttaatt

SEQ ID NO: 153284 - DNA, 948 bp, Arabidopsis thaliana landsberg
tagaaaaatctacttcttttcgctttttgtttttgggattgttttcattgatcctttcaagatggagaaagtgaccaactcagacttgaaatcctctgttgatggtggcgttgttgatgtgtatggagaagattcagccaccattgagcacaacataactccttggtctctctctgtttctaggtagcaacataacttctccgtggtaatataactaagtgtttaaattaacactcaagttagtaactctgtttcttgtttcagtggatattcattgctgagagatcctcgctacaacaaaggacttgctttcactgagaaagagagagacactcattacttgcgtggtcttctccctccagttgttcttgatcaaaagcttcaggtaaaaacttggtgatttggttattctgtatggttgcgctaatggatatagatacataaaaaacttgtgtcaatggtttttttgggatttcaaatgatttaggagaagaggctgttgaacaatatccgacaatatcaattcccattacaaaagtacatggctctgacagaacttcaggtgaaaatcttgtctatgtaatctacaaattttctgtttagtatttcagagaaaaatgaatctgttattggacttgaaacaggaaagaaacgagagactgttttacaagctattgatagataatgttgaggagctacttcctattgtttatactccaactgttggtgaagcttgtcagaaatttggaagtattttcaggcgacctcagggtttattcatcagtttaaaagacaagtatatattgcttgtaactgtatcttattattttcaattccctcccccccccccccccctcttttagctttactcatatgtcataaccattttattcataacaggggaaagattctagatgtgttaaagaactggcctgaaaggaacataca

SEQ ID NO: 153285 - DNA, 637 bp, Arabidopsis thaliana landsberg
  unsure (1)..(637): unsure at all n locations
tatccctcggttgaagaagcagcagcaacaagagaagcagtgtataacctccagtggccacctaatggaggccgccatctgatagctgaatttgttagagcagaagaagtaaaagaaaaactggaagctcctctgcctcctcctcctcagcctcagcatcagccacaagctcagactctttcgcggccacctccaactgctcttccaccaccaccacctctggccaaaccacctcacgtcgtagaacgtcttcctctgcctccccctcctcctatagcccctgaggaacaagaacctcccattgtcactcttgatgatctattcaagaagacaaaagcgatccccaggatatattacttacccttgtcagaggagcaagttgcagctaaacttgcagcgaataataacaagtgatcttgctggttcttgggaatttcaggtcattgttttcgtagcaggctcnnnnnnnnnnnnnnnnnnnnngacaaaagttgagtactctgttgagtttggtttgttatttttaatgtagaacggatgggaagactcttcttatgtttagtagactttggtttgaacctgtgatgaactaacagagttgtttggctctctgtgtgttagatcttttcctctccat

SEQ ID NO: 153286 - DNA, 450 bp, Arabidopsis thaliana landsberg
gaatcatgacattgttctgctaaactactgcagcctagcagcatacatgagcgaagaagaagtgctagaggggattatataccctccaatatcaaggtaagagtaacacaatcaaagaacatccttactgttacataagaaaatgttttgatatagttgctacatttggcatgtggaattgaaatttcaggatacgagacataacaaaaagaatagcagctgcggtgattaaggaagcgattgaggaggatttggttgaaggatatagagaaatggacgctcgagagatccaaaagctggatgaggtaataattcagctaatgactggctttaatatataatcataaatgatagaaaaagaaaagatgtcaaaacaacatcccatctttcacgtgttttggactcctgatcataaaatcgtattctacgaagaatgtcgatcgggtttga

SEQ ID NO: 153287 - DNA, 543 bp, Arabidopsis thaliana landsberg
atgcatgaagcactactgacaaaagagaaaaccgagcagctcgaggtaaagtgaccaatctttcatttcctttgacacaactctgattgtgagatttcagggtttcgcttgatatgttcgataaattgtatgaatgcaggtacctgacatggatgatgcaatggcacaagctgttgatattggtgaaaacgatgtgagtatcatcgattacatcagatcctcttcttctttattgtttcttgatgtatcatgctctgaaacatctccggacattttttgacaggacgacgaagacgatgcagatgtagaaaaagacgacgagaaagtgccgaggaactggagtgtcttgaaggaaacccctgagcttcgcaccgccaaggtaaagtcacattcaacttgagccacattatatgtcttgtgtggtgtgttgatgttatgagcttggtttcttaaacagcctaaaccaaagaaggaaggtcggaagactctagacgaggccgtggatgatgctgagaacttaactgattttctcatggactttga

SEQ ID NO: 153288 - DNA, 306 bp, Arabidopsis thaliana landsberg
tgaaaataaatcgttccttagtgaggtggtgggtattggaagtgcatctataaagcaaggaatcagtaattttgctcaaggccatttgccaaagaagaatgagaatggcagcagcagctacagaggtccgaatctccacagatcattaactatggagaatgagaacttcagtagatatgatccagttaagctggggaaggatggtaactacggaacgtctaagaacacgactggtggatcttggggccacgcttccggagaagcaagtgaaagtttctgcttcagttcgtgttgagagcaaaactc

SEQ ID NO: 153289 - DNA, 556 bp, Arabidopsis thaliana landsberg
cgaacctctctgtctcgtccattacttaaaaaccaaatctttcatcatcttccttcaccagttgactctctttcaatctatctctgaatctctcactctcctacccgaaaaccatgaactccaacgaccaggatccgattccgttcagacccgaagacaacaacttctccggttccaaaacctacgccatgagcggcaaaatcatgctaagtgcaatagtaatcctcttcttcgtcgtcattttaatggtcttcctccatctttacgctcgttggtatctcctccgtgctcgtagacgtcatctccgtcgtcgtagccgtaaccgtcgcgctacgatggttttcttcaccgctgatccttccaccgccgcaacttccgtcgtcgcttcacgtggacttgatccaaacgttattaaatctcttcctgttttcactttctccgacgagactcataaagatccgatcgaatgcgccgtttgtttatcggaattcgaagagagcgagacgggtcgggttttgcccaattgtcaacatacttttcatgttgattgtattga

SEQ ID NO: 153290 - DNA, 730 bp, Arabidopsis thaliana landsberg
atgccttcaggtaaaacaatagcagttaaaaaactcgaatccaacagagaaggcaacaacaacaacagcaacaacactgataacagtttccgcgccgagattctaacactaggcaaaatccgtcacaggaacattgtcaggctatacagtttctgttaccaccaaggatcaaactcgaacctcttgctctacgaatacatgtctcggggaagccttggcgagttacttcacggcgggaaatcacatagcatggattggccaactcggtttgctatcgcactcggtgcagcggaaggtctcgcttacttacatcatgattgtaaaccaagaatcattcaccgtgacatcaaatcgaataacattctcatcgatgagaatttcgaagcccatgttggagatttcgggttagctaaagtcatcgacatgccactatcaaaatccgtctcagccgttgctggatcctacggttacatcgctcccggtaagtttgtaaaaaaccgttaaactttcgagtttacactaacttaaagctacccgttttttaactgtttttttttttgcagagtatgcatacacaatgaaagtaacagagaaatgcgatatttacagctttggagttgttcttcttgaattgttaaccgggaaagctccggttcagccgctagagcaaggcggagatcgttgccacgtggacaagaaaccatatcagagatcattcgttaacatctga

SEQ ID NO: 153291 - DNA, 428 bp, Arabidopsis thaliana landsberg
aagttagattttctatgtactgcagtgagtttgaggaattggaagctaagcctacaatggcagttatggatggtcctcttgaaccatcatcaactgctagggatgcccctgatgatcctgcttttgtcaacttctttagcgtaagtttctaaagcttctgttacacactcacactatcatcttcaccatgacagcatcttatacgactaatggcaggagggctttctattagttctagccttctaggttcttgaattatcttcagcgtagtatatggtccaacttagactcctcaaattgtaacactgaatttatctaaattgttgacagtcaacgatgaatcttgggaacactgcgagtgggtcagcaagtggaccttaccaatcatcagcgattcctcaccaacctcaccagcctcaccaacctca

SEQ ID NO: 153292 - DNA, 1929 bp, Arabidopsis thaliana landsberg
  unsure (1)..(1929): unsure at all n locations
cgaaaagcgagtacggtttccaaaggggaagaagtcgaaacctgaacagctcttagaggaagaagctttagcccgccgcaaagcccgtgatgctgctaaggagcgtgcaaagattcgcaatcagaatactactaagctctttatnnnnnnnnnnnnnnnnnnnattaatcaggctcaggagacttatgaggtaggatttctactatcctctttttgtttgttgactgttcctggaagctaattgtgtatattgcgagatctcaatgatgtttgtttgcaaaaagagttatgctgatgtgatttatttcattgtaggatgatggcaatcgcacagaagatgggatccagattgaagcttttagtctggacagagagaaagaagaaggttactttgatgctgatgggaactttgtagaatatgttagagaaaaggaagtcaaggtacacatctntcattgtaaagcttagctccaagatatcttgtgtattgtctttcattatatgtgttttctttcaggatgcatggcttgacagtattgaaaaaaatccaatgtatatgggacgatctgctgcaaatgatactgagatggatgatgatagtgggaacgaaaaagcaggggatgacctttctcaagatgaaatcggagttagaaagaggcgcattgctaatgtccttgaaccaggagaaacggtgagactcattctgcgttttaacaagtttttgtttcaaacatgaaacatggattgtattagttaaaaatgtcaccttaatatagcattgttgattatacatacttcgaacacgtaaaataaatcggtttcatgttacaggtcttgcgagctttaaggaggttgaaagggaattcgaataatcgcaaggagaagatgacatctgagaccaagcttatctttgatcagcttactgaggatgcggacaagcttatcgagaacggcgactacagtaagtctctaataacttatgctacttcaacaacaaatatgatgtcctccatttgttaatatatgtgttcctctttttatgtattgaagatgtttatcatgaggagcaagaagttttccaacgtgaagcaggttagagattctaatactttttcaatatcagctgtagatgtagctacgtttcctctgctttgtgatatcaccttttcacaacattcgggaacaattggcttgacttttcacattcttcttctctatgttggtcttttagaaggatatgagagactagctcaagcgaaagaaaatgggactgccaatatagtatcttgtgatatgtttggcgatgatgagaatgctcctgaaccttcctctgatctacaaccgtctagctccatctcgggcactcagcttaattctgattatgtgtttgatgaatcttcagggtatgtttgtatatactctcctctcgcgctctcttgttgcataagtcagctttttgtccgaagtattgtgttgctagcaatattcattatgaatctcaattttatttatctaaaagtattctataaatggttttgcaggtactactacagcagcagccttggttactattatgacccgaacactggactttactgctacgcaacaaccggaaaatggtaaaatttacttgggatgagtttagaattttgaaaacccattactaatctctttattcatgtgttcataatttcgattatcagctcaattctggttatgtgtttgattacaaaatatgcgtgcaggtacaggtacgatgaagagactaaggaatataaagaggtggtttctgaagttgctactgaagaagtttaattttcgtttgtctgtacttttgactaacacagggtcttgaaatatttcccttgttgtttttagtttgaaagtaagcacatcatacatgagtttatataaatatatttggattta

SEQ ID NO: 153293 - DNA, 1015 bp, Arabidopsis thaliana landsberg
atgagttgcaatggatgtagagttcttcgaaaaggttgcagtgaaacatgcatccttcgtccttgccttcaatggatcgaatccgccgagtcacaaggccacgccaccgtcttcgtcgctaaattctttggtcgtgctggtctcatgtctttcatctcctccgtacctgaactccaacgtcctggtacaacttctttttatcactatactatctatttttattcgaatatataacataaccattaggttacaaactctacggatctatacaacttttaatgtttttgattttaaattgatttttatgttttggtttgttcagctttgtttcagtcgttgttgtttgaagcgtgtgggagaacggtgaatccggttaacggagcggttggtatgttgtggaccaggaactggcacgtatgccaagcggcggttgagactgttcttcgcggcggaactttacgaccgatatcagatcttcttgaatctccgtcgttgatgatctcctgtgatgagtcttcagagatttggcatcaagacgtttcaagaaaccaaacccaccattgtcgcttctccacctccagatccacgacggagatgaaagactctctggttaaccgaaaacgattgaagtccgattcggatcttgatctccaagtgaaccacggtttaaccctaaccgctccggctgtaccggttccttttcttcctccgtcgtcgttttgtaaggtggttaagggtgatcgtccgggaagtccatcggaggaatctgtaacgacgtcgtgttgggaaaatgggatgagaggagataataaacaaaaaagaaacaaaggagagaaaaagttattgaacctttttgtttaaaaccgacgacgcaaaacactcaaagattttgaggctctctcttttagggttttgagtgggaatggatatttagttaatgatttttctctatcgagaaatatgataaaattttggggatatatattttgccgatgagaataaataatctgatgag

SEQ ID NO: 153294 - DNA, 569 bp, Arabidopsis thaliana landsberg
cctaaatggaacgatgcccttttagagatgttcaggatcgattatatcgggacatcaccatatattacatgttcaccatcattatgtcatcacaagctaacgtcacgtgacaaattcctaatcctatcttctgatggattgtatgaatatttctctaaccaagaagccattttcgaggttgaatctttcatctctgctttccctgaaggcgatccagctcaacacttaatccaagaagtcctccttcgtgctgccaacaagtttggtaagaacataaaaaaataacgtgtttttataaaagaaacgccaaatttctgaatattgttgaaatctgatctttggttatttttgtttcattttaggtatggattttcatgaattgttggagataccccaaggagatcgtaggaggtatcacgatgatgtctctgtgatagtgatctctcttgaaggaagaatatggagatcatcaatgtgaatattattgtgttttcatgaatctgaatcatgtgaagaataaccataactcgggttgatgattttttccgattaaaagttcttattctcaa

SEQ ID NO: 153295 - DNA, 807 bp, Arabidopsis thaliana landsberg
ggttaccgagagaacctaagtatagtcacttgaaaaggctgcataaggtcatcaagctctgcgaaccggcattggtctctgctgatcctacagtcacatcgctcggggataaaaaagaagtaagtatgcaaactaatgaaatgttacactgaagataataaccataaaagattcatacattttttttgtttttgttatgttttcagattcatgtgttcaagtccaagacttcttgcgctgcatttctctcgaactacgacacgagttctgcagcaagagttatgtttaggggatttccgtatgatttgcctccttggtctgttagtattttaccagactgcaaaaccgaatattataacactgcaaaggtaaataaactaatagcttatatccaaaacgttactttgtacatgatcattttttatcatgtgcaacttgtgcattcatatatggctttggttcaaaaattgttcttcatatgtatattcatgggattccttactaatttatatatgaaaacatattttaacccattgaaatagagatttgcatacatctttcaaacagtttattacggtcttgaccttgttgatcttgacttatatatgtgttccttttttttgtgatatagatccgtgcaccaaccatacttatgaagatgattcctacaagcacaaagttttcctgggaatcgtacaacgaaggaagcccttcttcaaatgaagctggtacatttgttaaagatggtctagtggaacaaataagcatgaccagagataaaacagattatttctggtattttacgga

SEQ ID NO: 153296 - DNA, 869 bp, Arabidopsis thaliana landsberg; identical to SEQ ID NO: 10963

SEQ ID NO: 153297 - DNA, 1583 bp, Arabidopsis thaliana landsberg
atggtttttatcaacaaggctgtgattatgcagtatccacattccatgactgttcttactcttcaggtactgatatccatatttctcaagtactagatatctaaagagattattcacttcctgtaaatgctgattatgaattcggtcccgtttgcttttgtttggttgtgttagcaattggctacttctttgcttatacactttggtagacgaatgggatacacaagagctaaaggaattgatatggctacggccaaaaagcttcttccggtttctatcttctacaatgctaatgttgcatttgctcttgcaagtttgaaaggagtaaacattccaatgtatatcgccattaagagactcactccacttgctgttttgatttctggggttttgtttggtaaaggcaaaccaacaactcaggtacttaccataagaatgttgattttttattgtgaatttgtataatgtttcaagctctgaatcttttgtttaattttcaggttgctctatctgtactacttaccgctgcaggctgtgtaattgcagctcttggtgatttttcttttgatctttttgggtatggtttggctttaacatctgtctttttccaggttggtttcatttgttcttttccttctcttaaatcagtctccactcacccatacgagtaaatgaatattgtttctcatcattgctgcagactatgtaccttgtgctggtggagaagtctggtgcagaagacgggctttcctccatcgagataatgttctataacagcttcctttctctcccatttttgtccatcctcatcatagttaccggcgaattcccaaactctctatcactattacttgcaaaggttagaaacttcatcattccaagcttgcggctattctcagaaactagtctcttcaaaatgtcaaaatcaatttttttttctttgacagtgttcttatttgccgttcttggtgattctcattctttcactggttatgggcattgtcctcaacttcaccatgtttctttgcaccattgtgaactctgcactaacaacaaccatcgttggtgttctcaaaggcgttggttccactgtaagtataaaccctcatttggctctctttcgagatgaaatctatagaggcaatcatttactaatctttgcctcctttttaatctcctagacgctcggttttgtcctcttgggtggtgttgaagtacatgctttgaacgtgtccggtttagtggtcaacacagctggtggtgtgtggtactcatatgccaagtaccgacagaaaaaggctaaaccggctaagctaatgtctgatttggaagctcacaaaaaatgagaatttcggtccggtttggtttcgtttgggaaggcattaccccggtttatagactttgccactcaaatcaatgatcagaacgaaccgatgtatttgagagttgaaccaggaaaatcggtcctagagtgagatttaattttgatgtgaaacttcattgatcagttaatttctcgtttaggttaagaaaaaaaaaaaatcaatacctatttttatatgtagatgcaatcatgctaatgt

SEQ ID NO: 153298 - DNA, 386 bp, Arabidopsis thaliana landsberg
  unsure (1)..(386): unsure at all n locations
tcgcctccacaggtttattccgagagcacattcctctcttcggtgccctcttccctccctttcagaagtacatcactaaaggatatgtctccgaaacagagtcaggcaaaagacttgctcaggtaatatagaagatagtgttgtttttgtagcttgttaatcaaggaaagacttttcttgctgtgtactcaagccatagagttttgttnnnnnnnnnnnnnnnnnnnnnnnnnnnnnngaaatcaggggtttattggagctggaacaatgcttcggcttcttttgagaaccagttatcagaagaagcaagtgacgttgagaaggctcgtaaagtgtgggagatcagtaagaagctcgtgggcttggcctaataaacttgaagtctg

SEQ ID NO: 153299 - DNA, 974 bp, Arabidopsis thaliana landsberg
  unsure (1)..(974): unsure at all n locations
ttcctccgttttctccttttcaatcgaatccctaacctccacgagactcatactcttcttcgctctcatgtcttctctttcttcttcaaaccggcgaatatcggtagtatacggcgactggtcttatccccatcatatggagaccggagcagagatagtgttggctccgccgccgccgatgtttcgtcatctattctcgacgacgagcttctgagnnnnnnnnnnnnnnnnnnnnnnnnngatgaagcgctcgcgatgatttctgatcggttcgggtcaaatcgcggtggaatcgttgaacttgaagattgccgttcgattatctccgctgctgtcagtcgcggcaatgtggaccttgcgttgtcgatattctacaccatgcgagcgagtttcgatttaggtactctcatctcaactttactattaacccagagtaggagtttctgtgattgattaagcaaatttaggattgattgtttgttttcacaggtggaagtgacaatgatcgatggagttggtcaaggcctgatgttgaagtgtacacgatgttggttaatggtcttgctgcttccttaagggtttctgattctttaaggattatcagagatatttgccgtgttggtatctcccctgctgaggaggtaacactttgctatgataccttgaaattcgtttgaacttacttaagattcatgtaattagtttgtaagcatgattgctattgattttaggttccctttggtaaaattgtgagatgtccgagctgtttgattgccatagctgttgcacaaccacagcatggagttcaggtaatgatgatccaattcgatcttcaatgaatgctctacaaatcttatatggaataactggatgatttgctgtctatgttactagattgtatcttgcgctaattgccgttaccaatacgagcttttctctggtgacataactagcattgactcagaagagctcgg

SEQ ID NO: 153300 - DNA, 915 bp, Arabidopsis thaliana landsberg
gttagtagaagaagtaacaaatggtgatccttcttcaccagacgctaaaacgatgacgaaaatagccgaggcatcgtttgataccgtggagtattggagaattgtggatgttcttcatagaaagtatgaattagttttgtttctcttgaagattattattatgattaagggatagcttaagatgatgattatgaaaaacaggattgggaaagatgaaagagagataaagaattggagagaagcgtacaaggcaatggtgttgttggagttcttactaatggatggacctattcatttacctcatgatttttctttatgatttggaatcttttcgatttcctctccacttttccaaatccgttgaccaataatggggtaaactattattcccaaatctccaaaaaaaattttgttttcatatttttcttgttattgctatcatgcttcaatttatgttcgcattataggtttgattggggagctcaagttcaaaaaaaggcagatcaaattcaaacacttctattagggaaagaagaattaagagaagctcgtcttaaagctctcaaaatcacttcccaaatcaatggctttggtaactccaccacattttctccttctcctaattctctatctaactccttctcttccttgaaaacctccaattcaacaccaaccaaaagaattgatcttatatccgagtcatattcgttaatcgacgacgaaaacaagctctcggagaaggatcaagccagcaaagagacgctagtcagcggaatctgcacaaaactcgccggatttagccctttgaacaagtttcaaggcggtcgtactaaggcggcaaaatttcaaactttgtctaacgttgagagagtttcaagtaaatgttacgatcgttgcaattctattggttactaa

SEQ ID NO: 153301 - DNA, 608 bp, Arabidopsis thaliana landsberg
agcgaagagtcaaagaagagagagagagagagaaagtgggggaaaaaaggcgaagaatacgcagattccatccaatttagggttaggacttcccctaatttggaaacctagtcctgtttcctgatctgttttccggatcggacgagagacgaattaacgaaaatgggcgcgaattctattccgacggacgcaaccattgatcttgatgagcagatctcgcagctcatgcagtgcaagcctctctctgagcaacaggtgcctacaactttctctttagaccttagcccttgacgttttctctactttgtttttatcgatggttggatctgttttttttttttttttgagtggaatggtattttttttctgtgtttgaggtttctttgggtacgagattatcagatttgatttggaaaatttcgttttttttttttttttttctaaatgaacatcttcacgaaatgttattagatcttggcatgtatgttctcacggaagctcatttgtcaccgcagttctatggagttggagaattggctttgcttctatggtttgatgttaaattttggctgattcggattcttagcatagtgattaatcacatctaa

SEQ ID NO: 153302 - DNA, 1889 bp, Arabidopsis thaliana landsberg
atggataaggagagatattccaggagccaccgtgacgatcgtgatcgagattcgagtcccgaccattctccacaacgtgaaggaggacgccgccgtgaccgcgatgttgattcgaagcgtcgtgattcagatcactaccgttcatcgaggcgcggcgatagggaagatgagagagataggaccaaggatagaagagggagatctgtagagcgaggcgagagagaagggagtagagatagggaaaagcatcaccatgagaggtctcacgaaggtagtaaagagaaggaatcgaggagcaagaggaaagatagagaggaagagaatggggctagggatgggaagaagaaatctaggtttgctgatgggaatggtgagaggaggagcaggtttgaggatgtggctattgaagttgagaacaaagatgctcaagtctctgagggttctggggctacgaatccaaccagtggcgttacgatggtgagttctctataccttttctttaatcttctttgtttgctacttgcgatttgttcatgattacctctagtcttcttcgatagctaatgcttgcattttctttttttgtgcagggagcctctacatatagttctattccatcggaagcttctgctgcccctagtcaaacactgctcactaaggtatcttcgatatctacaacggatgaaaataaggctagtgttgtcagatctcatgaggttcctggaaaatctagtacagatggaagaccattgtccacagctgggaaaagtagtgcaaacttgcctcttgattcatcagcgttagcagcgaaagctaggaaagcactacaattgcaaaagggattggctgatagattgaagaaccttcctttggtaagatgtacagatattctatacttttttgcgttcattcttctctgaaaactttgtatttgataaattgcttttcttattctctgtgcagctgaagaaggctactaagccaacttcagaaggtagcccacataccagagtgccaccatcgactaccactcctgctgtctctacaggcacatcttttgcttcagcattaccacatactggccttgctggctttgggagtattgccaacattgaagctgttaagcgagcccaggagctggcagctaatatgggatttcatcaggatcgagagttcgctcccgttattaacctatttccaggacaggcaccctcagatatgactgttgcacagagaccggaaaagccccctgttctgcgcgtggatgcactaggaagggagatagatgaacacggaaatgtgattagtgtgactaaaccaagcaatcttagtacattgaaggtcagcaatgttaatttgaatatcttaagttttcatgtttttctttatatgatcgagcttctaaagtacttggattttacaggttaacataaacaaaaagaagaaagatgcttttcagattcttaaacctcaactggaagcagatctaaaagaaaacccctattttgacacaaggatgggtattgatgaaaaaaagattctgagacctaaacgtatgagtttccagtttgttgaggaaggtaaatggacaagagatgctgaaaatttgaagtttaaggtatgcattgtcttttgtatggattctttttaacgatattctctcttggtggtcttttagatgtctcattgtgtgtatttctgtcttttctttatagagtcattttggtgaagcaaaagcgaaggagctgaaggtgaagcaagcacaactggctaaggcaaacgatgatataaatccaaatttgatagaggtatccgaacgtgtcccgagaaaagagaagcccaaggagccaattccagatgttgagtggtggtacgtaatttctctcacc

SEQ ID NO: 153303 - DNA, 1346 bp, Arabidopsis thaliana landsberg
attcgtcgtcgcgagtcgtaacagtgtgaatatttgcatctgtctcagaatcattcataaagttctgtcttctctcagtttatgtcgtgtgggttgtcagattcaggaactggcttggcaagtgaggataagaaattgttgctggtacgatatggtgatgatgctaatgatgactttgggtctcaatctaaggtctgtttttttttgccataattgtttttttttggtttgtgatgaatagttgagagatgaaacttttagttctcattgtagaaggcgagaaggaaagaagagttaatgagtgcaaggaatagtcaacaagtagaagaagatgttgttgagcacccaagaacatctcataggtcccagcgggtgtgtatgctctcattttattgtgttttgctttgggggttactgttgttgcatatctataatgtgtagattgttttaggttctagcaggaacggcgaaacgaaagaaattgctttctcttaagggaatggatgtgagacctatgatggaagttgttaaaggagcagcttttggaattctccaggtaagagtaatgaactaattttaggagcttctgcgtttgttggtgtctgagttaacatgattcttctcattatttaggctgctggtggttgtccaacgtctctgcgtcctggtaggtggttggatttgtatagtggtacagggtctgttgggattgaagcaatcagtcgaggatgttctgaggtagcaaagaaataaagaactgtgattgtatgatctttgttggattctcttttactttaagtgatcactaaacatgtgtttccatcttggacttgaattatttctcaacaggcacattttgttgagatggatccttgggttgtttcaaatgttctacaaccaaacttggaacacactgggtttgttgatgcttcggttatacacactgctcgagttgaaaacttcctggaacgtgctgataaattagtaggtatgtctagtcttgaagatgttattgtcaatttcaccacttaacttcagctttaaatagaacctatattaagacttttctttactatcaggtaaggatggagtgtttgattatatcagcgttacgccaccttacatggaggttgattatgaggttctgatggatcagattgctaagtcaccagcgattggggaaaatacttttattgtgagtagctatatatttccctttttaaaccatcttataaggattttgggtcaatgtgtaatactcgtcctcttttggacaaaatctgacctagttggtcgagtacccatcacgaacaacaatgcttgattcatgtggatgccttgaaaag

SEQ ID NO: 153304 - DNA, 1301 bp, Arabidopsis thaliana landsberg
gtacactactctttctgttgactgctgcacaggtgttaagaggtggaagacgagtggagatttcgatctatgacatagtggtgggtgatgtcattcctctcaacattggcaatcaggtgagtggtttattctccttttaattttgtttttgtccatattaccttgtctaatcgaagtttaaatttatatctaggttcctgctgatggagtactgatatctggccactctctcgcccttgatgaatctagcatgactggagagagcaaaattgtgtgtttttgtttcctgtcatagtaaaattgttgattttctcgcttcttcttggtataactttctatgtgtcaatttccctttccttgtcaggttaacaaagacgctaacaaggacccattcttaatgtctggctgtaaagtggcagatggaaatggttctatgctggtaggacgacttcctagtttttcttgttcagcagaactgatctcttgggagatagttattaatctcttccatttgtgtgatatgtatgttcttttctttctgcaaggttactggtgttggagtcaacactgaatggggattgctgatggccagtatttctgaagacaatggtgaagaaactcccttgcaggttgatatctttgatcattgttaaggaatctttaaatgtttacaaatcaagctaatctttgacttgcttgaaccaggtgcgcttaaatggggtagctacttttattggttcaattggcttagcggtggctgctgctgtgctagtgattcttctgactcggtatgaatgctatctttgctggttattattttggaactcggccaaatcatgttcatgacagaagaacgattctagttgacattatgcgaattttgtatgttgttctctttttcagatatttcactggtcacactaaagacaataatggaggtcctcaattcgttaaaggcaagacaaaagtcggtcatgttattgatgatgtggtcaaagtccttaccgtagcggtatgtttcctagtgaacaatcttagtctgatagggattcgggacccagcagtaagtatctttaatcttctttagtaatgctaatactcggctattgctgcaggttacaattgtcgtagtggcagtgcctgagggtcttcctttggctgttactttaacgtatgtattcctatctttgctatatcagacctttgtggtagtttcatagtagagtttacttctcgattgctgattttaattccctttcttctaattgttttcagccctgcctattccattaggaacatgt

SEQ ID NO: 153305 - DNA, 1382 bp, Arabidopsis thaliana landsberg
gttgaaccctctgcttcggatgaaaatgagattcagaagtcatggcaagagttatattttcagatatcatctgacacttacgaaaaagtggatgcagctattgctgtagttgagctacttatgtcttcagtatctgtgagttcctaaatcttctctaagagagttataagtatgatatgcatctagtattaaaagtctcaaattttcgaatgattctcagattatgtcatttttccttgtagggaaatacagattctggtgctgctgctccatcttccatatctgaagatatttcaactataccaggcaacagcatcgcaactgctacagccccgagctttgaacagacaactgaccatagccaagtcctacagcatggttcctcctttcctttggctacaaatcaagctcctcttcatccacctcttgaacactttgtttcaggtcttggttatagtatccaggagcaagaactgcctacaaattctatgaacctcaatcctctttttgctcagcaaccacttccagttcctcatgacacatcattacctcctggttctcacgtccctcgaccaccggattcgttctcttttagcctttccaatacaccaagggcctattctgtgactgtgcctccatattctggcagtcagatacaaccaataggaccacgttctactatgaggccgtcgaccctatttactttccatcctgtacatagaccaacactgttaccggacatagaccaatcagtacggcctttggctcctaacttcagtccacgtcttgtagctcatcagccagctactgaaataccatcaattccttttccctcggctagcagtctaatagcagaatatggttctggtagttctctgcgtcccatgtcagtgtcaccacatattgctagtaggcctgctggtcttgttccgacttatcctccaataaatacagcttctaggccgtttcacggggatttcggtttccaaccacaacaaccaaacgttgttaccacaccacagatatcccctagacccaactcacaatcagctcatctccctcatctgccatttcaaacctctcaacattttgggcaaaatttcacaagatcgcagcacttcgacaggcagatggatcaacccttgagccacccatctgtaccatttcatggtaacgcgagatcgaacgttggacctccattgtctcagatgatgcctagaaacttccctggagctcaattccaacagcattctgctcatttccctccaagaccagtgtttcatcatgataacctgataccacgtggccagacacaaattcgccaccgattcaactctggtgtccatcaagtatatgaccctttttcacctagtgatggttaa

SEQ ID NO: 153306 - DNA, 1621 bp, Arabidopsis thaliana landsberg
atgggctctccctgctggattttggacctcaagctgaagaaaaaacattctccgattgaccaatacctggtgataaggatgaggttcgtattcacgtttgggcgccccctaactcctaacaagtgtttactcaggatgtgatggtagtactatatatggagagaaataaaaatgaaatcctggaagctaagctaggcctttgacataaagatggttttcgttttttcttacacattgttttggtttggttgtgtatgcaggctaaaggttgtgaagatgtcatttctacaatccgaaatggtacagcagctgaaagtgcttttgcatcgatgcgggagaaagggttgctcgctcctcgcaagtcgaggcaccggttgacacctggaaccgtcaaatttgcagcctttcatgttctatctcttgaaggaagcaagggactgacagtattagaacttgctgacaagattcaggtaaatctataatctatatttgctatgctgttttcatcgtatttgaatttttttcatttacatagtctttatgttttccattgaaagaaatctggacttcgggacttgaccacaagcaagaccccagaggcttctatttctgttgcattgacaagagatgtgaaactctttgaaagaatagctccttcgacttattgtgtacgagctccttatgtgaaggatcctaaggatggagaggcaatactcgcagatgccaggaagaagatacgggcttttgaaaatggatttacaggtccagaagatgtgaatgatcttgaaagggatgaagacttcgaaattgatattgatgaggatcccgaggttgatgatttagctacactggcaagtgcatcaaaaagtgccgttcttggagaagcgaatgttttgtcaggaaagggggtagatacaatgttctgtggtgttaaagcagatgtaaagagtgagcttgagaaggagttttcatctcctcctccaagcaatatgaagagcattgttccacaacatagtgagcggcataaaaatacagtggttggcggcgtggatgccgtaattgatgaaagcaaccagggccaatcatggattcaaggtcttacggaaggggattactgtcatctaagtgttgaagagcgccttaatgcccttgttgctttagtcggcattgccaatgaaggaaactccatcagaacaggtcttgaggtaaagtctgggttttcttttagcagctttcctgttgaacagagtagaaattgaccttttgagtctattatttgttatctgattgaaatttattcacaggatcgtatggaagcagcaaatgctcttaaaaagcaaatgtgggctgaagcacagttagataacagctgtatgagagatgtacttaagcttgatcttcaaaacttagcaagtagcaaaactgaatcaacgataggcctaccaatcattcaaagctctactcgtgagagggatagttttgatagagacccttctcaacttctagatgaaacaaagcccctggaagatctttcgaacgatcttcataaatcatctgctgagagagcacttattaatcaggatgccaatatgagtcgagagaattatgcttaaaagagatc

SEQ ID NO: 153307 - DNA, 351 bp, Arabidopsis thaliana landsberg
agagaagatccacaagcgtgggaaaatcgaattagggttttctgaaaatggttgatactgtcgacaagttaggtaacttccaagcgattacaggtctcgaagatgctgatttgtgttctaagatccttcaagctcatggttgggacctagacccagcaatctcttcattctcatcttctgatcaagacgcttcgtcttccgccgtcgatggtggtggtaacaatcgcgatcacgatctcaataacgccaccgtgactcctgattatccacctcgagggatccccgccgatacagagcttgttatgcgtgatgaaaaggaagaaatcgaggtccaggagttgcggaaggatt

SEQ ID NO: 153308 - DNA, 2248 bp, Arabidopsis thaliana landsberg
ctgctgctaggccggagtacaagctcactgatgaggttaagaaagccggattttctattgaagcagatgaacttgcatctatggttcgcaaaaatgacactaagagcctggcacagaaaggtggagttgaagaacttgctaaaaaagtatctgtatctctctctgaaggcattcgttcgagtgaagtgcccattagggaaaagatatttggagaaaatcgttatactgagaaaccagccagatcattcttaatgtttgtgtgggaagcgctccacgacataacccttatcattcttatggtctgcgctgtagtatcaataggtgtgggtgttgctacagaaggatttccaaggggaatgtatgatgggacagggatcttgctaagtatactcttggtggtcatggttactgcgatcagtgattacaagcaatctttgcagttcagagacttggatcgagagaagaagaagattattgtccaggtcaccagagatgggagcagacaagaaatctccattcatgacttggtcgttggagatgtagttcatctatctattggggatcaagttccagctgatgggatttttatatctggatacaacttggagatagacgagtcaagcttatcgggtgagagtgaaccgtcacatgtgaataaagagaagccttttctacatttcaggaaccaaagtacaaaacggttctgcaaaaatgctggtgacaacagttggtatgaggactgagtggggaaagttgatggaaacgctggttgatggtggagaagatgagacgcctctgcaggtgaagctaaatggggttgcaacaatcattggtaagattggtttaagctttgctgtgcttacatttgtggtattgtgcataaggtttgtcttggacaaagcaacgtctggtagcttcaccaactggtcatctgaagatgcattgacgctacttgactactttgcaatttctgtaactatcattgtcgttgccgtgcccgaaggtttgccactggcagtgaccttaagtttggcatttgctatgaagaagctgatgagtgacagggcacttgtgaggcatcttgctgcatgtgagactatgggttcttctacttgcatctgcactgataagacagggaccttaactactaatcacatggtggtcaacaaagtatggatctgtgataaggttcaagagaggcaagagggaagtaaagaaagctttgagttggaactatcggaagaagttcagagcactcttttgcagggtatatttcagaacactggttcggaagttgttaaggataaagatggaaacactcagatcctaggatccccgacagaaagagcaatactcgaattcggtttacttttaggtggtgattttaacacgcagcgtaaagagcataagatactcaagattgagccgttcaattcagacaagaagaaaatgtctgttcttatagctcttcctggaggtggtgcacgggctttctgcaaaggggcatctgaaatagtgttgaaaatgtgtgagaatgttgtggattcaaacggagaatcggttccgctaactgaagaacggattacgagtatctctgatatcatagagggttttgcctcagaggctctgaggactctctgcttggtttacaaagatctagatgaagctcccagtggagagctccctgatggaggctatacaatggtagcagttgttggaatcaaggatccagtacgtccgggtgttagggaagccgttcagacttgtcaagctgccggaatcaccgtccgtatggtcactggagataacataagcacagccaaagcaattgctaaggaatgtggcatatataccgaaggaggcttagctatagaaggttcagaattccgggacttgtctcctcacgaaatgagggccattatccccaaaattcaggtcctttgatatatgatagatagaatgaattgttattgtttatctgtctattgaaaatgtttaagtatctctaaaattccttgtttctgcctttaggtaatggctcggtctctgccattggacaaacatactttagtcagcaacttgaggaaaattggagaggtagttgcagtgacaggggatgggacaaacgatgcccctgcgttgcatgaggcagacattggactagcaatgggaatagctggaacagaggtaagctatagttattctctgttattggtatggttaataaaaaaatctcgagattaacatt

SEQ ID NO: 153309 - DNA, 3726 bp, Arabidopsis thaliana landsberg
  unsure (1)..(3726): unsure at all n locations
atgaggaagctctgtgcatgtccgtgtgacagaaagagttttctctataggtacactatggatgagttgaatcttctcgttgaagccctggaaggtaaaaagctcagctctatgttcagatgggcaggcatagatcaaaannnnnnnnnnnnnnnnnnnaccacaagttcaaaacccgaagaagacaaaggcaaggaaacagatgaggttacaccctgtaatatcacgaggaaagatgtcgcagctggaactaaggaccagacaagagtgaaggcgagatctttggctgatatactgaatgttaaagatggaaacaatgatgcaaaggagactttagaatcttgttctaagaaatcaaacaggccatgcgataacgattcctctgaggccaacgcgccaaaaaaacagaagcagtgatgaataatgaaggagattgtagtttagtcacaaaatgcaagacgataaaaacacttttgtcttcttcttaaatcgatatatgaagcaacttttttttttggtaggcgaaatatgaagcaacttgatatgtgttttgtttgttttggctaatagacaaaaacatttttttggttcagtaatatttatttacgttgactctaactaaagtagaaggaaaatatttgacgaaaatacagagccgttggatttgatgactttatgagattgagattagttttgactttctttttttgagagctgcggttttgtaaaaatggcccacaatttctctgaaaattcaaaattcagtgccggagattactcgtcgtagtcgtctgtgtcagatttagttctatttgcgatagtgcgaatggcggagacggacgtcggaagtgtgaaggggaaggagaaaggatcgggaaagcgctggattttgctgatcggagctatagctgccgttctgttagccgtcgtggtcgctgtgtttttgaatactcagaattcgtcgatttctgaatttaccggaaaaatatgcaattgccgtcaggttaggtatttctaaaagctctttgtaagtttctgaattggatacttgagctcgtgattagctttgaatctcagcgattactttgattttgatttgtatactagacttctcaatcgttttgattttgttgttaggctgagcagcagaagtacattgggatagttgaagattgttgttgtgattatgaaactgtgaatcggctaaacacggaagtgttgaatccattgcttcaggaccttgttaagacaccattttacagatatttcaaggttggttcatatttcttctttgatcatgaaagtatctagaggatttggaggtgtgttgtgataggtttgaatgcgtttaataggttaaactgtggtgtgattgcccgttttggcctgatgatggcatgtgccggttaagagactgcagtgtttgtgaatgtcctgaaagcgagttccctgaagtatttaagaagccattaagtcaatacaatcctgtttgtcaagaggggaaaccgcaagctactgttgatcgtaccttggatactagagcttttaggggttggacagtcacagacaatccctggaccagtgatgatgaaactgacaatggtaacttttctttacagtctacttcatttttgattcttacatgtcgaaactctatcgctacttcatatataactggctcatgagatgatatgtaacaagtaggggttttagcatcgaattgctatgtgttagatgcagtttttgatgactgtatatatgatcgcagatgaaatgacatatgttaatcttcggcttaatcctgaacggtacactggctatattggcccatcagctagaaggatatgggaagctatatactctgagaactgtcccaaacgtaagcttcaccatattaaagtgtttcttgttttctctatttgtttctttatactcttattctccaagtggctgattaattcatatggctgtcttaactcctgcaattatactggcttctatagatacatctgaaggatcttgccaagaagagaagatcttgtacaaattggtttctggtcttcactcatccatttcagttcatatcgcttcagattatttacttgatgaagctacaaacttggtaagatctgccgtacgaatctgacttatctgtgatatgtatttcttaagcagatatagaatgactcaaagactacttttttttgtatttcagtggggtcaaaacctgacgttgttgtatgatcgtgtgttaagatacccagaccgcgttcagaacctatacttcacatttttgttcgttcttagagcagtaacaaaggtcagttacttaccactttacttttctgtctggatcctaggaaaagggtcccagtggtctagaatagtcacaattagttttttttgcatgatttgtaggcagaagattacttgggagaggctgaatatgagactggtaatgtgattgaggacttgaagaccaaatctctggtgaagcaagtagttagtgaccccaaaactaaagcagcttgtccagtaccatttgatgaagcaaagctctggaaaggccaacgtggaccagaactgaagcaacaattagaaaaacaattcagaaacataaggtccttcttgagtcctttaactaattttcttgagcaatgataaaatttccactgactagctaagttaaattcttttttattacttgaatcgtcttgcattgcagtgcaataatggactgtgtaggctgtgagaaatgccgtctatggggaaagcttcagattctcggtctcggtactgcattgaaaattctattcactgtcaatggtgaagacaatttgcgtcataatgtgcgtttctaacacacctggagacgcattgtccatttgcaccgtgtattttctttaagcgtctattgggaacggcattttagtgatgtagcaatctttgttgttttgtttcagctcgaattgcaaaggaacgaagtgattgcgctgatgaatcttctccaccgattatctgaatccgtgaagtatgttcatgacatgagtcctgcggccgagagaatcgcaggtggacatgcctcttcagggaacagcttttggcaaagaatagtgacatctatagcgcaatcaaaaggtaagaaagcattaaagaatttgtagactttaatcgtgaagtgagacaagaggtagaaacttattttctctggtcaccacttgctgaaatgcagctgtatctgggaagagaagctagatgttcaatgaggtctgggggttgtgggatcaagcgcagtgatggcgggagagtatactttgttgtaaagtaaagagaggttaattttgcaggaaacagttatacaaagccccgttagatgccaacccgaagctgagaactttttgatttaccctttaacgtgaatttagagaatcttacatgaaactaaaaatattgtacggattttgaaatttgttgacagtcccttctgaagtaaacatagaatgggtggaaaaacgtgaatgaagagagacatttttatttgttcggtatcagtttaggcatatcataaattgcctactcaccaaagctcccattacaaaatgttggggtttggtttacaacttcgcagatttaactacctgaaacacatgcaatgtataaaaccttgaggataactactcttgtatagtaaaacttccaatttcttcaggaaaacctgataactag

SEQ ID NO: 153310 - DNA, 850 bp, Arabidopsis thaliana landsberg
gataaattcggattctgtagctctttcaatacgactgcggagatcagagccaattatttggttatggcgtctctgatctcagatattgaaccgccgacgagtactacttcagatctcgttcggagaaagaagagatcctctgcttcatccgccgcatcgtgtcgttcaagcgcatcttccgtctccggtgagattcacgcgcgatggagatcggagaagcaacaacggatctactcagccaaactgttccaggcgctccaacaagtccgcctcaactcttccgcctcaacatcatcatctccaacggctcagaaacgaggaaaggccgtccgtgaagccgccgaccgagctctcgccgtttccgctcgcggaagaacactctggagcagagcgatcttagctaatcggatcaaactgaaatttcgtaaacagagacgtcctagagctacggtggcgattccggccatgactacggtggttagtagcagcagcaacagatcgagaaaacggagagtgtcggtgttgagattgaataagaagagtataccggatgttaaccggaaagtacgtgttctaggccggttagttcccggttgcggtaaacaatccgtaccggtgattctagaagaagcaactgattatattcaggctctggagatgcaagtgagagccatgaactctttagttcagcttgtctcctcctacggctcagctcctccaccgatttgatgaggttaaaatcgtcttttaaattctaccatctctcgatctttcacagcttatgtgtatatagaagattcggcttgattataatctgtaactactcttcccaaccgctgattcttgtctg

SEQ ID NO: 153311 - DNA, 452 bp, Arabidopsis thaliana landsberg
ggatcaataccggttgctaggagaaaatgtagccaagttacggattgatatgatgaaagaatagctctccacgttccgttcccagcttgaagagttcgctcgtaaacacaaggtcgttatatgttgaatcttatatatatattttgttgtggttgttgtggttgttgttgttttgtcatcgccttgatttcgtaataagaacatgtctttaataacatgttcctgaatttgaaacaattgtggtgaaaagaagcataattttttctttggttgcagaatgacattcgtaagaatcctgccttcagtgctcaattccatgaaatgtgtgctaacattggtgtggatcctcttgcttctaacaagggtttctgggctgagctcctccagattggtgactcctactatgaacttagcctgttcagccccactgaagaagatgcttctgatttttg

SEQ ID NO: 153312 - DNA, 742 bp, Arabidopsis thaliana landsberg
tagtgagtagagagagttatcatctagggtttatagattggagattttagccgcaacaaggaggaagtgtttttaatttaattttattgttaagagttattgttgctttagggatttttggaatttgggtgttcttttaaatggctcggttgataattccttgtcgaagttcgtctctggcgagagtcaatcttctgggtttgctctctcgtgctcctgtgattaccctttaactcttttttttgtttctttttgttttagatatagaaagttgtatttttgattgattctgacaatagaaatgatataattaaaatgatggagttctgttcgaattgtatgtttttgttgagagtttagtttttacatgttttacttttgaattcggttgtgtacacaaaccttggaaagaacttgtgtaagaataagaaattgttcttgattcttgtgttcctatgacttctgttttgttttgttccatctttatatgtttataattatgttaatttctcttttacaggttcctgttagaagcagttgtcttcgtagttcggcaaacagacttactcaatacagaccgtttcttacttccgaggtttgtgtttctttgtttcttctatcatcaagtgccacgctatgtaaaaagagaatgatctttgctgtaattctttgtttcaggccatttgtttgaggaagaatcggtttctaccccattctgttgatgtaacttgctctatcctcg

SEQ ID NO: 153313 - DNA, 1488 bp, Arabidopsis thaliana landsberg
atggagcacaatgaggaattttggaagcttttcagcaatgaagatcttaaaagacgtttttcagaagttggtgtcgatcgacaccacacctgtgtcgatcgacaccacacctgtgtcgatcgacactcttattgctgcctagggaattctcgttttctaccaagtctttgcgaggccatgaagtcttccatatttgcaaagtagtccctccacgtttttagtcacgaatatacctaattgtttggtcattgttagacctaagttttgttttagagattgttacacattttgagagaagaatccaatccttttagagaggattctgaactcccttacttgcattcttaaatcatcaatgcaaactatttagattatgacttagtaatcaccttgttgggtttagggagtctcaatagggatttagatggattagtagatcgaaaaccccttaggattatttttagagttcttcatcttgattattcttattgctagttttagattgatcatctagaacttgatattagataataggtatgtccgccataggtacttgttattagaactatcatagatgagccgaggcatttaagaaagaacaggtagtctcatagaagggctcttgtttagatactaggtgaacttatcaagcttattaacaatgcatgccttagcataggatttctcgacttctttggttatctagctttaagtatagagagtttcgcggaacgccaccggctactctagaatcatagtttgagttcgagaacggtgcgttaacaatcctaatattagctagatctacgatttatctatctcccgagaccattacttagacccgacgcttaaataacttgaatctacaactcatttacttgcttatttgtcttttacattcaattacttcatctagcttattaaacaacatcataagtctattgtgtgaaaatcgagagttcactggaattcgacccttaagtgctaacgacgatctgttattttgagggagtaagcttaaggcagtttgagctatatcaaatttagcggcgttgccgaagttctattttagttcaccattagactaggtgtcattttaagtctagatattacttttctaccacctattgacgtgtttctttgtcttttggtctcttgtatttcaggtaccttcagattgagaatcacgttcccatggcagactttcacggttatgtcgaccaacaccatcagggtgtcgatctacaccctctgcagaaccagactgctacaataggcgattttaacagaattgacctcttctacacaaaccgatcagcattcaagctacctccattagaaagagatgactttgctatacaccctgcctattatgatattgtatcaagaggaaagtttagaggagctcccgacgaatcaccattagatcatttggaagtcttcgtagacatcgtttcctctattaaagcagacgggttaccatgctga

SEQ ID NO: 153314 - DNA, 1586 bp, Arabidopsis thaliana landsberg
atggcttcgaatctcgtggaaatgtttaatgctgctttgaattgggttactatgattctggagagtccttcagctagagttgtcttgtttggtgtcccaatccgaggtatagatttgaagaaacaactttaagtgaactttgtctgtctatccaagttttttggttatttgagattactaaagatttcaacttttttgtttttgttttcgttttccagggcacttctttgtggaagggttgttgggtgttgtcattatcattctcctcactcggaagagttataaacctcccaagcgaccattgaccgagcaggttctgtctcagatcctttcttgatattggtttgatagatcacataggatttggttcttggtgacatctttgatgtgtggtatagttgaaatgtattgagttttcggggttttttattacgcaggaaatagatgagttgtgtgatgagtgggttcctgaacctcttataccgccaattactgaagacatgaagcatgagccaccagttcttgaaaggtaacgtagaagacttctatgtagttcgttgtatagccttattctgtgttatgcttaaagattttgttgggtccatacagtgctgctggaccgcatacaacagttaatggaaaagatgtggtgaattttgcctcagctaattatcttgggctcattggccacgagaagttgctggtaacgtgaagctactttgttttcaatacaatctctcttctgtttgaatagttttatttaagatttgtcttatgccaggaatcatgtacttctgcattagaaaaatatggggtcggttcttgtgggcctcgtggattctatggtacaattggtaagaagacaatcattttctaaatagatactttggttcatccattggctcgcttggaaagggttcttactgtttgattacttctcttgactagatgtccaccttgactgcgaaaccagaatatccaaatttttgggtactcctgattcaatcctttactcttatggactttccacgatgttcagcacaattccttgtttctgtaagaaaggcgatgtcattgttgcgtaagtacacaatttcttataacatcgttctacttattagattacgttagtagaaatcccaggattacattgaacatctttgtttgaaacttttttatctcgatattaaactcattcttgtcttttctattttcttagtgatgagggtgttcactggggaatacaaaatggacttcagctttcaagaagtacaattgtgtacttcaagcacaatgacatggaatcccttcgaattacccttgagaaaatcatgacaaagtacaagcgctcaaagaacttgaggcgttatattgtagctgaagctgtatatcaagtacctggcagttttctttcttctcctgcttccatattttgaaaattctccctgaactgtgatgcttacccatttgcctttgggtatgttaaaatctacagaattcaggtcaaattgcgcctctggatgagattgtaaaactaaaagagaagtatcggtttcgtgttatattggatgaaagcaactcttttg

SEQ ID NO: 153315 - DNA, 1343 bp, Arabidopsis thaliana landsberg
aggtgagaggagatctcacttgccttcttcactcactctgcagcaacttcgagatcaagttaaaggtcagattccttaattctccatttcttatttgcttcgttgcagagaagaattaggttttcccgatcttcggattctgattctgattttcttttgcgatcattggcttggcgataagaatggcggcaacatcactattgtacaatcagctcaaggtttgagtctcgcctttttgttttcagaatgttgaatattggcttcttatggtaaaatcgagtttgattctaatacgtatatcgtatataggctgctgaaccattcttcttgttggctggtccaaatgtgattgaatccgaggaacatattcttcgaatggcatagcacattaaagacatttccacaaagtatgatttcttgtactccgttttttccccctgagagatctttgtatgaatgtgtattgatctctatatgaaaattgattacagtagagaactcaactgagagatgaactttgaacaatgtgttttcttttttcaagatccttatgctacttttgttgtgtgtgtgtgtgtgaatggtgtagagttgggctgcccctggttttcaagtcaagttttgataaagctaacagaacttcttcaaagtcatttcgtggtcctggcatggccgagggtctgaaggtatcttcccctgtatacctttaatcactctttttatgccttgggatgtctaaatatagatgaattggatgttaggactgtggatatgagaaccttcacagagtattgatcgatcttatatatgtaaactaattgatagcagccattgcattactctcccctatgatgctaccatatacttgaacgtgaaattgctttaattttttttttttctgaacaagaataatgatggtcacatttctggttctccaacgcagattcttgagaaggtgaaggtagcatatgatctaccaatagtaactgatgttcatgaatcaagccaggtataaatgaacgtaatcacataaaagattgagatttagcaagtctttagtaccttctaatgtgtgattttattttccttagtgtgaagcagttggcaaggttgcagatataattcagattccagcattcttatgtcgccaggtgagactctaaactgtattttcctcaaagcttttgattgtagctttcaaactgtcgatcttggattgatatctgttctatggttgatgatttaagttgttaattgtaattccacagacagatcttctggtcgcagcagcacaaaccggaaaaattatcaatattaagaaaggacaattctgtgctccttct

SEQ ID NO: 153316 - DNA, 582 bp, Arabidopsis thaliana landsberg
  unsure (1)..(582): unsure at all n locations
atggtgatgttgatcagtctgaaaagaagattatctagtgatggcggtcaagaggagacaacacttggggaatcaaatcctttgaagggggatccgtcgagtcctcatgttcctgaagaaagtgttaagaagtggaagacatggttgttgagtgatgctgaggtgatgagagcacttttctgtcacatttcagacaactagtctgcctgcatttgcgttaagcgttgaatattgttttttgtgagatctgtggtcannnnnnnnnnnnnnnnnnnnnncgagttcacgtttttatacaggccagggaagttgatgaagcaggggcaccacaggatcaagaggcgtttattaaagaagtggaggccttcaacaaggagaatttcctggaatttaaagccccaaagttttacggacagcccttaaattgtctcaagtgagttgttggaagtgttgctttaattcttggaaaattccatacttttggttatgccttgtttgacgtgataacgtctgcatgctttactttgaaatgtaggctttggagagccgttatcaagttaggtggctacgatgtggtaatga

SEQ ID NO: 153317 - DNA, 2731 bp, Arabidopsis thaliana landsberg
atggatgatagttgcgccgtttgcgcggagaatctcgaatgggttggttacggatcttgtggtcacagagaggtttgctctacttgcgttgttcgtcttcgtttcatactcaatgatcgtcgatgctgtatctgcaaaaccgaatgccccgtcgtctttgtcacaaaggttagggctttttccttaatctgctcaaatgtgttgctcttaaatggtaaaagataaacttttttaagatagtgagaatctgagactaaaacttgtaaatttgcttgaatcttgggttacatttgctgtgttctattgcaggctttgggtgattatacaaagacgattagtgatttctcgactactttcccatcagtaccaaaggaaggtcgagtaggatccttctggtatcatgaagaaaccaatgtttactttgatgacttgaaccattacacaaggattaaagcaatgtgcaggctctcttgcaatttgtgtaacgatacaaacaagactcgaccaaagaaagagcctaaccattgtgttcggtttaagagcgttgaacacttgaaagatcatttaaatcatcagcacaaattgcatatgtgcagtttatgtcttgtaggtcgtaaggtcaggttctgaaactaccctcttaggtttaagatatctctgctaacgatttatcatgaacaagctcatgcttttgttttgacaggttttcatttgtgaacaaaagttgtttactaagggacagctgaaccaacatataagtagtggtgactcggaagttgatggaagtgagagtgaaagaggaggtttcactggtcatcctatgtgtgagttctgtaaaagaccattctatggtgataatgagctatacactcatatgtctagagagcactacacttgtcatatatgccaaaggtaattgctatttgtagttgtgagagttatgaatttgattgacctcgaaatgatttcattttcttccatttggcaatgcaggctgaagcctggacaatatgaatattatggaaactatgatgatcttgaggtatgaatgtaatcttattgggtgttctgactctttaacagtacatgtctcttacttgtttttgcaacaggttcatttccgaagtgaccatttcctatgtgaagacgaaacctgccttgctaagaagttcatagttttccaaatcgaagctgagctaaaagtaaaacacattttttttattcacactgtttgttatggtgatacacaatgatgtttaaaggatcacttgcatttttttctagaggcataatgctattgaccatggaggtagaatgtctcggtctcaacaaaatgcatcactacaggcatgtatcgtttccgagtacaactcttgccagttaattatctttcccatcttttggtttgctttatgatgtttaatagttggttctgtttcagatacaagccagtttccaatacccgaacagtcgccgtggaagacgccgatcttctcttcgtgagcctaatcttgtgcttctggaatctcaagcatcttatgcctttaacgacgataataatcttcctcaacatgtgggacgctctggaaattcacgtcttggagaatcttcttttcctccactctctgtgcaagcaaaccaaggccaatcaagatttggacagaactcagagagtttagttagtaacaccacgactactcgtcaaagacatcgtgcaaaccaaggccaatcaagatttggacagaattcagagagtttagttagtaacaccacgactactcgtcaaagacatcaaacaaatagaagtgcaacttctggttcttctcaagcttggccagcactaaaccgaggcccggcagaaatatcaattacaagcagggtacaatcttctggtgcttctgctcaatctcaatctaggcaccatgacagagttgaaagtactagaactcttgcttctgcagttccacaagatgctcgtaccacagttggtggatgctcatctggttcttctctgagttccgccaatgcaacaaagaggaataatcatcactcgtcttcaacccctaaaatgtctgaaacaagatcactggcgcagccttctcattctgattctcctcaaatttccgctgtgaaaaatcgcaggtcatcatccaccagtgcaaatgcagggaacattcaagtagcgcaaggtgtttctgatgtacagtctgacaataaaagtttggttgaaaatttacatgccagccttggccccaatgaaaagttattcatggccttcaaggatacttcaggaaagattcgtcatggttccatcgatgccagaccttacttggaatatgtgaaaggttatggtttgtctcacttagttctggatatggctagactctgcccggaccctcagaggcagaaggaactcattgatacccacaacgcctgcttgaaaggaggcaataaagggaaagctgtgaaggttgaaagtagcagtgtctccaagggggatagatttgttgatacagtgagcaagttgcaattctctgtcaaatctcaggtcaaagacagagataaggatgcattccgttcagataaaggcaaagcaaaagtccgtgcgttggtgtattcttcatcggctgcagtgggacctaggtgtcacaggctatctccctcagaaaacttcttagtttctcagaacacgtctaggagacaaatcaacgcctgcagttctagttcttag

SEQ ID NO: 153318 - DNA, 384 bp, Arabidopsis thaliana landsberg
gacttctttgcattagtggaagagacgtctgtagttgatggagatttattgtcatgggtaagtaaaaattctacatagtatttcacaacctttttcatcaatgtctcatgaggtttctctatttacctttgcagacaaggaagttcaaagagttgcttgagaacagattaggatgggagtttcagaagaagagcgctgttgacgggatttactttgaagaagatgatgaggtaaatatatctgcctccagctttgtcttaagtttctttctctttcgctcataccattaatttgacatgatgcagtatgctcctgtggttgagatgttggatgaaagtcatggagaatatatggataaaaccacttagacatcgatcgatgcag

SEQ ID NO: 153319 - DNA, 495 bp, Arabidopsis thaliana landsberg
tctgatactcgccactctgtgaaatgctgtaccttgtggaaaatcggaattatgaattgtttgttgatccttcaattttcatggatcgattctcaaacagtaagtatgtcatgttttggctaccattcgtttttgtatttggttgatgcagaacatcagccaagaaacaaacagttatattgaatacttaacccagcctacttgtttcatcatactcttgcaggcttattgaaaggaaaaaataataaagatgttgtggcaacagctagagacattatagctagtatgaagagagattggatacaggtgtgactttgttatgttagtgtatcgtttcctatgtacgctttgccttagagttaattaaattatgagttatgttagtattagctacgtattggcttgcagaccggccggaagcctagtggaatatgtggagcagcactttacacagctgctctttctcatggtatcaagtgctctaagacagatatt

SEQ ID NO: 153320 - DNA, 1306 bp, Arabidopsis thaliana landsberg
ggctgtgtttccttgctactttaagttatccagttagcttgttcttaaaatttgtataaacaatggcagagacgtttttttaatgtggtcattttgattcatgttttccttgatacttatagtttcataccctttggtgctatggtggtatcccattacgtatcaatttatgagtgcgtgtttttataagtgatgtatttgttactagaaatctgatgagcataagtacacgttgttgatatgtaacactattggcttatatgatttctataatatgccttatatgcttacgaaatggtatgttgatatattccaattctgattgctagatattggatgcgttaaataaaggagagatcccatcaacaggatcactagttgaggttttcaataaagatattgttgagagatgtgtgaagctgtacaatgagaagatggtaagagtgcgactacctatgtccgaagaatctctccaaagtgcccatgaaatggcgcataatgaagctatcaaagcatttgatgcacaacattttggcagacaacatgcaaagaaatctgtcgatcagttggatgaacaaatgcaggaggtatgaattcctatgctaatatagaatttctattaagtgtggcttagtggatgaaacaaagggatgattctgaatttcgtgttggcaaatttggtagtctacggaaaaataagatttccaaaattactttcttattcattcttgtgcacttgaaatattgtccaggtatataagaattttgttcttgcaaatgaataccaatcgtcgaagctctgtgaggcgctatatacaagttgtgaagatgacatggaccacttacaggctctccgactcccttccatggctaaatttaatgcaggttttgtgtactgcaacaaaacgtttgagcagcaatgtgttggtccttcaaaacaaaattatgagcaaagattaactaaggtaatatatacatgtctatgttatgtgataagtattgaactgtaatttgatatgagaacttgtgtgcagatgatgggaaagtcacggtctttgttcatcaaagaatacaataaccgactgttcaactggctggttgggttctctcttgtaatggtggttgtgggccggtttatcataaaattcattttattagaaatggcggcgtggatacttttcatattcttggagacatacacaaggatgttctggacagcagaagctctttattacaacccagtctggcatttcatcgttgggacatgggaaaatgtcgtgtatagtcctattctcgacttggacag

SEQ ID NO: 153321 - DNA, 422 bp, Arabidopsis thaliana landsberg; identical to SEQ ID NO: 75612
  unsure (1)..(422): unsure at all n locations

SEQ ID NO: 153322 - DNA, 432 bp, Arabidopsis thaliana landsberg
atggtgattctcaggtacgagagcctgggtctgaagacagtaccgtcgaaagaggagactttgaggatgaaagtgcgcaagaagatgagcaagagaggcgagacaatgcgtaccaagatcggagtgaagagtaatgtcataagaaacgtgcccaataacgtcccatattagtttctgtgtatgtgccacatgttctcaagtgttggattgtatgatgatttcatgtacttttgagtctttgaccaagttgtgttgctacttggtaataagagtaagctttagaaagagtatgttcactgaaatagaaatgttaaaaattaatacgcgaacgttgacttctgatttactctcaatatctacattgtccagagatgcatgtaaaacaaaaaagaaacagcgacaaaagggtactacaatatcccaaaaaggctt

SEQ ID NO: 153323 - DNA, 1598 bp, Arabidopsis thaliana landsberg
atggttgatcaaggtcaacaaattactcaatctgtatcaattccggtgattggagacggtggcaatggatacggtaatgccatgaatgttaagagaaccgtcaaaggatatattaaagctggctttgcaggaattatcatcaatgatgaagtttgttgtgaaaatactaagagtgagagaagagtggtttctagagaggaagcagtgatgcgtgttaaagctgcggttgatgcacgtagagagtgtgattcggacattgtaattgtagctcaaactgattcccgtgaagcgatatctctggaggaatcactcattagggcaagagcttttacagatgctggagctgatgttctctccgttgattctcttgtttctagagaagagatgaaagcattctgcaatgtctatccactagttcctaaattggtaacttcactttgcgccggaaactactctttctgtatcttgatatattccctggagatacgaagatacatttttgtggtctgtgtaggctaatatgcttgaaagcggaggaaaaattccaattctaaacccgctggagctagaagagattggatataagctagtggcgtatccaatttcattgattggagtatctattcaagcaatgcaggtcacaatctttctgtttctgccaataatgtgttgacttcactgtggtggcaaagagacttaagaactatgtggaacacttgcaggacgctctattggcaatcaagggtgggcgaattcctccaccaggaagcatggcgtctttagaagaaattggagagattcttggttttgacacttacgaggaagaagagaagcggtacgctacctcgtcatcagatagaggtgagacatggaagttttcagttgtaacatctttgggaaatgtcaaatcaataactaaatatatgttttatccttttcaagaagtgagcagcagtagcgtctatcgtaatcaacgggtggctaaagatgatccagaacagagagaggacctgattgttgaagtcataacacctgaggtttataatgaaccaagaaaccccttttcgcggatctggtcacgatctttgaggatcaaaatcatcggacgcgatgggtttgagaaactcgatgtcagaattccggtaagtccactttcgagggccatttttcgtgttttatctgagctgatgcaaaacttgtcttatggttggaacaggccggattcttggaaggtgtcacaaacattgttccaggtattcaaaaactcctaagtctctcttattctgtttcagttttcttaggcatagttattgacagatcctcaaaaaattcgcagctttaggaggcgtgaacttgaagcaattgatggacgatgcagcagatgaggtcggagggaaaattttgttagattttaaagacactgcaggtgacagaatccaagtctttctagaatgacacacacctagtgaagaaaaagtaaatacagccgggaaacatttaaaaagagaatacaaaaatgtaaagattttatttgttccgtgaatgagaaatgtattacacatcttcaaaataaagaaatagaagtgaatgtgtatata

SEQ ID NO: 153324 - DNA, 1577 bp, Arabidopsis thaliana landsberg
  unsure (1)..(1577): unsure at all n locations
atggacggtgccacataccaaagattcccaaagatcaagatccgtgagcttaaagatgattacgccaagttcgagcttcgtgaaaccgacgtttctatggccaacgctctccgtcgcgtaatgatctccgaagtccctaccgtcgcaatagatctagtcgaaatcgaggttaattcatctgtactcaacgacgagttcattgctcatcgattaggtctcattcctctcactagcgaacgtgctatgagcatgcgtttctctcgagattgtgatgcttgtgatggagatggacaatgcgagttttgctctgttgagtttcggcttagttctaagtgtgttactgatcaaaccctagatgttactagtagggatttgtacagtgctgatcctactgttactcctgtggatttcactattgactcgtctgtatctgattcaagcgagcacaagtaagtcccttttcatcattgtagtgattatttgttctttatgaattgattggaattgctaagcttagatattacacaatgctaaacaaaatttgacatctttagatgccctttgcatgagtcttccttttggtagttctgtggcttttttttctgcagtttcttagactgttattgttttggtttcaggggaattatcattgcgaaactacgcaggggacaagagttgaagcttaaagcattagcgaggaaaggaattgggaaagatcatgcgaaatggtctcctgcagctactgttacgtatatgtatgagcctgacattattatcaatgaagagatgatgaacactttgacagatgaggaaaaaatcgacttgattgagagcagtcctaccaaagtctttggccttgacccagtcaccggacaggttaaattcgaagttctgtaagaataacatctatacaagtttatatttgggagacttcaatatgattgtactactttataggctaccatgcttagaaatatatgtatgtgatgtggcgaatgaaatatctttaagtgtttagtgcgtttagctcatttcttttgcatactattgttcgaatcatcacaactgtatttatcatactatgcttcttaggttgtggaggttgatcctgaagcatacacttacgattaagaagtgatcaagaaagctgaaacaatggggaaaccgggactcattgagatccatccgaaagatgacagttttatattcactgttgannnnnnnnnnnnnnnnnnnnnnnnncaactggtactaaatgccattgatcttctgaagcagaagcttgatgcagtccgtctctcagatgacaccgtagaagcggatgatcagtttggtgaactcggtgcccatatgcgtggaggatgaactcaagtgattaattcgagctctttgttatacctgtttgtttcaggttttgagtttcttctggagcagactgatattaaccgtagtggcactgtcttgtttgataacatgtgaagtggcagtcttctatttgttctggacctctgatccctctgttcctgaatcttgttaagtttggttgttgttagttgttagactcgctcgtaacgaaa

SEQ ID NO: 153325 - DNA, 338 bp, Arabidopsis thaliana landsberg
atgtaagtaacaagtaagagtcctcaaaattctatcaaaagttaccaactttaataaacccacaaaagctttgtatttgcattttacgattaagtactcagaccatcactttttccacattttctcgagcaacccatggaccaagaccttaagactgaaaatagctgagaaattgattgagaaaatcaacagaatactgaacccatgcctttgtttatagattcctaagatatcaaacgaaacgagaatcggcaatagagagtgaaaactggttttggagaatcaacgatgcgagaagcgagagtttgttttgttgtttcaaactctctatcgactga

SEQ ID NO: 153326 - DNA, 462 bp, Arabidopsis thaliana landsberg
  unsure (1)..(462): unsure at all n locations
caagaacatgaagcaaaccttgtgcctggcagttctcttcctcattttatcaacaagttcatctgcaattcgaagaggtatgttgttgaatacagtaatgattagtttcttaaaattaatattatcaataaccaaaatcatcttccttcaactctaaatctttatatgtcatcaggaaaagaagatcaagagataaatccattagtttcagctacatcagtggaagaggactcagttaatgtaagttcatctaaatttttccctaaaataaataagcaatttgcttattttattttcctaaaaccacctaaaatatgctatcagatgcataccaataaactttttcaaaggtgatttcttaatgatatttcatgggtgtatatttaatacataatgggngtttctttaatttcttcctaatggtagtaataagtatctcggaaattgcaaactatagggtta

SEQ ID NO: 153327 - DNA, 735 bp, Arabidopsis thaliana landsberg
atggcggagatcgggaagacggtgttagatttcggctggatagcggcgagatccacggaggtcgatgtcaacggcgttcagctcactaccaccaatcctccggccatcagttccgaatctcggtggatggaagccgccgtacctggaacgtaagtaatagtgttcactttcctcttcgaaaatttgaagctattaataatcaaagtaagaacaattgtttaagtatttgattttgttcgaatgtgtctgtcaagtttggattttgccttgataactaataattaattttcttcttcttatgaatcagcttttatttatgtaaatacctctaattgtttcatgcatgaatgagagattttactgatataggatcttaattgtgaacagtgtattgggcacattggtgaaaaacaaagcaattccggatcctttttatggacttgaaaatgaagcgatcacagatattgccgattccggaagggactactacactttctggttcttcactaaattccaatgtcaaagggtggggcaccctcaccctctctctctcttgggcgaaattgctatttttcttgggccttattttcatattttggtttgacggatttgcagtaattgaatcaatacgtgcatttgaatttccgtgccatcaactactcttgaacaagggtttgtaaatgggcacaaagacagagctttccaaaggaaagttttgcagacatacaacttgac

SEQ ID NO: 153328 - DNA, 3411 bp, Arabidopsis thaliana landsberg
atggcgtcaagagcgatcgttaggagaaagaatatcatttccgattacttgaatgtctatgctcgctctattcagagctttcagtacattggaaactcctctcagacggttcattcacatgcttaccactctggtattaaccgtcctcccgtggaaactaaacctgtgactgaacacaagtcctttacaagaagagatggtcttctattgctttctagaaatggatatttcaatcgtagctttcatggttttcactcctcgggatttggttatggaagttcagaagttggtccttctctggggatgagatacatgagcctatccattcgtaatgctactacagttgcagctaagaaaccggaagaagaggataaaaaagttgatgagcttgctaagaacaggaaagaagcatctcctgaggaatgtgatcaagctgttgaaagtctgagcagtgttaaagcaaaggcgaaagctaaacgtcttcaagaatccaaaaaggttgctcgatcgatagtacagagggcatgggcaattgttcttaagataggacctgctataaaagctgttgcctccatgaacaggtttggctttatcctcacattttgcgttcttaatcgccaggctttatgcatggatttttatgtgtactgattttctgttttctacagggcggattgggcaaaaaagctcactcactggaaacatgagtttgtatcaacattgaaacattattggctggggaccaaattactctgggcagacactagaatcagttcaagattgctgctcaagttggctggtggaaaaagtctctccagaagagaaaggcaacagctaactcgaacgacagctgatatctttagattagtgccatttgcagtgttcatccttgtgccgtttatggagtttttgctcccagttttcttgaagctcttccctaatatgttaccatcaactttccaggacaagatgaaagaagaggtatgtttcaacagagtgtaggctttactcattcgtttactaccttcttgccttcttggtctctttccgatgttgctcttttgttaatgcacaggaagctttgaaaaggaaattacttgcaaggatagaatatgctaagtttcttcaggaaaccgccagagagatggctaaggaagttaaacattcaagaactggagaagtaaagcaaaccgctgaagacctggatgagtttctagacaaggtaaacagtcataattttgtgttggctcaaatccctcctcttctttcggtttttggatttgaatttcattttccttgttcttaaaatcatgccttgcaggttcgaagaggtcaaatagtccataatgatgaacttttgggctttgcaaagcttttcatcgatgagcttactttggataacattagcaggttagtcgtttcttttttgtttgatctcagagatgtcttgtgctcttagaggttcatgttccgacagtaatatacctctttgtttttcaaatataggcctcgcttggttagcatgtgcaaatatatgggtattagcccatatggaacagatgcttatctgcggtatatgctcagaaaaagactgaggaggtaagattcttccatatctcgttgttattagaattgttagtttttaccttaatttgatgtttaatttctacttcttttcactgcagcattaaggaagatgataaactgattagagctgagggtgtggattccctttcagaagctgagttacgcgaagattgcagggaacggggaatgctgggactggtttcagttgaagagatgaggcaacaggtttctcctctttactcctatgattcttgattctttgttatttctttattaaactccatcaggagaagataactctacagctattaatgttttagtattgaaacaattttgtagcttcgcgattggatggatttgtcacttaatcattctgtcccctcttcgttattgatcctctctaggttggttccagtactctttgctgtcatttttttgttcttcgatcagttttattgcaaagaaatttctaatagcaatttatattcagggcattcacggttgctggaagagttaaagcagaggatgctgtccgagctactctttcttctctacctgacgaggttgtggatactgttggtattacttctctgccatctgaagaccctgtttctgagcgaagacggaaattagagtaccttgagatgcaagaagaactgatcaaggtcttgatacaccacttgactgtattggattatgcttgcttgaggaagttagagaaaccgaattttggttgctccagattttacattttgtatttattatatttgcaggaagaagaagagaaagaagaagaagagcttacaaggattaaggatgttaaaggtggtgaagaggataaggcactgcaagagatgaccataccaacagccagcgaagcacaagaacaggccagagctagagttcttgaacaacaagatgatctttgcaaacttagccgcgccttgggcgttttggcttccgcttctgtaagaaaaatgagtctatggttatcaacaatgggtatgcagagcagtttattggatatttatttgatactctgtttgcttttgatataaacagtcggtgtgtagagagcgcgaagaattcctgagattggtcaagaaagaggtacactgtccaccaatgcttgatcagcactttgtgtcgtagattgaaagactttgtttttctgtttctccaggtggagttctataacacaatggtcgagagagaagatgtagatggtgaaaaagctgcaatgaaggcatacaaagcagctagagtagatattgaccaagctgatgaagttgctgaagcagacgaggtttcctctgcactaatggagaaggtaaaaagattttaaatcggtttttaagactattaaagtcccatgagatttgtttaagaggcttactcttcggtcatactttttaaggttgatggtctgatacaaaacctagagaaggaaattgatgatgtggatatcaaaattggcaaaggctggcagcttcttgacaggtatatagactccatttttctgtttgagtgttctgtttccgagacttagaatctaaagtgatcacatttgaatgaacacagagatcgagatggaaaagtcacacctgatgaagttgcggctgctgcaatgtacctgaaagacacactcgctaacgacggccttcaacaactaatcagtagtctctccaaagataaaggtaaagaacagagcgatcctctccttcttgagctcttatctccctgaagttgatcttttttataaatctgttattcaacagagggaagaattatggtggaagacattgtaaggttggggagattggg

SEQ ID NO: 153329 - DNA, 1792 bp, Arabidopsis thaliana landsberg
caaggtagtgggagtggaccaaaagaaagccaaaaacctatggttgaaagtgaaaaggttgagagccaaacagaagaaaaacaaattcatcaagagagtttttcctttaacaataaattggtatgattgatttatccgatacaagattggttttatgtctgagcatatttctggtcttatctgtgtgcataattaattttacttcactatataggaagctgtggatgtcttcaaatcacttttgaaatccgccaaagttggatctgactggacatgggaacaggtagtataactttcactattaactgttcttgagcatgtttctgaagtttcagatggtttctgtcacaggccatgagagaaattattaatgacaaaagatacggtgctctgaggacacttggagagcggaagcaagccttcaatgaggtcattctattatcttataccctaaaactagcaagagaatttatcagacgagaattaaagaaatttcagatgtttagatatagtacatacacattcttctccaggtttgaacagtgatgcttaagaggtacatctgatcacatatgttaattgtgttttgttggtctttgttttgttgtgattcagttcttactccaaacgaaacgagcagctgaggaggaaaggctagccagacagaaaaaactgtatgaagattttaaaaggatgttagaggtaagttgcagatctgctgctccatgatatatctccttttcatttttaggaaattttaaagtagagaaattcatcagcatgcgtcttatctttatcttggactttgtcttttttttttaccaggaatgcgtggagcttactccttctactcggtggaggttttgttttccagaaaattctgattccaatactttttctttttctctacgagaattactgcaatttctttgtgatataattttccttttaaatccagtaagactgtgacaatgtttgaagacgatgagcgtttcaaagctcttgaacgagaaaaagaccgtcgtaatatttttgaagatcatgtcagtgagctaaaagagaaggtattaaatgatgtatacattaatgagttgtgttgtttgaaaagtaactgtatttttgtttgtcccatttcttctctatatgcatgtatttttgacattagttttccattggaaaattttgctcagagtagtcatttgactttttcttaattcttgtaacttcatcatcatttgaaacttcacatctgttttagccaagtgtgtaccatctcttgaatagtgaacttcattacaacgtgtgtccttactctttatatttgcgaggaccaaatatcaaatttattgtttgttcaaagttttggcattaactttaatttgggttccgttattcgtaatgttgttaattttataaggagcgggtgaaagctcttgaggatcgcaagcggaacataattgaatacaaaagatttttggaatcttgcaatttcatcaaggtgattgtcccgctttttaaattttatttttccatactattttgtggtagttcattctgacttaatattttccgtattcagccaaatagtcaatggcgcaaagttcaggaccgcttagaagtggatgaaagatgttcgcgtctcgagaaaattgatcagctagaaatctttcaggttgtttcatttatcaggaactatcttcccattccagactcggctaaatttaactgttgtacaggagtatctgcgtgatctggaaagagaagaagaggagaaaaagaagatacagaaggt

SEQ ID NO: 153330 - DNA, 1366 bp, Arabidopsis thaliana landsberg
ttcttagcttgaaggcatggaaaattttgagagggtttttatagaaattgaagagaatgagatatgtgaagggcattcgttgctctatgaatggtatgctatttttcttgaggtcaaaggattatggcgaagagcaaattcggtttatcagactggtctttcaaggtctcttatctttctccttgctgtgtggctcgttcctaattttgtgatttaatttgtgatttgttgctcattatgctatcgtggagaatttgtaggaaagctgaaccatttgacaggttaaaagaggctcactcattgttcttacaaagaatctctaagaggaccaaagcatcttcccttgaaaaggttttttctaactttaatgagtagcatatggttattctaatgcactttgatagctttagttgaggattgaacgttttctttctggcaggttggtgatgatgctcaggccactgacttggagacgggttttgtgaatccatgggaaacatccactctgaacggcttaattcacaagataaaaccacagcttgtgaaatatgatgtaaggctgatggaaaatcatgatattttacatgatttaacttatatagggaggcttgtccactgagtttctttctttatgtttgcatcaggggtaccatgtaagcaacatagttttccctggaaaggccaacctgtcatctttgcagaattattccagaaataagatcattgagataggtatacttttttcataccaatctagtctgtcaccgctacaggataaagaatccttctttttattataagatgcatttttcaaattaaaagtggctgggcatgtattcatttgtgtaaaagaaattgattcccgctttgttctcacctgggacaatatgtcttctctgagactaaaataaaaagtgacctggatccattggctctgtctatttgctaggtggaagaaagtaccagatgaagggctgtgctggccaaggtggttttgctcaagtgttcaaagcattcattgacagcaatcctgatgaagtagttgctctaaaggtagatagacccttaaagttttttcaaatacagtatgatgctaaatgctcatattgcatatactaatctctcaacaggtacaaaaaccaccttttccttgggaattccacatgtatcgccaacttgattgcaggatcccagatagccaagtatgcccttttccattaatattaccagttcacaggtgtttcacaccgtactaattactctcatgctatgttagagatcaagttttggattggctcagagagtgcacgtgtattcagactacagtatacttgtctgcgattatttatcacacgggacactccag

SEQ ID NO: 153331 - DNA, 1248 bp, Arabidopsis thaliana landsberg
atggaaaccaaaatccctaagtcaatgatcgccggagtacagactgtcatgccggtggaagtgacgcaacaccgggaaatccgctccgtatccgtcgtagatcccgtcggagtaggaatattccggcgaacggttaacatagttacgtattacaaagaagcaggtgatagtggtggtgagagagggtggttagtcgccgggtggatcaaggaatctttagggagagccttgacggagcagccgatgctttccggtaggctacggaggaggaagacggcggggaatgatggtttggagttagtggccaatgatagtggtgtgaggatggtggaggctaagtttccggcgagtctgccggagtttcttgaaatggcgaagagagacaaaagcagagctgaagcagagactgttttctggaaagacattgatgaagatgaacctcaatactctccattgttctatgttcaggttatttgcaaactcaattatttatgtcatctatcaaattttaatatacactataattaataatatattttaattaaaatcctcagacttacaattaatgtttcttttttttggtttggtctaaaaaataaaaatgttccttcacatatataaatattgagattttttttatatatttgttaataggtgactaattttgagagtggtgggtactcaattgggataagctgcagcatcctaatagctgatctcttccttgagacaggtttcttaaccaaatgggctcaaatccaaagctctttagctcaaaccacactcaaaccagtattccacctcccttctctcaagcaagactttggtaatttcctcactgaattttttaggtcagcctcggttctcgaccgcggcgaacctattgcttttcgggccaaaacatgcctgaaaatatcaccagcctgcattgtaactagcaaaagaacgagtggggatgttttcttattcatcaaggaacaaagcagtggcgaaaatagtactggatgtgatggtacgaaggtagagatacattcgagtgatgaagtgattaagggttgcgattgcggtcgtgattcagaggagacaaatgatggagtacttgataagagtttatcgtttggggaaagacttgaagttacttcatgttgggttgggtgtgtctcaaaaggggtagtatttgttttcccatctacttttggggatgccaagtcgctagccaaatttattgttgctctgccaaaagagtaa

SEQ ID NO: 153332 - DNA, 3525 bp, Arabidopsis thaliana landsberg
caaagaagctagctaggggcaggatttgtatgtcaatggccgtcgacatgtcttccaaacaacccaccaaagactttttctcctctccagccctctctctatctctcgtatactactctctcttttctacatacatgtacttactagctctcacataaacatatattatatatgtcttgattttaatggagcgaggaatatatacaggctgggatattccggaatgcatcctccggcagcaccaaccctgaggagtatttcctgggcagaagggtagttgacgatgaggatcgcacagtggagatgagcagcgagaactcaggacccacaagatccagatcagaggaggatttggagggtgaggatcacgacgatgaggaggaggaagaggaggacggcgcagctggaaacaagggcactaataagagaaagaggaagaagtatcatcgtcacaccaccgatcagatcagacacatggaagcgtacgttcgatataattccatccttacctagctaactaaaccccccactctttaataagtataaactcttaattaatcattatgcttctcaaattaaaacacataattaggggattccgattcattagggcttctatcaagaaacattgggttttttccgtgctcatatttctagatgttttatagttaattatgtttttaaacccttctttctcaaatatatatatgtatcacctatgcatctccgtatatagtacttaattagtggaagaaggagaaggtgtcttgcgttgaagagcaattctcaattacgcaccttcaattctccattaatttcacatacatatatatacttagatgatgtattcatacaaatatattgccgatcgatgatatatgatccagcattagtttcaatgcgcttatatggtttcggacgcttactcgttattattccccgtcttctcctaacatgactgtaggtacacgcgcgttataacgtatataaaggcttaaacaataaagtgttaatttgtttcatcacaattaaagctgatcagtaatagtatacatatgcctagttagggttcagttgcatgtaaagattttcatcttttagaaatgtctgaatttgaggacgttgcaggctattcaaagagacaccacatccggacgagaagcaaagacagcagctgagcaagcaactagggctggcccctcgccaggtcaagttctggttccaaaaccgccgcacacagatcaaggtaatgtatatcttacgtgatatggatttttgtctgactatagtagtatatatatagtttatgaatcaatcatgcatggacaggctattcaagaacggcacgagaactccctgctcaaggcggaactagagaagctgcgagaggaaaacaaagccatgagggagtctttttccaaggctaattcctcctgccccaactgcggaggaggccccgatgatctccacctcgaaaactccaaactgaaagccgagctcgataagcttcgtgcagctcttggacgcactccctatcccctgcaggcttcatgctccgacgatcaagaacaccgtctcggctctctcgatttctacacgggcgtctttgccctcgagaagtcccgtatcgccgagatttctaaccgagccacccttgaactccagaagatggccacctcaggcgaacctatgtggctccgcagcgttgagactggccgtgagattctcaactacgatgagtacctcaaggagtttccccaagcgcaagcctcttcgtttcctggaaggaaaaccatcgaagcatctagagatgcggggattgtgtttatggacgcacataaacttgcccagagtttcatggacgtggtacttttccattatttattactgttaccagctactataacttattctatgtgtataaaaaggaattgatgtgtacgtgtaacgcgcagggacaatggaaagagacatttgcatgcttgatctcaaaggctgcaacggtcgatgttatccggcaaggcgaagggccttcacggatcgacggggccattcagctggtgagtactcatcaatatatacatatagtgataattgatgaatgacgactcagctgatacatgggatggatatggtttataactattgtggcagatgttcggagagatgcagctgctcactccggtcgtccccacaagagaagtgtacttcgtgagaagctgccggcagctgagccctgagaaatgggcaatagtggacgtctcggtctccgtggaggacagcaacacggagaaggaggcttctcttctgaaatgtcgaaaactcccctccggttgcatcatcgaggacacctccaacggtcactccaaggtcacctgggtggagcacctcgacgtgtctgcatccacagttcagcctctcttccgctccttagtcaacaccggtttggcctttggggctcgacactgggtcgccacccttcagctccattgcgaacgccttgtcttcttcatggctaccaacgtccccaccaaagactctctcggtccgtctatatatccggatcctccatttacactctctatctttctttatatataaccttttcactcctctgttgataatcaggagttacaactcttgccgggagaaagagtgtgctgaagatggctcagagaatgacacaaagcttctaccgcgccattgctgcatcaagctaccatcaatggaccaaaatcaccaccaaaactggagaagacatgcgggtttcttccaggaagaaccttcatgatcctggcgagcccacgggagtcattgtctgcgcttcttcttcgctgtggttacctgtttctccagctcttctcttcgatttctttagagatgaagctcgtcggcatgaggtaccttgtcaaattcacacacatttaagcaaacaagaaaagcggtttccactcatatatttatctaacgatacatatcatcagtgggatgctttgtcaaacggagctcatgttcagtctattgcaaacttatccaagggacaagacagaggcaactcagtggcaatccaggtgcgtttattttgtcttctcctcctgtaaatctgtctaggccttgataatctgaatttctatacatttccagacagtgaaatcgagagaaaagagcatatgggtgctgcaagacagcagcactaactcgtatgagtcggtggtggtatacgctcccgtagatataaacacgacacagctggtgctcgcgggacatgatccaagcaacatccaaatcctcccctctggattctcaatcatacctgatggagtagagtcacggccactggtaataacgtctacacaagacgacagaaacagccaaggagggtcgctcctgacactcgccctccaaaccctcatcaacccttctcctgcagcaaagctgaatatggagtctgtggaatccgtgacaaacctcgtctcagtcacactacacaacattaagagaagtctacaaatcgaagattgctga

SEQ ID NO: 153333 - DNA, 318 bp, Arabidopsis thaliana landsberg
gaaaagaaaggcgatctttagatttgacgggtcaacagagtacgcattgcttatatataatatctcgattttgttatctttcgaatgtgattagttaaatgctaaagcttaacgtgaaaaattgtttgaatgtttaaacaggtacgaagaatacatcgattatttatacccagaagaatcgcaaacaacgaatctcaagattcttgaagctgcatacaaatggaagaagcagaaggttgctgcttctgaggatgattgagattaagcttttttcttaagttatattcagaactgtgaaatgtgttttgtattcttcct

SEQ ID NO: 153334 - DNA, 459 bp, Arabidopsis thaliana landsberg
acggtaacaaattattcattccattccgtacatacgatattaactacgacgaaccaaaaacataaaacatacttattggttcacactttaagtcgaaaagtaattattataatttagttaccagatcctgatccagctctagagccagcaaatgaaccggcagatgaaccagctgaaccacccgaaccactagaactcgaacttgatgacgagctggagctagatgatgatctggaacctgaacctgatccagaacctgcaccagcaccggagcccgacccgccgccaagaccaatccccaatccaacgcccaaaccgattccaatcccacctaggtcaatccccaagtcttttcttgcgagtcggctctcggttaacataactaaacttgaaataactactaaaccaagaagaaaaagaccttcggccttagccattttggaaatcttcgtgtgttaa

SEQ ID NO: 153335 - DNA, 1372 bp, Arabidopsis thaliana landsberg
acaaaccctaagaataaagaaaaagaggctagaatgggtccaatctcaagttcttggagctttaacaaattcttctcaatagttttcgttgttttcgccatctccggcgagttcgtcgctggatactatcgaccaggcccatggagatatgctcacgccactttctacggtgacgagaccggtggtgaaaccatgggtacgtacacaacttcatttcacttctcttgcatataccatatgaagtcgatgatccaacgtttccagacatatatatccacacgattaacaaaaaaaaaaagtttatgaaaaaatttccaaaatattttaccatggatacgtagtccatagcaatttttcatttgcattgcatgtgcattgaaccgtacctgaatcacaatatgtcacgcataagatcaatgatataataactttatgtatatatatatatatatataatgtaggtggtgcatgtgggtacggaaacctttttaacagcggctacggactgtccacggcggcgctaagcacgacattgttcaatgatggttacggatgcggccaatgttttcagataacatgttcgaaatcaccgcattgttactctggaaaatcaacagtggtcacagccaccaatctttgccctcctaattggtaccaagactccaacgctggtggttggtgcaatcctcctagaacccatttcgatatggctaaaccagctttcatgaagatcgctaattggaaggctggtatcatccccgtctcatatcgcaggtaatattcacatttcattagagcattactattatactatttttatggaagatatgtgtatatagatgaactaacgttttatagaggtagattcaaaacgtaaagaaatggtttatattcaaatatttaaatgatatcttgtttgaatgcaccatttgcaaatgctaaaatacgattatgtcgatatatatatgtagagtggcatgtaagaagatcggaggaataaggttcaaatttgaaggaaatggatattggctacttgtgtacgtgatgaacgtcggtggtccaggtgacatcaagaccatggcagttaaaggtagccgcacaggctggatcaacatgagccataactggggagcttcgtaccaagccttttcttctctctacggtcagtctctctcgttccggctcacctcttacaccactcgtcagaccatttacgcttataatgctgctccggcaagctggagcgccggcaagacctaccagagcaaggctaattttagctaatttaggtcatattcaattccgagaaaccggtttatttgaatatacggttttgccatttgttgttgagtccgatcgatcgagaggttga

SEQ ID NO: 153336 - DNA, 470 bp, Arabidopsis thaliana landsberg
tgtggctgaaaacagatccaaagtttaaccctttcacgggttcgggaagacgtttggatggacgacctttatcctatgaaccgcaacctggtgctgctaacagtaacggccaatcacatcctgttgcaagtagtagtagtagtgggtcagagaaggctacgcaacaaaatcgagggaaacttgtgttcggttcaaatgtagagcggtctactaaagagacaacaaaggtaaataacttgtttaaaagtagtatgtgcaaaaaatggtatcagagataagagatggagtagaaatataatgttgatctatctgtaacttaggttggagctgggaaagatagaaagcaagaggaagaggctgagaaggaagccaagttccaagcttttagtggtccaaactattcattgaggggttgaaccaacaaatgtaaggaaccaatctctcgtcttatttatgattttactcttgtg

SEQ ID NO: 153337 - DNA, 668 bp, Arabidopsis thaliana landsberg
  unsure (1)..(668): unsure at all n locations
aagctactcgattcttgaagnacgtgtttggtcaaattgagtcccttagaaaggagcatgcttctctcctctctgaatctagctatgtaagtcaatttctatatgcacattgattgtgtatatgtattctgtgacatgaatcaagaagctaagacgaatgttgcttcaagaagttacttagtcgttgtatttttctaaatggtcttgttgatggaaactggtgttgtgtgtaggtaaccacagagaagaatgagctcaaggaagaaacatcagtgcttgagactgagatttcgaaactacaaaacgagattgaagcaagagcgaatcagtctaaacctgacttgaacacctctcctgcacccgagtaccatcatcatcatcattatcaacaacaacatcctgaacgtgtatctcagttcccaggacttcccattttccaaggccccggctttcaacaatctgctacaactcttcatcctcctgcaacagttcttgtccttccaatacaacctgatccccagacacaagatatctcagaaatgactcaagcgcagcagcctttgatgtttaatagctcaaatgtgagtaagccatgtccaaggtatgctagcgcggctgactcgtggtcttctcggctacttggagagcggctgaaagccagtgaatga

SEQ ID NO: 153338 - DNA, 259 bp, Arabidopsis thaliana landsberg; identical to SEQ ID NO: 65983

SEQ ID NO: 153339 - DNA, 2520 bp, Arabidopsis thaliana landsberg
ttgttcttctaggttttgctcaattttctgtttccacgttgaaacacgggcagccagatctgtttgcttctcacttttagctatgttagcgagaagagcatcctacaatataaagaaccaaacatttgagcttccataagaatatagagcaaaaacctaatgcggtctactgaaaattggaacaactgtacttccaacgtataaaatcaaaccaatggtagttaccaggtgtgagcggcagagatcttccaagctttcttgacaatttgattcgccgttttcaaatccatcgtagttgtgaaactcagcagctccaccatcattctgcattcaaattcaaatgagcggataagggtttcacatatttcgaccaaaatagatcaattagtgaaactactcaccatattgagaacatcttcatccatgaacggatgttctgcatcatcaccatcatgctccccaaaatcatggaagtcgccattattggcttcatcatggttatccttgtcattgtcattgtaattgccgttagcaccacaaggttggtttcctccattcacaagcatctctcgaagctgacatccaaactatcagttttttttgtttgttgcatttcaatattatataaaaggtatagagaaacacagaccttctcgtaataagggatgtcttgtgatgcttgctcgtctttactagcacaaccgtgcattttccaaatttcaataagctctgaactgatgggaccgtttggtctagcgagagggaacatggaagtcatatggtccttggtaatgctccatccaatcttttttaaattttttactgcaaatggaataaagtagaacatgaactagaagtaagatgcaaatcgaaagatatagcttcagatattaatcaagaaaacaatagccatttcccaaccttttttgaaaggcttcactttcaacttccctggttcatagggattcaatggcttccacggatcatcttcgtcagcatctgtatcactaaaatccatggctcctccatattcattatccatgtcaaaaccatgatcattgtcttcaaaaacaggaggctgagacccttggtcacaattttgatcattgggaccattgccacatattggggacaagttgacattggtgccctgattctttcccacagatgacttacgagcacttcctccagaacgtccaacagatgagtgaaagcttttacgaactgagctgcctctgtgggcactgttccttcctttaccaccatagttatcacctaaaaattcattcaccgctacagcatcacatgggtctaatagtataaaatcccggtagagatgtgtagttgccaactgcaagagatgaaagttaaaacggagttcaagccccaagctctttctgtttttcatactctaagaagtggaaaaacatgctataccagataggattccaattctcctccgtcaccactagtatccaaacagtcaccttcaagaacaactagattcgctggaggcttgacaaattgacttggacaagtatctccgccaaccgaactgtccaatctattctttgtgtccactatattatcaacaatagctggattagaaatctgctctctagagtggcacaaagataaaatgtcaaatttcagaaatttctctacctgggatgtcatctacattccaggagagatctttttctttttcatcaacctgacgtgaggagcttgcttcattctcatttgatgtacctttagactgttcctggtctctgttagcaagaacaattgactaatcagagaacctttctccaagaattgtttaaggtaatggaagcaaatttccaagtgagtatcaactagcaaggtgaccaaaactaaaatttatatgaaatcagaaagtaacagcttaaacacagcacctaagtaggaaaaagatacgttttttagatgcaaccatggtataaattttcttcatttgtgaacacaaaacaaaacccatccacatagaaatagatggaatcaaagttagcccctaaaccctgagatgcttggagtatctaacacaattactaatgttattattcctgttcaatttcactaaggaaaaaacagggaatctaaaaggacaaacctttgcttcgatagaaactccaacgtgcgtagaactaaattatacaagtactcaactttcttgctgtaaacctgaaccgaaccctgaagcagcaaagcagctaaacaaaaatcgaaacccaattcttaattacccaaaaaatgaaatagcttgacatcaaacgagaaagttctgaaattgaagcaaaatccacacagaccttcagcgaaattcacaggaatttgcccatcttcttcatttccagtgatttctccggaacaaattttgaggaggtactcttctagcttctccgacaaatcaacttcccaattagccaccaaatccctctccggctgtactgtatgaatcctctcgccgcggacttccccgccaccgtgactggtcat

SEQ ID NO: 153340 - DNA, 1678 bp, Arabidopsis thaliana landsberg
  unsure (1)..(1678): unsure at all n locations
atggcaaagctttttctacacatttgtattaaacgacgtcgtaataagtcggaatcagaatcactgagggcctctcgtttcatgagagaaacaaaaaatcttatctttctgacatcggtggtggtgtgtgatgttgtcagccatggcaaagacagagctacaacgatctctctctcttttattcttctgtgtctgtctttaaatagagtctctttgaaacgaagcagctttgtcctgttttgatatccatggctataccttcgtgcttaaagactggagctttaatgtctccggccactggatttaatttttccggcagtcttatgaagtcagacagcggcttcgccgttccgacaaagttacagagtactcgaaaaggtcatcgagagagattgagagtccaagctattttcagtttccctcctacgtttctgaccagaaacggtcgagctgagaaacagaaacagctcaaacaagaacttcttgaagccattgagcctcttcaacgtggtgctacggcctcgcctgatgaccagcttcgaattgatcaggttctttctctttcttttgggaaccattagggtcttgagaatagtcttggtacactagggtctagagaatgtgattgagagactaatgctgagtgacttttgtctgtatggagacagttagcgcgtaaagtggaagcagttaatcccaccaaggagcctttgaagtctgatttggtcaatggaaaatgggagctcatttatacaacctctgcttcgattttgcaggcaaaggttagggcttgtgttgttgttgttgtgtctaagtttgtgttcttttggcttgttgtgtcattctcttcaatgtcttgaacaatgcaacagaaaccaaggttcttaagatcaataaccaactaccaatctatcaatgtggatacattgaaggtgcaaaacatggagacttggcctttctataactcggtaatgtttcattgtggcttcacttggctcttaacaaaggattaagaccaaacttttatcatcaatatagctctttggagagcctttgctttacataagtaagattcctttagcagagtttgtaaaatgagtctcatacattaaagcaaactacaatgttttcataggtaactggagacataaaacccctcaattcgaagaaggttgctgtgaaactccaagtgtttaaaattctcggctttgtaagtacactaaaactcttactgctgctatatgtgtgtccactataagagaacctttactgattcagacaccatatgcttctgttactgattggtgttcgctgtgcagattcctataaaagcacctgatagcgcccgcggtgaactagagattacctatgtagacgaagaactacggtaagtagggaatgaatgttttcatttctatcgaacaaacatccaaaacgtttgaatcttaaaaccttaaaacaatgtttattttttgcaggttatcaaggggtgacaaaggcaacttgtttattatnnnnnnnnnnnnnnnnnacttatagaatccctctctgatctatcgaacaaaaatggtccgagccattcataatacatacctgatatcgccttgatctggctttcttcatcatgtatgtaatctaacattaaaagactagagggaataaaaagagaccagcttta

SEQ ID NO: 153341 - DNA, 877 bp, Arabidopsis thaliana landsberg
ttatccacgcaacaaagcctctcaacgataaatgccacatgggtcttcaatggactttcccagttgcaggccttcatgctctctatgtccttgctttaattgcattcacaagagcagttcgacatgtagagtttcgttttgacgagcttagagatctctggaaaggaattctcgtctcagccacttcaatcgttatatgggtaacagcgtttgtgttgaatgagattcatgaagaaatctcttggcttcaggttgcttcaagatttgtgcttttagtcacggtatgaagctaataccaggactgttctttatatttgcagttggaatacctttttaacagacttctgagttgattcttctttcagggtgggattctcgtcgttgtcttcttttccatctcgagtaaccaacctcttctttcacaaatcagcttgaagaaaagacaaaactttgagtttcaaagaatgggtcaagctctaggcattcccgatagcggattattatttcggaaggaggagtttcgacctgttgacccaaacgagccactcgatatgcttcttctcaataaaagatttcgccattcgtttatggaatttgctgataggtactccattcaatacctgacctcatatatatcccggtttcaccatttatttaaactaattcgttatatgctggtagctgctacgctggagaaacattgcatttttttgaagaggtgtatgaacatggtaaaatcccggaagatgattcgataagaagaatctacatggctcgacatatcatggagaagttcatcgtcgcaggttaattacatatccatcttccctcttctttgtagacctgtctcgtgtgttctctctataaatctaactag

SEQ ID NO: 153342 - DNA, 322 bp, Arabidopsis thaliana landsberg
tgcaggtgtgtcataagcatggggtaatgcacagggacctgaaacctgagaacttcttgtttggaaacaagaaggagactgcacctcttaaggcgattgattttggtctctctgttttctttaaaccaggtcatgtggtctttctgctcagtagatagctgattgctttgtggtttgtcaataatcttaacccacaccgttattttctttgcaggcgagaggtttaacgaaatcgttggtagtccgtactacatggctcccgaggggctaaaacggaattatggtccataagttgatatttggagtgcaggtgtaattcttt

SEQ ID NO: 153343 - DNA, 710 bp, Arabidopsis thaliana landsberg
atcaatctttgatccctatacaatgctctcaagaaaattggcaaaataaatcgtaatacatttcagcatacattggtatcatgatcaaatctgcaatcttggtgtcgatctgtgtgttgtttcacattggttaacaaaagtcatggtgaaacagactgaatcctatgagatcttaggcgtcaaaactgatgcttcagatgctcagattaaaaaggcttactacttaaaagtaagtctttttttcgtttctttttgtgtgcaaaaactctgcttttagttagttttttctttgtgatataatgtaaattttatattgtgaataacctttctttgcttgctcttcaggcaaggaaagttcatccagacaagaaccctggagaccctcaagctgctaaaaactttcaggtgttttgtcatattgttactgtttctttccagggtctttatatgttgttttactggaatcacatcaaattgctgatgacgtctctcatttgttgattttcatgaatgaaaaaggttttaggtgaggcttatcaggttctaagcaatccggataagcgagcagcttatgacaaatatggcaaagaaggggtccaacagtatgttttgtcctctctgtttacaactttgcatctccaacttcggtttgtgattgatatttcatttgcagggatgcaatggttgatcctgcagctgtatttggtatg

SEQ ID NO: 153344 - DNA, 672 bp, Arabidopsis thaliana landsberg
tcattttttcccattctttaggttgtgatttggtggtctggtctcatgagaggtgctgtatctatggctcttgcatacaacaaggtataaaaagaatgtctttaaatactctctatgaagcttcaaatgacacaaatcatcatttaacacttgtttctattgtagtttacaagggccgggcacacagatgtacgcgggaatgcaatcatgatcacgagtacgataactgtctgtctttttagcacagtggtaagaaatctctggatgatcaaatgagttacataatatttcttaattgaattggacatttggttaatagattctcttgaaccttgttttcaggtgtttggtatgctgaccaaaccactcataagctacctattaccgcaccagaacgccaccacgagcatgttatctgatgacaacaccccaaaatccatacatatccctttgttggaccaagactcgttcattgagccttcagggaaccacaatgtgcctcggcctgacagtatacgtggcttcttgacacggcccactcgaaccgtgcattactactggagacaatttgatgactccttcatgcgacccgtctttggaggtcgtggctttgtaccctttgttccaggttctccaactgagagaaaccctcctgatcttagtaaggcttga

SEQ ID NO: 153345 - DNA, 1378 bp, Arabidopsis thaliana landsberg
cacctctcgctaagcgtgcgttagccgttagggttccgatctaatcatggcggactctgttttgaaggaggttaactgtggacgccctgaaaagatcccgaagttggacaaagcttgcaaaggatcgaaatcgtcctggaaacatctcaagctaggaaacgtggaagatgatgagtatcttcgacagtattgtttgtttcactacgaattccataaatccgaggtactattcaactttaatttttaagcttccttgtttccttcaaaattagggttaattcgaaaatcggaatctgataagaagtcttttttggcttaattagggtttcacggttgattgggagaaatatgactacatgttccatataaggccgttggaaaattcaccacctatcagcgatatacgaaccaatgctgatgtgatccgtcatgtgacactctttgccattgagaaacacaatgaagctcatggatctaaacttgtgtttgtcgagcatgtctcagctaattttaaatttgccaatggtctcctctgctggttaacattctgggctaccgatatggcctcatccgctcctacatcgcagatctatcaagtcgaactttggcgtcgcggaaaacagtttgaaattcccatcttcagggtcaagcctaaggacgaaggtgacaaatttcgttttaactctattggtttcttctttttattctttggctgctacctattctgatgtttaactcgtgtgtgtttatgcgatgcagagatggatgatgttgaagtgaaaccaccctctcccatgccttatgatgactatggtactgctactttctcttggtttaccttttttgaccttagattactaggtgttttacttttctgatcaaactaaacaatgccatatgacaattctggattatagaccatggaattagttgaacataaaccaccttttacctttgcttttctaatcaatgctagtattcattaattgtgttttgttgtcatgtagataaaccaccggttgtctttgttcgagctgctcctgaagatggtgtccctttcgtctttgatcgaactggagctctttatgatctctatcggtctggtttgtaagggaaaagtatatataccattcctttggtgacaaagagatatgatgttagtcactgactgaaaaatcaaattaggcttgtaataatattataccctctgaatattcaacttcttctatctctctaaatatgtaccagcttctcttctagaaatctatgaacactgtcactttaatctacctttcttggtggtggaggatcttcataaatgtgtctcctttttcctttatccatatcttaaaaggaaaaaacatgagttcatgaaaac

SEQ ID NO: 153346 - DNA, 609 bp, Arabidopsis thaliana landsberg
ctttactccgcatagccctaatcatggtttttcagatctcaatccttttgggcttgctggctgcttcattcgtttttgtttgtttttctggttgaattgagttcatttctttgattgcttgtgtactttggtttctgcaatttggtaagagtttcatgactactttactgaggtgccttaagatcagtgaactgttttctactatgatcatagactagaattaaactatgctctagtattttgattatttctgattccttgtctcattcttatataatgtgaaggaaagcgatttgcacacgaaaagaacagggcatactgagtttgtagataagacattggagacaatcaaacccatcagcttggaagctcctaaggttgccatggagattgatgataatgctagtggtagtggagaggctgcagaaggtacattgccatgttaatgtatatgtattgcatgagtttctgaatgtgactttaacgctatttcttatggtcactctgcagagatggttgttccagacgttgacaataacattctcgaggaacttgaagcgatgggcttccctaaagctcgtgctacccgagcactccattactctggta

SEQ ID NO: 153347 - DNA, 719 bp, Arabidopsis thaliana landsberg
ctgaattctttcgattatctcctctctttgacacaactgtcagcaatatgaagctagcaactcatggtcgtcctgaggccatgaatgcagtactcatttcctcaattgctgcttcaacatttaacccgcagttggaagcgtgggagccccttctggagccatttgatggaatattcaagtaaagacagtattgtttcttatttatgatatgacttaactagaaaataaaactatttgaaataatattttgattgctcactttcacgttgtaggttggaaacatatgatactgctttgaaccaatcgtcaaagccaggaaaacggctgcgaattgctgctactaacattttgaacataaatgttagtgctgcaaaccttgaaactcttggcgatgccgttgtttcctggagaaggcaattagaacttgaagaaagagcggccaaaatgaaagaagtacattatctttttctttttccgtgaaagtataaattttcataatgtgttacttactaatctgctctggtgcaggaatcagctgcctctcgtgagagtggggatctttcagctttttcagctcttgatgaagatgattttcagacgattgtggtagagaataaactcggccgtgacatttatctgaaaaagctggaggagaactcagatgtagttgtgaaaatgtgtcacgatgaaaacacttctgtctgggttccccctccaag

SEQ ID NO: 153348 - DNA, 299 bp, Arabidopsis thaliana landsberg
cgttggaacttctggttgagaagaaagtcacgggattgcctgtaattgacgataattggacactggtaaaactaagaaactatatcttttgtcattgtgttcctctgtttagagtcttgaacaacaagctcgtgattaaacttagtcatgaataacaagcaacgtcggtttagttactgatttattggatttagaagttaacaagatatgctttgtcttacttactcctctgctgtaatttctcctgcaggttggtgttgttcctgattacgagctgctatgcttggactccatctctg

SEQ ID NO: 153349 - DNA, 1571 bp, Arabidopsis thaliana landsberg
atgtatcctcagaagattgatgctttgttttacgcgcattcgattgatgaagttaaagcacttggtcctttgctggagaagtttagaggtactgttggtaaaaaggcttatatcgcggtttcgggtgggaagttctgtccgtgtgaggatgcggcgtcggctttgaggtggcctaaggttgtttgtaaggagaggagattcaagatttttgatttggaagttggggctattttgggtgtgtcgaactcagaggtgcctgtatttcaagctgtgtattcgagcatgaaagggcttattaagattcataatccaagcgtggtgattacggtagctgatgctgatccgaatgtcaagaaagctttgaaaatggctaccgagactaattctaatggcaccgcattggttcttctaccgagagcttctatctccaaggttctctggatggctgatctaagatcaacagcattgccaagtaagtatcaactttttgcctttaatatagcttttgcagttttaatttaccgaaactgacaaatgtcttgatttcagactggaataagatgagagtctcagtgaacatcatcacccaaaaccgagctcaatctttattaagattgcttaggtctttgagcaatgcatactaccttggtgacgaaatatcactcagcttcaacatggatagcaaagtggatgaagagacgatcaatgtagtgagcacattcgattggcctcatggaccaaaaacactaagaagaagaatcatccaaggaggcttaatccgtgctgtgagcgagagttggtatccagcttctgatgatgattttggtctcttgcttgaagacgacattgaagtctctccatattatttcctctggatcaaatacgctttacttgcttaccactacgaccctcaagtctctttccctgaactctcctcgatctctctttacacgcccaaaatcgttgaagttgtcaaagagagacccaaatggaacccaacagatttcttcaagcaaatccatcctcacacaccttaccttcaccaattaccatgcagctggggagccgttttcttcccaaagcaatggagagagttctatgtctacatgaacatgagattcacagagaacgcgaaagctaacccggttcagattccgaaatcaagaaccaacggttggcaagcgtcatggaagaaattcttaatcgacatgatgtacctgagaggatacgttagtctatacccaaacttccctaaccaatcaagcttctcaaccaaccacatggaaccaggagctcacatcgcagctaaagacaatgtggtgaaacacaacaaaaccgatttcgaagttccattgcttatggatggtttcggaaacttctttccgaacctggtactccctccgctttgtaagcttccgtcactcaatcttttcaacattccggtttcgcttacaggtcttaaagctgctggagctaagcttggtcaagatgttcttcgttgcaccaatgtctctgagattgtcgccgtcaatcatcagacaggtttaccggctagatgcatgaaattctga

SEQ ID NO: 153350 - DNA, 323 bp, Arabidopsis thaliana landsberg
gataaatgatcttatcttaatcgaggaaggaatcgcgtaccttggagagaaagcgagctttgggctagcagagagacggaaagaaactctgcgagagcggctttggattgggaagtgcgaggaggtttgagtgactgcatattttgattcagcagcagctggagatgtgactgagaacgacgaagacgccattcgtcttcttattgttattggttcagatcgggtttaggttctctctcgatgaaaccaaagagcacaacaacaacagttcacttcagaaagagagagagaagatgtcggattcggaacgcgtttctctttga

SEQ ID NO: 153351 - DNA, 1845 bp, Arabidopsis thaliana landsberg
atgacatgtaagggtgggtgcgtctccccacactgaaccacatatctttttgccggcttcttcaacggctttttctcttcccccttcccttcccttcccttccttcgacgtcgttttgtctccttccacacactctttcctctctctttcttctctctttcttttctctctctctcctctgctcctccgtctctcgtctacagtgccctccgcatcacctttttccttgtcctatgaatttggtcgaaatgcccttctcctcctcctccttccactaatctcaagtaagtctctttcttctctcactgttttcaatttcagtccttttttctttctttcttcttgatttggtttgcggtgcagaagatatatccttcgagactctcccttgccgtctccaattgccactcaccgctccaactctcttcgaatgtatgtatgcctctccttccctgcgctttcaattctttgtatgcttagtctgtctctttgttcattcacatctgaccctaatccactttcttgcatatatacctactactgctttcgggacttgtcttgtttatgcaaatctagaaatagttttgttcctttcttttcccctggataaattttctagttgctaggttcattcgtattttggaaggtatttcatctctccgacattgctctcaacactgtcccctccaatgcctagtccttttatttttttcttagttccaattcccttaaatacatctcacagtcttcttcttcttctcgattgcagtagctgaaatgaatggagataatagaccagtggaagatgctcattacacggagacaggtttcccttatgctgctactggaagttacatggacttttatggtggtgcggctcaggggcctcttaactacgatcatgccgcaactatgcatcctcaggtaccttatgtacttaagtaaatttaaggtcccatccgttgtcaaatgagcttatcattgtgtatgctcatatatctcagagagacacaccaaatgcattgtggcgaacacataacgtttcttgtttgcctttttctcaggacaatctgtactggaccatgaataccaatgcatacaagtttgggttttcaggatcagataatgcttctttctatggttcatatgacatgaacgatcatttatcgaggatgtccatagggagaacaaattgggactatcatcccatggtgaacgttgctgatgatcctgaaaacacagttgcacgttccgtccaaatcggagacacagatgagcactctgaagctgaagaatgttagttctttttactctctctacttcgatcatattcttttctaagctaataatttgtctgtgctttcaggcattgcaaatgagcatgatcccgacagtcctcaggtatgtgcacaagatctaaacggtttttgaacctgtgtcaactagttaactcttgcccatctttgtgaagctagtggatgtatccgtgcaggatgtgatctaaacactgatatgaattctatatgctcgttaatgccatgttgccacaggtatcctggcaagatgacattgatcctgatacaatgacctatgaggttcgtttcagtttccttgttggttctttttagttttattgattgacgaagatggtcaagagagggagtggattcacatctagatgcgggacaacaaataagttgtttggtttgtggatcaggaattagtagagctgggggaagcagtaggaacagaaagccgggggttgtctcaggaactcatagaaacgcttcccactaaaaagtataagtttgggagcatcttctccaggaaaagagctggggagag

SEQ ID NO: 153352 - DNA, 545 bp, Arabidopsis thaliana landsberg
gctatattctgttataaatgtttgatgatataggttcaagtgcattgatttggatgcaaatggagttttgacgcggaacgagctgcaattcttttacgaggagcagctacatagaatggaatgcatggcgcaagaggcggtgttgtttgaggatattttgtgccaattattcgacatggtcaaaccagaggacgaagggttcatttgtctaaatgatttgaagggttctaaactttctggaaatgtcttcaacatactttttaacctcaacaagtttatggcgtttgaaacgcgtgatcccttcctcatccgccaggtatcacaaaatatagtaaataccttaaagctagctatacatacttatagagatattcatttctcaatgattgattgctgatacataggagcgcgcaaatccgacatggacagagtgggatcgttttgctcatagagaatatattaggctatcaatggaagaagatgtcgaagatgcttctaatggaagtgctgaagcatgggacgactcacttgaggtccccttttga

SEQ ID NO: 153353 - DNA, 1370 bp, Arabidopsis thaliana landsberg
atggacacctctctctcccaccacggatctctcccgtttcccccatcgcgccgcaatttcgttaaacaaaaccgcggcggcgattgcgtttttctcccctcgcgtcgtaagttccgatacgattcgttggtggtggtttccgctgcgtcttcgggacagagcatcgacgcgcctctagttccacggtcgcctcagggaaggtttctaagttccgtcttggtgaaaaaacggcagctctttcatttcgccgtcgctgatttgcttaaacagctcgctgatgataaggaagcttccttatctcgtatgttccttagttatggttccgatgaagcttccctccacaggttccttttaacctccacttttcttaatcacaatcgcaagtgtttgttgtcactgtagaatcgccgagttgtagaagaaaacaaaatctgtaaaattgcagaatccagaaatgtttgaatctttggttgaatccagaaattatgctaatcaatggtttattagtgttggttatcactatggaatggttgtttctgttttatgttctatgatctggcttttatatggagactgattaacgtatttgaatcgatgttttgcagaaggatagctcaacttaaggagagtgattgccaaattgcaattgaagacataatgtacatgttgatcttgtacaaattctcagagataagagtgcctcttgttccaaagcttcccagttgcatttacaacggaagactcgagatctcgccttcgaaagactgggaacttgagtcaatccatagctttgacgttcttgaactcatcaaagaacatagtaacgcagtcatcagtttaagagtgaattcgagtttgactgacgattgtgcgacaacggagatagataagaatcgtctcagtaaagtatacacagcttcggtcttatatggatactttttaaaatctgcttctcttagacaccaactcgaatgctcattatcacaacaccatggaagtttcactaagcaactgaggcattacatttctgagttcgatcccaagatattgcggagatgcgcaaaaccaaggtcacatgaagcaaaaagcctgatagaaaagcagagtttagctctttttggtcctgaggaaagcagcaaagagagcaatggaccatcgttttctagcctgaagaggatgcttcatgaggctgtggcgtttggtacgtttctatgggacacagaggagtatgtagatggcgcgtttaagctcaagtagtatgagaatccagagtaataaccttatagcagtgtttcaagtatgtatgaaccagtttgctagaagaaaacttgaatatcttatatggtggacattgcatataatatatagat

SEQ ID NO: 153354 - DNA, 779 bp, Arabidopsis thaliana landsberg
tttgggggttgggtttcttctccctttctacatcctctctcttctcttcccctacactttcatctaatggccggcctgagatggagagagtggtggaacacgatggccttccccacccggcgtatctggaatcgtttcaccgttcgcgtcgggtttcgacacagcggtaagctctgatcctctaccctccttttcaccgagggctaagaatcctctgtttcatcacatcaatcaaaaaacgaataaaagttgatcttcgtattcctacgagattagtttagatttttatcactttcttttgtgattcttgatcatatatagaaactgtcggtggaaacttttttagctatcaagaattaaatgtctttgaaggttttgttgctttatacgtgttggtcttgcggaaaaatctttactatgaatgtttcaataaaaccctaataaatcgttgttaagttttttttttaaaacactaaatgattgttcttttgtgttgtaggacttttgagattacaacatgacgtgagttcttgcgagtatgaagacatacacataatgtggaatttgttacacaagaacgaagatcttacacgcgtaccaatccaacaacaacaacaacagaggaagaaaccttgttggaatcttattggttcgtatctttgccaaagattctgatccgttcttatacatataaaccaaaccattgttgtatttgagagagcaatgacgggtcccttgcagtgtggtgtggttttattgacaaatttcgcgaataatga

SEQ ID NO: 153355 - DNA, 986 bp, Arabidopsis thaliana landsberg
  unsure (1)..(986): unsure at all n locations
acatctgttttatgtaggttgctgcaagagtcacagccgaggatgccgagaaggatgaatggtttgtggtgaaagttattcacttcgacagagaaacannnnnnnnnnnnnnnnnnnnnnnnnnnnnntccccacattggttaggagagggaacaatcatcattatcaagcaatcttatgtatatgtgtatgctaaaagatagatcttgagaacttttcatgaatctgatggttaatagtcaagtatccatatatttggatttaactggtagatagccgttatgacacagttatggtaaatattttgctcttctgtagagtcatatatgggtttaaataaagtttcaaactttcacagagttgaagtacttgatgaagaaccaggagatgatgaagaaggaggtggccagaggtaactaagaactcttaataactcaaaaacatttgcaatgacattgcgtaacttgctgattattctcttgtaatctgtaggacgtataaactatcaatgtcatgtattttaccgtttccaaaacggaatgatccttcaagcacacaagagtttataccagggaaacatgtgttagctgtatatccaggaaccacagccctctacaaggcaactgtaataagcaccccacgaaaggttagcttttttctgcaccatttcaagctcgtttcaacaatgtattagaaaccaataagaactaacctcaagctattcaaacctgcatgatgcatatccggttccagaggaaatctgacgagtaagttcctccacacctttattcgtatcgaatcatcaactagttaaacatttctggctaagatttaagaatcccaaagtgtttaattatgataatttctgattatattaggtacttgctagaatttgatgacgatgaagaagacggagcattacctcaaagaacagtgccattccacaaagtggtagctttaccagaaggccatcgccagtaatttta

SEQ ID NO: 153356 - DNA, 628 bp, Arabidopsis thaliana landsberg
cagattttttgagaacgagagagaggagatcaaaatggtaggcgaagagtagacgaagaagagagtagtcactgaatcgctaggatggttaacggaatcttcgattatgccaaagaagcatcgcgccatcgaaggtgttggtccttcctcaatcatggagcttaaagctcagctctataagtctcaggaggaagctaaacagacaaaggattttacgggatccgatgctcaataccatcgcgccaaagaaaggattgccgccaaagattctttcgccgcgaaaaactccggcgtcgaaagtcgcaatttaaagtaagtctgaaattcatcgaattcgaatccttcctctggtttttattgtttttattgctttcaatttgatgaaacgagcacatttggtaagtagggttgggttagggtttgaaattcccttattgtgtatattctttagattaagattggatgataattttcttaggaaatagagattgcttgtaaattaggctattgatctttagttatcgtgtctatcgttctgattaagattagatagtaatcaaacttcgtagcttaagtagatacattgctctgagatgattaagcaaaaaaacttgtaagattttaggat

SEQ ID NO: 153357 - DNA, 813 bp, Arabidopsis thaliana landsberg
taattgttccccacagaaaatcttaacctatcccagccgtagacaacgagccaatgagggttgtaagtttctgacagccttgacaacattgtcttaaactctggaaagaacggtgagttactttacattgttaaatcacaaatacctgtttgctcgtagcaaaaacttataaatcagttctcattcctactatttacttgcagttctgcttgagttctatgcaccatggtgtggacattgtcaaaaacttgctccaatcttggacgaagtggctttgtcattccagaacgacccaagtgtgatcatagcaaaattggtaagcctctcttttatgttctttacatgtcaaactataacttgatatactcctcctggattgacttaaccgtgtctgtgtctgtgcaggacgcaaccgcaaatgatatcccaagtgataccttcgatgtgaaaggattcccgaccatttacttcaggtcagcgagcggaaatgttgtagtgtacgaaggagacaggacaaaggaagacttcataaacttcgttgagaagaacagtgagaagaagccaacttctcatggagaagagtctaccaagagtgaggaacctaagaagaccgaggaaacggccgcaaaggacgagctgtagaaatctcatgagttttgtttcggaatttgagtaggagcgtttctcttcttcaccatatccaacagaatcttcttttttctttagcagttttacagttttatcttttttgctctcttgttcgaacccaaaattatccccattaataaaaagttaaacctaataatcatttaa

SEQ ID NO: 153358 - DNA, 821 bp, Arabidopsis thaliana landsberg
  unsure (1)..(821): unsure at all n locations
tttgcatgatttgagagtccaatcatttaccgtgatttcaaaacttctaataaacaacttgattcggtaatttactaattttagttttttttttttttttttcagcgtacaaaattatcctaaatatattcttcaaaaatatattttcttattattacatgggggttttcaggattttactgcaaaactctcagattttgggttggcaaaaatgggaccagaaggatccaaatctcatgtcacaactcgagtcatgggcacttatggttatgctgctcctgaatatgtttcaacaggtttatacacaatgatttcattgtctgttttttcagtatttattcaaatcattagggtcctttaaaaaaaaaggatatagtttccttctcatatatatatcttccattgctttctcttacaaagagaccattttgatagagtcattttgaggattacacagaacatagaaataagtaaaacatataaatctgtaatgtgtcaaaatttgaatnnnnnnnnnnnnnnnnnnnnnnnnnnnnnnntttgattaatttttctttttttaactcaacagagctttattaataagagtggacatagtcatggactcatggtgtaatcaggatctaattttgattaattatctaacgcatgtgagcattattttcagggcatttaacaacaaagagtgacgtgtatagttatggcgtcgttttactcgagctcctaacgggaagaagagccacagaaaagtcacggccaaaaaaccagcaaaacatcatcgactggtcaaagccttatctaacatgcagccgccgtctacg

SEQ ID NO: 153359 - DNA, 1548 bp, Arabidopsis thaliana landsberg
atccagacactgtacttcctttcaggtggtgcaacgaccttaatcttcatgctgcttggtgcaagtgctgtgatttctttgctcatacggtcagcgatacctgagaacatagtggttccaccactgagcacaatgttaccgtacagatccttcctgatatccacatcacacttcatgatggaattgtaagtggtctcgtgaataccagcagcttccattcccaccaaagacggttggaacagaacctccgggcagcggaatctctctcctccaatggtgatcacctgtccatcaggcaactcatagctcttctcaacggatgagcttgtgtttgctgtttccatctcttgctcgtagtcaagtgctatgtaagcaagtttctctttcacatcccttacgatttcacgctctgctgaggtagtgaatgagtaaccacgctcggttaagatcttcatgaggtaatcagtaaggtcacggcctgcaaggtccaaacgcagaatagcatgtggaagagcatatccttcataaattggaacagtgtgactcacaccatctccagaatccaacacaatacctggaaacacacaagacaatggacaatggtaccacatcaacaaagccaagaaagggtactttcttaatctgaagctaagaagaacttgaagtttgttcaatgcaatgggtagtagtgattaaaaaaatggtgtaggtgttgaagatcttattaccagtagtacgaccactagcgtagagggaaagaacagcttggatagcgacatacatggcaggagtgttgaaagtttcaaacataatctgagtcattttctcacgattggccttggggttgagaggagcctcagtgagaagaacagggtgttcttcaggtgcaacacggagctcattgtagaaagtgtgatgccaaatcttctccatatcatcccagttgctaacaataccatgctcaataggatatttcaatgtcaaaatacctctcttagactgagcctcatcaccaacgtaagcatctttttgtcccataccaaccatgacaccagtgtgtcgaggacgaccaacgatgctagggaatacagctcttggtgcatcatctccagcaaatccagcctaaggaattggaaacacatatgaatgaaccagacaaaacagcattgtatccaaaaataataaaagaaaaagttatcagatttatatccacaaaggtcatgtaaagatgtaccttaaccattccggttccattgtcacagacgagaggctgaatgtcttcaccatctgccattttctatatcctgtcaaaattgatataaaaaatattagcataattgaaccctttattttgcaagaaacagaggaatcttaagatctaccaaagagaattaaattgaaaaagcttcataaacgcatactaatgaagaatcaatgacgatggaacgttatggaaatgtgattaccttagaagttagagaggggatctctgaggaaacgaggagggtggtggtgtggtacgggtgtgtagtttttgagagagaaacg

SEQ ID NO: 153360 - DNA, 1967 bp, Arabidopsis thaliana landsberg
gagattttactctctctctctctctcttcttcactctctaccaaagtctctcgtctcagatatgaagatttctcaagctccgatctctgttttcgtactcttcttgctctccactgttttgcctcaccatctctcactgggagctccgattacatgctctggtatagttccaatgaaacacagaaacgagatgctatcaatttcggattttggagctgacggagacggcaagaccttgaacaccaaagcattcaattcagctattgatcggatacgaaactccaataagagtaacgaaggaactcttctttatgtgcctcgtggtgtgtatttgactcaaagcttcaatcttacgagtcacttgactttatacctcgccgatggtgctgttattaaagccgttcaggtgaatgattactaatttacataacttgattcaatgattgttaggaattgtttgtttctacattgcgatttctgattgtttgattactttaggatacggagaaatggcctttgaccgatcctttgccgtcttatggaagaggacgggagcgtcctggacgaagatatatcagctttattcacggagacggactcaacgacgttgttattacaggttgttactttttttttgtgtcagcttagatgtcgtcgaaatgaatcttctaaatcagattgtgtgtcaatgcatttgctaggcagaaatgggacgattgatggccaaggagaaccttggtggaacatgtggagacatggaactctaaagtttaccagacctggtctcatcgaattcaacaactcaacaaacatcctcgtctctcatgttgttcttcagaactcccctttctggacacttcatccggtttattgcaggttcacaaatctctcatgaactttaatatgcacttggtcattagtacttgactatcttttttcttacagtaatgttgttgttcatcatgttactatcctcgctccaactgattcgtacaacaccgatggaattgatccaggttttttttatcagtttctctcttctacttaatcatgttgttacgtttcaaatcatgactgatgtgtttactaattaccacagattcaagctctaacgtctgtatagaagactcctacatatctactggtgacgaccttgttgcggtgaagagcggttgggacgagtatggcattgcatacaaccgtccaagccgtgacatcaccatccgccgcatcactggatcttccccatttgctggaatagccatcggaagcgaaacttctggcggaatccaaaatgtaacagttgaaaacatcactctctacaattctggtatcggcatccacatcaagacaaacattggccgaggaggaagcatacaggggataacaatctccggggtttacctagaaaaagtccggaccgggattaagatctctggcgacaccggagatcatccagacgataaattcaacacatccgctcttcccatagtaagaggcataacgatcaagaacgtatggggcatcaaagtcgagcgtgctggcatggttcagggattaaaagattcacctttcaccaatctctgcttctccaatgttacactgaccggaacaaaaaggtctccaatatggaaatgctcagatgtcgtaggagccgctgacaaggtcaaccccacaccttgccctgaactaagcgcaaccacacaacaaggtggttcctgtgaaaaccaatcctaattctccaaagctaagagactacatgtagattaatgtaagttttattgccatcttcataatcaaatcacttgagacttgactcttgagacaatctatatagactactaatataatcaaattatagacttaaggtttcacaaaacaaaaatcatattctactgaatttgttatatagacaaaatcatcttcatcattttcacatcatatggataatgatatttatttaccag

SEQ ID NO: 153361 - DNA, 728 bp, Arabidopsis thaliana landsberg
agctgctaatgggaggagccggttggtcgattcgtcggaccaaagttctgaaagaaccaaacgcagcacgtatacttttgcggatatctttggtgagcttaaagttggataccgtgacactttccgaaaaagcttctatcttttattttccggaaaaatataaacttttactctcttccgatctcctttcttgtacatctagatccaagcggtatcgatggctcgacgtggattattgatttcgttcttcgctatcttctccgtcctgcttcaatcttccacttctctgatcagttcttctagcgtcttcgtcaatccttccaaagtcaagcaggtttcatcgaaacccaggtttcctcaaaacccctaaagtgattttgggaaatttcaaaactttgaatgttaacaattttgaaaaattcgttttttttttttacttgtgttcagggcgtttgtgtatgaagggtttctcacggaattggaatgtgatcatatggtctcccttgtgagttttcaattcatcttcggttttgagcttaaatttggaaactttattttgttttctctgctaaagactctaaatttcgatgtattgactattgaaaaggcaaaagcgagcctgaagagatctgctgttgctgataatgatagtggagagagcaaattcagcgaggttcgaaccagctctggcacctttatctccaaaggaaaggttcgatttttccttt

SEQ ID NO: 153362 - DNA, 605 bp, Arabidopsis thaliana landsberg
atggatccatcagctggcatagaagatgagtaccatcataaaaacaacagagtatataactttcctctgatttacaacttttttttttatgatgcttaattgaatcagtctaaggcagataattgttactgttttgataggtttactgctggaaaggtcttcggtttacagctcggcaagaccttgaaggattttctagggtaaaattttcttcgatttcgatttcccaatgcttcatatgattgctttttaaaacctttttctttctttttcacagtttactgaaatgggaatcgaaggagttgtcccagttgaactattgccgcctgaggtccggtccaaataccaagctaaaccaaacgaaaaagccaaacgagcgaagaaagaagaaaccaaaggtggatctcatgaaacagagggaaaccagattggtgtttctaatagtgaagctgaagctgaaggaggaaggggtgatgcagagacgatggagagtgatgctattgcagacactcctacgcctgaggaacagcaaagactcggtggttctgatacagaaaacggtcaagaggccggtcaaatcgaagacggagagacagaagaagctg

SEQ ID NO: 153363 - DNA, 1639 bp, Arabidopsis thaliana landsberg
ctcaataagttttcgattttaccttacgcagaaaggttcgttgaaaccctagattcgttctcagttttcgtgttggctaatggcgagcgcggcacggggagagagcagcaatccatacggcggcggattgggaaccggaggaaagttccggaagccgacggctcgtaggtctcagaaaactccttatgatcgaccaacgacttctgtgaggaacgctggacttggtggcggagatgtcagaggcggcggctggttgtcaaaattggtggatccggcgcagagacttattacttatagtgctcagaggctcttcgggtccttatcccggaaacgcctcggctctggtgagacgcctttacaatcgccggaacagcagaagcagcttccagaaagaggtaagaagattgttgattttttcgatccaaaagttattctttttgtagtttctgagtttcttagagaaattgttttttaggaactgtagtttttttaccgtttggatttgccctttgctttttttttattcattttagtttatagtagttcagaactaataagtacataaacgttgttggaatgttcttcaagtacctagccaggttgtctattattgaatttgtggtattagagattgtttatgtattggtagcagtcatgtatggaattcgtttccactttgctaagttgacgttgttaatgtgtactctttctcttatcatggatcaggtgtgaatcaggagacgaaggttggacacaaggaggacgtctctaatgtaagtaaatgagccgcatcttttgatgaaatatcttcttcctttcggtttcattgttcttttatcttctgtagtgtaaacctatgttttgttctgtgtgaagttgtccatgaagaatggtttgattcggatggaagataccaatgcctctgtcgatccacctaaggatggatttacagatcttgagaaaatcttacagggaaaaacttttacaaggtatatactatcttacaggtcatataacctagtagagtaacaattttccttcgaggattgaaaagtgtcttaatcttttgatgcatccagcattcataaaatagaagagttgataataaagacctatgatttttccttcttttttgtttcattttggtgtgctcatgtcaacatttataggcattttcacattttgaactagaaagaaacattgtgttttgaaaatcagttgatcactttcaatgattttacaggtctgaagttgatcgattaactaccttgttgcgttcaaaagctgctgattcatccactatgaatgaggagcagagaaatgaagtgggtatggttgtgagacatccaccatcacatgagagggataggacgcatccagataatggaagtatgaacacccttgtttcaacacctcctggaagtttgagagtaagaaagttgttacatattagttgtactagtctgttttatgctgagcttcatgctagatgccattgtttaatctttttgttgttgatgacatccttaccagactctcgatgagtgcattgcgtcgccagcacagcttgcaaaagcctacatgggtagcagaccttcagaagttactccttctatgttagggttacgtggtcaagcgg

SEQ ID NO: 153364 - DNA, 1247 bp, Arabidopsis thaliana landsberg
acagattacctttcttcgaaatcaacaccaacgacgacggtggaagaagatcctccggtctcaaactctctcatggcggcgatcaaaagatctcaagcgactcaacgacgtcatccagagacttagcatcttcatcaaatccatggaacaacaacacggaaacgacgtcggttttgaaagttgagttgaagtattttatactatccattttagatgacccgattgtgagtcgggtctttggtgaagccgggtttagaagcaccgacattaaactcgacgtgcttcatcctccggtgacgtctcaattctcttcacggttcacgtcaagatctcgtattcctcctctgtttttatgtaacttaccggaatctgactcgggtcgggttagattcgggtttccgtttggtgatctcgacgagaactgtagaagaatcggtgaagttttagcgaggaaagataagaagaatccattactagttggtgtttgtggtgttgaagctcttaaaacgtttactgattctataaacagaggaaagtttggttttttacctttggagattagtgggttaagtgtagttagtatagagattagtgaagttttagttgatggatcaagaatagatataaagtttgatgatttagggagattgaagtcagggatggttttgaaccttggagagttaaaggttttagctagtgatgttttctctgttgatgtgattgagaagtttgtgttgaagctcgctgatttgttgaagcttcaccgtgagaaactttggtttattggaagtgtttcgagtaatgagacgtatttgaagctgattgagaggtttccaacgattgataaagattggaatcttcatcttcttcctattacatcttcaagtcaagggctttatccaaaatctaggtttgttttattctctatgtttgattgttttgtatccaaagtttgaatatttttattgaaactgtggtgttatgtgtttatatacagtttgatgggatcttttgttccatttggagggtttttctcatccacatcggattttagaataccgtctagtagctcgatgaatcagactttacctcggtgtcatctttgtaacgagaagtatgagcaagaagtcaccgcctttgctaagtcgggctcgatgatccatgatcagtgttcggagaagttacctacttggttaaaaaatgtggagcatgaacacgagaaaggaaatctcggagaggtgtagctt

SEQ ID NO: 153365 - DNA, 525 bp, Arabidopsis thaliana landsberg
cttcctgtatattttgttccttcataatatattactatccttctcgtttattaatacaaacttgaattcttcttcttcttaactttgtctgtcaattcacatatatatagtaccaccatcacataagtatctcacaacacatcatggtgaacgaagaaatggagtcatcacttaaagtcatcgacgtggcacgagtcacaccatcaaactccgactcgtccgagtcactcactctcccactcaccttcttcgacctcctctggtacaaacttcacgccgtcgaacgagtcatcttctacaaactcaccgacgtaactcgtcctttctttgactcagtcatcgtcccaaacctcaaaacatctctctcctcatccctctctcactacctcccactcgccggaaaactcgtgtgggaacacttgatccaaaccgaaaatcgtctacacccaaacgacgccgtttcattcacatcgccgagtcaacgcagacttctacgtttaccggaaagaccgttcccacacgagt

SEQ ID NO: 153366 - DNA, 708 bp, Arabidopsis thaliana landsberg
tgtgatgctaacaatcaagatgtgatcagaagtcactaagtcaagccaagcataacagatttcgatgtgttctagcaatcctaagtgaacatgcagaaaacagaaaatcaaacagaaacagtaaaacactcgaccaacacagctctttgcatagcactgggtgaggtcgagtgacaggtcgagtaacagacagaaaatgaaacagggatactcgactgcacagtctgttgccagaaaactgggtggtcgagtatcaggtcgagtaaaagtaaagaattgcagaaactaagcaacggatgacgggatgcactacacaacagtagagtaaacaataaaatcaatcagataaagaattcctaaagatgggataattgagtagtttcgtttcctcagtttacaggtgattgacatgctcaataaattaaccctagacaacaagttcattaaccaaatctaagtgccaccgcaacagagactctcaagctaacctagtcccagactcaatcaccattgacgagagccaacctaacaggcattacgaatcaacaagtaaaagccaaaacgctccctgcaaccaataccttggtacagggtcacgaatctctggaattagtggttcagacatttcatcgaacactttttggacccaaaaatgtttgggctcaaattccagttgatcagaaagcaataggcattaagaacaactaa

SEQ ID NO: 153367 - DNA, 992 bp, Arabidopsis thaliana landsberg
tatgcatctggtatcttctccgtgcttttgctgcggttcagagacagtttaaaagtaagcatgtgctgtctccagtttagaaattcctttttttgtacagggattgttacctttcaccatatttttctgatcctaaatctcactctcagggtgaaattggtatatttttccccatcatcgtcttaagatcattagataactccgagtgtcccaatgaccaaaagatgggtgttcttaggtacaatatttttctgctcgtccagatgtaattttgttttgaatacatctcttaggcaagtgagtctattatctttttgctgtgaatttcatggatactcatatttttctacgcaggatgcttgagaaagtctgcaaagatcctcagatgcttgttgatgtgtatgtaaactatgattgtgatctagaggccccaaacttgtttgagcgcatggtgtgctccattttccattcttttatataactactgtacttcagcaatgtgactggtagttatgactcacattacatgtttttattttactttaggtaacaactttgtctaaaattgctcaagggtctcagagtgctgatccaaatcctgccatggcttcgcagacagcttcggttaaaggttcatcccttcaggtaggcgtcatatcatgtttgctttacttgcaatccagaaaataaactactgaaattgctatgtgtatatattttatctaaagccttatgaaatttttctctaagaaatggaaggacccttttttggtaaatatttaaggtgctgggtcacggttcttaaatcactagttgattggtagaaaataaggagagagccagaaaatagtacaagaaatgcaaacgaggactctgcttctactggagagccaattgaaaccaaaagcagggaagatgtcccacgcaactctcagaaggctaaagctcataaatccacaatggaggcaaccatctccgaggttcttgtttaa

SEQ ID NO: 153368 - DNA, 1017 bp, Arabidopsis thaliana landsberg
tttggtggaagatgaaatcagttcgtttttcgaatcgtctccacctctgaagaacaaggaagagatcgtagccaatcttaatcagttcattgagctgaattcttcgtgtcaaggtgagatcagaatttgtgtatatatgtaacattttgatttctgaatgacttagagggttttttctttcttttattttatcaggagggatgaggaggattgtatgtgtgacttcaggtggaactacagttccattggagcaacgatgtgtaagatacattgataatttcagctctggaaatagaggtgctgcttctactgagtaagtttttatagtttttgttttccaattactctttatagaactggtaaaaatatatattattgaatacaaactttggttttgatttggattgcaaaggaatttcgtcaaggctggatatgctgtgatatttctctataggaggtaacgttggccttgtcatgtgtttctcaattgtgtgtagttgaaagataactgaaatttttgtttttgttggtaatagttatggtggtttttgatatcggtttattatgcgaatctttaggggaacttgccaaccgtattgtcgatctcttcctgatgatccattccttgaatgttttgagtttcctgataagactaacattcaaggtttttttcttagaacatctctttctcaatctatacacatagattcatctttattcaaatgtagttcatggtttatggatattaagtgtgtgtttctgctctctatggttgtaaattatgtgtctttatacatcattttgttggttttcagttcatacatcacatttggaagctgtgaaaatggctgttatggatcagcaagctgtatgtattagaccatttgtttattgttattgaattcgttcacggaaaatgctgagcactcttatcttttgtttgtttgtttgtaacataaccttgcaaaattaacatttcaggcagtagcagaaggcagcttactaaaacttccattc

SEQ ID NO: 153369 - DNA, 2169 bp, Arabidopsis thaliana landsberg
attttgtgaaggcacactggcttttgagctggtgttgaagcaatgggtagttcatttaacgctcagatattagttgagaagcttgccaagctcaacaattctcaagcaagcatagagagtatcctcttctgtatatcataatttggctgtagaaagctctgtaatttcattgtttaagtacttaaataggtgcttggaaaagactatacagaattggtatctaagttaatgagtaacaatggtataagatgaaagtattggtatctcttctcaagcagaatatatctaaattcctcaggattttcttttacttgagctgtagtttataccaattttgagtttcagtgatattggtgtctgatatacacggataattttctcaactctcccaacttgcttttattgtaaattagtttccctttgattcgtctcatgtgatgtgttgtttttctctcgccttgtatactattctggtgtatgttttccttgacgttatacagctttatcacattggtgtatctttcacatgaacaaagcaaaacatgttgtagaaacatggggtaggcagtttcactgtgccccacgtgagcaacgtttggcatacttgtacctcgcgaatgatatcttgcagaatagcaggcgaaagggttcggagtttgtaggtgagttctggaaagtactccctgatgctcttcgtgatatgattgaaaatggtgatgactttggaagaaaatccgcacgccgattggtacgtgaagttaactttttatctaccactctctctgaatttctctttgtttgagattttagcgaacatagaaatgccacttattgatgtgatttaaagaatttgacaagaaaactgcattgctaattatcgtaattatttcttcaaggttaatatatgggaagaaaggaaagtttttggatcccgtggacaaattctcaaagaagaacttctgggaagacagcctgaaaatggaaccagaaacggaaatctcgtgccacttaagcttgtaagtcagagtttgttgtacaagcaatttcgtaccagtatgtctcagtacggaaacactgttatgtgaaaatttctactttcgagttcttgcatgctaaccacataatcaactttgtcatttctgcagactgttcctcagagacaggtaaatggatccacactggacaaagtagtgtctgctgttgaagatcttcacggcgttcagattgatgaggatgctcttgtcggaaaatctactaatgctgcaggctaccttgagaaagcaacacaagaggttgaaagagatcttagttcaggtatcaccgtccattggctgctacattactgcaaatgtattgatatgcttttttcttatcaagtgacaagcgacatagcttcagttttctacattcgtttgttttaagaactcagctgtttggtctatctttaaccacacaccctttgtatctgaaccgaaatcttaaaatttgcgtaacaatctcgtatctggtctatgtgtgatcttaaaccactaccacgcttccaattcttacttccatgatgctcctctctcatttttccaaatagtttttgccaaaatcatcttttaaacatggtggctcttaccatttgataggaatattcagcatatctttgtgtcaaatcatttaatgataagagcacttacccccaatccgcaacgagaataaccagtgctacacattttggttaattttggatccctaatttttgtcactacatttctgattactgggactggtctttatattaactgcttgtagatatattacacttctttacttgtaggatagagaagatccaattcttgttcaagcatccatttgaagttgttttcactatcttacttcttgagcattgctttaaataggacacacccctgggccagcggtggtgaaggagttgcagggacaacatgtcatattgagagactgcatcgaacagctaggggcaatggagacatccagaacaagtcttatctcacatttgagagaagctttacaagaacaggtttacatttatacattttctttcaaaacaacatctttcattgcaccggccagaaacctcaccttgtttttgtttgtgtccaggaactcaagctggagcaagtccgtaaccaccttcaggtt

SEQ ID NO: 153370 - DNA, 486 bp, Arabidopsis thaliana landsberg
aactgctctttcaactcatagagaggagcccgaggatgaggcatcatcgggtgaacaacaatcttatgcttctttggctggtcgtcgtaagagcatagctgatatgattcaggtacatggttccttattttattactaaaatattaattcattttacataaaggaagatttccctcttacactttcttctgtgttcaagcggcctcattcggcaggaaatcgtccaatagcacaagacatccatgccatttcctctgatacatcttcagaacacgcaagaagattaccggggtccgatataaattcggttaatctgctgagggagacagattctctctccagcgatgctattgctagtgaagatccctttaccactgatttggcctcacaaagttttactaatgcacagacagagagattgaacgcgaggcatgcgagccatgaggacaacaatctatctgtttttggtgcttctcctccatcctc

SEQ ID NO: 153371 - DNA, 2162 bp, Arabidopsis thaliana landsberg
tgtcttatagagatggtgtcatggagcatgaaccaaaggcgtgtgctgctgtcaaaggaacacagattatggttatctttcaaatctggttaagcaaagagcgggggaaacgatcttcttcggtaactttccatgtttatgtatgatttaggtggagaatttgttctacaatatgattgctagaaggaagacacttcaaaattctgctgatgattacgggaaaatcgtggatttgctgagccggatggctattcattacaataatgtcagcttttcttgtcgaaaggttggtatacttattaactaaactagtcgtatttagcaatcttttgtgttttggaattgtgaagtgaattttggatgatactgtctcgccagcatggagctgttaaggctgatgttcactcagtcgtgtcaccttcaaggcttgattcaattaggtctgtatatggagtatcagttgcaaagaacttgatgaaagtagaagtttcctcctgtgactcctctggttgtacttttgatatggagggtttcatatccaattctaactatgttgctaagaagactatattggtgcttttcattaatggtgaggatttttttccttagtagaaatgaaaagttagtaatatctgatttatcactagataagcctatgtgacatttaatttattgattacaacagatagattggtggaatgctctgccttaaaaagagccattgaaattgtttatgctgcaacattgccaaaagcatcaaaaccttttgtctacatgtcaatcaatttgccacgggaacatgttgatatcaatattcacccaacaaagaaagaggtaattgctttcctccttttattttacctttaaggcctagtagctgctctatattcatgtatgtgggttcaacagtcaacactttatatgagaaaattgtgcatttgttgcttaacttgcttgaataataaattccttatttatacaacaaaataatagatgctttggtctatcgtgcaggttagccttctaaaccaggaaatcattattgagatgatacagtcagaggttgaagtaaaactgagaaacgcaaatgatactaggacgtttcaagagcaggtatgctcgcaaaagaacctgaagcaacatttttctctggaggttaagaacatttatttactaatcatgttttctttcgaatatttgcatgctacagaaagtggaatacattcaatctacgttaacatctcagaaaagtgattctccagtttctcagaagccttctggtattgtaccattttctgggttgaatgcctttcatagtctaaaacttttcctgttgcaaactcttctgtacttttcgcttcatagaaaagcttgtgctcttctcatttactaggacaaaagacacagaaagttcctgtgaacaaaatggtgagaacagattcatcagatccagctggaaggttacatgcctttttgcaacccaagccacaaagtctccctgacaaggtttctagtttgagtgtagtaaggtaagaccccacctgatacaagacgtgtagttacatataaacaacattggatcccatgtcattactgtattcaaaactctcatcttatttaccagtagatgttcactcctttaatttccgtgaaaattgtttcctgcaggtgtttctttggcatgattctttattggttagatgtgttgcgcaactgcagtatattcacttgatcttattacggaattgcaggtcttctgtaaggcaaagaagaaacccaaaggaaactgctgatctttctagtgtccaggaacttattgctggagttgacagctgctgccatccaggtagtttactctgcatggttattcttccgaacaaaactttaaatcaatcctcataactgcttttctcaacattattctctgttaggtctgctggagactgtaaggaattgcacatatgttggaatggcagatgatgtttttgctttagttcagtataacacccatctatatctagcaaatgtggtgaatctcaggtatattcttaatatttaatgtttgatgggttttagctgtacgtaacaaaacatctcattccgcataccatcttattgggttttgcagcaaagagctatctttagagctcattgaacgagca

SEQ ID NO: 153372 - DNA, 1657 bp, Arabidopsis thaliana landsberg
ctcaaactctcaaactctctctctcttcccttcttcttcgttactttgcccgaaacactgactgttgcagaagcagatttaattcttctttagggaatcttcgaattggttagcgcagagagatgaagcatttcatgatgccaaggaacgctatcttgcgtgatatcggagagtcacaatcgccaaaccctagcttgacgaaatcgaagtcacaaaggaagattaaatcttctaaagagaatgctccacctccggatctgaactcgttgattcctgatcatagatcttctccggcgaaattgaaaagtccattgcctccgcgtcctccgtcgtctaatcctcttaaacggaagctgattgcggaagctacggcggataatggagtagcgattggggtttcagactctggtgtcaaggtagtctgagctttttattttttgtttttcttgctcagaaattggagaatgttcgaaggaaaaatcctaatgtcttggattaattggtctaattaagttccagatttctataaattaacaaaatgaagatgattgcttgtatttttagaagtttatagttactaaattgaagagaaactatattatgttttctgagtaaagtttaagctaatctctaagtctttgggcatatgtaggttatagtaagaatgaagcctccaagcaaaggtgaggaagaggagatgatagtaaaaaagatctccaacgacgccctcactattaatgaacagactttcacattcgattcgattgctgacccggagtcaacacaggcaggcatttagttttcatgattggggtttcactatacaatgttatcttatgatttatataggctaacaagtctttatcttttttgtattctttgcaggatgagatctttcagcttgttggagcccctcttgttgagaactgtcttgctggatttaacagttctgtttttgcctatggacaggtagtcatcatttctcaatctgtttctacgggattgaatttcaatttctcaagatgattgtaattctaacatttgttttcaccagactggcagtgggaaaacgtataccatgtggggtcctgcaaatggattgttggaagagcaccttagtggtgaccaaagaggtttgactccacgtgtctttgaattgctcttcgcccgtctcagtgaggtgatgcttcgtgttgtttcctttcagtctgtttcattatgtgagagaggcagaacattcaaaagttgattttttttgtttgcaggagcaagcaaagcatgctgaaaggcagctaaagtaccagtgccgctgttcgtttctcgaggtttaatgagtggattcaactttagtttttgtgcttatgatgttttcatttatcaaagcttgatatacatggttccctttcccatcttttattgcagatatacaacgagcaaataacagatcttttggatccgagcctaaaaaacctgatggtaaaaggaacttgcaatttcaacttgtttttacattttttaaggaaaaagaacctgggttcatcatttttaattaatattgcaccagattagagaagatgtcaagtccggtgtttatgttgaaaatctgactgaggaatacgtgaaaaacttgaaggatttgtcaaagcttctggttaag

SEQ ID NO: 153373 - DNA, 1349 bp, Arabidopsis thaliana landsberg
agaattttattaaagtcccaaactttaccatatttaagagagatagagaaagcttctctgcttctgacttcaatggttgtgatgaatcgagttctggtagctcttacattagctctgctagcttcgtcggcgttattacctgtttccgatgccgcgaagaaaccttcttcgacgccgagaaaggaggatgttccgtatataaagtgtcaggtttgcgagaaactatcttctcggttacaccagctagtgaaggagaagcaacaacagatctctcccaaaaaggttgagtttttaatgtatttttagtgatctttctagtttgatttgatgtgtttctgcttactgaatttgctggtgggaaataaatggtagatctcggagtatgagatcattgagattgctgaaaatgtctgcaatttgaagaaagaggaagctgattggatgcttaagattgacattgttgagaaaggcgataagcttgtggtaattgagatttctctacctctctcccttcttgtttgatccgaaaatattacattgtagctttgagattgaaataagtggaaacttgtacatttgttgttgaatctcaatgctggtgactctgttaacaatttgtttgttttgactttgggttcgtagctggttgagcaaccagaagaagggatgtgtaattccaagtgcaagacgatcgagaatgcttgtcaaaaggttagcttaatgtggtctttcagctgttaatacaattggatttgcatttctttgagtatttagagttggataaatgtgattttcatctgtttgttggtgtgtgttgcaggtcattggttactcagacactgatgttgcagagtatatttacaagtctaagcctgatcttgtttcactggtgaatcatctatgcaaagatttgaccgatgcttgcagcaagaaacctcctcctgttcccaaggtaccttttattgaaactgaaatgtggatctttggtgatttgtgtccgtgaatgttcttatgttgttgctgtggagatgacgttttgataagtgtttctttatctttgccaggatcgggttcctggagaaccatttgttgcaaaaccatcaaaagatgctgaaatggacaagattttgagatctatgcaggtaatctttgatgacgtcaatcaataccactaagcaaggaatgatcttaagcttactctttaccgctatgttcagggtatgccaggagcacctggcatgaaggtatactctagagaagatatagagaaggggaatatcggtaatgaagatgatgatggcgacgatgatgaagatgaggaagaagatgataagtttcccaagaacttg

SEQ ID NO: 153374 - DNA, 520 bp, Arabidopsis thaliana landsberg
ctcccatattcttacttgactccactgcaagctgctgttggcgttgtccaaaaggtatcatgtctataggactttatagttatttttctcgtgctttgattaacggccttcaacacaatgacttgtaattaatttacagggacttagaccaaaaattccaaaggaaacacacccaaaactgactgaacttcttgagaaatgctggcggcaagacccagctctaagacccaattttgcagaaatcatagaaatgcttaaccaactaatccgcgaggtaattgatttatcattgcatctctctctctaaccaacacgattcttagcattaatatgttttgaaaccaccaggttggagatgatgagcgccacaaggataaacatggtggttacttttcaggcctaaaaaaaggccatcgttgactctctcgggtgcgctgaaaaatttggtttgatcggtttgatagagctctactcacttctcgttttttcgttgtacagtttctagagcctcactctcttt

SEQ ID NO: 153375 - DNA, 2140 bp, Arabidopsis thaliana landsberg
agcttaaatcaatgttttattctgttagctggttgagaacagtgatcacgcccgaatgagtaaagaaattgcggacaagagccaccgactaaggtacgttatatatgtatattctatgacttttgaactaactatcattttctaactaattttttttttgatcaacgactatcattttctaactgtgtgtttacatgatcatatataggcaaatgagaggagaggaacttcaaggacttgacattgaagagcttcagcagctagagaaggcccttgaaactggtttgacgcgtgtgattgaaacaaaggttgttaagaaaattacttgataccatgtataagtttctctaagcttacgagtatgcaatttactaatacgagatgtgtttgcagagtgacaagattatgagtgagatcagcgaacttcagaaaaaggtaataattaaccaaaataacgtttattctttacttgatgatttcaatattaattttggcagtttcaagatccaaaattttcatcttcttctctttttttttggtgttcagggaatgcaattgatggatgagaacaagcggttgaggcagcaagtatgtgtcttaccctctctgttgataacaaatccctttcttttgtctaccattaacgtacacactcctaaatttaatccccagttgtctacaacacatatgtttgatcatactgtgagataaatgaataaaccaagtgatatagcgcgatttaaaaatgtctttaaaactaaaggtaaccatgtagctagttagtctctagggtcctagaggtctacgagtgtgcatgcatggatttggtgcgttttttctttttcatcttcattttgttttttgaaacatggaaccataaacgaatatatatctaattcttgtttgatatatagtttggtcgaggcttcatgtcaagatttgctcattcgtagttagttgatctctagagaaattcaaaacacatggtgccactaaaaacacaaaatgcaaatacttagctagagaacttaatgatatgttttgtcttgatttttgcagggaacgcaactaacggaagagaacgagcgacttggcatgcaagtacgtggatatatatatagtcttgattattttgaattttgtatgtttgttatcagtttaatgttaaatttggaatatttttttttggttacgtgtagatatgtaacaatgtgcatgcacacggtggtgctgaatcggagaacgctgctgtgtacgaggaaggacagtcgtcggagtctattactaacgccggaaactctaccggagcgcctgttgactccgagagctccgacacttcccttaggctcgggtaaccaattaatcaccctttctttttacattcttttgagttgatagctttacatgattttttttttatttttaaattgagacaaagaatataaaaatatatactttaaacgaccatatacatgtatgttgtccatatttattggcattggaagatatggatgacacagaatcgtaaataaatttggtttatttgttgtatatttgtaattctaacaaataacatgttattttgtatattttacatgatatcatgctatttgttaaaattacctgtcataaaaaacaccacttatttatggtttgttttttgaaaattctggcacaaatctaatcatctacaaaatcactctaaaaaataagttattgatttaatgtatggtgttgtgcagcttaccgtatggtggttagagatggaacaattcaaagaagttgatggagtgaggagagtaatgtaaatctttttaactcggtagtaacaagagacaatgtctaagtagtgaattctcaaatgtttgtgtaagtttctgcctatggaagaggctttcatttttatgattttcactatgtatgatctctcttcactgcatttctggttagtaacgcttgtcaccgataaactttctcgttatggaaagttagaatataagatattgtagaattttgattatcgatatactcttggttagggatcaaaaatatattttagtgatgcctcaaataactaataatcatcataggactcagtctcattagaaattttagtgtaacaaaagtgtattcgaattct

SEQ ID NO: 153376 - DNA, 943 bp, Arabidopsis thaliana landsberg
atgtttatgttttttaggattggcctattattgctcagcgtgttcatgaccacttgaaacaataccctcgtttgcgtctaactcatgggaggaaggtttgtgattagcttaagagatacttatcttaagtttaatcatcggtcttaatttcttgattatcatttttggtgttataggttttagaggttcgtcctgtgatagactggaacaaaggaagagcggtcgagtttctattagaatctctcggtatatatatacattgttataatttcatttcgtagtttcttgttctagaccgatgattagtcgtaatttgatcaaatcttgtttaggattaagcaataaagacgatttgcttcctatctacattggtgatgacacaaccgatgaagatgcgttcaaggtatatatataactaatgtttcaagttacttacatttagtgattggttacttcttgattgtgatttgcctaatcgaaacaacacgatgaatcttacaggtactgagagatgggaaccgaggtttcggcatcctagtatcgtctataccgaaagaaagcaatgcgttttactcccttagagatccatccgaggtaatagtaacattaaaccattaacaatttcttgatattatgttttgtgtatgttctatttgtattaacttgtggttttgcaggtgaagaagtttctaaagactttggtgaaatgggcaaagttagagaagaattctactggtttttgaataatataggggaattttctgctttaatgcttatttacactttgttttttgcttctttaatcatttttcatctctacccagttttagtcacagcttaatttatgattttccatttatctggtggaagttaagttattaaagttatatgtaaaaggaatgctaacgtattgcatagatttgccaaaagactatttccttgg

SEQ ID NO: 153377 - DNA, 788 bp, Arabidopsis thaliana landsberg
tttcaatatatctcctgatgaaataatagagtctgtcaaatcaggattattagcacccattgaagctgagcctgaggtgttctttcttttgtaactctatcttcgctttattcaagtataaaccaaaggctagttctgaatcagctttttgccttcatccttgcagctcgaggtgccaaaagaattgatctctcaatcacaattgaaagagttaaccttgcagagaaatccatgttttgtccctattcctgggtcaggtttaaccaaattgcatgacaaagagactgggatcactcagcttcggttatccaatgggatatctgtaaattacaaggtacgtctttcatctttttgctcttccttactatgtaaggatctccgtagtgattttctttctacattataagacatattcctcaatatttatattgttgtttgctgtctacttatcaaattgcagttcttaacaacttaagaaaatatgcttcgttctagcagaaaacatttatttggtgttgattgatacttcagtttttactgtaccatcttgtatggagaaataaagacccttcccttgacatttcccttttcaatatagaaatctacgaccgaatcccgggcaggtgtcatgcggctcattgttggtggtggacgagctgctgaaacatctgattccaaaggagctgtggttgttggtgttcgtacactcagcgagggtggtcgagttggagacttttcaagggagcaggcaagtgaagctgttgaaaactgtattgtgatttttaatc

SEQ ID NO: 153378 - DNA, 1163 bp, Arabidopsis thaliana landsberg
gtagactcaaagtcaactgaggtgaagtcagttgagtgtgctgtactatcttctctcagggttctttacttttctgctcaaaaggctgatgttcgagttgggtcattaaaaattcttcttcacgtactggaggtatgtataatacaatatgaacattcaaaatctttgtttacctttaatatctgacattttgcttctgcataaatcttatatcatcagagatgtggagaaaagttatactatagctggtcgagcattcttgaaatgttgaggtatgtttcctgcttactttccattttttcccacatatgtataattgaattttccattctatttgctgatcctattcctcacatattctctttaggtctgttgcagacgcatcagagaaggatgtggcgacccttgggttccaggttagtgaaggatgacttcctgtagattcgataaattagcagtagtgtacagccttagtccatctcttactttataccttgtcactgataccttgtttgttcttcccagagtctccgggttattatgagtgatggacttcctacactcccggaagactgtcttcatgtgtatgttcctatctctgtttaaattactatgttttcttattttacatgctgatacttagctgccagagatgtcaacacaattccttgtcttatatgggatggtagttaatgatattaatatctcaggtgcatagacgttactggagcttatagtgcacaaaagactgatttgaatataagtttgactgccattggcctgttgtggactttgactgatttcgtagcaaaaggactccaccatgggtctctagtggagaaaggatcgggtaaataactgtcaaatcctagtctgcactcctcacctcaagagaagctctatttttaaaaaatagtaagctgagctgttcctgcaggattcaataatgcagattccactccacagcaaacaaatggcgaggacggggaaaagcatatgggtagcaattcgggcaagtcagattatgaagctccaatacaagtggtcaatcatgagaaattactgtttttagtcttttcgttaattcagaaacttgttgatgacgaacgaccagaggtatttttcatagaccaccattttttttggaatgtgaattttttatt

SEQ ID NO: 153379 - DNA, 434 bp, Arabidopsis thaliana landsberg
acgatgtgtggggaagacggcaaagcaatcaagcaaatacttttccttcctcttcttctccaaaagtcgtttgttttcacatttctttcgattcccacttgactctccgagaaacctttgcagatcaacaaacccatcttctgattctggaaaccctaacccacccggttccgattcagacaaacgggtcggagaccgattttgatctcgaactcgattctttctcagatgaaagtatcaaaaattgagaatttgaggttgtttgagtcttaatcatctcgatcaatgtcgcgttttccccgtggatttgtggagaattcatcaatggaggaacccaaaatcgctcgtcgtccaactatttgcttcagaccaataaacccttctgatttagaacgtttggagcaaatccatcgtgacatattcccaatcaggta

SEQ ID NO: 153380 - DNA, 2846 bp, Arabidopsis thaliana landsberg
atggctttcgttcgatatatcccttgtcggaagattccacgaaatgttgatcaattcgagctgccatgtcttggatcgcttcgagctttcttctctactcagaagctcataggggatgaaccagttctcgtgagtttcttctcaatctctcagagtttttcgatggttcagatttacctacttgataagtaatattaatgacaaatcgatcaaccttaagcaatgcaaaaggcaaaacttttcgtatttcaaagaaatttttctgctctgagttagctgttttgaatccttgttaagaatttctgtctccgttttgtgtttacagtctcatagttctctccagatccgagtcttgatgtttatcagatttcattctcatttggcgatttctagaatgtgagactaaatggttggttaatctgaaacaggttcgagatttcatacacactgcattatatgatccaatacaaggctacttctctcaacggtcaaaatctgtcggggttttggagagaagcattaagttcaaccagcttgaaggtaggcgcaaagttcaactttcacttgcttaagtgtttaattcttgaattttagccacgcctctataactgccctgaaactatagcaatatcagttcttactctacatgagatgcatcatgatctttgtttggctagttatctgttgtttcttatggttatattatctcttttatgtctagtaagtcgatagttctccttgtcctagggaggaaagcatacatgaaactcttggaaaaagtatacaagcagagtgacatttcttggtttactccagtggagcttttcaaggtgaaatgtttgtggatagattctttggtgttttctttgattaagcctcacttgtgtgatttatcctattttatcatgccaatcatctcttgtagccttggtatgctcatgggattgcagaagctatactgcgtaccacaaatctctcagttccattaaaggtttgcttatctgatcgtccacatctgtattttatttaatttcaagacaaaacaaaacctgatattatgtctctgatttctgtagttatatgaaaagttttgaatctagttagtcctgacctatctttacctatcagactgcaaggaaactagttagtgatagcctaggcctttagcttgttctgttcatgctttaaaacttgaaatagagaaaccacggtttacctatagaacctttataagttttgtttcttttgaaaatggttgtgtagtttagaatcgtttgaatttctgtttaagatcatatgtctttaggaaagtttatatatcacgattgaaggtggagaaagtaatgccatgaatttctgtttaagatcatatgtctttaggaaagttttaatatctggaaaagggaaattttcatcctggtttgtgagttaaagtcgacatttgcactggttcttccgttaatcaataacacttgaaacatgtgcttagatatacgaaattggtggtggatcgggcacatgtgccaagggtgtattggactatataatgttgaatgctccggagagaatctacaagaacatgagctacacgtacgtatgccagttttcctctcttgtcaatttaagctagcatgtattcatacaaaatcatctttggctggaacttaagaataataaactgttatgaaacatgctgcaattatattaactgcatggtatttttaatatatatcagttctatagaaatcagtccctcacttgctaagattcagaaggaaactgttgcacaagttggaagtcatctatcaaagttccgagttgagtgtcgtgatgcatctgacctagctggatggagtaaggttctttttgttcagcacaaggcagattctggttttcaatttcctgttgctatgctagaattcggtatttggttgaaaatattaaattagtgagttgtttgccaaaaaaaataatataatattcttagaagattaagctagtcggagaaatcgttagtgaaatgaggttatgctactagattgtcattgacttagaattagcgataatacccaaattttctagagactacttattaatcaagatgtttataaattagccaaccacatattatcgaacaatcccagtttagtgactatgaagttatctatctgtgcttataaagtaaattttcaaacagagaatgtggagcaacaaccgtgctgggtgataatgcttgaggtatgtaattatgttgatgtggttctatttgataggttggtattttgaattgaagagggaatcatacgtgtaatatttgtattaacttataccattgcaggtgctagataatctcccacatgatcttgtctattccaaaagtcaactttccccatggatggaagtcttggttgaaaataaaccagagaggtacagagaatatttggctcaaatgaagtttatttctgcctttattgatcccgatctcttataaactgtagcgaagcactctctgagctatacaagcctttagaagatccactgattaagcggtgcattgaaattgttgaacatgaagatgatccggtttcaaaaccaaaagaaatttggtctaaactatttcccaaacctagacgtagttggcttccaacaggttgtttggtaagaaaaaaatggtgtccacatattacaacagatgttgtgttactctgttctaatttttgtaatttcagaaactgctagaggttttacatgcaaagctgccaaagatgtccctaattgcttcggactttagcttcttgcctgatgtgaaagttcctggtgaaagagccccattggtttcaacaaag

SEQ ID NO: 153381 - DNA, 1419 bp, Arabidopsis thaliana landsberg
tgtgtctatgctgcagatagaagtccttggaatttctcttccatggaaaggaatgtttacttgtgaacgtactggaggaagattagctgaacttgcaaggaaaccagatgaagatggaagtccttttgcatcttgttctgacttgaatccgtttgctgcaacaacatctttacaggctgaagctgtttccacaccagtacaacagaaggatccctttcccagtaatctgcttgaccttttgacaggagaggactcttcttctgaccccttcccacaaccagtggtggaatgtattgcaagtggaggcaatgacatgcttgatttcttagacgaagcagttgttgaatatcgcggctctgacactgttcctgacgggtctgtcccacaaaataaaaggcccaaggacagtggtgctcatctgtacttaaattgcctaaagtcccttgcgggtccaaacatggtgagatgcaattacgtctttccagttgccacaaactgtagttctgattgtatgaatctttcattggtttaactattcttctcatatgttatctttcttcgtaaaattccattttctatggtaaatttaatttctgcatgtctggcataatacaggcaaagaagcttgagtttgtagaagctatgaagcttgaaattgaacgtctacgtctcaatatttctgcagcagaaagagatagggcactgttatcgattggaattgatccagctaccattaatccaaactcttcatacgacgagttatatattggaagattatgcaaaatagcaaatgcacttgcagttatgggccaggcttctcttgaagataaaattatagcttctattggtctagggaagctggaaaataatgtgatagatttctggaacataaccagaattggtgagggttgtgatggcggaatgtgtcaagtccgagccgaggtcaataaaagtccagttggatcttctaccaagagttcaagaggagagtcgggctcagtgttcttgtgcttccaatgtatgaaaaaagcttgcaagttttgttgtgctggaaaaggagctcttctgctttcaaaatcctactccagggacactgcgaatggaggtggaagtcttgcagatgtctctgctacttcgataggttcagatcattacatttgtaaaaaatgctgcagctcgatagtgcttgaagccctgattgtagattatgtaagggtcatggtcagcttgcgaagaagtggccgtgttgataatgctggtcgggaagctttgaatgaggtatttggatctaacattacaaatcaccttgctgttagaggtcaaccttctcctaatcgagaagacttcaatttccttcgtcaaattttgggtaaagaggagtcgctttctgagttcccatttgcaagcttcttacataag

SEQ ID NO: 153382 - DNA, 800 bp, Arabidopsis thaliana landsberg
ttcactcttctctctctctctctctcgcttctcttcattgtttctgtgtgattacagcgaagaagagagaatccttggagcattccatggattcgcttcgatttctccggattcttctactattatcttcgattttactcttatctctccgttctacagtcaccgccggtgatattgttcatcaagacaatttagctccgaagaaaccaggttgcgagaatgacttcgttttggtacttatctccacttaaatctctcgtttcttacttcgaattcagcttcctcttcactactctcgatactaatgttgttgttattcccctctttgtggcttcttcttacgaagctcaacaagtagttccaaaaaaacgaaatcggaggtttctaattatacatgctattgaaatttcgtgattggagtttaagcttactgattagcttgtgtagttgatctaagttatggataagcttaaactcttagtttaagtctaattatgagtcgttcatgtttaaatctgatatgagaagtgtttgataaattggattaagatctggtgaaagttttatgtgtgtgatttgttgtaacctggttctttccttaggtgaaagttcaaacgtggattgatggtgttgagaatgaggagtttgttggggttggcgctagatttgggaagcggatagtttccaaggagaagaatgcaaaccagactcaccttgtttttgcaaatcctcgtgattcttgtacaccgctcaagaacaaggtttttatgacctatgacattagaatcaatgcattttaa

SEQ ID NO: 153383 - DNA, 1314 bp, Arabidopsis thaliana landsberg
gacgggctgcttaactggagtctctctcactcttatggtactcttttctactcgccaattaaagtacggagtttctttgggatttcaagttttgttggccacttagaagaccttatgtagttagttgggctgctttagaaatttgcgtggatctgcgtcagtttcttatgaggaatgaatcatgtagtggtttttgactatttgatttggtattttttggtagatggtttttgatgatatgaaattgtttggttagacagtgaggaggatcgaaaatggtttgcagaagctatgcaatcacaaacggtagatgtagtcaagcggttgaaggagattacacaggtattgcagacacctcaacaagttttggaggctcatgaagtgacccctcaagatattgaaggttcaatatggagttcactattgttttcttagctattttctctcttgttggttactaagattttgagttatgatgatttggtaggtttgttggatgagttgcaggaacatgttgaatcgattgatatggctaatggtgagtcttttcatactttgaccttgtaactttgttctatatctgtcttttgattgctgggcttaacttgtacttctttgaatgtatgggcagatcttcattccgttggaggcttggtacctcttcttggctacctcaaaaactccaatgctaatatccgggctaagtcttcagatgttgtaagcacaatagttgagaacaatcctcggagtcaagaatcagttatggaagccaatggtttagagtccttgcttttaaggtttacttcagacaccgatatgcattctcgaacacaggctctcggtgcaatatcatgtaagctgctctgagttctatcctatatacttagatggtcgaatgcctttttcaaaaacaaaaatgtctatcgtaaatctgatgaatgatttgtggtaaatttggggtacagctttgattcgcaataataaacttgggatcacaggcttccggattgcaaatggctactctggtttaaaagtttctttttaaactgatagggagagatttcaaaggtaataatactcttcacttttcttcatgcttggattcctctgaactttgagagaacacaaagttgtaaccgtttgtcttgctggtgcataactttcaaaacttttgtcattactttctcattcttcaggaaagctttaaacttgttggattatcttctacaagagaatgactcagactccgatattgatatagaattcgggcttcaccatatgatgatgcacctcgtgtctagcttcgatgctgat

SEQ ID NO: 153384 - DNA, 616 bp, Arabidopsis thaliana landsberg
gagaaagtggcagtgcagcaacaggtggagaccttggtgaaggacaacacagtcctcaaacgtgctgttgctatccagcatgagcggcagaaggcattggaggatgcgaaccatcagctaggacttttgaagcaactggttcctcagtatcaggaaaagcttagaaatctggaggtaagccttaggcgacagagagcttctgcatatcccttgctattgctttgaatggtctggtgttggttgttttaaaattgaaccaaaaacagatgttgttagaatttgatgatgcctcataaaagaaagagtgaatgacaaaaggtagaaaaaatgcaggtgaacaattacgcgttgagaatgcagctgcagcaagtggaacatggcaactcaatgccagcaagattcaatccggacgtcttctaaagctctccaagaagacaaggacacttgcagaggaggagaaggcaataaacgaaagtagagggagagagagagagagagcgatatcaaactacaaaacaaaagtgcttttgcattgtaatactgtgtagtcaggacaaacaaacattctgtttcctttccttttttttttatatatttctttggtttgctgctgttt

SEQ ID NO: 153385 - DNA, 3768 bp, Arabidopsis thaliana landsberg
  unsure (1)..(3768): unsure at all n locations
atgagaagaagtgactatattatattgaaagggaatctctcagcttatgtgcattttatttacggatccgattatgtgagttttttttacgatacttgctgttgactcatacttaagcattttttcccctgtttgattgtacactatgatacttgatgatggctttcttatatatgttatctctcactcaatctgcagagacacaaacgtttgaagaaagtatttgttgttctccacgaagaattgaaggtgagttacaaaactcccctataaaccgtagtgttggttgttcatctcccacatgcattcttactttagatgtaccgtgcatcttcatggatggatactaatgaattatgataacctcttgcagcacctgaaacaaagaatgagagactacgcatcatctcatggaaaagattgatggaaactggaaccaaaactctcctttggtggagtcatcttgttgaaacattagctctgtttttctttctttcttgtgaaattagaaatgattcataggcccaattttgtgtgagttgtacttaggaggacctttggtagattttattcttgttgcagttggtttagttggagcgctcgataaacgaatatgtacatacatgggtatcaagatcaatgtagattcttctggctctgctttaatttaactttgataagtcatcatggcattttggtcttccatgtgaagcttaacagagaaagcttaatgggtctgattggtggtgacctaaaccattaaggatgattgtacgtactaccattttctgacagcgccaccgccacggttgcataaatcgaaatcactgttgtagtcttgtagaaggtgaaaaaaaaaagtaacctaaaggaaaatctaaaacgcagtcgttttgttttcttagtttggtacaaaaactctgaaatcaaaagaaagaagaaaaaaaagtctctgttttttctctcttccctgtttttctgtgtctttctcctccgtgttccgtcgtcttctctctctgcgttccttcttgaagccggaggaagcccaaaacccttggaataaaaaacaacggcctctctgctactgattgatagaaaacaaaaatctcaaacctagagaagaaagcgacgtactgtatattctcaagactaactggatctctcgttgatcttcaataaaccctttttgcaatcagtctcataagagtctacaactcgtgggcttctatttttcttgttggggtttcaacgttttcctctgtgaagaaagagattgactttcatggagatgaacctctgctggaatttgtagattcaattagggtgttttctgggttttgtggtgcttcgataggggtttttggtgcgttggtggtgggtgatgggtagtagtgatgagcgaaactgtaaggcgattgatgcgtcggtaggaggtttggtttgggtccgacgtcgtaacggggcttggtggccgggtcggattatggctcatcacgaggttcctgacggtactattgtttctcctaaatctggtactcctattaagcttctaggtcgtgacgatgctagcgtgtgagtactttcttccatcaatttgactgatcgattaaatctctttttgcatcttgttttgatgcttagcttttttaatcattgtcaatatgatctttgctttatgaatgattagacaaggtttctgttactctttttgatctctctaacaacttattaactagttacacatttgtctctccagggattggtataatcttgaaaagtccaagagagtgaaggcgtttcgttgtggggagtatgatgcttgtattgcgacggcaaaggctactgcatcgactcctggtaagaaggctgtcaagtatgcccgtagagaatatgctattgctcatgctcttgagattgagaatgcacaccttgccaaagatcaccctccgtgtattgagaaggctnnnnnnnnnnnnnnnnnnnnnnnnnnnggtattgaggactcgggtgatgtggcagagactgaagttgcattgcaatctactatgtctttgaaaaaaaccaagaacggcaaagcttctaaggtgcagcctttgtcagaaaagagaagaagaacaccaaatgactcggaagatgatgggactcaaacaaacaaacgaatgagaggacttgaggatattggaatgggtactggatcgaaagggaaagtacaggtcggtgctctgctcgaggatacgcaggaacatggttttaaaagtgatacaaacaacatcaatgattctgtgtcaaatgggagtctttccaatggcagtagcagggattgctctccgtcaatgaaaagaaaaaggtcgcctgtcgtcattgcgaatgactactctaaaaggaaaaaccgacgacggacactgacaaaagtgttagagagtacagctacggtgtctatccctggtacctgtgacaaacttgtcaattctgattgtttgtctcttccaggggtttctgaaagcgataataactcggacagcaatgaggttttctctgagaatgtttctgaaaatattgttgaagtgatcaatgacaaggggaaagagagtgaagtctcgaacatatcagttttggcaaaggatgactcatccaatggattatttgatgttccactaaatggagatgaaaaatacccttcaggtatggctaatccttttttatacaagctctgctgattgaatgatctgttttgaagtgtttctatctttgttcaatggattatctgaggtacatttgcagtgtgtctatgtttgttcacacttctgttacttttagtggaaagagatggatgtcaccatttttaggatgagcggaaacataaaagcacggaaaaatcatcaattggatttgttacatatagattaaagggctaatgtctggaaaatttacccgggacagaatagtagtgactatttgtttgggcaatggatgcctttttttttcttttataattctgtgttcaacttagtgactagtgtatatttgagatgcatccctaattttgacttgtctatggttaattgtttctgttttgttggtcttggcgtaagatggttatcttctatcatttctttctctgcctgttaggattaaacatttgatcaattagatcggatttggtggcttcttttttctgtttgtgattagcatgacttaaactgacgcccattcttgttccaggtatttcgacggtgcctttcacatcttcttcacccaggaaggctcttgtttctggaccgacgagacggtttggtcagagtagccatgatgatgtggtgaaaagcgaaggaagtaatggatctcctagtacaagtccagcagctacacttttcaatgggattaagaagagcacttctaaatggcagctaaaagggaaaaggaattcaaggcagatgagtaaaaaacaagtagaaagaagaaatgcgtacgccgaagaagccaacaacaatgctttacctcattggtctgtctctgatcaaaagccacgcagtcttttcagcgttggcactcaagctatgggaagaaattctgaactgtatgacgtgaagatcgaggtaaaagctaactataaaccccgtaatgttccgctgatttcccttaggagtaaactgaatggtgaagctattgtcgggcatccttcagtggttcaagaacttgaagatggatcatgtggccacattgtgagtagtcatagaattgatgatgcgaagccaaaaccatcatcaa

SEQ ID NO: 153386 - DNA, 263 bp, Arabidopsis thaliana landsberg
atgggcctaacgggctttaatgggccaagctggaactcaacaaacaggtacgagatttttgattattctgattcagcgtcgagaaaaagctacgattgtgtgtttattattattgcaaccatttctctgctgtttcttcgtcgtttagcttcagaggacgacaatacggtaggcgagagagagagattaatcaatcggcgacctttttaattcgctcgtaattcgttttgattttcgtgtttttgcaacgaatttaacaactt

SEQ ID NO: 153387 - DNA, 5083 bp, Arabidopsis thaliana landsberg
actaacctattgacatttgagctttgagttctagatttctacaggggaatcatgagcaattacagtggcagttcttctgttgatcctgactacaacatggatgacacagagtcgtcatcgtcaaggcctgagagaaaacaaagagaatatgaaagcttcagaagaaaagctaagatagcccgagggaagagagcgatgacagagaggtatgagcttatagacgaagatctgaaagatgagtacatgcctgagcatactcgcagagctaccaaacttctgcacaagcctgacgtattgcctgctgaggaatatattaggctcttcaagctgaatgagttatgtagcactaggtatccttactcgaccacacttgcacaactcggattgttggaagatgttcagcacctgtaccagagttgtcatctgcacactctgatggcttatccgtatgtatcatatgaagatgagacaattcaattcctctccacgctgcaagtggagctctaccaaggtatgacctctgatgagttggattgtgaaggattgggattcttgcgattctctgtgtatggtcatgagtataggttatcaatcaagcgcttggaaggattgtttggcttccccagtggaacgggaactaagcccaagtatgatagagaagagttgaaagacttgtagatcaccattggcagctctgtaccgctgaattcttccaggtcaaagagcaatcagatacgcagccctatcatcaggtacttccagcgtgctatagccaatgtactctactcccgagagatcacagagactgttactaattctgatatggagatgatcgcaatggctctcaagggaactcttcgccaaactaagaatggcatgtctctgcaaggtgaaatcaatgacacacctttctctgtacttcttctgatccatctgtgtggatacaagagctgggccgtcagcaataaccacaagagagcacgaggcgctctgtgcataggcggtgttctgacaccgattctgatcgcttgtggagtctcaatcacttttgatggactcgagccgcgagcaatggatatggagcacctacgtcactatgaattcctggagtttgcaatggttgacgatctccacaggttcaggtttgagcactctacagacaggagagctaacatccttctccctagccctgaggtcacacggataatagagggagataacattgattttaggcctgagattggacgcctctactatgagaacgctccgccattggatgaggatgatcttcttgaagaagctgcctcggatgggatggatgaagatagggcagtgaagttcgacactagcatgtatcactttgctgaacatgtacctccagcgaggcagagcaagagcttgactgaagctcataaaaataacagtaaattgcagaagtggtgcaagaagcaggacaagctgatcgccaagtgtttcaagcttctgacagataagctgagttgctcttcctccaccactgctattccacaggtacagcctcctatggagatgccatcgaggagaattaatgcacctgcgcacatgcctgagcttagcgagcagagagtcccacatgtccaggctaggcatttgtcattcgaatcccgggaacacaagagaagaaggaaggctacactcactcgatctagcagcagatcacgcctcatttactcgaggagatcactcgaccgcggtactggccgcagcagaaggagagaggtcgagtttcctcagagcagtgctggccgccacagagctgatgaggtcgagtacccacctgctggagcgatacagaacaaggaggttcgtctatggcctgggagcaatcgcaggcagccattgacgagcaactacgttcattcttcgactgaggtaagcgcctcacttcaccattgtattataccgtctgttgtgatttgtttcttcattttttgtttctgtgattggatttgtcctgagtactctcttccaagtttattcacacagtggactgtgtgatttaagtttgggggagggctcaggaagtgtgtgttgcattgtgtatatttttgagtctgcattcatctaaggcatagaaaaaccaaaaaatttgaaaaatttcagaaaatgatttcacaaaaaaaaagagtgttcatgtagttgcatcacatttaggatcgaatctagagtgtttcatttaggattgttgcatatgcataggggatgatgatgagatagccttgtaagcattttgattcaccggataaactcagtgccctcgttgctagttgtctgttgcatagtcaatgaatttgaaaaaaaaaaaaaactgaaccatgcttagattgctctactcgaccacactgtcatgatctgataccattccctatcaatttgaacctgaatctaatctttaattatcatgtctgcatcaaatttgaactcatggataccctaaaatacttggattttcttattcattttgatcactcttgttaataaaagtagctgactctccttattagagcagttaacccaaacccaaacctagactttctttcaagccctatatcacttgtgattgtttgtgaggtcttatttcgattaagccttgtagaaagtgttaggttcgtaacgacagagatagtgtctcatgtagttctagttcgtattttttggactagataggactaggtgggcgcttatactttgggttgggatgtgtttaaaaaaaaaaaaaaagggttgattcattgataagaaaaggtaaaagactctaggtgaagtaagctaaacaagcagaaaaagtctagtaaaggttttgagatttgtaaagaaaagaaagagttcttgttagctattgaagatgggcaaaagcccttggttttaaaatgttaaaaacatgaaccttagttgttaaagaaatccaaatccgctagatgtatcaaagtgttgagaaagcttctcctagaattaagagaaaagaaaagaatgattagaaaaagggcttaaaagattcacgaatgcaaagggtagagtttagttcttgtattgggattggagatgggattactattagagcttcatttgatgtactctgggtagatgggatcttatctctgtatgcatagcttgggacttacctttagcattcaactaaagcttaatcatttttttttgagagatcccctgttactgaagcctattctgtaagggaccatctttgtctcttgaccttttaccttagccaaatgagttctttgatgatgcattgcttgattcacgttccagaactaatgaatgttaaaggggttggtagatttgaaaacttgtgcaggtcgagcatatgagtcggattgattgatgatgaggcatggctaacgtttttaagtagaattcgatcttgcagcttagaactttcaacttggacattgatttcatctggtttatctggtgctttggctctgagtccccgctttcaaacctcacctccagcttgtttttaattgtttgcttgagggcaagcaaagactaagtttgggggagttgataagtgtgcaatttacatcttttgagcatccatttgttatcactttagcatcatatcaccactgttttataccatttctcatcattttcatcactttgcatgtttatgatagttttgcatgcatgttgcatatttgtgttgttttcaggtgatttggagctgttggcgagctaattggaggaagccgacctgacgatatcaacactcgaccccctggtcgagtagatggcttcgcaacttcaacaaaccactcgaccccctggtcgagtagaaggcctcatcacttcacacgaccactcgacctcgtggtcgagtatcatcatctccaccacctgaccatcactcgatcacactactcgaccccctggtcgagtacctccatcaccttcactcgaccacccactcaattgcacggccgagtctcaccatcatcacacactcgatcgaccactctaccaccaagccaagtaccaccatctccatcactcgacttcatactcgactgccagcttcagagtcttctccattccgcactcaaccagacactcgagcacaaggaagaaaagaagactccagcttatcacttgaccattcaatactgtgtcgttttgagtattagggtttcggaatattttgctataagttgcatgtattttacattatcaaaaactaagttttattccgcagacactgtgttcttgaccttttgtaatccggatgctctcttaatctattcagtatttgcttttgatttcgtttactaagttgttcatcctgttatcatcctactattactctgtttctatcatgttttcattcttatcaacgcttatgttttctacaatgaagtctgagtagtgaataggtttctgaggatgggttagagtattttagaattctccctatgctaggtggttgagtttgattgatagatcccttctggattagttgttcttaatgcctattgctttctgatcaactggaatttgaatctagacatttccgcgcccaaaaggtgttcgatgaaatgtctcaaccactaattccagagattcgtggccctgtaccaatgtattgattgtagggagcgttttggctttaactagttgattcgtaatgcctgttaggttagctctcgtcaatggtgattgagtctgggactaggttaacttgagagtctctgttgcggtggcacttagatttggttaatgaacttgttgtctagggataatttattgagcatgtcaatcacctgtaaactgaggaaacgaaactactcaattaccccatcctcgggaattctttatctgattgattttattgtttactttactgttgtttactgcatcttgtcatctgttgtttagtttctgcaattctttactattacacgacctgatactcgaccacccagttgtctggcaacagactgtgcagtcgagtaaccctgttatacttttctgtctgttactcgacctgtcactcgaccacacccagtgctctacaaagagctgt

SEQ ID NO: 153388 - DNA, 932 bp, Arabidopsis thaliana landsberg
gttcaagctaaacatgttattagagtctgtgatttcggctactaatcgagttaaagagttattggcaaagattaacagtaatgaattgaaaaccgatactcccatctgtatcgaggatcacctcacaggtatattgagctcttctcttacagcagagctgatattctgaatttttttcttccaactgatgtatattgttttgtttttgtcttgtagctctaaacctaagatgcatagaacggttatacagtgaccatgggctcgatgtgttggatttgttaaagaagaatgcatatcttgctttaccggtaatactaacccgtttgaaacaaaagcaagaagaatgggcaaggtgtcgtactgagtttaacaaagtctgggctgacatatatacaaagaactaccacaggtcgcttgatcatcgcagtttttatttcaaacagcaggattcaaagaatctgagcacaaaaggttttttctccttacatattataagagaaaatgctcctagaaaaaatctacttatgaagttcttatgcactactatctttcactgcagcattgctggcagagataaaagagatctctgaaaagaagcgaggcgaagatgatgcacttcttgctcttgcggctggaaatagacgaactatttcttccaatatgagttttgattatccggatcctgatcttcacgaagatctgtatcagctgatcaagtattcatgtggagaaatgtgttcaacagaacagttagataaggtaatgaaggtatggacagaatttttggaaccaatatttggtgttcctatctcgccctcaaggtgccgaagaccgagaagaggctgtcaagtctacaatccccccccgaccagaccaagaagatgctgtcagtaaaaaaaaggagctagtattgcccactgactcggtcaaag

SEQ ID NO: 153389 - DNA, 711 bp, Arabidopsis thaliana landsberg
acagaacacctgagtggctaaagaaaatgttttttactatcactaagagcgagaggaatggccctgtgttccgttttttcatggatcttgatgatgcaggtgcattgacacttctctttgtaagctattttagcagtttacagtaacttagtctagatactacttgcttgtataagagccttctggttttgaataaggctgaaataatctaaaatgaattgcaatggagatcctgaaactgcaaaccagattgccaatttttgggtcctgacgtgttgtttgttttctcagtttcatatgttaaaaaactaaatattccaagtggagtggttggggcttgtcgacttgatttggcatatgagcatttcaaggtatgccttgattggaactagtatcttgttatatactacatttgaattgtacgagaggctgagttttaattgtttcattttcctcaggagaaacctcacttatttcagtttgttccaaatgagagacaggtcagtgtgacactgtgacttggatttgtttgctcctttgattaacttacttctaactgaaatgatttctgattcgcaggtgaaggctgccaacaaacttctcaagtcaatgccacagaatggtaaaacacaaaaggtggagggtgtccctgttttcggtgctcaaaacctggacattgctgttgcaactgcagatggaattaagtggtga

SEQ ID NO: 153390 - DNA, 1301 bp, Arabidopsis thaliana landsberg
ctaacgaataccatccaaaacaaaaacgtatgacacttgatcactctggttcaccacacgctcaaaagcgtcccctgtttcgacacgtgtcaaacggtccaaaacgaggtcctagacacgtttggtaagtcacttagctattttagcctcaaaagtggtccacacatcgcatcgcacacggcatagaatctccttttggatcagttgcgcttattgctggtgtgactggctagggtggagtatgagtctagacgtccagcgctcagaaggcgtttaatgggcgttggatcctattaattccagagatatctgactctaccccaagggattagctgtagagagggtattgactttaacatgttgattcgataatgcctgcttagttagagatcgctaaagggatttaggtcagtgtctagctttgcttgaggatttctatcacgagagtgaattaatctgttgttgaacttgttgtctagggatagcttctgtgaagttttgtcaaccgcctgaatagattaagtagaccacactattcgattaccacatccttaggaatcgtttatccatttgcctgttatcatttctgctttgtcattcacttgcctgctattgccatttctgcttttagtttcatttcatttctgttattgcatattaggactgttagaaccaaccaactttctgcttggcttgacttagagttttctgatcatatctcatctgtttgcatcacaccggattggattgacatcctaacatactacaacgacaagatagtgttttaggattaattgagtaaaatcctactatcaatttgtgccttcctcagttctctaaacttgtcacttttagcctacagaatgcaatcctatttatcagtgcgttaaaaaaaatcagaaagacacatgactatagaacaaaatctaaacctacacaaccttaaattatgcgctagtcttattcttcacccaatttttccatgctgcagcagattggatgttctttggtttcaaactttgtaattgtgtcttgcccatctttcgtactttagttaaaagcttggacttggaagaccgccacaaacaatccatgcgcttaaacacataatctttttgccatccatcatttaaattgaaccttgcctgtaatatttttcaaatgcaaacattactttgtaataacttaagatggaatactctataaacaaaagatgaagtaccttaatctcctcccaaagtctgtctttggtttgatcatcaagtttcctccaatcatctaggagtacaggtacatgctcc

SEQ ID NO: 153391 - DNA, 1029 bp, Arabidopsis thaliana landsberg
atgactcgagctctgctgctgcaaccgtacagagcgacggtgcgagcagcttcatctagggaaacgcaatacgacggcgttccggaggttaagttctcggatcctagccggaactatcgggtcttggtgttgggtggaacgggtcgggtcggtgggtctactgctactgctctttctaagctatgtcctgagctaaaaatcgtcgtcggtggacgcaacaggtttgcgaaaaatttcttattcaatttccatggaaatgtcgaaaaatttgaaattcattgaatatgaatcattctctgtgcgcagagagaaaggtgaagcaatggtggctaagctgggagagaattctgaattttctcaagtagatatcaatgatgctaagatgcttgagacaagtttaagaggtttgtttcactttcccaaagagcttatcattgtcaattgtcaaatatgtttgaatttctatatgaatttggacaattgttagggactaaattgacatctctaatgaatttattattttgagtactcaccgtgaaatgtgtgaatccagacgttgatcttgtagtccatgccgctggaccattccaacaagcacctcgatgcactgttcttgaagctgccataaagaccaaggtgaggataaggtaataacagtttctaatgtcaccagtcttccacacacaagctcctcgatgcattgttctcgagtcttacagagatttttatgtgtttatatttgaaacagactgcatatctcgatgtttgtgatgacacaagctatgctttccgtgcaaaatctcttgaagctgaggcaattgctgcgaatattccggcgttaacaacagctggaatatatccaggagttagcaatggtgttcaaacctgaatgctagtccctctatcttttatgcttgatattgtttgttccaatagatttaacaacatgtttgtctttcttatagtgatggcagctgaaatggtcgctgcagcaagaagcgaagataaaggaaaaccagagaaattgag

SEQ ID NO: 153392 - DNA, 693 bp, Arabidopsis thaliana landsberg
atcaactacaagggtctcgaacttgatctcggtcatgaagaggatcatgaagttacgaagatgatgagaaccaccgcaaagagcttcgacagtgattacttcatctgcccaattcaagattctgtcggaaagacagagtttcttcatcagagatctagcgtggtccccacacaactcctccagattccaataacttgggaacctttgtcccccgtggacgacaaagatcacaataagtacctggatccggatttctcggaaccagacccggaacttttgacggagtcttttccgtcgccgagaataaccttcaggaaatcgaaggaaaccgaatttgccgacatgaaaatagattcaccagcagcgaggttcactagtcctctgccgcagaacgatgagagacactctgactcagaaggagggttaggaggagagtcttatgatgagatcatgggatcagaggttgaagaaagcagtgacttgagtagcaagaaagaggttgattgggatgaaggtgaaagaacgaatctgtggaagaagggtcttaatggatttggagctatatgttcatttggtgttgcagctgctgcagccaccatatgtgtcttcttccttggacacaacagtagcatccaaggtggtcggaacaagaaccagatcctcaggttccagatttactctgatgataataag

SEQ ID NO: 153393 - DNA, 2295 bp, Arabidopsis thaliana landsberg
atgtttaggatagtttttcatgcatgttgcatatttgtgttgttttgaggtgattcaaagctgtagacgagctaattggaagaagcggacctgatcatgcaaaaccactcgacctccaggtcgagtatgacgattcacaacctaagcagaccactcgaccccctggtcgagtagaggacaccaccacttcacctcaccactcgaccacgaggtcgagtgccctcatctccatcaccagaccatcactcgatcacatcactcgaccccgaggtcgagtgccctcatctccatcatcagaccaccactcgacctcatcactccacctggaagtcgagtatcactttcaccaccactcgactacaccctcgatggcaagcttgagagtcttcttcattccgcactcaaccagacactcgagcacaaggaagaaaagaagactccagctattcactcgacctcccactcgaccacttcggtcgagtacagttcttaatccgtcccaatactttgtcgttttgagtattagggtttcggaatatttggctataagtagcatgtacttcacattttcgaagacaagaagtttttatctagttttatcccgcagaccttttgttctagaccttttgtaatccggatttctctttatctattcagtattcagtattcagcttttgttcttgatttcggttactgttattcattctgttatcatcctgctgttacactgttgctatcatgttttcaacctgttcaacgtttatgctcattgttatgatgtctcagtaatgaataggtttctgagtatgggttagagtagtgtagaattctcagtatgctaggtgattgagtattggttgatagatcccttctggattagttgttcttaatgcctattgctttctaatcaactggaatttgagcccagacatttccgcgcccaaaagatgttcgataaaatgtctgaacaactaattccagagattcgtgaccctgtaccaaggtattggttgcagggagcgttttggctttaacttgttgattcgtaatgcctgttaggttagctctcgtcaatggtgattgagtctgggactaggttaacttgagagtctctgttgcggtggcacttagatttggttaatgaacttgttgtctagggttaatttattgagcatgtcaatcacctgtaaactgaggaaacgaaactactcaattaccccatccttgggaattctttatctgattgaattctttgtttactctattgttgtttactgcatcctgttatctgtcgcttaatttctgcaattctttcttgttactcgacctcgtactcgaccacccagttgtctggcaacagactgtgcagtcgagtatctgtgttttattttctttctgttactcgacctgtcactcgacctcacccagtgctttgcaaagagctgtgttggtcgagtgttttattgtttctgcttgaatttctattttctgcatgttcacttagaactgctagaacacaccaaaacctgttattgcttggcttgacttagtgacttctgatcacatcttgattgttagtatcacacccatttggattgaaaacctaaaatactacaatgatatgattggtgttttaggataattgacttaaaaacctattatcaatttggcgccgttgccaattgggtgtttgtttgttacatttaagatttcagacttgcttagatcaagttctttttcaattttctttgcagttactaattgtgtgtttttcttgttgtcttcttgatccaggtacagctctactgtatgcgaactcgatcaacaggcaaccagaacctccttttcaacgacaacatcaaccgcacagctcgcgaactcagaaaaaggagaaccacagtcaaccctgtacctcagcaaccactcgaaatggctgacgaccagaatcaacaaaatggccctgccaacattggtgttggagatgcaccacgtgatcaccgtcatatgaagggaattgcacctcctgctatccagaacaacaattttgagattaagagtgggctcatctcgatgattcaggggaacaaattccatggtttgccaatgaaggatccactcgaccaccttgatgaattcgataggctctgcaacctaacaaagatcaatggtgtcagtgaagacggattcaagctccgtttgtttccattctccttgggagacaaagcacacatctgggagaagaatctgccccatgactcaatcaccacctgggatagcggaagccctatagactag

SEQ ID NO: 153394 - DNA, 991 bp, Arabidopsis thaliana landsberg
gtggcaacaattgcttggtttgaagctgacgctgtctgtggcagtcatcaaattgcaatcccattggttcttgttttcccctacatttgccgtcttttgcaatgtcttcgacaatacaaagatacaaaggaaaaatcatctcttttaaatggtaaaagcctaaccttctagcattaatgttaaattttcccacactatgaagaaagatgttcttttcctaccatcaatcttatagttgatctgtgattttttcagctctgaagtattctacagcagtacccgtgatcttcctttctgcacttaaatatcacgtgatgcccgagagctggacttcattttaccgaccgctctggcttttctcaagtgtcatcaactcactgtactctttctactgggatgtaactcgggattgggacttgaggtaataggttgaaactgcatcttcctatccactaagcagtatttgcatatcataatcacataacttctctctgttgtgcagcggtttcactaagatattcaagtttagccgcccaagtgccatatcaaacctattatatggccgacaatgggtgagattcagtttccaatgcaaccaccataatgttctcttcgtattgtaatgtctgaaactgtcaagtattacgatgatgcaggtatatttctgggtgatagggagcaatctggtgctaagatgcgcgtggacatacaaattatcagcacatttgaggcacaactacataacagtgttcacaatgacagcgatggagatgttgagacgatttcaatgggtatttttcagagtagagaatgagtggaacaagatcactaaatcacatccaatgggtgagatttcacttgaagaagataaactacttggttctactacacctcacgatgtttagcatccaactatttttgattatttcctctaatcctacgcaaaattcttggtttttttcctattggtccactcggactctagacactt

SEQ ID NO: 153395 - DNA, 1210 bp, Arabidopsis thaliana landsberg
gctcccagagtctttacctttgcttcatgacaaagtccttgcagcagctgctgacgctacctttagccatatctctgttcataagaaaaatcatgtatgttctgctttcacatgtgaaccctttttttgtaagctccactgttttgctagaaaagtttctgtgaccacaggatggcgctcccaaattcctaagtaacattatcaaaggcttcagatcaagcactgaacagaagatggaccaagtacaagatttctcccacctggggaacatcttttctaatccaccatacttaaaaccttctgataccggtggcgacgacgaaaagattgttgagctaaacataggtttgtaatatctacactaagttactcctccccgggttcctgcctctgactaaaaattgttttctgtagatgacatcgagatagatgaacctgtgatcatcttgccgttgccagagaaagccaaaaaagaaaagaaaggtaaaagatctgtacgcctcaagttctagtatcattgtgaatgcatgagacgattcatgaggtttctttgcagataagagaacggataaggaaaagctgttcgacggtgcatccagcgatgcacaacccaaaacaagaacagtggatgaaattaagtccaaatacagaaaagctggggtgagtcatgaccaatttgatatacccaactagcttcttttttgtgcttccatctctaacatagttgggtaatttttccaggaaacctcagcaatagcttcacaagcgaaggacaaacttcatgagcggggagaaaaactcgaggtcatatattacgctgcagagatttcatcttcatttatgtttccaagctatgtatgctaactacaaaaacatctcctttctttgttttatctgccagagaatcagccaacgcacagctgagcttcaagacaatgctgagaactttgcatccatggcacatgaacttgctaagcaaatggagaagcgaaaatggtggaacatatgagagagttgcagccattgtgggctcttccgtatataaactaattatcttttgtgtttccacaggtgaaaatttctttttcacgtttatttatcaatcaaatctgtaaaatagattgaccaaagagagcaacccttctaacttgaaaagttgcttgtgagctgatttgaggctgctttgactgtctatcagaattttaaattt

SEQ ID NO: 153396 - DNA, 720 bp, Arabidopsis thaliana landsberg
atgaaattgaaaaaggcaacggagcgggaatccatggatcatcctgtcgggtcgggttccggatacaaaaccgggtcggatcctaattattttatcttcatgtgggccctcgaatttaattatgagtctccgtcggctggtgaataaatacgacgaagacgtggccgaatctaaatggttggaagatccttgaacctaccgaatcatctttgatttttttttccccaagcttttggccactctaatggcttcgccggccaatcatttgatctgacgaaagagagagaaagaagcagaaaagctttgagatggcgatgccgctgggcatggcgatgtatctgatgagaatggtttggttttctctgagtggttgggttttcacttgcgtggctatcgctgatgagatcgctggttctctgagaaacggagatattggtcctttccacgtcggatgattaaattcgagatccttagctctccttctgtgagtatatgttcttctcttccccaaattgttacgttttttttttgttttgctctgttgttttagattagagtcgcttcgaatttcctaacgaactctggaattgataatagtttgagtttatagaggataaagatagttcattttggtcgaaaagggaacaatttttggtggaagtgtttgatatatgtttcagtcactcagtgtgtgtatgtgtaactaaagtttgggttgta

SEQ ID NO: 153397 - DNA, 951 bp, Arabidopsis thaliana landsberg
  unsure (1)..(951): unsure at all n locations
gtaagtaaaccagcagtgaagacaagagcgtttcaggaggcatgtgtttatacagtagtggaggagcttgtggagcatttgtctcagtggagttgttccgttgctttctttgaactatcatttatcccgaccataaggctgcgtagcttttgcaaatccacgaaagctgagaggtttaggaaagaaatgaagcaactcatcagccaggtaataaagagaaaaaaagagaaatgcggttttactttatgtctcttgtacttgcaataaaagaaccgactttattgacttgtgtgttgatgactccttcaatctctcttttgcttttcagattgaagctaactcagaatttgtcaacaaaaagagagctttgattaagtttctacccaatgatcttgctgctgaatcattccttgaggtttagtaactcatttctcttgatccatttgattttttcaattgttagtgatgataatacaaaacctatatttgtttctttcttcccgtctttgaaactactgctgcattcttcgaaaattttgtgggataccacaagttgtttatgattacagaacacatgtttactccaaaatgattgcaaacatggtttcaaattattttttgggtcttctctgttcaggatgagaagaaagcaggaaaaacccctctattgcaatatgcggaaattatccgccaaagagcccagcaaagaaacgaatcgctggtggaatctgagtgcgttacattcctctaaagttgatcacttgtatatttttgttgtatgactttgacggatactaatannnnnnnnnnnnnnnnnnntgtaattgtgggagagaactcagctgtctttgggaaaaacgcaccaagcagtgatgatgaagatgatgaagataggatggaaaagggtgctgcagctttcaattcttcttggttaccgggaagtgactccaa

SEQ ID NO: 153398 - DNA, 265 bp, Arabidopsis thaliana landsberg
ctatttggtacgcgttgttaacaaggcaagtaagagcatgtccattgcagggaccttgcaagtttttaaagaaaatccttatgaataaaagcaaaaaattaaatcagaatagtgaaataaaccaaggtgtgaaccttgtttaaggtatttttgggtatattaggtgcgctgacgtggctgtatcttattggatgacaataaaacaagttttgtttcttttcccgtattttttttctttgcctattcccaaactatttttttcttt

SEQ ID NO: 153399 - DNA, 740 bp, Arabidopsis thaliana landsberg
cactaatgtttagatttacaagagcatcaagattagctaatattcgataaatggatttgttggtcattcaatctggatatactttgatgaactccctgacacggagatacaagtgcaatccgccttatatgattctgtcgtttaacgagagaaagctgaaagcatacatcttgtgacttgaaactcgttccagttgctaattaaagtttttgttgtctatggtcccaggtttatcatgggcttcttgttcggtgggatcccttggtacctcggtgcttttattgttctagtcacatctgttgatcaccgcgagaaagctggttacgttgcctgttcaatcgcagtgagttcctctctctcattacattgtcgtagaacaacggcattggtcactcatctatattcatcattgtctctcataatttctttttctttttatgaattcttccagtccgttatctatttgattgccgtcatgctcgggatgactggggatattaacatctggtgaaactactccccagccaaaaccaaactcaatcttgtatatatatctacatatatactcgaaaacgtagatatatatcaatatcatttacaccagttattgctgattttagtgagttacagaagggaaatatttgtaactttgtgttgaattttatatcataactaaatattgtatatatgtggttgattcccttggtggcatatctatctatatgtaaaatattttgtga

SEQ ID NO: 153400 - DNA, 1118 bp, Arabidopsis thaliana landsberg
gcgccttctagaaggctacctccgccgttgtctcagggcggcaggactgacgtcgcagacgctttccatagactctgaaacaaccatccacttctggggcccaccacctctagaccaccggagcgacgatgacagaccggttatgcttctcctccacggcttcggtccgtcgtccatgtggcagtggcggcgacagatgcaagccttctctccctccgctttcagggtttattctcccgatcttgtcttcttcggcgactctacctcttcctccaccaatcgcaccgaagtcttccaggttttataaacctatgtctctatctctctatttattataagtatatgtttgattccacaattttcccattagatttaccgatgatattattgtttttttaaaacgaaacagaattgagaatgattacgaacgctagcatcatgactcggtgaaaaacaaatcagataaagaaccaaagagcaaaaatatttcagaaatttgtttgttaatttggatttagaataaagtatagtataagaatttcttacaagaaaaagctactatatatatatatatatatgttccttttttgttaaatatataatcatctgatttccttgctacaatgctactacatatttttaatatctgaatctcaaaactgtgatcagtatattatgatcaatccttcatgctctctagaaagtatctcaaaagtgaaataagcgatagtcgtgtttaaataaaatatgttttgaactctttttagtattaaaacatatacgtaatataaaacaattaggcggaatgtatggcaaagctaatggcgaaaataggaatagggaagtataatgtggctggaacaagctacggggggtttgttgcgtaccacatggccaaaatgtggccggaaaaagtggagaaagtggtgattgcaagctccggcatcaacatgcgaaagtgtgacggtgaaagtttattgcaaagatccaattgtgagtgcatcgagaaggttatgttaccatccactgcaactgagtttcgcacacttatggctttggcatcttcatggcggttagttcgtatgtttcctgatgctctctggaacgacgtaatcaat

SEQ ID NO: 153401 - DNA, 976 bp, Arabidopsis thaliana landsberg
gagcaaggtgatttgaagcttagggtccgagcgctagagtctgagagggcatttcaacgcgttgcagctgttcaaaaaacagtaggaagtgtaagtagagctttccattctcatgtcttttttacatcaaaatctcttcaagtcgttctttgaaagcatttcatgttttctgttttgtgtgttaaagttggtttcttttcctctttttgttaaacccattgtgtttctctacaggctgttgctcaggaagtttagtcaatctcgcaacaattttgtatctgaattctataaaagtaagttggtactcttgttctttttttttcacctataaacctctttgtctgctcaaattcaccaacgttcttgtttctttgtgttctcagacacctgcaactatagcatatacagtatgtgctttcttcagcctccaagttctaatcggaatcataaaggttaagaagttcgatcaacgggaaaaactaatcactggaacagcttaagaacttgcttggtatgtcatgatttatcacctcttgatgtttacaagttacattatcagactcaaattctcacactcattttttggcttaatttgtacagaagaaatgtattaaagcttcttcaatctccataaacccttttgtgcatttcacaggagtgttaacaatttcactggtctgcaaataaaattatcttatggaagcttgagaggcaagagatggtcaactagtcaaaccaccaccactctctcatctctgtcttcttaaagttcgataataatttttggagaggagactctggttgttcatcaacagagtggtcatgagccacatgtattgcttgtgtatagagagatttagaaattaggaactttttcgtataaatatactcattgtactcagctactcactagactcatctctgttttagtaatattttgaatactgtatctcaaataaattaatcttatcaaata

SEQ ID NO: 153402 - DNA, 574 bp, Arabidopsis thaliana landsberg
aacaacgagacaatcgacggttacggcggcgtaaaccttatcggacgaatgaagatctgtcgctctccttcctccgtcgtactctctctattcatccaagtccttactctagccgtcgctctcgatccttcgcagccagacgaatccaacatcaccgcaacaccgattctacaggtaaatcaaatcaaatcaatcttcttctctggtgtttgatcgtctgaccaattggcattcgctactttaggatgtgctgaaggagatatcggtgaagcagaagtggaatctagaggaagttagattttcgaaattggaagttaagaagattcgtattggtacgagtcggagatttgagatccggatccgattagggaagagcagattcgtattcatcttcccagatgaaataacagattggagaagaagcggcgggggtagtgatgttgagttgcaggaactagttcgggaagttaattcgagtaaggttcttgatccgccgcttgtattgaaaggtccatttgagctacttgtcgatggcaatgatcgtctctcgctttcgttaccggtaaaaatgttc

SEQ ID NO: 153403 - DNA, 1471 bp, Arabidopsis thaliana landsberg
  unsure (1)..(1471): unsure at all n locations
atgcgttaagagacgatagaacatcncaggtgtgttttattagcagcaatattgtcctaagagattgaatcagtcataaagttgtcaactttctagtcctcttgtttaatgcgattgggttccttgcatttttagttgactctggagaggaggcagtttgatgaattggtttcatctcgagaagatgagaaatttgaacagcaacttcttcactctactggtttatggaatttgtaatgtctcttcctctcttaaacccaccagtttcagttttcatacaaccttttgagttttctgaatgatgtagcctttcttttgtttgcagattaatatctcctttaacatctgaaacgaaattgccggcagttgtgtctcctttagctgatgcagagctttgtgatgtggttgcactagctcagaaggctttatcagcttcaaaacaagctgcattgttagttgatgacactgaagcaaatccatctgacaacaccaaggattctctctccactaggttgctttttttaaccttgtttgtgtatcttatcaatctgctacttgtgggctgtaatgtgaaaagatttgtatttctggatgtttggttttagctcttctatgtccttaccggaaaagggaaacatagtaagatcgaagcggcagctagagagacgagcaaagaacagacgggctccaaaatcaaacgatgtggacgatgagggttatgttcctcagaaaactagtgcgaagaaaaagtataaacaaggggctgataatgatgatgcgcttcagctcttcttgtggggacctgagacaaaacaacttctgactgctaaagaagaagctgagctgatatcacatatacaggttcatgctttccttattcatgtgtccttggacttccttcttgtccctggtgctaacttccataatctttgatctatcagcatttattaaagttggagaaggtaaagactaaacttgaatctcaaaacggctgcgaaccaacaataggcgagtgggctgaagctatggggataagttcccctgtcttaaaatctgatatccaccgagggagaagcagccgggaaaagttgattacagcaaacctacgtctggtagtccatatagctaaacaatatcagaatcgtggactcaactttcaggacttattgcaggttagcttcaaatgaacccattgtttttgtgtaggcacaaaaggtttcttgtaaaaatatctcgagctcttcagtattttttggtgtgggatagagtgatctaacttgatgtccatttctcttgatgcttcttcttatgcttatctaatggttcgtaggaaggaagcatggggctaatgaaaagtgtagaaaaattcaaaccgcaatccggatgcagattcgctacttacgcttactggtggattcgacaatccataagaaagtctatatttcaaaactccagaacaatccgtttaccg

SEQ ID NO: 153404 - DNA, 3283 bp, Arabidopsis thaliana landsberg
  unsure (1)..(3283): unsure at all n locations
gagagagcagcacaagagagcatagaaggaccgattggggattagttagcgtgaaaggagatcctagtagcagctatggatagagaatggggttccaagcctggtagtggaggcgccgcctccggccaaaacgaggccatagatcgccgtgagcgtctccgtcgtcttgctcttgaaaccatagaccttgctaaagatccctatttcatgcgaaatcatcttggaaggtatgttattggatttatgtatgctttgttgcacgagtaagtagcagattcaattgttggatgatcaacctgagatttatgaatactgtgattntaccaacttcatctacatttttgctccgttttgagtttgattattcatatgtgttatagctcttgagtttgttttgctgttgtttctagaattagtttttttttttcccctcatgccactaatttgatttttggtgtgtttttatgttgtgcagctatgagtgtaaactatgtctaacgctgcataacaatgaaggaaactacttggcacatactcaaggtaagaggcatcagacaaacttggcaaagagagctgctcgagaggctaaggacgctcctactaagccgcagccacttaagcgcaatgtctcagttcgcagaacaggtaataagttgttttatgtttacttagttttttgtaattataatacagctttattcccattgttgatatcaaatctgcctaggcctggaattggatataatgggaaagtgattgtctagaagtactagcaaaattgtatatctttgctcttgagtacatagattttacttaattgattgatttaaagggtctcttaataactccattttatgtatggtcttgcagttaaaattggtagaccagggtaccgggttacaaaacagtatgatcccgagctgcaacaaagatctcttctgttccaggtaagcatctaattgttattgttgaacttcaatgatcatcattagagacttagccagagtaaaatctcactgtgtctgtttactcctcaaacattgttttacagattgaatatcctgagatagaggacaacataaagccaagacatcgtttcatgtcatcttatgagcaggtgagtgttacaactccttgtctatgtatctcataaaaaatttcttttccttcatactgaatagttttcttccttttttttgtgtgcagaaagttcaaccgtatgacaagagctatcaataccttctatttgcagctgaaccatatgaaatcatagctttcaaggtatgtgttttttttttcttttattcgtgacatatttacattctagaagtcatctgggattatagctctagtagcccaacatatcttggtcgaattgtttactgatattgatggttgtgttttcgcattggtttcaggttcctagcacagaggttgataaatcaaccccaaagtttttctctcactgggatccagactccaagatgtttacagtaagtgcttctcatcataattctcataaagccataagcttagtttgttttccgagattggatatgttttgtgtttggattaatcaaaatactgacaaaggatgtaataaaacagctgcaggtgtatttcaagcctaccaagccagaaccaaacaagcctcagtcagctgttggagcaaatggtcttccaccgccaccaccacccccgcctcatcaagctcaaccgccaccaccactccatctggtttattcccaccgccaccacctccaatggctaacaatggttttaggcccatgccaccagctggaggtttcggacatcctaacatgtgaaagagaatccagcgaagcagtttaaaaacacagtactctgatcatggtttactaagagagacttgctctttgactgaaaaacaaatctgttctgacatctctacggatgtattatctctctagataccttctttgagtttcttctatctgcttctcgtatgtaccattttgacaagattgttttccgttaatagtacaattagcgttggcgaaacaaaattcatttgttatatatcggttaactcttaaccaagttttaaccgaatctatggtcctatgaccggccatggatatttcatatttaaattatttctaacgatgatcaaagtggagtataccacgtcactcacctttcgacgggggtaataatgtatttacacattatcatcagtgtctctgaaattcaaaagagtaaagaagagggaaaatcaaaatattaaaatccctaattcccaaattactttgaattctctcggatccacaaagctccggtgaacccaacaaacgcattttctctcattgagtttatacaagcggagaagttctgtcatggatgaatccttaactccaaaccctaagcaaaagccagcttcaacgacgactcgaatccaggctccgacgagtcccttcttcttgggatctaacgatgacagattggaacgggaacaagctcgcgccgctagagccgctgctagccgtcgtaggtctgtcattttcgctcgtgggtctcagcctgagacggagtccgatccgtgtttcgacaaacagcaaattctcgagttgtttcagaactgtatcaaattagccagtgaaaacgtaagcaactactttcttctggcttttttttcccccataattatagcaagtgaaaaaggaaaattcgtggctaaaagtccttgtctttgaccttggtcttgggtaaatatgcttctgatgagatttacaagtagctttttaatcactataatctttgtttagatttgcaatttcttacggattttgaagatctgatttttgtcatgtatacttggaattgatgatgcgaacccatatgagtgggactggtgaagttttttctaatgtggtttttgtgttaaacagaaaatcaatcaaaagaatacgtgggagttgaatttgatcgaccatctttgtgagattatcaaagttgaagatgagaacaatacagaaacaaattttcaaaaggtaagctttcgatttcattcttctttgtcttttttaaaatgctgttaagacgtttgagaatacacaaaaacataaaactgaaagaaaaaatgagttcagataatgtttaagacatatatgtgttcgtccaagtcaggcaagttgcactcttgaagctggagttaagatttactcaatgcgggtagactcagttcattcagaggcatacaaggtcttgggtggaattacccgagctggccaagatgacggtggag

SEQ ID NO: 153405 - DNA, 1742 bp, Arabidopsis thaliana landsberg
atgggtggtatcgatcattacaacagaatgatcaatgatattctcaaaagaggtaataattaaattttcttgagaatatttctcaagaccaagataagaaaaaaaacaatacttagcacaatcattctcaggaatcgagccatttgtcacgttgacacattacgacattcctcaagaactcgaatatagatacggaagttggctaaacccccaaatccggtacgtagatacacacacacaacacatatgtacaagtagacacatacagtacaatgatacactgaaattaagataattgttggtctcagggaagattttgaacattacgcaaatatttgcttccgacactttggggacagagttaaattctggtctacgttcaacgaaccaaacgttcaagtgattttgggttaccggacaggaacttacccgccttcacgttgttccaagacttttggaaactgctcctgtggcgattcttacatagagccactcgtagccgctcacaacattatccgttcacatgtagccgccgtcaacttataccgtacaaaatttcaggtatatcaatattgttaccgtgtgtgacaaaaaaaaaaaaaaaaaaaatcaatattgttaccgtgtactagatatttcaaaactcttttaatttaagattggtttcgtttaggaacaacaaagaggacagatcggtattgttatgaacacaatctggtttgaaccgattagtgattctttagcagatagattagctgctgacagagctcaagctttctatttgacttggtaagctggattggttttcaaaatattgttcccaccttagcgccattaccggggttttgatatcgaaagagtgcgaaaaatgcaggttcttggatccggttgtgtttggaagatatccaagagaaatgcgagaaattcttggcgatgatcttcctgaattcacgaaggatgatcttaaaagctccaagaatgcattagacttcattgggattaatcagtacacaagcagatacgcgaaagattgtctgcattccgtatgtgaaccgggcaaaggaggttcgagagctgaaggttttgtctatgcaaacgccctcaaagacggtttacatttaggagaaccagtaggtagaccaaccaatcgaaagtaaaactgtttagaaacatttctgaggtgtttgattatggtaatgatgcagactggagtaaattggctttctgtttatccacaaggaatggaggagatgttgatgtatgcaacagagcgatacaaaaacattccattgtatgtaacagaaaacggtaagcacgtcggcactcgtctttgtctctgcaatttctgcgacagtttttgatctcatcaattttgcaggttttggtgagaacaataccggagtattgttaaacgattaccagagagtgaagttcatgagcaactacttagatgcactcaaaagagcaatgaggtaattatgcttcaacttcagaaaaaactcatatatgtctcgattctaaaccctaaagctacttgtgcaaataggaaaggagcagatgtaagaggatacttcgcctggtctttactagacaacttcgagtggatatccggttataccataaggttcggtatgtaccatgtcgatttcagtactcaagagagaacccgagactgtcagcttcttggtacaaaaacttcatcttccagcacagagctctatcaaaagatgattggtgcctga

SEQ ID NO: 153406 - DNA, 747 bp, Arabidopsis thaliana landsberg
aacgtgtccttggaggccccggctatgcacatcggtatcccggtatgcaaccaccataacttccagggtggtgctggtaaccgttaatcagcgaaatctagcccgttaatcgatccgcgtcttttgtcccagtcagaacttcgcgctctctctcagtgttcttctctatctccatcttattcagggtctctcgccgcttccgccggtgcagtcgtcgattagacaccagagatcgatcgcacagttttcaatgagtccgctggtagccggaaacagacatttctcggtctccgccttgcgcgccaccctcaaccaccggaggaacctctttcgccgcaacgtcagagagacgattcttcccgtgaagaacaaacgcaagtcgcgtcgcttctcagatctctgttcaatgtcgattcgaatcagagtaaagaggaagaagacgaaggagaggaagagctcgaagataacgaaggtcagatccattataacagctatgtttatcagagacctaatcttgattcgattcagaacgttctgattcagggaacctccgggaataaaataaagaggaagcgtggacggccgaggaagattcggaaccctagcgaagagaatgaggttttggatttaactggtgaagcatctacgtatgtgtttgtagataaaaccagtcgcaatttgggaatggtgagtagagagaatagaacaggaatctccctggattcaaattcagtgaagagaaaggga

SEQ ID NO: 153407 - DNA, 555 bp, Arabidopsis thaliana landsberg
atcagcattcttccagattgtagaaacgttgtttcaacactgcgaccgtaagtaatgactcagtagttgctgttttgtaggaaagcctttagttgcatcatgttgaagctaatatgaagttgttggacaggttgctgcaaagacatcacatgtgcaaatggtgccatctggttccatattgtactcggttgctagatacgatgaagatattgctacttatggaaaccgtgggacaatcacagctcgtggattgttggagcaggttaatgttacacgagatacaactgattacctgtggtacacaaccaggtacattttgaatatccaatagtaacattatctttgcttctcaagcatgatttgttcttggaaaatgaatcggtgtttccggggtttgcagtgtggatattaaggcatcagaatcattcttgcgtggaggaaaatggccaactcttacagtggattctgcagggcatgctgttcatgtgtttgtcaatggacatttttacggtatgatacattcttttgctaactcactcctaagaaaacagctgt

SEQ ID NO: 153408 - DNA, 434 bp, Arabidopsis thaliana landsberg
tacgggattggtgaggaaggagtctagagaccaaggaagtgtccaagcttcttctaatggagaagatgagctcaggtgggacaggaacaccagagaccatgtacttgtagattagggcttgatgttccagttcttcccattgtgttggtgtaaatggaggccttcctattgttctcccgctacttccacttagactcatcatcttattctctagctttcttcagatagtttatatatgtagcaaattcagaagcataaaagaaggaagagaaagagctttcttgatggattcagagattagggctcctgagtttcggacagagacagacaaagatgaccactttctctgtcactcttttcctctggtttgatatctctctctctctctctctctctctttctaagcatatattcctcagatgcaaattgcatga

SEQ ID NO: 153409 - DNA, 1630 bp, Arabidopsis thaliana landsberg
atgggagactcttcgagttcaacctcttggagcagtaaaaaggatacggaagatgatcggatgattgcttttatgttatctgaagagtactctaaactagacggtgcggtcggcagacgcctctcaaatcttgctcccgtccctgtaagttttgtttgagtcccgaatgaaacctttgtacatgcttagttctctccctggatacctatatttgctcttgggttgcagcatgttccacgaataaattgttatattcccaacttaaatgatgccaccttggatcaccaacgccttcttcaaaggtatttctgatgctctcttccctttgctcaatatatatatctaggacgctcactattgttgtgaatatgttagtgtaatcattgtatagtgtttgttcctagaaagacaaactgagagtaataccgtatgaggctttctttcagatgttgattgttaattcttaagtttaattgtctatgtaggttaaatgtttacggtttgtgtgagttgaaggtctctggtgatggaaactgccaggtgaatggaggttacatttgaaacaatcttcttcatctcattctgttctctctctccccctctactcggtttttgatatcttattgtgaattgtgagtgtcttttcagttccgagccctttctgaccagttataccgatctccagagtaccacaagcaagtgaggagagaagttgttaaacaggtgaagtgtcttatgagttctgaccgatgaacaaaggcagccatctactatatgatcgtgttttatgttcattattaatccattgtagcagttggacttattcttatatctgtttgaaagttaggtgctcacatctctcttcgtatctcattttcctagttgttcttttttcttcttattgcagctcaaagagtgtcgttctatgtatgaaagttatgttccgatgaaatacaaacgatattacaagaagatgggaaagtatgttttgcaaacagattcttttctcattacgcatataagctacactttgtttgtttgagaatgttctgtttcatactcataattacttaaatgacagatttggagaatggggagaccatattaccctacaagctgcggcagatagggtaagtttccttaaataatgatctttgctttgttctcatatcacctgatggctattatagttctcaagaagacaaaattgtgattcttttccatttggatgtttacataacatagattaacacttcacatttcctgagaggccatgtaacttaaccacatacagactaggactagtgcttatgagaaatagccagtaattttcctttcttttctaacaaaatttcctttgcatctttctttgttcagtttgcagcaaagatatgctggctgacatcctttagagacacttgtttcattgaaattatacctcaataccaagcacctaagggtggtgagactacaaaaaaaaagtttcctttcactttcgcatatcgctttttgatatgaagtgacatctgacaaatacagttttacaagttgtgactctttatgtttgctattgtgcagcgctatggttaagtttctggtcagaggtgcattataactctgtatacgatat

SEQ ID NO: 153410 - DNA, 681 bp, Arabidopsis thaliana landsberg
atggagattttcaggtaattggtaaaaaaatatagtcatctaaattgcgtaagaatagagagaaaaagttaaactctcgcctgttcctggatgtcagctaccatcaaggtttagggaagtgggtggagattggaaactctgggatgttcagacccgaaatgcttctaccgatgggtctccccgaggatgttagagtcatcgcttggggtctctctcttgaaaggtacgagtttttaattcccttcaacatctcagggtcgctgctgattctttcttgctttttgttcgtaaaacagaccaacaatgatattatacggtatcgacaacatccgagatttgtttggacacaaggtatgcacaaaatcttcacttatcaagaaaactttgtgtaaacatttctttgttctgttggaaatatatatattcaatcaatgtgtcattattttgtcgcaggtggatctcgatcttattaaacggaatccgatctgccgagttggaatatgagtgatatattttgatttatctttttgattcaagatacttaatttgattatctcttggtattttcaattctacctttggttattggacttgacaattccatcttaaacatgtgtatactcttaattgcaatctggcttgtcaaatttaattttcacttagcatttggttttgtatggt

SEQ ID NO: 153411 - DNA, 1180 bp, Arabidopsis thaliana landsberg
  unsure (1)..(1180): unsure at all n locations
aaacataacttgtttcaggttttagattcttgcactcttggaggttgagcttagttcgacatgaaggtctttatctaatctccactcgctggcaatgaagatgagagtggaaaccgcacttgcgatccttttggttctcatatcaattcaacaatgttatggaggttagtttctactcagcaacatatataaaaacatggtgtgagtttcatttaaattgatgacgtttctttgttaggtgtaagcaactatacatgtacgtgtttctcttcgggcaatcgaagtgatatcctggaatctaactgttccacatcatgtaattgcagaccaggttcgttttctctttaccaactagaaaattttcaatattctagagaaaactaactttttgactctctcttttgttagcagacagagatcaatgggtatgtttgtgtcctgcaaatggatttccggttatagccattggtggttcaaattcgtcatgcttcacttcatgcaactgctctgctggtatagtttactatatccattgttctactgcaaacttagtcgattatatcataagttggtctacttacttgtttccaggtgctacaaaatcttcaaagaannnnnnnnnnnnnnnnnnactcgctatagttatactactcttctgcggtgtactcatttcactagcattccttgcctttatgatttgttacatttgtagaaaggacaagttttctggacaaaccccttcagtctcttcagatagagaatctagctggcatagctctgctaacttaataaaccgtaaaagctcggtttcacaatcgaaaattagcatcagctcctcagtggcaggtcaatcatttttaccctcttactttctttgagttgatacgttaaacagaagaggaaataagaacttgtttttgttttgttttcttcaggttgcttctttcagaatgcttctttgttttgtgtgagcaaacctgaaacaatccatggagctatctttcagttctcatacacagaattagagcaagcaaccaataaattctcaagtaacagtgtaataggacatggaggaagtagttgtgtttaccgtggacagctcaaagacggtaaaaccgctgcgatcaaacgtctaaatacccctaaaggagacgacactgacactctattctcaacagag

SEQ ID NO: 153412 - DNA, 95 bp, Arabidopsis thaliana landsberg
atgtttgcaggaaattaacaagagcgatggctatgcacagacgaaaatggatcctaaggagattgtggaggttttcaagaaaaaattcatggtaa

SEQ ID NO: 153413 - DNA, 395 bp, Arabidopsis thaliana landsberg
aaaggaatcaactcacagcccataaaggaagaatgggagcacgaccggtgacgataagccaaacccagccatagccgacaaggttctggacagagccgacgagaagagcggcccagagaggcaagatctcggagagagtaccagcgaggaagccgacactatcgccgagatctttggcgacaccgagcctggagagctgtttctggttgtagttgagggagctcttgatgacaggagagatgctgccgaacaagtaaccgatgccagcgcaagactgaatccacatggccgcaacaaacactagccatctattgtttatgaacgatttcactctttctcgcgtcgtcctcgccattttttcgatttctttgtacgatcaaccttgtatttctttc

SEQ ID NO: 153414 - DNA, 344 bp, Arabidopsis thaliana landsberg
ggtggagatatttctcggaagaagaagcttcttaagaaacaggtatatctctctataagggcgaaatcttgatttcatgattgtatcttcagcggtttctgtgttccttaaaatgagtttttgttttgaacaggcggcaggtaagaagagaatgaaagccataggtagagttgatgtccctcaagaagctttcatggccgttctcaaacttgaacgagaagtattgtgacatcttgtgggtttctccactgagtcactcaagattcactacatcatattttattttatcattttgtaatattctgcaaactaatttcacataatgcaattatttttcgcatttc

SEQ ID NO: 153415 - DNA, 4490 bp, Arabidopsis thaliana landsberg
  unsure (1)..(4490): unsure at all n locations
ctgagaaatctgtttcgggtaatctttgtcgatgtactggttatcgtcccattgtcgatgcttgtaagagttttgcttctgatgttgatattgaggacttagggttaaattccttttggaaaaaaggagaaagcaaagaggttatgttgaagaatttgcctccttataaccccaaagaccatcttgtaacattccctgagttcttgaagaagaaagagaaggttgataatggttcggatcatttgaagtatcgttggaccactccttttagtgtggctgagcttcataacataatggaagcagctaactctggagactcgttgaagttagttgtaggcaacacgggtacaggttactataaagatgaggaacggtttgatagatatattgatatcagtaacattccggagatgtcaatgatcaagaaagatgagaaaggaattgaaataggagcagctgttactatatcgaatgctattgatgctttggagaaggaaagcaaatcttcttatgttttcaagaaaatggccactcatatggagaaaattggcaaccgttctatccgaaactcgggtagtattggtggtaatctagtgatggcacagagcagaaagtttccttctgatgttaccactttgttgctcgctgtagatgcctcggtgtatatgttaaatggtaggaaaaccgagaaggttacgctacaggagtttcttgaattgtctccggtgttagactccaaacgcgttcttttaaaggttgagattccatcatggactgctccttctggtgatgacactgaatttctctttgaaagctatcgagccgcacctcgttctattggaaatgcattgccttacttgaacgctgctttcttggcgctagtgtctcgccaagaagcatcaagaaaaggtgtaacggtagaaaaatgcttcctggcatttggttcttatggcggggatcattcgatcagggcgatagaagtggagactttcttgacaggtaaattacttagctacagtgttctatatgaagcttttggtttacttaaaggaatcatagtccctggcaaagacaccttgcactcggaatatagaaaaagcttggctgttggatatctttttgagtttttttacccactgatcgagagtggccatagaatatgtagtcttgattcagggaataagcataacaacagccatgttgataccgtaaaatctcttcccttcctctcatcttcacagcaagtattagagagcaatgaatttaaacctattggtgaagcagttatcaaagttggagctgccttacaagcttctggttagttcttatgccgtctgttttcatcatttttagtaacttgatatcggttcaagccacgggtaaagattcaatatagggccttacatgagctttctttttcaggtgaggcggtttttgttgatgatataccgactntaccagactgtcttcatggagcattcatttatagcacagagcctttggctaagataaaaagcttaagcttcagagagaatgtaactcctactggagtttttgctgttcttactttcaaggatattccacaacaaggacaaaacattggttccaagaccctttttggaccaggacctttatttgcagatgaactaactcgatgtgcaggtcaaagaattgctcttgtggtaactccagtttcctcttcttttttaattcttgctcgtatttcgttgcgtatctagagaagtatatggcttttgcaggttgcagacacacagaaacatgcagacatggctgcaaaacttgcagtagttgagtatgatacaaagaatttagaacaaccgatattaactgtcgaagatgcagttaaaagatctagctttttcgaggttcatccgatgttttaccccgaaccagtaggtgatgttataaaaggaatggaagaagctgagcgaaagataatctcctctgaggtatctcaaaactgtttccagattttcaccgccaaagttgtgtagtgacatctcattttgtgtgtttgaaacttggttatttattcagttgaggctagggtcacagtacttcttctatatggagccacaaacagcacttgccttgccagacgaagacaattgtgtcaaggtatttagttcatctcaagcacctgagtacgtacattcggttattgctacatgtcttggcattcaagagcataacgtgagagtcatcactagaagagttggtggtggctttggtggtaaagctgtaaagtcaatgcctgtaagtatttaccataattggtttctttactggcttcttgcacgaatcaagatcgtgaatgctcattaaaattgatgtttcaggttgcaaccgcatgcgcactaggcgcatacaagttgcaacgtcctgttaagatgtttttgaaccgcaagacggatatgataatggctggaggaagacatccgatgaagataaattacaatgtgggatttagatcagatgggaagctcacagcactggagcttacaatgcttatagatgcagggcttgagccagacgtaagtccaatcatgccgcggaatataatgggtccgctgaggaagtatgactggggagctttgtcatttgatgtaaaagtgtgtaagacgaattgtctgagtagaacagcgatgagagctcccggggaagttcaaggttcttacatagcggaatccattatcgagaatgtagcttcttctcttcaaatggatgttgatgcagtgagaaaaataaaccttcatacttatgatagccttagaaaattctacaatcacattgctggtgatcctgatgaatatacactgcctttattatgggagaaacttgagatatcttcaaagttcaaggaaagatctgagatggtgaaggagtttaatctttgtaatgtatggcgaaagagagggatttctcgagtacctatagtccatcaagttatgcagagaccgaccccggggaaagtaagcatactgagtgatggttctgttgtagttgaggttggaggaattgagatagggcaaggattgtggactaaagtacaacagatggttgcttatggtctcggtatggttaaatgcgaaggaaacgaaaagctcttggatagaatacgtgtagttcagtccgatacactaggtatgatccaaggaggtttcactgctggtagcacgacatccgagagcagttgtgaagccgttaggctttgctgtgttatcttggtggagagattgaaacctataatggatcagatgatgatggagaagtcaggttccgtgacatggaacatactcattcaacaagtaggtagcctagtaaattctgatagttactcttctataacaaagattctgcatgaataaccgtaacgtttgcatttttctttgatcaggcgtatggtcagtatattaatttatcggcgagtacattgtataagccagagtattcttccatggaatatctcaactatggagttggagtcagcgaggcaagtcactatgggaaacacttctttctttatatttgaatcaatcaaacaataatgtgattctacttgcaggtggaagtggaccttgtgacaggaaaaaccgagattttaagatccgatattatttatgactgtggaaagagtcttaatcctgcagttgatttaggacaggttagctagcatttagttaactccacaagtttttcttgttttcttttagtcattttgttgagctaagcaaaaaaacatggtttgtttttgaaaagaccgaaggagcatttgttcaaggcatcgggtttttcatgatggaagagtacactactgatgagaaggggcttgtggtgcaacaaggcacttgggactacaaaataccgactgtggacacaatcccaaaacacttcaacgttgagattgtcaacactggtcatcataaaaaccgcgttctctcctccaaaggtactacacaacgcttttccttatcccatagactttgtataatagagacaattttagactcttacataaacactctgaggttttttggttagaattttggactgaataatataatagagacagatagttgcaacaacttatatgtatcagtgttattttcattgttactttcatactcaacaactttttcatttgatcaacagcgtcgggtgagccgccattgcttttagcagcttctgttcattgtgcaacaagatcagccattagggaagctcggaaacattccctttcatcgaacttcattgatgggtctgattcggaatttgagttacctgttccagcgactatgcctgtggtgaagtctctttgcggattgtatagtgtagagaaatacttacaaggaaagatcaaaggacaataaaggcaaagcaagtaagcaactctcgttgctgctaagttacagtgttacatatactaaagttattcagattttatatacagcaaaaataattgctttgtg

SEQ ID NO: 153416 - DNA, 595 bp, Arabidopsis thaliana landsberg; identical to SEQ ID NO: 39994

SEQ ID NO: 153417 - DNA, 1132 bp, Arabidopsis thaliana landsberg
atggctctgttcagtctccatctcccacgttacgcctctgttcttggatttatcctcttgctgctccgtgatggtcagcgattttttacgttttcttcatctcagttttttcactcttcctcaaattctactgaagctcgttttgttttttcctctgtttttgttttccctaaaggtgttaagtgtacaacgttcacgctagttaacaaatgcgatttcccagtgtggccagggattttatccggttcaggtagtcccaaactcgattccactggattcgagctctccaaagatacctctcgcactttccgagcaccagcaggttggtctggtcgcttttggggccgtactggctgcaactttgatggttctagtagtaccacgagctgatccaccggagattgcggctcaggggagatggaatgtaatggatccggagctgaaccgccagccacactagccgagttcactctcggtatttccgggtctctagacttttatgatgtcagccttgttgatggctataacctccccatgatcgtggagggttctggtttgtgccccaccacagggtgtgtcacggacttaaaccagaattgcccaacggagctcaaagccaagaggagtttggcttgtagaagtgcgtgtgaggcgtttggaagaccggaatattgctgcagtggcgcatacggttcaccagatagctgcaagccgtcgatgtactcacaagtttttaagtcagcttgtcctaaatcgtacagttacgcgtatgattatgccacaagtactttcacttgtagtggtgctgattacaccatcactttttgtcccaaattgtcaaggtagatttagttaaaacagttaaagaaagacagagtttggtttataaagatcaaagctttgattatgtatttgtattgtgtgaaacagtttgaagtcttcgaaagaaccacctcctgaagagacaggaggtgaatctggttctggaactgactcgagtacagagatacaacaaccgatagaagaagcgtcattagcgaattcttattacgcggctatggctatcggagaatcgactagaaataccgcttcttttcttctccttttgattatcggttggatcagcttgtag

SEQ ID NO: 153418 - DNA, 1755 bp, Arabidopsis thaliana landsberg
atgggaatatatggagtgatgacagggaaaaaaggaaagagtgggtttggatctgcttctactgctgaagatgttactcaagccattgatgccagtcatctcactgccatcatcacaggttctttcatttttccttttccttctgatattttcttgcaaacccaatctattactattgccaaacaaattttattttacgtttactcgtcgtgtaagactttcttccaaaaaaagaatcggaaaacactataaaattagtcaagtctactataaattcaatgaatggaagatgaaatgttttaatggtggatgaaaagtcaaacttttaggattaagctagagtttcgattgtgacttgtgaggcaaataatataaaggggacttttttttttttttgtatttcaaacaccaaagattttctttctgttttgtcatgaccgattttttgtccataaacaaaatatcttagttatgtatcttctctctaattaagactaagttaatagatcaaaattaaactcgcatatgaatgttgttgccaaagttattttcattaaaattgaaagctaatatgttttgtagtatttagttggtactataatttttgaccaatatgcaattttatgaacaattattgtttgaacaaacaaaaaggtggaacaagtgggattggattggaggcagctagagtgttagcaatgagaggagctcatgtcatcattgccgcaagaaacccaaaagctgctaatgagtctaaagagatgattcttcagatgaaccctaatgctcgcgtcgactatctccagatcgatgtctcttccatcaaatcagtcagatccttcgttgatcagtttcttgcccttaatgttcctctcaacattctcatgtacgtttgaatattacttgttgaattttcttttttcttttgcagcgattaagagttaattatatgttaacttgttgtgtctttgaaatgttattagaaacaatgcaggtgttatgttttgtcctttcaagctcaccgaagatgggattgaatcacaattcgcaacaaaccacattggtaagattttattgatagtgttttcttgtcagtatcgaaatacgcaatattcgttaccaaaacatcatgttatgacatgaattataaagaaatatactagtcaataaaccatttttatataacattacgtgagtgaatctttatatatatatatttatattataatgattgtccaggtcattttctgttgacgaatctgcttctggacaaaatgaaaagtaccgcaagagaaagtggagtccaaggaaggattgtgaatctgtcatctattgctcatacttatacttactctgaaggtatcaagttccaaggcatcaatgaccctgctgggtaagtttgttattcaattttatgctaatgaaacgagactaaatatttttaactgatgtaaacactaattctctatcctatgcattatctagatattcggagagaagggcttatggacagtccaaactctcaaacttgttgcactccaatgcactctctcgtagactacaggtaatatattatttacacattgatatactttaattaaatcaaagtttgatgccataaaatgatgaatatgattttgggatgtaggaagaaggtgtgaacatcactataaattcggtgcaccctggtcttgtcaccactaatctctttcgctactccggttttagcatgagtacgtataccaattctccaat

SEQ ID NO: 153419 - DNA, 383 bp, Arabidopsis thaliana landsberg
cttggcatcttccttcaaagatttaggctttttgagttctgatttcttttttcatttggtgtaggttgctgcgtacgatgggacacaaggaaagatggctttctttgatccctcaagggctcaggacttcttgttcatttctggcactaaggtaaataaacacttctcaaaccaattgggacataatgtaactaagctcaagtgtattcaatttctgatcaaagatttgatggttgttttgatagatgagagcattggcaaagaacagagagaacccaccagatggatttatgtgccctggaggctggaaagtccttgtggattactacgacagtttgacactaaccggaaacaccaaacttccggaaaagattccggtttaa

SEQ ID NO: 153420 - DNA, 2979 bp, Arabidopsis thaliana landsberg
  unsure (1)..(2979): unsure at all n locations
atgtctttggtgcatctgcttttgttcgccggccttgtaatcgccgcttcctcttcttccccgggctcgcgcttgattctccgggaaatctccgatcagaaagacaaagctgttgaattgaacactaccaacttcgattcagtccttaaagacacccccgccaagtatgccgtcgtcgaattcttcgctcactggtcagttcttcgattgcttttcacttttcacttaaatctccacttttggttggtgggttttgcagtttatctactacctacagagtttggtgctggatctagcgttgggctctcttgcaagtgtgttcttataggaaaagatttgaactttatgatcctattagtgtgcttcttctctaatcattgctactagaaggctttatattttcttcagttactagtttgggcgtttactgatgcgtgtatcgttttcaattgattctaggtgtcctgcctgtagaaactacaaggtaacataaactattcaaagcctcaactttggagattttcgttgcctaaaaagtgttactcttatgcagcctcattaccaaaaggttgcaaggctcttcaatggtccagatgcaatacatccaggaatcgttttgatgactagagttgtttgtgctttgaaggtatttactccatgctccgaatgtttttatgaatcatgttaaattctcttggttcactgtttctgagctaagtcggtccatttccctggcagcgcagacgaataccaagctctgtgacaagttctctgtttctcactatccaatgctcttttggggtcctcctactaagtttgtctctggcagttgggaacctaaaaaggataaaagtgagatacttgttattgatgacggccgcactgctgagcgtttgctcaactggattaacaagcagattggcaggtttgtgccacaaatccaccggacgtttatcttcagcattgactcgaaatatatctagcagattcaaactatgtttcatctttgaagtgtatctataattttccttaccgagtttgccaatatcacatcttacttagtctgttttgtttctcaataatttgcagttcttatggcttggatgatcagaaattcaaaaacgaacatgccctgtcgaatctaaccgactacaaccaggtttctagacttatctctgcctaactttgctgatattattagcgtttcgtctaagattaaacagctttaagataaccgggtgttgatttgccacagatttctcaggctgtgtatgatgtcgaggaagcaaccgcagaagcttttgatatcattttagcacataaggttgagagatgtgtatgtatatgaccttcttccattcgctcagtttcgttaaaaaataagtagtttcatgtcgtgtacaggccattaagtcatctgaaacaagtgcttcatttataagatttatccagcttctagcagcacatcatctttccaggaggtaaattaaagtgtcattatcctaatgccgtcacaagcattttgatgatcactttctttttccacactaattgtgaaatttatattctataggtgtcggaaaggagctgcagaaattctagtgaactatgatgatttatgcccttctggaaattgctcttacgaaaaatctggagggaacgataccctgggaaatttccctatttgtggaaaggatgttccgcgtggatactacgtgagtgctagcaaccgactctattactgttttcctgtatatccgcattagagttctgattgtcctaatatcatatttggtagatgttttgccgtggcagcaagaacgatactcgcggatttaggtactgtagtttctttttaaacttcataccatgatccttcacttcagtttagtgaactattccttaaatgcttgactgtagctgtggattatgggttctgatgcattcgctttccgtgagaattgaggatggagaaagtcattttgcattcacgacaatatgcgatttcgtcaacaacttcttcatgtgtgatgaatgccgcctgcatttcaatgacatgtgcttgaggtaaaaataataataataactcacagttcgatttatcgtggtatttgctcaactgaacctcatatgcatgtgtttcatggacagcgtcaaaacccctttcaaaaaggcacgtgatttcgtattgtgggtgtggagcacacacaacaaggtcaacgagagactcatgaaggacgaagcttcccttggtacaggtgaccccaagttccccaagattatatggccaccaaaggagctttgcccattgtgttatctttcaagtaatcagaaaagcatagagtgggaccatgaacatgtctacaagttcttgaagaactactatgggcctaagctcgtatctctttacaaggaaaagagtgtcagccggagcaaggaagagaccatctcagccactgaagacttaacagtggccaccaatgctctggttgtgccgattggagctgcattggcaatagccatcgccagctgtgcatttggggcgcttgcttgttactggaggacacagcagaagaaccgcaagtattacttccatctatctatttaaatctagtggtagctaccaactcctgttttcttaccatttgtgggccatcgtttattttcaggccgaggagaaggtgaaactaaactacaagaaggtcttgatgttttcataacttacagacaacaaacacaaaggctcttgtttggagttgatataccaaagtcgcttcctgcaggtcctttccttgtaacttttgtctctgattntgaaagatagtccagattcttgtcttgaattttgggatacaaacacagagagacacttgtgaatgttgggatctttataggaatctttatagtggtttataaatttgtattggatcatatggtcagagttgttgtgtaagaattcaagatgagtcttctttgtct

SEQ ID NO: 153421 - DNA, 2581 bp, Arabidopsis thaliana landsberg
ttagacataggtatcgatcaaagacttcctcatttcactaccgacgaaatcaggctgagattggactagtttgaagatattgttaacaacagagagctctactgcagtagtatctgacccacagaaagcggtccaatcgttcacagtcaaacccgcggatataacttggctgccacggttcacggttcctgcaaccaaaggcacctgaacaagattcgctagctcgaccatttcttccacgttggtatttgagtgaacctgtacatcatattagctagtcaggtgattttctagtgagacaaatgccacaaaacaaagacgaaccaaaagaatgggtgttttttatatagttgtctactaaccattccaccattattggataaagaacaataacttcccacaagttcgttattcgcaatggtttggcgataaacttcaacaccaagaacatcacttattatctcttcggtgtctttctcgagctttggatgcacaagcgcgacatagtcattgcaagctatagcgtttccaagtgcacatataggttcttcaattcgttggactacaacttcatcaggcaaactatctctcaaatgttgaagctctgttcacattataaaatagtccctaattaataaaaagatcattacaataactatatgaacttggaatagtggaaaccaaatcaccttggtctgtaatggtgtgagacagaagaagtccgtttttgtttccgacacatagactaccaatagtccctgatcctcctatggaagtagtaacaattgggataacaccttttaacttcgactcataaccactacaaataaattaattaaaattacaagtcatagaaaaaccaaacttgtacgtgaaaacttaattagacaatgtgaagactcaagagtgtatgtatgtatatatacgtgaagaagtttgcggaggcagatgttgcggaaacgagacaataagcatttgtgagtttggaaaagacaccaatttcgcaattattgttatcatattgaagacctgccaaaaacaagaacagaaaaaaaaaaagaacaatcctgtaagcaacttgaaaagaaagcatcgtataaaaagctaaagcttaagggaaactcacgagtcgccatgatatggatccaacaaacacctgcggaattaagtaacacgaaaacctaatatgagattatgaatttcaatacagatccaaggcagaaacagagaatgaaagatttaggttttcggatcattggttatgctatattgaaagatttagttttaaggtttaccttgtcgacaaatcggaacaaaaagtgacggaacgataggaagagaccctattctctcttccgaaaaccctatttatatatcagaaacttggaacaagcttatgctacttatttccatttattagttttggtaaataataaaaaagttaaaaattaaaattttgagaggaaattgtgaatgtaaaaagaaaatgatttaatctcaatgtgttgatataacttctacgattcaacaatcagctgcaccaatataagaaattaaacatactcataataataatatcactccgctcatcacaatgatatctttaaaataactgtccaaaaaaggtagactagagaagaaatacacaaaattcagcacaaaaaataacaggagaacaacgctcactgtaacagtctctctcccctctttacacaacttgctctacctctctctctctttctctatgctttaaacataattgatgatggtcttttcgagtgtttgtttcatttcatcttgctgcgaatctacgtctcctccttcccttcaccggcatggaaccaaaactagtcagttcatcttcgtcatcgcttgtttcatctgaccgccatctcaatccaccactgttatttctgctctccgtggccaagacattgttgttgttgtcctttaagctgcaattcataatacacacaattgatatgtagctcatccaatatatgactaaaagccgtggacataagaaccaaacaaagttccttagactgaaaccaaactggactttattttcaaaccaaacggtaacaatagttttataccaaacaataccagtgtcctctactttaatggcacgattcagaaaggaacaaatggctaagagataaagaagagaggaatacctcgaagacatgtccattggatcatccaaatcaacaaagttatctttgtctggttgcatccttgtgccaaaaaaggtggattccggtttctgtgaagatccattgagatggttgctgctagatttcactgtcacgggattgttagctgtgattcggcggagataaggagagctcatattattctctatgtatctatcaacatttacttctggagaggattcttcagtccttttcccttggagctggctgttcccacgagctctatttagatctttgaacggagttgacatttcaccgaatttcagattcttggttacgcttctaacttcactcttttgtcctctatttgcgtttggaaataaccttccatgtgaaagatcatgggacgcgtttcctatcat

SEQ ID NO: 153422 - DNA, 494 bp, Arabidopsis thaliana landsberg
aagaagaaggagaagaaccccgtgaaaatgatgaagagaagactaccggtcaagactatggtgaccggggaggaaacgagggtatggactggtttgaaattgtctgtctcggtcgtggatatagacattttgagaccgtgcagtgaaacggccggatcagaaatattgtgactggtttcataggtagcttgaggaagaagaaagggtttattctgaggttgccgtgtgggaagggtaatgtcaatggggaagagagaaatgaggagaaaggtaaggtcatacatatgccaaagcttttagagttttgagcgagtctttggtgacaaaagctacgtgttatcttcgtggccaattaatttgctctaatctaattctacattctagttttacggtgatcgatcttctagttatgataaaaaaaaattgtggctttataatcaaattatgaaatgttttaaaaatcaaatatggaaaagatacaaaagaaagatgat

SEQ ID NO: 153423 - DNA, 841 bp, Arabidopsis thaliana landsberg
  unsure (1)..(841): unsure at all n locations
aacccacaagtcgacttgcaagctcaggatcgtgcccataggattggtcaaaaaaaagaagttcaagtgtttcgattctgcactgaggttggtctcctctccgtgaatttcaagctaaaacagccatgagaggtttaaaattaattatgtgttgtttgtttacagcctgctattgaggagaaagtgattgaaagagcttacaagaagttagcacttgatgctctggttattcaacaagggagattggcagaacagaaaagtaagtgcgttatacagtgattgctttatgcattgattcatctctgacagaattggaatttatcttaactatgcagctgtcaataaggatgagttgcttcaattggtgagatatggtgctgaaatggtgtttaggtctaaagatagcacaattacggatgaggatattgacagaatcattgccaaaggagaagaggcaacggctgaacttgatgccaagatgaagaaatttactgaagatgcaatacagtttaaaatggatgacagtaagtgtgctatttatccctttttccaatggtaactcccttgcatgggtaatgggatgtccatataagatagtttttggtttgttgcaggtgctgacttttatgattttgacgatgacaacaaggtattcttggataattaattgaatgattgaaggaaaggtttaacgcatactgtggttatgctctgcagtttttcgaatatcgtttcctgatttcttttttaattttgtttggtaggatgagagcaaggtggattttaaaaagattgtgagtgaaaattggaatgatccaccaaaaagagagagaaagcgcan

SEQ ID NO: 153424 - DNA, 1514 bp, Arabidopsis thaliana landsberg
atggctagagatttggactcgcgaaagaaaagaaggatctctttagatggaattgctgccttgtgtgagcattccaaagagatcattgattcattgcctatgttgaattctcctgactacttcttgaagccatgtataaacgagctggttgagcgagaaattgaaagccctgattattgcagccgggttcctgattttactattggcaggattggttacggttatattaggtttcttggaaacacggatgttagaaggttggacctggatcacatagttaagtttcataggcacgaggttattgtttatgatgatgagagctccaagccggttgttggtgagggacttaacaaggctgctgaggtgactctggtcgtaaacataccagatctaacttggggaaaacagcaagttaaccatattgcttataaattgaaacagagcacggaaagacaaggagcaactttcatctcatttgatcctgataatggtttatggaagttctttgttcctcatttcagcagatttgggttgagtgatgatgaggcagaagatattgcaatggatgatgcgccaggtttgggagatcccgtaggactggatggtaaaaaggtagctgacattgatgaagaagatcagatggaaacttcggagctagagctttctcattctctcccagctcatttaggacttgatcctgaaaagatgaaagaaatgagaatgctgatgtttcctaatgaagatgaagacgaaagtgaggactttagagagcaaacttcccatcttatgacagccttgactaaacgaaatgtaagaccttcgcagaaaattgctcaaagaaatagtcatcaagaccctccaccggtcgtgcgcaaaactccgcttgctttgctggagtataaccctggtaatgataaaagctccccaggtagtatcctgatggtacaacaaaataagaatttggcagtgagaaagtcgaaaacgggaggtttcgagctggacatcagccatgtcacaccgttaactgataactattcccgcaatgttgttgatgcagcattattcatgggaagatcgttccgagcaggttggggcccaaatggcgttctttttcacactggtaagccaatatgtagctccagttcccagatggtattgtcttctgtgatcaataaagaaaagatagcaattgacaaagtggtttgggatagaaagggaaaagttcagaaagaacttattgattctgcgtttgaggctcccttaagtctccacaaggaattgaatcatgtagaagaagaagttaggtttggctctttcagtcttaaacttcagaatgttgtcaccgatcgtgtagttctttcagatatctgccgaagttatattggtataatcgagaaacagctggaagttgctggggtgtccacatctgcgaagctgtttttaatgcaccaagtcatggtctgggaactcataaaagttctcttttctgagagacagagtactgaacgtttgat

SEQ ID NO: 153425 - DNA, 2420 bp, Arabidopsis thaliana landsberg
  unsure (1)..(2420): unsure at all n locations
atggataaatcagatgatcaaatcacagtcatcgaatccccgcaccaatctgatctgatgatagaactcattaagaaactaaagccacaggtggtggttnnnnnnnnnnnnnnnnnnnnnnnnnntaccagttcatcgtttttgcacctgttggaagtgacaaaagaaattggatgtcgacttttcttggatatatctgatcactttgagttgtctagcctccctgcatccaatggggtactaaaatatctcgctgaaaatcaactaccttctcatgcagcaattatctgcggtctggtaaagaataaggtaaagatttcgatcaaccacattggtgacgagtatgcattatgttgtatctcatttaattgagaactaactaactctgagatcaattcatgctcttaaagttgtgtcatgtgcgttctacaggtctattcagatttagaagtagcctttgtcattacagaagtggatgccattgctaaagccctatccaaaactgtggaagtcttagaaggtcatactgctattatcagtcaatactactatggttgccttttccatgagcttttggctttccagcttgctgatcgccatgccccggctgaggtatgtagtttaatctgtcctaacatacgtacgtgttagattttttttcagggttaagttaaaaaataacattcgtgttagatttgcatattagtattccttaaaaaaagtaggccggctgaaaaaagacatgtggtattcttggaaaagacatttagtgatttgttttcatgataccctaaacctcataatcccggaccaataggagtaacataaaaaaatctagattaagctcgcttgtagaacaaagttaaaccaatgtgtatatcgtaaggctggaaactctactcagttctctattatgtggcttgtagagggaaagtgagaaggcaaagtctgaagagatcattggattttcaagctcagccgtctctattctaaaagatgctgagctttcagtcactgagattgacgaaacttctctaatccacatggatgttgatcaaagtttcttgcaaattccacaatctgttaaggctgcaatctttgaaagttttgtgaggcagaacatatctgaagcggaagttgatatcaacccaagtattaagcagtttgtgtggagtaattatgggtttccaaccaaaagcagcacaggctttgtatatgctgatggctcactagcactattcaataaactggtaatttgttgtgctcaagaaggtggaacgctttgtttacctgctggcacaaatggaaattatgttgctgctgccaaatttttaaaagctaatgtcgtgaatatcactaccgagtctagtgatggctttaagctgacagaaaggactctgacgaaggcactctagtctgtgaagaagccgannnnnnnnnnnnnnnnnnnnnnngttagccctacaggcttggtgtacagcaatgaggagatggatatactgttgtctacttgtgctaagtttggagcaaaggtcatcatcgatacttcattctcgggattagaatacagtgcaactagctgggatttgaagaacgctttgtcgaaattggattcttccttttcagtttcgctgcttggatgtctctctttgaatttgctcagtggagctattaaactcgggtttctagttttggatcagtctctcatcgatgccttccataccctcccaggcctgagcaaaccgcacagcactgtgaaatatgccgctaagaaaatgttggctttgaaggaagagaaagcaagtgactttctggatgccgtttctgaaaccattaaaaccttggaaggcagatctaaacgcttaaaagaggtactcatttctgcctatactcccttttgcattatcatcagagctcagattgtcttagattgtttgcaaataacaaatgaatatttcaaatggttaaagctgtgggaaaggctttagtggtaccgctcaggtctttttgaatctcatgttgttaacaatattgcagcagaggagtaaatggagtaaatgttgatcgcataatcgcatgatgttaggttgttgatcttcctttttaaattatttgaacaggtactacagaactctggttgggaggttatccaaccctcagctggaatctcaatggtggcaaagccgaaagcttatctcaacaaaaaagtaaagctgaaagcaggagatggtcaggaaatcgtcgagcttacggattcaaatatgagggatgtgttcctcagccataccggtgtttgcttaaacagcggttcctggactggaatccctggttactgccggttttcatttgcattggaagatagtgagtttgacaaggctattgaatcgatagctcagtttaaaagcgtccttgctaactga

SEQ ID NO: 153426 - DNA, 278 bp, Arabidopsis thaliana landsberg
ttggctttttattttcatttccatggtgtggaacgcaggtagcttgcacacttggaactattgtatttacgagcattctacttatacgtggactttgggccggagtagcatacatgcaagagagccgcaacaataggatcaatgaactcgctgatgatcctcgtgcatggaacgggatgcaaccagtttcctgatgaattagcttaacacttgtagaaatcagaattctgacttttgggagagccataattgtttaggttcttccaaggcaataaagc

SEQ ID NO: 153427 - DNA, 462 bp, Arabidopsis thaliana landsberg
cattagtactacacaaaaagttaaaagtatgttgcaggttaccctgtttctcaaggaagacctgcaagacaaaaccgtcttccttgttgtggtcttggcctcggttggttcttgtaagttcttgtttttcccgagcaatctcaaattagactttgtttcaatacattttgtctgaaaaaactcaatccttttttggtaaaggttcatcattggtttcctccttggtgcaattccatggtatgtaggcgtattcattctagtatgtgctaggatcgatccacgagagaaaccaggatacgtagcttgtaccattgcagtgagtctttcactaaaagataatcgtgtttaatacattaatcttgtgatttaatcactttttaacactttatactttcacaggctgttgttgctacaattgccatagtttttggtgtcatgggaggaagaggagtttggtcgtga

SEQ ID NO: 153428 - DNA, 458 bp, Arabidopsis thaliana landsberg
acgaactattcacaaaaagaaataaaacgagatgggaagtggcatgataaggacattggttattctagcaatagctttattcatgatcggttccgacaacgtccacgtggcaaaagcccaggtctgtggagctaacttgtcgggactgatgaacgaatgtcaacgctacgtcagcaacgccggaccaaattctcagccgccgtctcggtcttgttgtgctctaatccgtcccattgacgtaccttgtgcttgccgctacgtttcaagggatgttacgaactatattgatatggacaaagtggtttacgttgctcgttcttgcggcaagaagattccctccggttataaatgtggaagtaagtatctttcttgcttttcttattatagtttcgtaattgttaagcatataataatttggatttgaatctgttataggttacaccattccggcggcttaa

SEQ ID NO: 153429 - DNA, 789 bp, Arabidopsis thaliana landsberg
ctaaccaatgtagctattacatacatctgagagacatatccaagtaatatagagtatactcatcaacatactgcctggtctaatcacccaatgcatgtgagcgtacgtcagttgtactgtatatacagtacagtcttctcttgaattactgaccagtcttatagtttctaattgagcatagaatcatatgtattgatgtatcatatcagaattcaatgctttctaagaattttagaaaaacttcatgctgacatgaacctatgttattgtgcaggttgtggactttggtgagagtggccctgttagatgttcacgttgtaagggctacgtgaatcctttcatgaagttcattgaccaaggaaggaagttcatatgtaacttgtgtggtaattattactctttccgtatagaaaagccatataaaatgggttactgctatatcaagtgcaataatgagtaccaggttatgaaagaaactataactactatacgcgagaactaaagtctggtttactttactgatttgaaggaaatattatgtgaatttggaattcacctagaattaggactccctttgaattgctatcatcctaatcactttaggattttgatgatgtggaatggttttgtgatccattttctcatcaactctctttgcacaggatacactgatgagactcctcgtgactaccagtgtaatctagtccagatggtagacgtagggatgctgatgaaaggcctgagctgtgtaggggaactgttgactttgttgctacaaaagaatatatg

SEQ ID NO: 153430 - DNA, 1157 bp, Arabidopsis thaliana landsberg
cagatttcgcgtggaggtcagtcagtgacccttgtgggaaaaagcttggtgatatttggtggccaggatgcaaagagatcgcttctgaacgatttgcatatacttgatttagataccatgacctgggaggaaattgatgccgtgtaagatcttatgacattttttgcattttattctcgtttttgaacaagtcaggtcctttaaagactagaatgtaaatgagaaaatgaatgaaattatataaagctgccaataatctattttcatatctcagtttttaatgaaagatcagaagttcaaggttaatgtgctgtcaacttgcaggggttctcctccgactccaaggtctgatcatgctgctgcagtgcacgctgagcgttaccttctaatctttggtggaggatcacatgcaacttgttttgatgatctgcacgtccttgatctgcaaactgtatgtcaagcttctattgtttcagcaacgctctttgtctgcttcttgacatatatgtttccatgttatagatggaatggtcaagacatacacaacaaggtgacgcaccaactccacgtgctggacacgctggtgtgacgattggggaaaattggtatattgttggtggtggagataacaaaagcggtatgtttctccttcaaaagcctctttctcttccctgcattttgattcctgcatgtgttgctctttatgttacatcactggaacttttcctgggggaaaaacttgatagttgcttggtttttttgtttgtacagtgtgattaattgtgatacttgctggtactttaccgcaggggcatctaagactgttgtattaaatatgtcaactcttgcatggtcagttgtcacttcagtccaagaacatgtacctctcgctagtgaggtatttaaaacacatccccaacttattttttgcataaaagtctccaactcatattgcctgacacatgaaacttgaattttccaagacattgaataaatcagtcttgtgatttcctctgcaacttttcgtttgatgacagggattgagtttagttgtgagctcatacaatggagaagacatagtggttgcttttggtggatacaacggacattacaacaatgaagtacagctaaatacattttttcctgatttggtttaa

SEQ ID NO: 153431 - DNA, 1297 bp, Arabidopsis thaliana landsberg
tatctgttattttgaaaaatacaaactgactgctctctcttcttaaaccgcttcacgatgtgctgggatttagaaaagagataaatggtaccaccataaacattgcgcttcaatggtatggccctttttgtactattgtatgtttatgtatgtggatgttgtagttactctgaacaaaattctattgatctgatcccagttttgttgtcttgttgttgtaccaggtgcgtagatggatattcaaacaaaattctgggatacgccaatggcatccgcaccatggatggtggaacatacatagatggtgtgaaagcgtcaataacaagaactctgaacagccttgtggagaagtcgaagcttgttgaggtataagaccagtcgacatcactgaccaagttttgtctatgaaacgctttttatttcgctatatatgaggtttcgaacattttttgccatgcatcatattttcacgaaaagctgcattcaatttgccaatatacccccctcttcacagactgaaccgaatttgaatagtttcatatctgcagcatagtagactttgctgtaaaaaatttcagcacctaacaatagaagagtttacagctttctttcccgtttgggcatttaatgttatcagtgtcagggaggcgtttccagtgttttgtataactgatggtgaaatttattgttgttgattctgtccaggacaaggatattatctttactgaggagcatgttatggaaggactgacttgcattgtctcagtcattgttccaaaacctgagtttgaaggtcaaacacaggtacacaagatcatagtgattgttaatcctcctctttggcattcttatctgtttgcaagcagtgatattttcccactttcttcgattatttgcactgatattttctctcttaatatctgcaagaagagattaggaaatccaaatgtcagggaaattgttgaccaatcagtccaggagtgcttaatggagtcttttgaattgcatccagatgtattcgagagcattatgtccaaatcctataacgcttacaaggtatgctgtttctatacctattgatactgctgtatcttcatttacactgttgtgttctacatgttgctttcttactttcaatttaatgaccacgaaaatatacatggcgactctttctctttttagactgatttggctgtcaagagggcaagggatgtgtatagttcagaaagtgtagcaatggtgtgtgccattgagtccattcctatgaaactgaccaactcttcttctgaaacatctg

SEQ ID NO: 153432 - DNA, 286 bp, Arabidopsis thaliana landsberg
gagaaaatattaccattgatatttactatatcaacatgcattattcaacttcaacctattttcaacatcaactaacagcccttcgaaacaacatttcaatccaaaagaacacacggtatgtccaatgtcctgcacgtagtcattgactcattgttcttacacttcaagttgttaaaaccactactctcttactcttatggccggcaacaactcttcaaagcctgtcgtacccatctctgtaatggtcaagagacatacaaaagctgtcttatagcttctctttttt

SEQ ID NO: 153433 - DNA, 3780 bp, Arabidopsis thaliana landsberg
gaaaatttctccgaatatacagcgactacacatcaaccatagagaacagtatgaagtaaatataccctctatccatcgcatatgtagtttgtgggagtgctctgttggtttcgctttcctctgatgttgtataccctgtattgtcaaatatgactgcgacacggttcccactcatctcatagaccgctagataatagtctgcatgtatataaaataattgttaaagacaaaacatagggcatacccaatatcctttgtgcatagtatttagtatgtcatggaagttaactaggtctttgagagttcgaacgccatgaagagcaaaagaaagagaggaaatacggaagagaaagacaaaacaaactaaaaaccaaaagacatttgacctatcgtttctgtttcacaggacgaccataagatgtaaaagtcttgcccatccattccacaacccattatcgattcacaaggcaacataagaagaagtttacatttcgatgagctagagcacttctctagcgcagatcacaaacaaccaactccaacctctggttatactatccaagatttttacaggatggtgcctgaggctgccaggtttcgaaggaataaagagttttggtgtagcaagaaaaattaagttacaagacactaattatattgtagatagagacagaattgaaataaaatatggaacataaataaataattagataaatgagtcagcagcttcggtgaattgttctgtatctcggagtattactgccggcgacgaggatagtcttatcttctcctctctaatgactttgattcattttcctcttcagattcaaatcctagattcaatcggagaatgaccacgacgacgccggagaagactccggcgagacctctctctatccaagattgggacgttctcatcgacgacttccgcgacgccggcgctcctcgcgactggttcacttccgttttccagattgattctctggtggacttcgctctctcgtctctcctcaaaaaagacttccctacaccagtgaagctctcaatcctagtctttctcgatgaattttccccgattttgtttgataattgtggtagcgatacctttgatcgcttcatcgatgttctccggacgatcgtgcaatctccaactgatggatcgtcaggattgaaagagcaagctatggtctctttcacgtctgtgcttgtatcgattgattctttctctgtaggtcacgttgaagcagttgttgatttgcttcttgcgctcgttaatcgtcctaaccacggatttgatcgacaagctcgtgctatcgcctgtgagtgtttacgtcagcttgagaaagcttttcctggtttgttatctgatgtcgctggtcatctttggtcgttgtgtcaagcggagagaactcacgccgtgcaagcttatcttctcttgttcaccacaattgtctacaatgtggttaatcagaagcttaaggtttcacttcttagtacctctgtacctttggtgccttttaatgctcctaattggatgcgtgatgagagttcgattatgagtcaaggtcaagggttggggccagatcagaaggaactgagacgaacattggcttttatgttggaatctccgtatttgtttacttcttgtgctatgatggaatttatgggtatggttgtgccacttgcatcggcgttggagttacaggcttctatgttgaaagttcagttcttggggatgatttattcgtttgatccaatgctttgtcatgttgtcttgcttatgtattctcggttccctgatgcgtttgagggacaagagaaagagatcatgagacgtcttatgctcttttcaaaggagactcagatctatcttgttttccgtttgcttgcgctgcactggttaatgggtttgttgaataagcatatgttgagtggggagcttgagaagaggacatctgttcttgagatgggtcagaagtttcatcctgtcgtttttgatccactcgctttgaaagcgttgaagcttgatctgctggtacaatgctctgtgagttccaacgctttgagtggaggtgataccagtcaatttgctggggatttgttgcacgactgcttgttatgggtttcggatttcaaatggttgccctcatggagctcagaaactgaactagcattccgcactttacacaagtttctgatatgtgcatctacacattccgactctgacccttccaccactagaatccttatggagtctagcctcttccaaaacgtgcaggtctgtagctctctttacttgcttcttggtcttgcttgatgatggtttacttttgctagttttcagaaggaacggaactgtgtggccctttttagttctaattagcttttagttcaggaaccaatcttttgctgattctgctctcagatatactcttcatttgttttgattgtcttctatatttaattcaggggttgctggtagacatgactttggagtttcaaatcttggtccctgttattgtggcttttattgagcggttgattcactgtcacaagcatcagtggttaggagagcggtttcttcagatagtcgatgagaatctgcttcccaaacttaagaaaaaaaacttattaacagcttacttcccgcttttccatcgaatagccgagaatgatacaatacctccttctcgattgatagagctgcttacgaagtttgtaatttcacttgttgagaagcgcggacttgatgtggggttgaaattgtgggatcaaggaactgaagttcttggcatctgtcgaacattgatgagtcaccataagagctctagattatttctcggactctctcgccttctttccctcacatgtctctatttccctgatctggaggtccgagacaatgctaggtatgaccatgacacccacgtaaacgaatctttctaatatttatgaattgtgatgacgttaactctacctcataaattggtacattgtaggatatatctgaggatgctggtctgtataccaggacagagaattaagaacattttgaagccggcagatgctgtcactccatcaacccattcttctacattttttagtgttcaaagtcctcgttttcgtcatgatcctagtaaatctcggaacctttcatcctatattcatcttgaacgggttacgcccctactcgtgaaacagtcatggtcattgtctctaccatctctaagtgttggaactgatggatatagcattatagaaaacaaaatccaggtagatgaagttgagccggatggcagtcaagaacttcagattttgccagaagctcgaagaattgaatcaggaaaacctacgttaagggtaatggactcaaagattgcagagattctagaaagattaagaagatatttctctgtgattcctgatttcaaacacatgccaggaattaaggttagaataacgtgtactttgagattggatgctgaaccatatcccagtatatggggaagtgaaactcagaaaatcgatttagagaaagtcgactcacctcctgcgattttcgcgacggtgctcaaattctcatcttcagccccttatggctctattccctcatgtcgcatacctttcctttgcggtgagcctcattgcaacagcaatgtacccaatgaagaagtttctttagacattgtcgtggtagccaacacactgaaagaggaggataaagatggcttgagaggagcaccgcgacagtggaactggaacctagagaacctacaccag

SEQ ID NO: 153434 - DNA, 365 bp, Arabidopsis thaliana landsberg
acagaggccaaatcctatttttagtgatgaatctctaaaaacagtagagagagaaaccttcttcttctttcttcttcttctacaaaatttcacaaaacgagagagaggagagattcaaacaaacgaatcaacaggtgagaaattcgaaatctctgcgagctcgtctcgcccagaatctcgatttctccacctttcctcttcaattcatcttccaaatccctaaaaaaaagactcaaactttttaattttggtccaaaaaagagtcaaactttcttcatcaatggcggagaaaatcacgagagagacgtcgttacctaaagagagaagcagcccacaagctctaattctgggacgatacgaaatgg

SEQ ID NO: 153435 - DNA, 530 bp, Arabidopsis thaliana landsberg
caaaagaaccaaacacggtttcacatgaatcccaatttcattgcaaaacataactaaaaataaagaagaagactttttggagatcgaatctgttcatgttgatgggttttggctgagctttctagagatagagctagagagtactgggtctgtgtaaagttgataactttttttggtttagagagagaaaggacagagctttacagagatggagatgaagcagatgaagtttcttactcaccaagctttcttttcctctgttcgatcaggagatcttagtcaacttcaacagttagttgacaatttaaccggagatgagctaatcgatgagtcatcgccgtgttctgctgtggctgagcttatgtctgtgcaaaacgacgccggagagaccgccgtctatatctccgccgcagagaatcttgaagacatttttcgttacttgattaggttttctagtttggaaacagttaagatcagatccaaatccgacatgaacgctttacatgacgctgccaagcgaggtcacttgg

SEQ ID NO: 153436 - DNA, 563 bp, Arabidopsis thaliana landsberg
ctttagagatggaggtagtcatgctattgcgttgtgtgacttgtgagatttgacgctaaaaagctaatacgttttttagtttgtctaaaagttctcctgcttactgtctttcttctgttatatattttggatttctgacttataataaatatactttaattttgtgtctgtcacaatctgtttttttttttaatctaataaagatacagtttgtcaaaaccatgaaacaaatatacgtgatgaaactagagacgcaatcttcgtcctttgatgaatattggtgaagtacaaatgtcttttccacaaaacttttgttacaggctgctcttaaattcttcatgtttacacagtaactttcacactttgtgctgttactgaagctggactatcgacctgaaattgatatagacaggagttgcttgccttttaatcgagattcgatgtctattgattagagaatgcaaatgtagattcttgtattttaccttggctgctttaaacagttcgtctacaacttcagacagtgttggatgtgcatgaacagcaagttttatgtcctgcat

SEQ ID NO: 153437 - DNA, 330 bp, Arabidopsis thaliana landsberg
attttcttatggttggcaaattacaagcttcatcggacgaaaagattggtcatcattgtcgccgttgcgggttcgttgtcaccgttggtgtcccgtctgtcaccgtcgccgtggctctttgtcgccgttaacccttgtcaaaaaccctaaaattttaatgggttgagccttgtgaattcgggttgggccttgtaaattttataattgggtttgtaaatttgttaatgtattttgatggtgtaataagtttgggctttgttttcagcctatttgtttttttttttttgtaattcaatttaaattaaccgaaatagaaaacatttggtttaa

SEQ ID NO: 153438 - DNA, 1189 bp, Arabidopsis thaliana landsberg; identical to SEQ ID NO: 12588

SEQ ID NO: 153439 - DNA, 435 bp, Arabidopsis thaliana landsberg
gattacagatgggcactatgcaatacacatgcaggaccttgttacattccctgtctcgataatcgtgcaagccatttaggagtcttccgagtactaaacattacgggcatcgtgagaggcattgcccagacagcccacccacctgccttgttcctttgcctgatggatacaagcggccaattgagtggcccaaaagtcgagaaaaggtctgttgaatctgttctctttcccatttagatattttaatttgctaagaacctaatacaaccattttcatttacgcagatctggtacaccaacgtccctcataccaagcttgctgagtataaggggcatcaaaattgggttaaagttaccggtgagtatctaacttttcctggtggaggaacccaattcaagcatggtgctcttcattacatcgatttcatacaggag

SEQ ID NO: 153440 - DNA, 550 bp, Arabidopsis thaliana landsberg
gaatctcataggtaggttttggacaaacgatatgcacaccgctaagaccacactgtggaacttgtagtattactgagatttgcccttctgccttcaaggagaccccgagcacatcatccaaattgaagaaatctatcaaaagcaagaagctttagttgctttggctctggattctccttctagatcattgttaaacccattttttgattagtcctcggttaaagttaaattgtatccaagatattgtatagctttatggggaatgcaagagcatcccacttgtgtgtaaaactaaaacttatagaatggaaacttacccttatgaaagacactgggcaagtacacttttaactgaatattatgaaaaaacttaaaagatgattcaagaaccttttaaagtgtttccactaaaagcaagtgatttggattttggagtcatccaccttgtaatctatctaatttgttatcaaacattaaaatttttgaattccccttatatagaattaacagaaatttctttctttggtcaaactaaaattaactgatattc

SEQ ID NO: 153441 - DNA, 2181 bp, Arabidopsis thaliana landsberg
gtacacttcacttcttaaaccgttttttcaacttgatgataaaagccgacgtcttcgtgaccaacaagtttcacattctctcgagctaaggtcttacagaaaacgggtcactgcgaaatcaggttctcaaggttgggactttggtagattcgtcaaaacattgtactttttcaatggaccaccatctcctctaaaggtatatatgaggacttttgtttgattctcattgagaggtgtaatatagtcatttgaagtaattgattgtttcttgcttgtgaagtttgtttcatcggtgtttgagaaacttactaacggagcaacggaggaaccggttgctgaaatgggaacttctggaatcatacttgtggctggagctactggtggtgtaggaagaaggattgttgatatcttgaggaaaagagggttgcctgttaaagcattggtactaaacttttcgataggtttctcttttcttgtgttttaattctgattttgaaaatgtgggcaaagtctttaactttttggggaataatcataggttagaaatgaagagaaggctcggaagatgttaggacctgagattgacttggtgagtccactgaaattttccacattgtattcttgttatttttatagttataagaccattgataactatctgcatatatttcaatgttgtcagattgttgcagatattacaaaggagaatacgttggttcctgaaaagttcaaaggagtgaggaaagtgatcaatgctgtttctgttattgttggtccaaaggaaggagatacacctgagagacaaaaatataatcaggtcggtgaatttttctgaatggaatttcttaaaagctttgaactttagattctagctttgagaaatgactctgtttggatattggttataatgcagggagtcaggttcttcgagccagaggtactgggactataagaacatttcttgagtattgttttgatgaatttagtgctcaatgttcaataaaactaaaacctatagattttggttattcacagataaaaggcgactctcccgagttagtggaatacattggaatgaagaacttaatcaatgctgctagagatggtgttggacttgagaatgggaagctatttttggtgtcgggggtaagttgggtcaaggaacttgattaggtttctatgagttgacatggcattataaaagacttaccaatatatctgtatagataacacgtttaaggatctaccttggggagcattggatgatgttgtaatggcaggtgtcagcgaaagtaacttcatagtagatctaaccgctggtgaaaacggtggacctaccggaatttttaaaggtttgataagataacaactctatttgccattttccttctcttggggttttacttatataagcataacatgttttgttaggaattgtttccacaacaaataatggcggatttacgagtgtccgaaccaaggtaaagggtacgactaaatgtcagaatctctccaagcttttttatccttcgttatctcactgaagcatgagtcttacacttttcttctagaactttcccgaggcggagaatgtctctgcatatgatggtctagagctaagactaaaaggtgatggactccgttataagctaatcgtccgaacaagccaagattgggatactgttggttacaccgccagttttgacacttcaccaggccaatggcaatctgtaagtaaaatcacttttgtcattcattttcgatatacttttgtgggtagattaattatagttctgttactttaaatcataggtacgcttacctttctcgtctttaagacctgtatttcgcgcacgtacagttacagatgcaccaccttttaatgcaagcagtatcatttcactacaggtttgttttcctttttgtgttaaccctcttaaaattcccattctaaatgtttgattaataagttggctatttttcagcttatgtttagcaaatttgagtatgatggtaagcttaaccctacattcaaagaaggacctttcgagcttcctttatctagcattcgagcttatatccaagaccccgtcactccaaggtctgatctagtttcttgctttttagaaaccaaactcttcactaaatgctgaactagcatttcgttactcatcgttacag

SEQ ID NO: 153442 - DNA, 571 bp, Arabidopsis thaliana landsberg
aacagagttctctcataatccaaggcttgctttgatcttttagaacattctaatattcacagagatgtaaccaaactatacagttgcatccagaaaatccgactcaagcgatttcataagcacgagtcaaccaccacagatgaaccaaactatatacagtttgcatcagaaaaaaattctgattcagcggagttcatgagcgagccacgaccatcattatctgaatttagccttgagcccagcagttgaggtacatgacttgtcggagagactcatcgggagtggaagaagaggtacgacgtctttcttccgaagggagagagtcgccggttagatctgcggcggcgagaggacggagatcggaggaaagtcttcgttggagacggtgagcagaggtgagaccgctttttaacttgacgccgtgatcggcgtttccttgaacagctacgaacgatgctgccatccacactttgttcagataactcattctttaatagtgattatatgttgtagatcctttcttcgtaaattggaaacctttgaaagatttgagaagcttttgttaaaaagg

SEQ ID NO: 153443 - DNA, 1864 bp, Arabidopsis thaliana landsberg
gtaaggctatggaacgcatcaagcaaatcttgtatcggagttggtactggccataatggcgatatcttagcggttgcttttgcgaagaagtccttcagtttctttgtcagtggaagtgggtacgtgctacataaatgattgcatataccttttattttgatataagtgaagcatgatgcttctagtttatgcatatattgtttataacaatgaggaaatcctgattaggactctgttctttctttacccagccacccaactgaggaattataagaaaggatcaattacccagccacccagcataaggctgtttactgttaggccttatactggaaaataaatttttctatcagattagtagtatagagactgtgtggtcgagaatttttgacttctgttaccttcatttctcagtgaaatattctggctgtaactaatttgtgtgcataaatgcagaaagtgtacaatctgtcttgattgttaacatagagacatgtatctattgttatatctcctaccaaactgtagggatatatttttttaatctcttaattacgttcctttggattagggatcgtacactgacggtctggagccttgatggtattttatatgactcacaggagcccattaatctgaaaactaagaagtgttgtcgctgcccatgataaagacatcaattccgtggctgttgctcgtaacgatagcttagtttgcactggttctgaggtaagacaatatgatgagcaaacatttgttgtttaagtttatggtaattcattctattgaacttttttctaatacagatgaattgagaaatttgtcttcctttctctcctattgaatgaagatgcactgggctctgatggagacatgcttcacgttcttatctgactgttggtttctgtcttacaggatcgtacagctagcatatggagactaccagacttggtacatgttgttacacttaaaggacacaagaggcggattttttctgttgagttctcaactgttgatcagtgcgtaatgacagcttcaggagataagacagtaaagatatgggctatatctgatggttcctgcctcaaaacatttgaaggtcatacctcaagtgtacttagggcctcatttataactgatggaacccaatttgtctcatgtggtaagtttcactaatcactcactacactgatgtcatttcttcttcatttttagttttaacattctaaccatgcacttgtaggtgccgatggtttgttgaaactttggaatgtgaacactagcgagtgcattgccacatatgaccagcacgaggacaaggtgacataaactgtccttggtttttgatgtatcttggtctgcctttgatgctatcatttataggattatgaacttcggcttgcctgtatttgtattggaagtatttatttttagccttttgatggaatatgttcattgccattagtcgcagagacctcttgctattctgttcagacaaataacagttcaacttttacaggtatgggctttagctgttggaaagaagacagaaatgattgcaactggtggaggtgatgcagatattaatttatggcatgattcaaccgcttcagataaagaagacgatttccgaaaagaggtctgtcagttcactgattagataatttctaatagtctggtttctgtggagcagtcatgtgtgcttgatctttagtccgaccatcatttttgaaacacttccgatgtgtacgaagaagcaatcttgagaggtcaagagctggaaaacgcagtgttagatgcggaatacactaaagctataagattagcatttgagcttcgtaggcctcacaaagttttgagctct

SEQ ID NO: 153444 - DNA, 313 bp, Arabidopsis thaliana landsberg
tatccccataattttatcctccccaaaccaaacggtcaaacctcactcgccatgagacaccttatctcacctccatggcctctcctccttctcctcctcctctcttctttcacctccggcgaatcctctctgtccgcagaaaaaaaaaaattgcacaccggtggtctcagtagacagagttttcctaaaggattcgtgtttggaaccgccacgtcagcttatcaagtcgaaggcgagactcatcaagacagtcgtggcccaagcatttgggatgcctttgtcaagattcctggtaattcactatttaacaata

SEQ ID NO: 153445 - DNA, 1809 bp, Arabidopsis thaliana landsberg
atgtatggtgctactggtgatggcagcagcagtgacgagaaaggtgtaacaaaacctaagaagctgcagattagaatacgagaaaagccaacatctaccaccgtggacgtcaataagcttaaagaagctgctaaaacgtttaaactcggagatggtctaggcttaacaatgagtagaacaaaatcaattaatgctggatctcaggatttgggtcagatgttaagccagccttcttcctcaacagttgcaactacaactgctctaagttctgcatctgctcctgttgatccttttgcaatgagctcatggacacagcaacctcaaccagtttctcaaccagctccacctggtgtagccgcgccgataccggaagactttttccaaaacacaatcccatctgttgaggttgccaagacattgcctcctcctggcacttatctttcgaaaatggaccaagctgctcgagctgcaatagctgcacagggtggtccaaatcaagcaaataatactcctctgcctgatattggtcttcccgatggtggtgttcctcaacagtatcctcaacaaacaagtcaacaacctggtgcgccatttcagactgttggacttcctgacggcggtgttcgtcaacagtatcctggtcagaaccaggtgccatctcaggttcccgtttctacacagcctcttgatcttagcgttcttggagttccaaataccggcgattctggtaagcctcctggacaacctcaatcgcctcctgcatcagttcgtcctggacaggtaaatgtgaatttgattttggaattcactaattaatctttctgatgtttcttattacatatatagatcaaatccaacacgtaaaagtgcatatcttattgtttgcttttctcctcaggttccacgtggagctgcagctccggtttgtttcaagactggacttgcccatcttgaacaaaaccagcttccagatgcactgtcttgctttgacgaagcattcttggctctggctaaggatcaatcgcgtggtgcagatatcaaagctcaagccacaatctgtgctcagtacaagatagctgtaactctccttcgggtaactaactcttgtcgatctcccctgtaatgagtttagattctgctcaaacgatgagaccatcttatcaatgctttttttctcctctctcccatttgcaggaaatcttgaggctacaaagagtccaaggtgcaagtgcattaagcgcaaaggacgaaatggcaagactttcaaggcatctagcttcactgccactactagccaagcaccgtataaactgcatacgtactgcaatcaaaagaaacatggaagttcaaaactatggctactcaaagcagatgctggaacttcttttatcaaaggcaccagcgagtaagcaagaggaattaagaggactagtcgatctctgtgtccagagaggcacatcgaacaaatccattgacccgcttgaagatccttctcagttatgctcagctacgctcagcagattatcgactattggatacgatgtttgtgatctctgtggtgctaagtttgctgctctttcgtcgcccggttgtatcatatgcggtatgggaagcatcaaacgctctgatgcactcgctggacctgcacctgtatccacaccgtttggctaaaggttatagacactatcaccgttggtgttaatcaacatctaagcaaatttcaaactggttacatgaacgaactcattcgatcgattttgtgggtttgattttgatttattcgtctgtatatgatttgattatttggtc

SEQ ID NO: 153446 - DNA, 3796 bp, Arabidopsis thaliana landsberg; identical to SEQ ID NO: 38194

SEQ ID NO: 153447 - DNA, 618 bp, Arabidopsis thaliana landsberg
atggtgtttcaagtaaaagaattcataaagttcatggacatatcgaaacatctactttgttatacgcgtttacgcaatgataatcagaaggaccagattctaagattcagaccgaagtgagtcgctagtaataattcatagctatgatttttttgtcttaatagtccatccacttcgccgaaaaaaaatcccaaacgctcagagacgatattggtatattacagaccagagaagaacagagtaaaaaacctaaagaaatggccgaacaaccactctctcttgctactatagtaactaaagaatttacctcaatcaacacaacgcatcaaacggtaaaatggtaattacattcataggagatacacatatttcaaaccttttcttatcgtaagggaagttaccatcatcttcctctcttatctccttttcacttgtttcccctaaagtagaggtaaattttctgcaaagccaaaatgggaaaccagatcaatcaaatgtttactggtttcatcaacgtcaacagtttttgaagaagccatgcaaagtatgatcagaggcttacctgaagaacccatagactcagcagtgactccaagcagaagagaccgaacccgataa

SEQ ID NO: 153448 - DNA, 824 bp, Arabidopsis thaliana landsberg
gatataaagggttaaaaagagttgctattttagctcaagagacagagccactcctgaaaggcaccgataaaatcctggccgtggtcgatgtcttactctcatcagcaccagagaatcgcatcaaaaaccaaccaaactggtacaaaatccttcagatcgaagatctaaatgaatcatcaacagacaacgatctaatcaagaaacaataccgtcgtcttgctcttcttctccacccagacaaaaaccgtttccctttcgccgatcaagctttcagattcgtgcttgatgcatgggaagttctatcaacaccttcgaagaaatctcaattcgatggagatttgaatctcatcttcactaaagtaaatctcaacactcagaaatcgaagaagaaaacaacaacgaatgagaagatgtctacgttttggacggcgtgtccgtactgttacagtcttcatgagtatcctagggtttatcaagagtattgtattagatgtcaaaactgtcaaagagcgtttcacgctgcgagtattcctcagttgcctccgttgatacctggtaaagatgagtattattgttgctggggtttttttccgatggggtttgttggtggtaaaggaggagaagccgccattgctaatggagtagatgcagctaagttcccttattggatgcctccggttttctcatccggcggcgttgcagctcctccaagtggtaatggtgttagttttgatggatggtcaggtggtgcggcgaagagagataatgaggctgtgaggagtaataatggtgttggagttaattcagatggaacaccgaattag

SEQ ID NO: 153449 - DNA, 867 bp, Arabidopsis thaliana landsberg
  unsure (1)..(867): unsure at all n locations
atggatgctccgcaactaatgggaacaaaagcctttctttcgaagagcttagcaaatgtactaacaacttttcagatgcaaatgatgttgtcggtggaggttatggccaggtctgtgtatttccaatgtcctcaactggaacaaccagaggtagtagttcaaattataataccaannnnnnnnnnnnnnnnnnnnnnnnaggtacccttcccaatgggcaagtcatagcaatcaaaagagctcaacaaggatccatgcaaggagcgttcgagtttaagaccgagattgagcttctttcaagggtccatcataaaaatgttgttaagcttttgggcttctgttttgatcaaaaagaacaaatgctcgtatacgagtacatacctaatgggtcccttagagacggtctatcaggtatatatttaatctctatatatcttgctttgttagttctttggtgctgaacttgaaaaacaaatgtagggaagaatggggttaaactggattggacaagaaggctcaaaatagcacttggctcagggaagggtctagcttatcttcatgagcttgctgatcctccaattatacatagagacgtcaaatcaaataacatattacttgatgaacatctaaccgcaaaggttgctgatttcggtctctccaaacttgtgggggaccctgaaaaagctcatgtcacaacacaagtgaaaggaaccatggtgagtaaaaaagaatctatcataaaatatatgaaaccattaactataaaaactaacaatatctctggaattaattagggctatcttgatcctgagtactacaagcgaacaattgcggagaagagcgatgtgtatgggttgggtggtatgc

SEQ ID NO: 153450 - DNA, 1672 bp, Arabidopsis thaliana landsberg
  unsure (1)..(1672): unsure at all n locations
ggcaaagtttaaagaatcaatcttaaatctttacttggaacccaagcaaacaagaaacaaatcatggcatcaggacaacgagaggcagagaggtccgccaaggccgagagagctgaggctgcagcgagtctagcggctgaagatttgaaagatatcaacaaaggtgatgtgacgtacaaattaacggagaggacaacgacgaccgagcctgagaggcctggcctgataggctcggtgatgaaggcggtgcaaggaactaaagacgcagtcatcggtaaaagtcatgatacggctgagtcaacgagggagggagccgatattgcatcggagaaggcagcggggatgagagannnnnnnnnnnnnnnnnnnnncagtactgtgcagaagactaaggaaactgcagattacacggccgataaggcaagagaagctaaagataagactgcggacaagactaaggaaaccgcagattacgcggcagagaaggcaagagaagctaaagatagaacggcagacaagactaaggaaacggcagaatacacggcggagaaggcaagagaagctaaagataaaacggcggataagttgggtgaatataaagattacacggcagagaaggcaaaggaagccaaagacacgacggcggagaagctgggtgagtacaaagactacacggtggataaggcgaaagaagctaaggataagacggcagagaaagcaaaggaaaccgcggaatacacctcggataaggcgagggaaacaaaagataagacagctgagaaagtgggcgaatataaagactacacggcggagaaagcaaaggaaactgcggataaggcgagggaagcaaaagataagacagctgagaaagtgggagaatataaagactacacggcagagaaggcgacagaaacgaaagatgcaggtgtgagtaagatcggagaactgaaggatagtgcagtggacactgctaaaagagctatgggtttcttgtcgggcaagacagaggaaaccaaacaaaaagccgttgagaccaaagacacggccaaggtaatataactagcagagtattcaatgtgtttatatatgctttgttggctattatatgatgttcgtccttaattaataggaaaagatggacgaggcgggagaagaagcaaggcggaagatggaagagatgagacttgagggcaaagaacttgacgaggatgcttctagaaagacacaacagagtaccgaatctgctgctgacaaagctcacgagactaaagattccgtagcccaaaggtatatgacatgatgtcctgaaagcgatttaacccaatggtcggaattagtggatgtgttgataatagttgttggaattattgtttgcagaggtgaagaagggaagggaagtataatgggtgcgttggggaacatgactggagctataaagagcaagctgactggtgctacgacgccctctgatgaggagacgcgcgcgtcggcccatggagacgagagcacagggaagacagttgtggcggttgacgtgaaagatactaggcctggatacgtggcgacggtactgaaagaggcggatcagatgaccggtcaaactttcaatgacgttggagagatcgatgacgaggagaaagtgagaatcgtcgtgggagagaaaaagctgtag

SEQ ID NO: 153451 - DNA, 1681 bp, Arabidopsis thaliana landsberg
gggtcacatttactgatgatgggaataagcacaacggagatcaatttgcggagattgctttccgctgcacctaaccagcaaaatcagtcgatgtttatgcatgtacgtttcttttgatcttcattatatgtaaactattagtctcgtgtttatgttgatgtatgaaacaaaaaatctgcagtatgttgctacattgagggaacaattagaacaactctccgaagaaaaaacccctgaaggccttcccaggtttacttactctcttgttgattcaccattgccattaaaaagattcctgctttttggtgtctctttctaggatcaagggttagagatttgaactggattgcttcgtattatagttgttgttctaaaagtacatgttttttggtgaaatacccttgcaaccattatgagaatgtgcttattttctcctttgatctctttgtccagagttacaaaggctaaggttaatgagtactatgagaagattgaagctgttgcttccaagatagcttctcaagaggtaagtcacctgaactagaaagggacacttcttttcacttgtctagctaggacattaggctcttgttgatatgatactttgttagttacttccccaatttttactagatgtattggtctcaggaattagtttcaggaacgcacattttggttggttcctgcgtagaaccattgtttagctgcaagaattttcaagttttacttctgtaacttataccaaatttttgatttttgctaaatttacagcctgagacagaggtatctgatgaaccctttgcaaaagattcgactagtggaagctcaccaaaaatagaagatgagcctcgaagccccacttcgccacagctgagaagaagaatcgtgtacgtggaatactagattcacatccttctcaagttgtagtaaattctttcttttagtacttatcaacttccttgattgagttagccctgcaagttccaaggagcaaagctttgatgctgctgatgctgattcatcaaaaccaataaaactagacaccgcagctcaagcgcacattgacaagcacaggtagatgcattgatcaccaagaagaactaggaactcatttctatctatgcactttcgttagtagagagaaaaatttatcgcaaagagtagagctttattgattttaatataagttcaattttgccacttcatgccaagttggtgattcatttgatgacagaaagcttcaagaggatctaaccgatgaaatggtggtacttgcaagacaacttaaggagagaagtcaaatgataagccaatctgtgcaaaatacagaaaaggtgagatgctaacctttttccttacaaaacccattatacttactattatgaattatcatcaacaatgggataagagaagaatctatatcggttcatatattgtttctactggcttcattgttcttaacattttctgtgttttttttttgttgttgatggtacattaacagatacttgattctaccgaggaagccattgagcaaagcttagcaagcacaggacacgcaaccgtaagagccacaaagatttattcagaaagctcaaagacgagttgcttccagtggctcttgatcctcgccatgacatgtgtgttcatcatggttgtcatgttgatccgagtcacatag

SEQ ID NO: 153452 - DNA, 535 bp, Arabidopsis thaliana landsberg
gcttcccggaaacacccacggagtcattgacttcactggaactgtctatccccatttggaaaaccttgatgatagcatcgcttcaatggctgtgtttcttaaccaatacaacaatgccttccatgaatcgcttcaatggtgctaattacaaggatgacgtgacttggatggaattgaagcattcaagggttccagagagaagacaaacataaaattggcagacagtagctaacgaatggcaatcaattacttcagatccagagagaagacgacgcgaatcgcgcagatcatagaaccaaattgtgagatttcattccgaacaaaaggcaaatgtttcgttcacagaatcacagagagtgagcttctaccttcgttccttgagaatgacgagcagatatgtgaagacggtgccgccgggagaagtcttcgtgataagagccgagatcacaaatgaagagaattgagcaaggattctggaagagagtttagagggagatgaagaaattagggagagaaccaattttctgagatcctt

SEQ ID NO: 153453 - DNA, 2442 bp, Arabidopsis thaliana landsberg
atgagttcttcacaatctccgtcgaccccgagcgcttcttttgtcgattctagcgattcgagtcatccagatgatcttcccccgatatacaaacggagatcagtttggacgtcctctgaagatactgtttcttcttcgaattcccccgagcagacgactcccttcacggctcgggaagataccaatgccgatatcgctcgggaattggatttacccgacgatcccgagccgcctctcgttcgtaggttctttgctccgatggctgacgaagccgggacatccaattggcaagatgcgtcaaagcccttcatgccgacggttaagatcgaggattttctttacttcggcccgaacgagacagaagatatcttgcgtcttaacgagcataaggctttcgaaaaggctgagaagaagaaaaggaagaggaataaaaaggtcgtaatgccatatcctcctggttcgtcattgtgcaccgagcggtctctctcggaccttagggctcgatttagtcttagcgctgtaaccctacgtgttccgagccctgacgagcgagccgacaatccccctgcaggtttctatactttgtacgagggttcttctatggttgcttcttgtggttaccgatcccgaggctaatcagatcgccctttcccagatcatgatgcaatctttgaggcacttgctcgggattttgattcggagttacgagtcagaaacggagataacgctagctcatctgagaaattttctcgagatccggcgggtgccaaaatccgaagtggaccggtattacatttcccccgctaagggaaagaaaattatcgatgggttcccgagcaaagacgagccatataccgatcacttcttctttgtagccattgaagatgctattcatgaagatctcctcgggactgttctgacgagatggggaattttgggtagttgtagttagaaatttattagtacccgaggtgatgttaatttcgttctctaattgcagttttccttttgcagaacgcactctcaagtttctcgagccgattccagacgattttctttcggcttttcacgcgttgtcggctccaaggtgcgattggctgaaacatttttctcgggagcgagttgagcgtgcgcttcgtcttcttcacggtgtttcttgtcccactagttcggagtcaatttttcgtggacaagcaatcgacgaaacttactttgcgggaggtctatgccaagaagaaagaggacaaggagaggcgattggcggaggagaggcgccttgttaatgcgggattgatctcgccgcgggccgatcctgaggcgacccaagatgggaatgttattcccgatgctgccgcgccggttgatgcggggttgatcttgccgcgggctgctcctgatgcgtcccgagatgggaacattattcccgatactgccgcgccggttgacgcggcgcccgctgaggctcagggaactgagccgtctgttactgcgcccgaggcggttgtggcgttacctgcaagtgccaaagcggcgggtaaacgcgttcgggttgacgatgaatcatcaaagaagaagaagaagaaaaagaagacatccggctccgaggcggagaaaatactcccgatcttcgaagatcgcattgcctcggccaatctgctcgggggatgtgttggctccttgcttcctcctccagatactctcctggaatctcggacgtatgccgagacgacatctaactttttacgggtatatgcttcattactcataattcgcctttagtttcgacattgtaaatctaacttttcctttttcaggccgttgctttgatgaaccggatggtacattcatatgatttggctatgcagagtaatatggaggcggttggcaagttagctgaggcggagtctcggattcaagccgccgagcgggagaagaatgaagcgctttccaaagctgccgcggcgaatttggagagggagggtttaggagcggatggccttcgtaaacaaagaaaacgccattaatatggccgagcagaatctcaaggcggattctgagattgtccttctcagggggatgttgtctgaggagagaggacttcgtgatagcgaggtgactcgggccattcagacgacgaggtgggaggtttcggaagccttcaccgccaagttaaaagctgccgagcacaaagtgtcgctccttgatgaggtcaatgcccaattcatttacctatctcaggcgcgagcaaatgcgtagctaatctaggcggggttctggagagagagaaagaacaagttgatgagtggttgaaggatttcgctgatgctgaggtaattcttaatcgtttcatgggctgagctgaaagacgatctcaaagctccagctcccgagcccgctcctctgagtccgggtggtcacagatcggtcgagtcattggccgat

SEQ ID NO: 153454 - DNA, 195 bp, Arabidopsis thaliana landsberg
aaaaagatggaacctcagagaaaacactcgacagccctccacacgtgtcatccctgccggcgaaccattccatacagaatctacgccgtatttcacacgtgtggcatcatagctctcatgtatcaccacgtacactcaaatggcaacgcaaacaacactctaataacagggcttttttctcctcctccgaaatag

SEQ ID NO: 153455 - DNA, 3210 bp, Arabidopsis thaliana landsberg
atggggaaacgagagaaaaaacctaatcgacgtcgccacaaaggtgaatattcgaatgatgctgaagatttctacgatcaacacccgccggctgttgcctccgtcgacgaagaagatgaagaaaactctgacgaagaagaagaagaaaatgatggaaacgaatcatcggatttgccttcaaagtttctcctttaccaacaatccgttcaggtaactgcaattctgtgcttggccttctaagtttcattgagtggttcttactggttttatgaaatcagttaaaagtacttaaattttcttagggagagagttctctgtatctcttgtataaagaagcactaagatttaacaaattgtattgtttgtgtttcactgttcttgttctatcatcaagcactaagctttaacatttgttgttcttgtcttttcattgctttttgtttgttgcagtcaccaaaaggagacataagttacttgcagaagttctttttaatgtatgttggtggaagacaacctttccatttccaagaagatttctgcggcactgctcttttaaggttgttgtgtgtttcactaaatggtacaaaataatgtagcttttggttttcttgcttgaataagtttttacattgattgttggaatagtgcggagtggctgaagactgacactagacggactgctatagggcttgattttgatcttgaggcgttagaatggtgtatggataacaacattagtaaacttggttctgacgtgtattcaagaatgtcgcttttccatgggaatgttttaactcctcttgaggctaagcaagtgaaatctaaatcccatgagctgatacaaaatatcagcttggatgatggtgatgataatgaagatttggctgatccgagtgttgtcgaatctttagagaaagatggacctgattcgttgccaaagagggatattgtgtgtgcttttaattttagttgttgttgtctccacaaacgctcggagttggtttcttacttcaagaatgcacgtgacgctttgtctaagaaaggtggtatcttcgtgatggatttatatggaggtgcttctgctgagggacagttgaagcttcaacggaaattccctaatttcacggtaatagttcattcttgtacttcattcggtaaaaaagggtgtcagagccataaatatcgaacttactagagataaccgtactaacgattgtccatattcatttggcagtatacatgggagcaggctgagtttgatattttaagccgcaagacaaggatcagtctgcactatcaccttcagaagcagaacagaaagattcgccatgctttttcatatagctggagactgtaagtgtcctgtagtctacttccacatccattctttcttcaaagtgggacagtcattacccacaatctcccacaagccttaagaaaatattacagttacaaaaaaacgaagcatatttggtacttaggggtttgcttagcattttagataacttgataagtgtaggcttttggtaattttggttggctgggtgaggtagagattctgtagtgcagccactatggatcaaaacttacacaaacatgtgctcgaatgttactgatatctaaattcatatgttagtgacttatccttgtgttggctggtaagtagcagtgaaatgatattgaatgttatattcgggcaagacaatattcctgctttccttattgtctgtagatttattgtacttgcactcttgaatcattaagttcctgagaagtaactcctggatctgctgttcatatatgtgtaggtggtcattgccggagataaaggattgtatggaggaagctgggtttagctcagtccatttctggctcagagaaatgccggacgcttctgaaatgcgtagaacagatgggtttggtgctggacgtgatatcaagtacgaacaagtcaagagctttcaacagtgtgattcttggaatgcttacattgttgcggtcagcctctagttatgctttctatcttttgatcaaaagacactagccctttaactcagatcctttgtcgattttacatctagtatttatttctgacacgcactggtttaggggggggatttcaatttttgtttattttttttggcggctcatgatttcaattatcaagtacaaaattgttaaaatgaatagtgtaggtgcttctggaatcttcaacgctagcccaaaagccaaataacaccattttccacaaattgtccaatttccattttacggccaacaaaaaaaaagagtaaaataacaatttaattttgtatcgattgcgtcgtcgttagttttcccatttcctcataattcttcatctctttcctttctcatctctcgattcctttctttctttccatataccattgatctctctcttcttataaaaatacagattctcaccatcaccgattcgaacagatctataaatcgtttctttcaccaggtaatgacttgttgttttcgccgatccattacttttttttttttctgttctatagttttgatgagattcaaacaacagatctattgatttttgattccatcgaccggttaattttgtagaattttttcgccggagttttttttgatccattctgttatggcggaagaacacagacttcaagaaccacgattatgtgctaacaattgtggcttcttcggaagcaccgctacacaaaatctctgttccaaatgttttcgagatctccaacatcaagaacaaaactcttccaccgccaaacatgctcttacccaatccttagccgccgttggtgctgctgcgtcttcctccgtgtcgccaccgcctccgcctccagctgattcgaaagaaatcgttgaagcgaaatcagagaaacgagcggcggctgaaccggaggaggcggatggtccgccgcaagatccgaagcggtgtttgacttgtcggcggcgcgtgggaatcacggggtttcggtgtaggtgtggtttcgttttctgcgggacgcataggtacgcggagcaacatgaatgttcgtttgatttcaagcggatggggaaggataagatcgctaaagcgaatccgattgtgaaagctgataagcttgagaagatttgaaaatgttgattgttgtttgttgttgttgctttggttttgtgcgtttgaatgaaacacacataagaagaaagagc

SEQ ID NO: 153456 - DNA, 1476 bp, Arabidopsis thaliana landsberg
gcttctttcatgtttgccattgtcgactgcaggactcgcttccagcaattagaagatgcaatcagcgaaaaaaaggaccaaatacgtgttctcgagcaacaaattattgagattttcggaatgactccttatgcctcagattctctaggaatgtcccaggtacaataacagatcaagaacagaaacaagagtttagatgtagaaatagtttcattcaggattatctgcttatatgaatccatttcaatacacttcctggataatattcccgtgtttgcttgatataggttctgtcgaagctcacgatgcaactaaatgagaaaatatttgaacatgaggtactcatcctcttttcttttttctctcattacttctcactcggtattgttatagatcagaatatcgctgactcggtgacaatgtcttttgctatgaaatgcctttttcaagataaagtctgcagacaataggatacttcaggagcagctgcagatcactgtaagctaaaacttcatataatggttctgtattttcaatgtgtgaaaggttgagaactaccagtttgaagttcattattaccctaataatatacacagaaatcagaaaacgctgagatgcaagagacaatcattctactaagacaacaactagattcgttagcccagagacaatcaacacagaaaatcgcaggagacgaatcatcagggaagaatattcataactgtgaggagtcagaaatctactctggagctggaacaccgaccagcgtgatgagcttaaatagagtatttgctcaggaagagactaaagagatcaacaacgaaacagctctcaactctcaggtatctttcccatacaaaatttgctccttcattcatctacccgacacagtaaatcattgtgataaacatttttgggggtttgttcacatcactactcactaggcattggaaatagagaatctgaagaaggagaagatgcgattgattgaggaaaaagatgagcttggaaaacttaacaagaaactcactgaagaagcttcttatgctaaagaattggcgtctgctgcagcagtagaacttcagaatttggctgaagaagttaccagactctgcaatgaaaacgcgaaactcagcaggtgaaaaaagtttcaggtctctctgttgttactcggagactccagcttcaagatagtgctgcaaagtaaatcatcatcattgacctatgatgcaaatctcagactacttggaaggtgatgatgttgatccatcacagggaacaagagatcatgatgctcacaaaggcaaggattcaaccaataaaaaatggtttgtattgcttggatagtattttgattctaacgtctgatgacaaacacatgatgtaaatattcctcacaaatttgttttcttgttctcagtgaccactatttttgtatgttcttaggttgaatcaatgatgttgcagcaagttcta

SEQ ID NO: 153457 - DNA, 756 bp, Arabidopsis thaliana landsberg
gcctctctcagctaaacccttcttcttcttccaccgtctccgccacgaaccagagaaagctcaacaatggcgtcaatcctctcaaagaagcagaagaagaacgaaaaatacaccttgaaagagctcaaatcattaggtcatgacttactcacttctcgatctcacatcaataaccttcctctccttctcaccttcgtctcaccagaatctccgccgcagttcgtcgttgaatcactcctctcactccaatcctttttcactcctctactctctcagcttcctccgacttcttcgtctccttcttcaaccaaaacagaggaccctgaagttgtgttcaaagcttggctcagatcaaaatttgacgaattcgtcaagcttttactcgatgttcttgtctctcaacaatcagaagattctctaagggtaagatttttctatctatcttctctgcgttctcttgaagttacatagctttgttattttttgttacctaatgtttttggttgatttagggaattgtgttgggaacattaatggaatttgtaaagcttttgaatgctggaaggtttcattcttcaatctaccacagattacttgatgctattgtaagtttagtctcagacttcttctttacgaaattgttattgcaagtgcttgatgttcttactattgttcactgtagattcactctgaggttgatattgagatattcttggatatacttacttcaaagtacttcaagtacattgatgtccg

SEQ ID NO: 153458 - DNA, 1254 bp, Arabidopsis thaliana landsberg
aattccagttgtgtgaaaggctgatgttaaagtttcagcagcatctaaccaagcgaaagctacagagagcaagtccaaaaataaagctgataagtgtcatgtgaatgctggagctatcaaagttgtcatgtctggtagttgttgtgacaatactgagaaagctgaacaggtgataatgcgatgcttggttaatgtttgagagaatatcatgatcattagtcctctcttatctttaggttctattacaagttaatggtgatgtggatgctgctatagaattcctgatagcagaccaaggaatggagtctttgactgaaaatgatacagaaaccgcctctgcatcagataccatcaacccaaagcatgcaagtgatagtccaatggaaaacaccgagcaagccagagaagaattgatagaggaggaatcagctagcggcaataacagtgaaacagtccaagccaagtgcactacacagaccgatgataaggtttgttggctcgctaaaaccatgagatagcttatttccttatgattgcattaaaatatgatccgaatataaaaggatttctgtgaaaactgcagaagatcccaaggaataaaacatgtccatgtggttcaaagaagaaatacaagtcctgctgtggaacagcaactgggagatcctctgtaaaactgttagtgtaagtttcttaaaacggttctgcaaaacactcaaagcagaacttaactaaagatgagtgtttcttgattaatttgcaggagccaaacaatggagtcgaagaaggggagaaagaatttgagaagaggaacatcgaatgaagttgaagcaaatgcaccagatgttggtgctctttgtatataattaagtctcactcactcaaggtgatcacgttttcactccatttattcacaccaaactcttttatctgtttagcaagaacagtaattggttactaaatccgtttggttatctctctatttcaggcgaagacataaatttagtatgaacttggagttaggatcactcgcgagtataccttttttgttgtctgattaaattaacagaaagaaaaaaacttgttataccgtactcaagaacatatatgtattacagagcccaaaaatagctcgagaataactcaaattcattaaagcataacttggttaacactagctcagatgatgattgtgatgatagtgatgatgatgatgatgaatcagggacgagagaagtggaaggtgtgaggaatgcg

SEQ ID NO: 153459 - DNA, 1843 bp, Arabidopsis thaliana landsberg
atgagtgagccaaatcgggtacccaaatccatgacccgacccgtcggaggaaccgagtacagctggtgcagagcgattgacggcggcacaggtatcgccgtcatagctctcttactttcccgaacaccaaaactccaaaatctccaaaataccctcgacaaactccagatttaccatcccactctccgttccaacatccgtttcgacgcatccgctaactccttctccttcgtcgttacgtccgccgccgattctcacgtcgaaatccatcccttcgattccgtatctacggctcagatcatccgagacagcgacgatccatgcgctgatccacacagaatcatcctagaacacgagatgaacaaaaacacgtggatcaatccacaccgttggatcaaatccgagtcacgcgtgtttatcgtcagtctctacgatctaaccgacgacggagagcaacggatactcacatttcggctgaacacggcggcggtcgatcgtactgcggcggttacgcttctgagagagtttatgaaagagacggcggctgatggtttcggaaacggtcccgtggtggcggcgacggagacggcggtgggattaagtaaggcgatagaggagctgattccgagtgggaaaggggataaaccgttctgggcgcgtggcatcgacgtgcttggttactcgttgaacgcgtttcggttttcgaatttgaatttcgtggacgcagagaattcgaaccggagatcgcaactggtgaggctcaaattggatagagatcagactctcaaacttgtggctgtaagttactctccacaccattcgattaattaattatgtgttaattactattcttacgtgttaaccatagcgtattagtatttgttaccatttttgcgtgtatgaatataaaataaatatctcacgaggattacgtaaaaaataaaataatagttacttttattttattgttatgtacataattttgagtaatccatagtctacaaatactcattgttgcaattacatatgcatacattgaagggctctacatttagtttgtaactcaaaaaggactaagaggatgatggtttgtgctaaaaaagctttagattgtttctgaaaagttggagcaattcaatcactatttgtagggatgcaaggcaagagggttaaagttatgggcggcattagcgtcctcggcgttaatcgctgcgtattcctcgaagaatctaccgccataccaaggagagaaatacgccgtggtgactctttcggattgtcgttccattcttgaacctcctcttacttcaaatgactttggtaagctcgaaaatttgggattactatagcctttgatgatatatatgaggaatagatgttcatagattatcttctcatgattgcaacaaattttttatgagctagtgatgatacggttcaagactgcatttttgtagttcttactagacattttcaaactcgttacactaacaatggacaaatgcaatttgatttggatgttgtagtattgatcatatgatttgaacttgatatatttcttattttgtttccaggtttctaccatgcagggatccttcatacacacgatttaaccggagaagaaaagctctgggacctagccaaaagatgctacgactcgttcacatcctccaagaactcgaacaagcagttcactgatatgtcagatctcaatttcttaatgtgcaaggccatagagaatcctaatctcacgccttcctcgtctctgagaaccgctttcatctccatatttgaagatcctgttatcgacgagtctccagagcctgaattggcttctcttggg

SEQ ID NO: 153460 - DNA, 1642 bp, Arabidopsis thaliana landsberg
acaccaatctttgattactttgtgtaggttgcattaccacaaaggagcttggtaccgtgatgcgttccctcggtcaaaacccaaccgaagctgagcttcaggacatgatcaacgaagttgatgcggatggtaacggaaccattgatttcccggagttcttgaacctaatggctaggaaaatgaaggacactgactctgaggaagaactcaaggaagctttcagagttttcgacaaagaccagaacggtttcatctcagctgctgaattgagacatgtgatgactaacctcggcgagaagcttactgatgaagaagttgatgagatgattaaggaagctgatgttgatggtgatggtcagatcaactacgaagagtttgtgaaggttatgatggctaagtgaggattgaaacaacttcttcggctttctcctcttttttttttgactaccttcttatgtaatttcataaagaatgttccttcgctttgttctaaaatttcattcatggctggtttttgctggttaaaaagacaggaatgttatgtgtttttaccttttgtctaaatgactcattgttcatgttattgacaggttcaggacctgattcttgaaatataacagtaatgagatcttcttctattatcttcgtattgatcattctctttagaatctgtcgtcgtatgtagaagcaagaagatgcttatcggttgcggtaagggtagggagcttaacccgagttggctcagacgatgaatgtaaaggagagaagagtatagaagttgtctcagacattccattgttgaagtcaagcacagtctctaagctgtaaatactctctccagctgcataaccacctaagagttgatacgatctgtctgattgatccatcgtcaaacacatatcttctgaacctatcatcaatcaattcagatttcttgagtgtcacaattaggttcaatttgctaaatggtttcctcaatcaaaaattcaaaattcaaaacttacaggcagcaagttcaagctgagtttgataaacgaattcaagaactgcggagacatctcgctcgaattcatgaaacggtccgtcttcgaaattcatcttccttagcttacatactccttctcctaactccatcatcgctcctttatggttcttcaaatcccaaaacactcactaaaattacctcaaacgtgaacgaaaacgagcaatagatggagttaaaaggagagtagatttacgttgttgaatagatggtgaaatccaacagcacattgaagaattccatggattaaggtacgagttggttcctctgcttgaatccaaagagcttcaagcgcgtcatgacttttgtaataatccctcttgttgaagagagtcactgcttcctcaaagctccaatattcttccttatcctcgtcactatcctcttcgtcttctccggcgtggtcgttgtatctgacgattgatcttcgactgaaacggacgcgtatggagctaaattttgtggaggctcgaatcgttgaagcagtaacagagattggagaagaagggattaaggagctgaagaaagaagatggaggaagcgtgaaagatgaaggaacctggaaatgtttcgaagaaactgccattatcaaagtcaaag

SEQ ID NO: 153461 - DNA, 806 bp, Arabidopsis thaliana landsberg
ttttttttttcatatgtgttcagcgatcactctgtgttcttaccaaagctaacttgtaaaaatgagagggaggatatgtttcttggcaatagtgattctctgttctttctccttcatcttagtaagatccttaaacgaagaagggcgtgttcttctggagtttaaagctttccttaatgactccaatggctatctcgcaagctggaatcagttggattcaaatccctgcaactggaccggaatcgcgtgtacccatctcagaactgtaacttctgttgatctaaatgggatgaatctatcaggtacactatctcctctcatatgcaagcttcatggtttaaggaaattgaatgtctccaccaacttcatctctggtccaatccctcaagatttatctctctgtcgaagtctagaggttcttgatctctgcacaaataggttccatggagtgataccaattcagctaaccatgatcatcactcttaagaagctgtatctatgtgagaattatcttttcggttctatccctagacaaatcggtaatttgagttcactccaagagcttgtgatctacagcaataatctcaccggtgtaatccctccttccatggcgaaattgagacagctccggatcattagggcaggacggaatggattctcgggtgtgattccgtctgaaatcagcggatgcgagagcctaaaggtacttggattagcagagaatcttcttgagggttctcttcctaagcagctcgagaagcttcaaaatcttactgatttgatactctggcaaaaccgtctatctg

SEQ ID NO: 153462 - DNA, 562 bp, Arabidopsis thaliana landsberg
atgctctccttcccgtctctctctgcctcatcgctctctcatctccgatccttcgtctccctctccaacggtcacttcaaactcgtcttctccgcaaccaccgtagaaacatctccctcttcctccggatctgttagcaactgggactgctgctccgtttcactcttctcaaaaatcgccaacaagcgaatcggatcgatggagagtttttcgaatgcattggcttcaaaaggatggacaatttacaaaacgaaagagaatccgacgccggaatctactaccaacggagtgagctcagtgtatctgtttaggaaagtgtatactggtcggatcatgacccgagaaggaaacgggtcgtgtagagtaagagagctgagacttcctcaattggatttcaggaacgcacctctacggattctgcaatatttgatgttgatgactgacgatatatttttccttgcgtaaatttgaaactttttttttttgtttgttttaatctgtttttgatttgtttctttaatgtaatcatctgatttacaaagattggatctctttggcctgt

SEQ ID NO: 153463 - DNA, 1783 bp, Arabidopsis thaliana landsberg
taaatgctttctgcagatgaagacacagcatgtgatgctctccatacgctggcagatctatcgctgatgatgcctgaaactgccactgatactggtgggatcatatgtttgacctataatcaatacacatttataattttgaacgagtgtcttaagcttgttaatgttattggccatagcatataattacactgatatggaattaagttcagagtctgatttactttcatgaaaattcatattggttatctactttctcaatctaatcttgatttaatttcagagtcatcagttcaagctgaggaaaagaaagctggagaagcttatgtttcagattttaaagggactgatccggcatccatgtctaaaagtagttctcttagaaactccaaacagagaagatacggcagcaatgacctttgtaaccctgaactcgagagaaaaagtccaagtagttctttaatccaaaagagacggcagaaagcattaccagctaaagtaagagaaaatgtatatatttagcaaagacagacttgccattactgttctgttgtcagaattcatgatcatgttgaagctgttctcttcctgcaggttcttaaagatgagcttgctgcaagctcacaagtcatagagccttgtaatagcaaggtatgtgtcttcttgtacaatacaactcgtgtgatttatacagtattccacacagtacccatcggcgttctctttggaatgtattatatcattggcaaccaaattatttgattatttccctttttttcatcgaagatttccttttgtagcttttatcttaggactgattatgatgttgtagggaataggtgaggaatataagcctgttgggagaggtaaacggtccgcaagtattcgaaactcacatgaaaagaaatctgccaaatctcatgatcatacttcgtcaagtaacaacatagtagaagaagatgagtcagctccatcaaatgcagtcattaaaaaacaagttaacttgccaactaaagttaggagcagaagaaagatagtaactgagaaacctctaactattgatgacgggaaaatttctgagactatagtgagtgaactttctgatactcagactttattcccaaatgataaagaaaccgcagtgatacatctttcaatcttaagatctttaatttctatggaatttagtctgtgagttccctgattatatttataccatatcctattattctgcaggagaagttttcgcattgcatttctagtttccgagcacggagatggtgtatttttgagtggttctacagtgcaattgactatccatggtttgccagacaagagtttgttgagtatttggatcatgtagggttgggtcatgttcctagattaactcgcgttgaatggggtgtcataaggaggttatcactaactaaaatgctgttaattttctacttttcttcgtgtgtatatggatgttcccttaatcatactttgttggtgcagttctcttgggaaaccaaggcgattttctgaacagtttctgaaggaggaaaaagaaaagctatacctatacagggactctgtaagaaaacattatgatgaactaaacacgggcatgagggaaggacttccaatggatttggcccggcctctaaatgtttcacagagagtcatttgcctgcatccaaagtcaagagagattcatgacggcaatgtcctaactgttgatcactgtaggtaccggattcagtttgacaaccctgaattaggggtagaatttgttaag

SEQ ID NO: 153464 - DNA, 226 bp, Arabidopsis thaliana landsberg
cacaaacaaacaataactaaaatggctttgtcttccaaaaccctaaagtcaactctcgtcttcctctctattattttcctctgtttctccttgatcctagctcacggcggcatagacgacggcgacgaagaagaggagaccaaccagccacctccggcccccggaacaaccaccgtcgtgaataaacgatacaaaggcttggtgcttgtgaagatctactgtatta

SEQ ID NO: 153465 - DNA, 1442 bp, Arabidopsis thaliana landsberg
tggattcttcacgtttgtttatattttgggttggctctacacctactctcagaagtcataagccaagcaaagggggttttagggtttttgaccgcgagccagatctctttctcttgtttctcccacttccgaatcaatggccttctcttctctcctcagatctgccgcctcctatacggttgccgctcctcgccctgactttttctcgtcgccggcgtctgatcattctaaggtcagagacgacgttttacctttaatcgatgttatgttggatatgtttagcttcgtttctgattctcttgcgtttctgttcgatttgattcgcttttagcttaggtcgtgctttgatctgcttgaatttcctttttacgcgcctttggttactttgaagaagttgtttgatgtgataaatattacttggaagttgttctgagtttcttagcgtaagcttgtgacgtttaatcctatttttgtcttcgttcttgcgttttttgtatctagtctcgtttaacgatgaatttcaacttgtgaggtttcaaatcttatttgttgctcttttagaatgtctaatggcaatacatttggagttgtttattttttatttaagtttttccaggaactttgcaagaaaacaatcgtatttattatcttttgtcacaaatttctcaggtgttgtcaagtcttggatttagtcgcaacctgaagccatcaagattttcttctgggatatcttcatctctacagttcagtgacaaattctgtaacatgtgtaaaagttattgatgtatgatgcacttttcgattctcagagtgtttgttttgtttatgtttaaatgtacagaaatggcaatgcaagaagtgtgcaacccatcaaggccacggctacagaagtgccatctgcagttcgaagtaagtaagaaaattaatagttttattggatgtgttttcctgttgtgtgcttattggtgaatttgatttgcttgagtagggtcaagtagcagtggaaagacaaaggttgggatcaacggtatgtgcttttattgattgatgccatttgtttgaagtcccagatcatcatttactttcttaagaattttcttttaggcccccaactttttccttttcttatggaagctcatttatttttgctgtgagtgctgcaggttttggtcggattggaaggttggtcctccgcattgcaacatcaagggatgatattgaggttgtagcagtgaatgacccattcattgatgccaagtacatggtaaggatgccttacaatctgagtcatgttcttgcttgcttgaacctggtatagtttgagaaaacattgaaaatgcatcatatgttagtcctctttttcactgaacaaatgtctggttttctatccccctattccacaggcttacatgttgaagtatgattctactcatggaaatttt

SEQ ID NO: 153466 - DNA, 216 bp, Arabidopsis thaliana landsberg
atttgatttttttatataaaaacttcatttgccagcatgattggctctaaactcgagctgaggacatctgtaggagttgtgtcgtggtcgtctttggttaagagaagaagaaatgggttcaatgttcagtggaaaccgaatgagcaaggaagagatggaggtggtggtgaacaaggctaaagagatcgtctctgcttatcccgttgttgtcttcag

SEQ ID NO: 153467 - DNA, 937 bp, Arabidopsis thaliana landsberg
  unsure (1)..(937): unsure at all n locations
atgcaagcattaataacacttcaagccaaagctcgagaacagaggattcgtatgatcggaggagattcaacaaatccaagaacatcgattcacaaaaccaggatcaataacttttaccacgtaatggatctacaaaacccatatctcaaaatccaaacttgacaatgactcctcaatttgacctaacttttaaaatcctctgttttttggcaggagaatgaagaaaacatcaagattgtggaaatggacattcaatcgaaaatgtactctccggctccttcggctttaaccgagatgagtcctcgcgcgtatagtagccatttcgaggattgtaactcattcaacacagctcaaagtagtcctcaatgtttcagcagattcaaagagtattacaatggagatactttgtcttcttatgattaccctctcttccctaattacatggctaatactcagtcttctaaagccaaggctcggtctcaaagtgcgccgaagcagagacctcctgnnnnnnnnnnnnnnnnnnnnnnnnggaggagaagatcttcgatggaagcaccgaggaataacggtgtcccgagagctgtaaggatgcagagatcttcatctcaactagggtcaaacacagccaaggaaagtcaacaacatcatcatcatcatcagtactatccgtggatggcgataaagctcgatagatctaatatttcgcttatggagagcgaatcggatctacaagtaccgttatgactaataccaactacggtagacatgttgatgtgagtccggaaagattacttgtttcacaagaaaatatgaattttgagattagcacttatatttcttgactttgtattattgcaggttcagggaaacaacaacatgtactgaacactgtgctttagaatttgagagattgctggaaaaataggcaagccta

SEQ ID NO: 153468 - DNA, 1024 bp, Arabidopsis thaliana landsberg
gtgtgtatggagattgtggtggtgcgtgggtcaatgaaaagtaagtttctttcttccaagtttcatctcttttgttcatgatagataaggtcgttccttcatattgcagtcatctcccaaatcctaaaactcagtcagccaaagtgagattagctgcagaacaaggatggttaagcttgggtcgtgatcttggggtttcgactcaaatacttcgacttgggggtatttatggacctggtcgaaggttgtttacagcttctgattgtgtatgtagtgcttaaacaggctttaaaactgattctcaaaaggaacgtttcttgctgcagtgcaattgataccttgttaaagcaggagcgtttgtctgaaggtcaaaagagaagagcgtcccgtaaattcacgtcgagagttcatgttgaagatatatgccaagttcttaaagctgccactgaaaagccagcatcagggtttgtgtatccctcttcatctatgatcattcttttgagatgaatgattgaaccattgagacggatgaatcaaccattttggcagggagatctacaatattgttgatgatgatccggcagcaagagaagaggtgtttgaatatgccttggagttgatcgagaaacgttggccggggaatatcaccacaaaaccatttccatttctgtatgaatctcgggaggaaagttcattgagaggcgagaaacgagtctgcaacgaacgcatgaaggataaactaggagtgaaattgctatatccttcgtataagtcaggactgcaaagcatagtcgagaacatggacaaccgtttttgagcacaccacaggactaaattccgctgatctgaatctttcctgtggagaattagggactctttagtaaagacagatttttagtttatccttttttgtttcttctgcattctacaaaatgacaagtttgtttcattggtacacatattttccccatgtgacaattaaacatggaataaaagtaaaaagggatacaaaatgtttaaggga

SEQ ID NO: 153469 - DNA, 1183 bp, Arabidopsis thaliana landsberg
  unsure (1)..(1183): unsure at all n locations
tcctaaatcgaaatcacagatgannnnnnnnnnnnnnnnnnnnncttccactcgatacagatccttcttcgtcttcccaattctcttcgccgtcttgttcctgggacttctgattccctcctccgccgataaccgccacgttatcaacttccgatcgccgggactctacccggagggactaacctgggatccaagggaccagcattttctagtcggttctctccacagccgcacaattcattccgtctccgacgctggagtcatcgaaaccctaatctccgatctcgatctaccggagaactccactatcctcggtctcgccgttgactctactaatcgccgtctccttgcctgtatccagagtttgccgcctctccctcccttcagtgccctagcctcctacgatctccgcagcggaggccgtcgtgtattcctctctcctctcccgtctcttcccggagacgacgaagacatcgctcgtgatgtcgccaatgacgtggcggttgatttcaaaggaaacgcttacgtcaccaactcagccaaaaacttcatctggaaagtcgatcgcgacggcgcagcttcgatcttctccaaatcgccgttgttcaattcgcagcctgtggcggcagacgcggacgcaagtttccgcgattgcggcttgaacgggatcgtgtacatcagcaaaggctatctcctggtggtgcagagcaacacagggaaggtattcaaagttgacgaagatagcgggaatgcgaggctggtgttgttaaacggtgatctgattgcggcggacgggatgacgaggagacgtagagacggcacagtcatggtggtgtcacagaagaagctttggttactcaaaagccaagatagctggagcgaaggagttgtttacgacgaaattgacctcgacatcgagggctttccgaccgcggtgacggttgcgggacgggataggatatatgtgttgtatgggagagtgatggaggggataatgggaagtagttacaaagaagaaggagcgagggaatggtttggtatagaagaggtttggtcggagaaggaaggtggtgaagataagatttggttgtatgtgttgattggatttggcttcgcttacttctgtttctggagatttcagatgaagaagctcatcacaaacatggacaagaagatcacttag

SEQ ID NO: 153470 - DNA, 1210 bp, Arabidopsis thaliana landsberg
taccgttgctgattaagatatctatgaatactggtttaacgttcgtcttttgttttccagactttgtcctttctcaattcatctctgtaagtttgttctgtttctgttttatctgtttatttccgaatctggtcccgtaaattgtttgttcgttagtcatgatcctaaaggtttggaatttgcaaaattgatcctcttctttataggtaatgtatgagaaaaatcggcaggagcttcttgagctagctaagaatttgttggaacgagaggaggaaccagaattgcctgtaatatcccaggtagtataaaatttcgttgagttaacctttttttaattcctgatcactaatggtttaactctaagcatcaagatatatattaataagttggcgtgatgattaatgtgtcgctgatagaaaactaattgatgttttggattgtttttatgggttttaagtattcatcttttggatagtggaaacactattctcgtttgtttgctttcacttttatattatttctagagggatgctatggattgagatgctttattcgaatctacgaataaaatatgactctgattaatttgatatatatgatgcagaaaacgttaatcgtttggggagacaaggacaaggtgtttcccttggagcatgcttatcggctgcaaaggtaaatactacattgatattttatggtaataagtcccataacaagtgttgtcataataactacatccgtataaaatatttaatatttctactaggtcaaaagagatgaaacatcgaacgtgaacgcatgtgattattgatcgtgaatccaatatgtcgaaactaataaaaattatatacttttgcaggcatttacagagttcaagattagagataataaaggaaacaggacacgctgttaacattgaagcaccaactactcttaataattttattacttcgtttgtcttaagtgcttgatttctatttttgtatatacttcttcttcatataaatatctatatgcatttgatttaagtgtatatatagttgacatcatttaacatatcatcaactgctgagtcatcaaagagctaaaactttcaagcttaaaatggagaggacaactaaaattacaaaaggaaaaaacaaaaacccactaaaaaagaagacgaaatagttagaaagtcccacaactacgaaaaaaataactgtattat

SEQ ID NO: 153471 - DNA, 782 bp, Arabidopsis thaliana landsberg
tagtcacctctctatacccttccctacacacatggagacactccaataaactcttcttctgcctcctctgcccatttctcccaaaatctctctctctattttatcagtctctctctcagataatggcaatgttgggcttggttttatctgttcttactacaattcttgcattatctgaagcaagaatcccaggagtttacaatggtggtggttgggaaactgctcacgccactttctacggtggctctgatgcttctggaacaatgggtatgtctctctccctctctctcttctcttccacattctcatcaacctaaagttccaatctttttttgtaaccacattgtgaaaaatgttaaaatcttgattttgtaccttaaagatccaatctttatgttcatctatgctaaaccaaaccaccacattgtcaaattaacggttttgctctgttttttgttttcaggaggagcttgtggttatggtaacttatacagccaaggttacggtgtgaacacggcggctctaagcactgctctgttcaacaatggttttagctgtggtgcttgttttgagctcaaatgcgcgagtgatccaaaatggtgccattctggtagtccttcaatcttcatcactgcgactaatttctgtcctccgaactttgctcagcctagtgacaatggcggttggtgtaaccctcctagacctcactttgatcttgctatgcctatgtttctcaagatcgctgagtatcgtgccggaatcgtccccgtctctttccgccg

SEQ ID NO: 153472 - DNA, 1578 bp, Arabidopsis thaliana landsberg
  unsure (1)..(1578): unsure at all n locations
tggggtctcaacaacctagttgagggacatcgcggctcnntttaagactgcaaagatcttcaccacatgggtgcttctttcttgaaacgatcaatctccaagatccaagacggtgttaacgattcacggaaactagccgacgctagagcgtacctaagcgccgctctcaccaacaagatcacatgcttggaaggtcttgaatcagcctcaggtccactcaagccaaagctcgtgacctccttcacgaccacttacaaacacataagcaactccctctctgctcttccaaaacagagaagaaccacaaatccaaaaaccggcggaaacactaagaaccgccggttacttgggttatttcctgactgggtctataagaaagatcaccggtttttagaagattctagcgacgggtatgatgagtatgacccgagtgagagcctcgtggtcgctgccgatggaacagggaatttttcgactattaacgaggccataagctttgctcctaatatgagtaacgacagggtgctgatatatgtaaaggaaggtgtgtatgacgagaacattgatattccgatctacaagactaatattgttttgataggagatggatccgatgttacatttattaccggaaaccgaagtgtcggagatggatggaccactttccgatctgctactcttggtaaacatctttgactcttttaaaaatcttgtttatataaaacaagactcaagtggtattgtttggggcatagtgtagactttaggaccgtagaatttttgcctttttttgtcaactaggaccatataatttaattttaaataattatatatgaattttctatgaaattaaaaagtaatattttaaatcttacaatctttggtttaggaaaaaaaggtgaaatagttgtgaacataagtaatcttgtatggttcttggagccatatttgttgcaatgacaaaaattaaaagcgataactaaagtggttggtactaaatcgagatagtaatgcttttcaaacttgcttttgtcacagcggtttccggcgaaggattcttggcgagggatataatgataacaaacacagcaggacccgagaagcaccaagcggttgcactacgagtgaacgcggattttgtggccttataccgatgtgtcattgatggttaccaggacacactttacacccactcattccgacaattctaccgtgaatgcgatatttatggaaccattgattatatctttggaaacgcagccgttgtcttccaaggctgtaacatcgtttcaaagttgcctatgccaggacaattcacggtaattactgctcagtcacgagacactcaggacgaagataccgggatctcgatgcaaaactgctccatccttgcgtcggaggatttatttaatagctcaaataaagtgaagagctacttgggacgtccgtggagagaattttcaagaacagttgtaatggaatcttatattgatgagtttattgacggttcgggttggagccaatggaccggtggggaagcacttgataaactttacaaaggcgagtataacaataacg

SEQ ID NO: 153473 - DNA, 4814 bp, Arabidopsis thaliana landsberg
atggatgatttcacaggattgttagcgagagacttcggattgaaacctcagggcaaatcagctcccatggcttctcaatcgaactcttctgccgctgatttcaacactttcgcttcttcttatagcttcgccaccgctgccggtaaaaagtccgattctttgccaatgtttgacgatcctggtcgagatggtgatgatcttctcttcaaagatgtgtttagtggaccaccaccaccaaagtacggatcttcttctggtgattcacgttctccatctgctcctgcttttgactatgatgctatgttcaaggaacccaaatccaaatcagcgtcgtctatgccggtttatgacaagcctgtgtatgatgatgaggatgtgtttgagtctattcctgagctcaaaatcccttccacttcttctcagtcagctaggtttgagaatgttttctcttctatctcatcttctcctacgaagcacaggaaacagaacagttctcctttcgatgatctcatgggaaacaatttggggaagaaaggggcagatagtgaccgagaggagaagggtagttccatttttgatgatttgattcctgggtttggtcgcactagctctcctccacctaaacggtagtattctttaactagttgctttttctttatctgtggttactagttagggtcactcactgccatttatatttgagaacttgcttgcgtgaaatgactctttgaaatgtagagcttagagaatgaaatgtagcatttggtacttatgtagagcagtttgattcccgggtttcgaaatgttatgtactctttatcttcatctgtggttactggttagggtcattgctcgtcaaattttagagcttgcttgcgtggcatgagtcaaggctcttcaaacgtacataatgattaagttaatattagtgcttatggagctgttctcttcaatttgaaagcttggttgggcacagagcttggatattggttattttatgaatactctctaaaacttgagtgagaaacctgaaaaaaaaactttaaaagcttcagcgttcatgtcattcatatgcacaatttcatttttgatctgtggctagggtcattgcctttctaatttgtttctcctagacctgtggttactagttagggttgctcctatcacctgctctctttaaatttgagagcttgcttgtgtgaaatgactcaagggtacagagcttagagacatcatgctttcataatagtagtgcctttatctctggctttgtagcatgcactctattctgtgtcatatcctgacattgctcttcaaatttgtttctcccagacctgtcttaagagcttgctcaagggtataaagcttagagccatcacgcttacataatcataatgcaatgtagcatgaactacattatattagtgcttctatttgcttgcatactatacaaatttctcttatgtgtagtcttctaacttaatttcattttgatttttgctagtatagggataacttgtttaccaattgattgataccctactattttgtgcaggacaacttcagagacaacaaatcaatccgagaaagctccatatcaaactgccgagacatcttccaatgtggaagaagacccgtttgtagtcttggaagagactgaatcaacccctagagaaccctccacgggagggttcgctgatccattggaggatattggtaaattcaacagcagaaaaactgatcattcatctgtccacggcggagtattttgttgatattgaccctcttgagagtctaggaaaaccagcgccggatatgaatagtagaggcaagagtcatttaagaccaccaggaaacatcagtggctcccagtcaccaccagtagaaagtcctgggagttaccattctaagaaagtttcatttgaagatgttttagagccacataatatgagtactccaccacctaccaattcaaatggaagtttcgagtcgtctgatgatgtgtggcttactgtatccgagatccccctctttacgcaacctacgagtgctccgccacctacgagacctccaccaccaagacctacacgtcctacaaaaaagaaggttaatgagccttctataccgacgtctgcttaccactcacacgttcatagctcaggaagagcttctgtaaatagcccgacagcatctcaaatggatgaactcgacaatttttctattggcagaaatcagaccgctgcgaatggatatcctgatcctccctctggtgacgattccgatgttttttctactgctgctgcatcagctgctgccatgaaggatgccatggataaagcagaagcaaagtttaggcatgctaaggaaaggagagagaaagaaaatttgaaggcaagtagaagtagagaaggagatcacacggaaaattatgattctcgtgaaagggaacttagagaaaagcaagtgagattggatcgtgaaagggcagaaagggaggcagagatggaaaaagcccaggagagggagagagaggagagagaaagagagcagaaaagaattgaaagagaaagggaaagactgttggctagacaggcggtagagagggctacaagggaagcacgcgaaagagcagccactgaagctcatgcgaaagttcaaagagctgctgttgggaaggctactgatgcccgagagcgcgccgaaagagcagcagttcaaagagcccatgctgaagcacgtgaaagggcagctgctggggcaagagaaaaggctgagaaagctgcagcagaagctagagaaagggcgaatgctgaagtgcgggaaaaagaagcaaaggttagggcagaacgagctgctgttgaaagggcagctgctgaggcacgtggaagggcagctgctcaagctaaagctaagcagcagcaagagaataataatgatcttgactccttctttaactcggtttctagaccaagcagtgttccaagacagagaaccaaccctccggtaagatggattatctacttctgttccgctttaagtcctttaccggtgatttgtctacttctataactctgggtttgttacaggatcctttccaggattcatggaacaaaggaggatcttttgaatctagcaggccatcttcgcgagtgccttctggccctacagagaacttgagaaaggcctcttcagcaacaaacattgttgatgatctcagttcaatatttggaggtagtgcaatttctgaggttcatgatgtgaccataatattctgttgctatgcactttatttttatatcttttaacttggtcacctactgaaaccccctgtgttgtaaagcttcagcttcccaatctggtgggtttcaagatgttgatggagaaactgaagagagacgacgtgccagactggaacgccaccagaggacacaggagcgggctgtatgtatcattagagttgttaaatttttttctttgatgggtttttgtatcggacaatgacatgatttgccggtatgttttataacatgaattcttttttcaatcaggcaaaagcacttgctgagaaaaatgaacgtgatcttcaagtacaaagagaacaagttgagaaagatgtaagtttccttaccacgtgattcagcttgaaacttttacatgtggtttctccttttccttcctctgttgtgcacatctcaaaccatgttgctttgttcagagacttaggtctggggccttttgcagccattagaataagagattgcgccatctttcgatacagtctcattgtttttttttcttttgtttatacaccatacttaatcctggagtatagaggatctgtaaactttttgttcaatcattattcttatcctggatttcagagaattggggtgactctggatgttgagataaaacgttggggtgccgggaaggagggaaacttgcgagctctgctttcgacattacaatatgtaagtcgtattgtctgttttctttattatttgcacctctgtgctcatttgtacctgatgttatgagtccacaatatcttctgatgctgttatgtaaatgagcaggttctttggccagaatgtggttggcagcctgtttcattgaccgatttgattacggctgcgtctgtcaagaaagtttacaggaaggccactctatgtatacaccctgataaagttcaacaaaaaggagccaatctccagcagaaatacattgcggagaaagttttcgacatgctcaaggtatgattcaacatctttctggaactaaatccatcactgatactttcagatgccaccaaaggaaccaaaaaaatccacttagactgcgtctcctcatggatgactagaagatccgcacaattgtacaaaatccatattaactggcttgaactcttttctcatgacaataaacaggaagcatggaacaaattcaactcagaggaactcttttgaaaaaacctgagataatgtttttgagagtgtgttgtttgtctctagcgcgaaagatgaagcatgtggcattcattcgaaagccaaaaatggtgcccaagttggaagcagagagttgtcgatagagtatgtattccccagactgattacccatcactgcatcatcatataccacgcagcaactgggcattcttttttttgttgctaatttttccttctcattaccctcttcttcaagagtatgatgtcaaatgtattgatgttgaattctgtatcaaaaaaacacaatacttgagagctgtgtattcttgtttccaaactatttatatatgcatatatgaacattctttt

SEQ ID NO: 153474 - DNA, 473 bp, Arabidopsis thaliana landsberg
gtcgtttcaaaatcctctaatttctcagtcctagcgctaaagctcttcctgggttcgagttgatttctcagtcatcgattgaaattttctcgggaaaaagggcctcatcgtctaccatcgacaacgaggttagtcgttaattggattttgatccgtctctctaccacaaattgtttcctttcgtctcttgtcatgtgctcttaccatatccgattcgcatcaaatccgtagcaacatttaaaactaagaatctgcaactgagaactgtttcgtagctgggattatgttcattgaagcgttaatttaattctattgaacagttattgaaaggtggtggcttttgcttctttgtttcacagaaaccagaaaatgcaaagtcttagtcaacttggaccttcagagattttccttgtcgccagaagagaaaaacccagtacgaggttagttatgagcgactcgagctcgattcatga

SEQ ID NO: 153475 - DNA, 1819 bp, Arabidopsis thaliana landsberg
atgactttttctcgtagcagctcgattacgttcttcatcgttgctttattcaccgtcttaattaatccggcgatctcttctcgcgccgcgtccttcatcaagctgcctcgctcttccatcgcttcatactgcgagagttggagattagccgctgagaccaacaatgttggaccctggaaggtgattccgtcccaatgcgaaaactatattaaaaactacatcaacggaggccagttcgacaaagactacgatgtagtcgctagttacgccattgactacgctaaaacggtcaaggttggcggagacggcaaggacgcgtgggtctttgacatcgatgagacgcttctctccaatattgagtactacaaggctaatggttacgggtaaatgctctctcatgttattattaccgttagattctgttttatcaacgaataatatgattgtattgtttgactaacttcgttgaccatgcattaaaccgggagatttgtggattcagatctggttcttggtttgagatttcttttgtgttatttttcgatattgtaccgagtgatttgttgatggtggatttaggtctgaaccgtacgatagtattaaatacaatgaggtggtggaaaaaggaaaagacccaggttatgatgcgagcttgaggctctacaaagctctcaagaaacttggtttcactatcattttactaactggccgagacgaaggtcatagaagtgtcaccgagaaaaatcttcgggatgccggttatttcggttggaaccgactcctcttgaggtaaaaagctataccaaaccacttctcttgttttgtttaccaatctactaactaatttactaaacttatgaaccggtaaatgcaggggtcaaaatgatcaagggaaaacagcaacacaatacaaatcagagcagcgatcacaagttgtaaaagaaggctacacaatccatggtaatactggagatcaatggagtgacttgttaggttttgccgtggcttctcgttctttcaaagtcccaaatcccatgtactatgttgcttgatcaccatctgccattgatatattgcatgataatttatcatttatgtatgaataaggatttatgaatgtatcccataattcaccgaatgtagccattcttaatgtaccacgtcctatttttttagtaggattcatacgtcactggtatgtaagaaaaggggactgattaaccaaataattttgatcataattgtgaaacaaaatccagataatgcttagatagtagttatactctaatccaattgatttgatcaacatttttctatatataaaattcttgattctgctaactaattaactaattaaagtttttggtttggtaagagttgcgaaacgataaccaataataaatgggagacatcattatctctttttctaaatctctccaatggcgtctcttcgtagcctttcgatttggttcttcttcttcttcttcttcgtcttcttaatcaatccctccatttctattcgaacttccttcatcaagcttcccggaagcgacggatctcgctactgcgacagctggagattagccgccgagaccaataacgtcggaacttgggatctgattccgtcaatctgcgtggattccgtcgccgagtatcttaacggagaccagtttttatccgattacagtgtcatcgtcgattatgctctcgcgtttgcgaaatcggttgaaattaccggcgacggcaaggacgtgtggatcttcgatatcgacgagacgctcctcacgaatattgactactacaaggctcatggttacgg

SEQ ID NO: 153476 - DNA, 1799 bp, Arabidopsis thaliana landsberg
tatgtcatcttcagacgtggtattggattggataaaaccacagattattttttcatggagaaattggatgtgatcatttcacgtttttggtcctttctcatgagaatcaccaggttagaacacgtttcccagtctagtctttcttaaagttcaatacaagtaaaaaaagttaggcatttgattacatgttgggtcttaacacatttagatcacaggttagagaaattacgcgccaaaaggtcaagcagtcttaacaagaaagatcccaaaaaagatgatgagccaaaccctgacacagataatgatgaattgtatgtggagcgtattcgccttgagaattcaaagctgaggttatcatcagtatccctcgcatgttatgatttgctttcattccaattttttgccattctgtacatatatatgatggtaatgggatttgtgttgatggattcagctttaagagttttttgagcaagctcacaatacaggagcctacattcgatagaatgattgttgtttataggtaaggtatatgtatgtcttgtttcagctatttgtttgtaactttgtgaacttgtggttcaagcttgtggtttatgatgttgcagacgagctagctctaaaacaaatctagaacgaggaatctacgttaagcatttcaaaaacattcctatggctgacatggagattgtgcttgtaagtttctgttcttgtcttctttccttttgcatcgctggattttgtagcgaaaattgcaaactagctgcaataacattaatgtcttgtgcagcctgagaaaagaaaccctggactgactccaatggattgggtcaaatttctaatatctgcagtagttggtctggttggtcttcttggcagattcttttcttttgttgcagttcatgtttacatgtctttcttggttatcatatgactttttgtacaggtagcggtgcttacttcggttgagatgcctaaatcagatccatgggtaattattgccattctctaaacagtgcatggttattgtgcgaaaacatacttcacgttaagtgcttttctttttgcctttccttgttttcattcttctttgttaagcgaacagcggcttattcgaaaattgtattccttcaggttccagcagaacatggctacgtatcagaacttgataactcagtcaatgtatgataaacaactagacagcgggaggggaacgctactacatttgtgtgatgatgtgattcagcaagaagtaagttcccgcatgaatacattgtaatacaatagaaacaaaaagcttacttggattgtaatgcacaggtaaaagaggtaatgatttgcttctacatactaatggagcaggggaaagctaccttggaggtacatacacctaaatttactctttatatggtgtatcatcatcaatgagtgctaacttgagttggtttgaatgtgtggtaaataggatctggatttgaggtgcgaggaactgataaaggaagagtttggtgcgaggtgtaactttgatgtagaagatgcagtccagaagctagagaagttggggatagttgctcgggacactattggaaggtactactgcatggggctgaagcgagccaacgagattatagggactaccacggaggagcttgtcctcaaggccaaacagggcgtcacaccttcttgaattcaccttctcttattttcagcatttgttttcttcgttaatttgatttcaatacaactttaagttactgtgtgggttgttactaaatacaagtgcaacaaattcattcacc

SEQ ID NO: 153477 - DNA, 2697 bp, Arabidopsis thaliana landsberg
  unsure (1)..(2697): unsure at all n locations
tggcaccaccaagagagccaaagccaagtactctctgctcttaaaaccctaacgtatctgcgataaaccctcgcgcctttgctaaaatagctgcctttatataacttagccgccactttaattctcgaaagtcatgttctttcacttttcttcgctggttcttcttcgcgctctctcttcttgccatggttggatttcccgctaatcaagcaaaaaccgttgaagaagagctacnnnnnnnnnnnnnnnnngatcaagaccccaaggtaaaaactttcaaggactcttttgatttcccttccatcgattcctttccggatttcgattctatcacttggtctgagagtaatcggaacgttgaggattttagcatagaagatacggactttgatttctttgagtaccacatggagatacctcaagaagatgttgttactgttagcgatgtaatgtgtccggagaatcagactactgttaattctgagtcgattgagggaaagcttgaggtctttaatgatgacatgtctggggaagttggtgtgagttcggttaggtctgagtcgatggttgaagtaaagcctgtgctttgtgatgtcatgtctgaggaagttggagtgagctcggttgaggtagagcccaatgtttgtgttgagatgtctgcaaacggtggggatgaaccagcagtaaaagattcagaaccggttgtttctgaaaactcgaggtcaatggaaggtgagactgagccagttgttgtgtctgatgcgtctgttgcttgtcccaccatggatttggatgaatcagggttgaagaaaactgatgagggtttggcttgttctattgaagtagggttggagaaggtaagtttggccgtggatgatgatgagaagagtgatgaggctaagggggaaatggattctgctgagtctgagagcgaaacctcgagctcttctgcaagcagtagtgatagtagtagcagtgaagaagaggagagtgatgaggacgagagcgacaaagaggaaaataagaaggaagaaaagtttgaacacatggttgtggggaaagaggatgatctagcaggggaacttgaagagggtgagatagagaatttagatgaggagaatggggatgacgatattgaggatgaggatgatgatgatgatgatgatgatgatgacgatgatgatgtgaatgagatggttgcttggagcaatgatgaggatgatgaccttggtttgcaaacaaaagaacctatcaggtcaaagaatgagctcaaggtacatatccttcagcttttcacatttcatagctattactattagtggttgatattttttccattagtggttgactgcgacaagaaaactatgtactgtcctcaaggtttttagcattactctttgaaggatggaagccttctttttgttgtgtaaattttgaaagatttttcccctttttaaaacttttgcaggagcttcctccagttcctcctgtggatgtcactctggaaccacaccatgccacacttcctgttggagttgttctttcggtatattaaaaattacctctacttgtatgctattgcttctctgtttgatgtcttgacaatccactgctaaaagcatacccgtctcatttgtgattttacaggtaatgagcgcacaagtaatagttgagggaatggaaaagcatagtcctttgactgaaggttctatcctttggataactgaaaaaagaacgccattgggactggtggatgagatctttggacccgtgaagtgcccttattatattgtgaggttcaattcagagagtgaagtgccagaaggggtttgtcaagggacacctgtctcatttgtcgccgatttcgctcaacatattctcaatatcaaggaactgcagaagaaaggttacgatgcatctggggataacgacgaggagataccagacgagctagagttctcagatgatgaaaaagaagccgaatacagaagaatgcataagttggaaaagagaggaatgatgagtgaccagaaaaccggtaacaccaggaacaagaagaagaaaaaccgagatcccggaaggcctacaagcagttactcaggggaatggacgaagaaccagggatctagttctctatcgtcaaaccgttctgatcctcaaatgggtggtccgcgtcctcaaatggacggttttcctccaaacaatgcagcatggagaccccagagtaatcagcagaacccatatcagcttcctcctatacctaatcagatgggaatgcagatacctttcatggcaatgcaaaatcaaaatcaaatgatgttccaaccgcagttcaatggtggccagatgccaatgccaggtggaccgggaggcttaaacttctttccaggacaggcttcagcgccatggcctgcaatggtaggtcagaattgtttcaaccaacagtttgggatgggtcgtggtattcagcagcagccattaccaaatgagctgagttttaatatgttttctcaaggtcttcaaatgcacccaccacagtcccaaatgcaccggccacagtctcaaatgaatccacagttccaaatgccaccacagttccagccccaccagcaatctccaatgaacccgcagtaccaaatgatgcaccgaccacagtctccagcgaacccgcagttccaaatgcaagcacaatctgat

SEQ ID NO: 153478 - DNA, 815 bp, Arabidopsis thaliana landsberg
tatgattacagcgcttgaagaatcaatacaagctgtcaattctgggattcatcttttgcggctggagagaacgagtatccttgggagattttttatctctgttttatgcctacagaacagtagaggttttgaaatatgaagaaaatttattacctgctcatctttatttgctagtgttaatatccttgattcagaaacaagataaaaagacgtttaagctcttccaatcaagggaacgtgagctgatgaacaagtacaagtacgtggttagcctgtggagacgagtgagtacacacctctgttcctatagtttgatttatacggttatgaagcctatatgttactggaaggcttcaaatgatgtgtatactaaatgtttaacagctttcgaatgttgctggagaaacacgctatggggatgccatgagatttctgcataccttagaggaagctactagctcgtaagtacacacattttactcttgctacagtttttttaaaagaatgatttgctaatcaatcaggctttccattttatcagatttgtaagagaagtgaatgcaacagtgggtgttttgcacccaattcactgcacaaaagagaggaaggtgaaagtggaagtggacatgacaacaatacctgcctttatcatagtactgattttactttacgctgtcttaaggccaagagctcctaagccaaagatcaactgatgtcaaaagactcccccatacaaatttttttgtcactttctgagacagtaaagttcatcactcttctgtatctttacttgaacaagaattgttgtaatctaa

SEQ ID NO: 153479 - DNA, 221 bp, Arabidopsis thaliana landsberg
agagtttctttcgacgatttcgcaaaaaccctatggagctcctccgatccaacttggctagggttcagatccctgaacctactcatcgcatctacaagcatgagtgttgcatctccttcgatactgcgggcaagcctctctctcacttaggtttcttcttcaaattccgactactctcgactctgctctcgttttcttcggttttgatgaattcgcaatga

SEQ ID NO: 153480 - DNA, 526 bp, Arabidopsis thaliana landsberg
aggttatcatgtcttcaaataggaatatatatgctgaaaggcattggatgtatgaaagaatcgatcctacaaccaatcgagtatcacaagctttttatgaaggattggacaattttttgaagtttgcaaaaagtcagcctttatttttggagaataaaaacttttttgtccgtatattaagtgtggaaatggaggaagacaacaagaagaacatatcgtgtcaacacatttgttcaacaaaggttttatgcttaactattgggtttggacttctcatggggaagattctagtatgttaataaacaacaattctgaagaagatactgttaggtttgagtctcacatagaaccagtggatccttatgtggaaatggtttcagatgcatttggtagtacagaatcagagtttgatcagatgagagaagaagatcctaatttcgaggcaaaaaagttttatgatattttggatgctgcaaaacaacctatttacgatggatgtaaagaaggtctttcaaaaattccttag

SEQ ID NO: 153481 - DNA, 1101 bp, Arabidopsis thaliana landsberg
aagccattcggaatctgatttcctgaaccatccataactttcttgtaaagaggaaccaaaaccacaaagccaccacaatcatcatcctcagctttaaaacctggtccatgtggctcaacccaaccaattgaccactctggatcatcaggttcaggaaacaccacattcccaatcttatcctcttcccctcctgatcctgatcctcctcttccaatccatcctctcttggtcttcttcactgatgaagaggaagaaccagtcttactagtagtagtcttcttcagtgaaggactaagtgaagaagatcctttaggaattgactctttcttctctctatcttaagtgttactaccaccacacaaccacctcggaagacgaggaaaagagactgccatcttttttactgtttcctttctaaaaaaaaaactccgaacctctccggagaaaactcttatcaatcagccatcatgtatcgatgctttatcttctacttcaacctgttgacaatttaaaaataaaatcaaccatcaataaaacaatcataatgtcaacataatgatgacactgaccaaacacaaagactttaacacaaatttcagatgccaatagagaaaatctcttatccattaatactgtttatgatgtgatcgattagattacattaactcatcaacataatatcaaacacgagattttatgattaaaacagaaattttttcttctcaatttcaattttcaatgaaatttcaggataaacacaacgaagatctcaattttttcttttttaaattttcactcgatgattcttcatcaatggaaagtaattaatgtttcatcagatcggtggtccaattaaaaaaagaaatcgctaaaaaatagaaaagcgaaagcggtcgacaattgaagaaacaaaggatgatcatcaaaagcctccgatgtccgtcaaaagacggcaaggcttcgccggaaaattcggcggaaataaatgcgaaaaaatcggaaggaagaagagagaaaaatctccggtaattgcgaaacgtagtaaattaccgagaaaaataagaaggaagggaaaaattcaaatcgacaatcgaagaaggc

SEQ ID NO: 153482 - DNA, 1689 bp, Arabidopsis thaliana landsberg
atttctgatcgttttaatcttcaatcagagatgcaaatgatcacgattcctgccaaacgcaaccaatcggaggtgggccgcagcttatcaagagattgttcttcggaaatagatctcaacacaagtcaacattcagatattgagaattatagcaacaagagcatgctcgatggctcactcacatatgacactgaaatgtcttgcgaagaaggaggtgacgttggcacacgttatggcagtgaaccaaccagtgtttgtgaagattgcagcactagctggtcaaatcaatgtgaaaatacaagagctcttcttagaattagatcccatatgaatagtgaggggaataaacgcaaaagatggtgtgggcgtactgctgaaatggattgtcttcctcgtatttcatttgccaattccgagtcaggcacaaaccctatagaggacaagtatgagatagcgttggcactgaaggaattggttagcagaggaatggcagcagaagcattttccgaaatcagcaccatggatccagattttttcacacaaaatccgggtttacttttccaccttaagcaggtaatggtgcaagaacaacttaaagctctcggtatattccccccaagagatattgttgtaacttcttcgttttgcacagtaacggaggaacttgtttatatatatttataaatgtacaggtcgaatttctgaagctggtgagtgctggtgatcacaatggagccctaaaggtcgcatgctctcacttaggtcccttagccgccaatgaccagtctttactgaagacattgaaggagactttgttagttttactccaacccgacggaaccgcacctgggaaagatttgcctttgaatgatctggcaaatacgctacaggtaacaatgtttttagttttgatctcttcttctggttttgtctcagatgaaagatggaacacacaactggtgtttgtttttgccattcttttttaaggtttctgtcggtaataggctcgggatcgaagaaccgaagttaatgaaaataatcaaagcgatgcttcacacgcataccgagtggtttaagcttcagatgtgtaaagaccggttcaataatctcctgaagatagattctttgaaagaagtgaacaccgatttgattggtgctattaaatcaaaatcaaagaaagatagcaacacaaacttgtcttctcaagtcacgacgacgtcttcaagcaccatgacatcagaagatggtggaagcagcagcttgatgatgatgactcagacttcgccaagagaagctttgtgggaagaaagtgcaattcttaaagtaatggtacgtttttcaagatccttacgagttttggatcaataattgtttatgtttttcggattttgcttatattgtatagtatagtgacgagagagatggtttcaggaatttctggcgatgccgaggtctgatgcaattcaactgctatcacaatacaatggagacgctgaggctgtgattcagcaactctttggttaaacccaaaccagactagaccgcgtagaactgaactgaggccggtttattttaatttggatgagttattattggtttattcatttctgtatttgtacattaactttacacagacacacttgagtaaaagaaaataaatagttttatcaataaaaaagtggtttgcat

SEQ ID NO: 153483 - DNA, 393 bp, Arabidopsis thaliana landsberg
tcataaacccgagtgaattacgggacgacaaagccggcaggatataatcctccggtacacaagccggctaggaatgaaaccccggacactaagccccgacatggggaaacgacgtagaaagacaaaataaaacatgattgatgattttacacataaacatagttctctctttaaccaaataaaccaagatcgaaaattaactggcatcggagatttcgtcggagattgagacacccactttaagaaaatttgatcttcttgcctcacttgataattaaaaatcttcagaagaaaaaccttgggatactttggatggcagacggtggaaactcagctaaacatgcagagaccgtcgagaacgccgtggccggagatatcgactatgcgacttga

SEQ ID NO: 153484 - DNA, 327 bp, Arabidopsis thaliana landsberg
aggcttgatccccagactagtgatgtacatgtcgcaaggagctatattctttgcttcgtatgaattttacaagagcgtactctctctagcagcggcgcagcctaatacgtcagctctctctggcacaaaacaaaagatggagatagccttaaatcgttaaaggacaaagatagttcaaccccctatgaaaccaccaagactgcaacatatgtaatacaaagaatggaaaattgtacatttgtttcgtttttgtaactattgatttgattaaattcatttgtgcaaagttctttttgactggagagagaagaagaagatccattattc

SEQ ID NO: 153485 - DNA, 2734 bp, Arabidopsis thaliana landsberg
atgggagcttgcgcttcacgtgaatctcggagaacagagacggcgaagctgatattaccagacggaacattacaagagttttcaacgccggtgaaagtgtggcagattcttcaaaagaatcctacaagctttgtttgtaactccgacgatatggatttcgacgacgccgttttagctgtccctggaagcgaggatcttcgaccaggagaattgtacttcgttttaccattaacatggcttaatcatccattgagagcagatgaaatggcggctttagcggttaaagcaagctctgcgcttgcgaaaagcggtggaggaggtttgagttacaacgatgaagatgttggtgagtgtagagttagaagagttaaaagaaacggttgcggcggaagaggttgtggtggtggtggtaaagggaggagaaagttcacggcggagttgagttcaatagctgagtagaggggttaaattggttagtcaatgtgtaaattttgtaaattgtaattagaaaatttgacttttacataatttttaccataaaaaatataaagttgatttcgttatttaatacaactaatacatagaaatgaccaaattgggagactttcacgtggatgaagtgttcaaaagctactaataaattgcatttagtcatttagtggtaaaaatatcaaatcctctctggcttttcttggtcaacaccgcgtaatggttacatgaaagacacagtgtacagttgcaaaaagtggggataaaagcccaaggcccattgttcctacgggcatagccgcatagggttgaaaaatgtagtcgctgtaagtaaggatgattttgttataataatatatttcaagggctttgattgcaaattagtttagatttcccgaccacataaatgttgctttgttttttcggttaggcaaattcgttgtggttaccaaaacgacgacgtggtgaagcaaatggcgagagtcgcctttgccacatcatcgccgccgttaatctcatcagttcgtactctccgccgtcatttctcagttttcgccgccgcgaatccagaaatgtctcgtccctctcaccacagctctctcgaagttatcggcggaggaagtgatcgtttcttaccggcgttaaaggactcactcgctaaaccgtacaatgcgtttcctctaatcggatttaaccgccacgtggagacaatctacgcatctttctttcgttctgttcctttcgttagactccgccgtgaatgtctccgaactaaagacaacggctctgttgctttggattgggtcgccggcgaagataggcactttcctcctgattcaccaatcctcattttgttggtaacactcaacatttcaaaaattcgattttgattttgtattgagtttaaaaatcagaactttaaaaaaatgtgtagccaggtttaacaggaggaagtcaagattcgtatgttagacatatgttgttaagagctcaaagtaaaaaatggcgttgtgttgtgtttaatagccgtggttgtggagatagtcctgtgaccactcctcaggttttgatctttctctgctctttcttggttcatcttagattcataaagtagcttcctttttgtactgtttcatggtctggtgatgatagatgaatagtgccaattagcttcattttgttactgaagtattatgatactgctaatgcagttctactcggcttcgtttttaggagacattggtgaagtgattgatcatgttgttgataaattcccaaaagccaatttgtatgctgctggatggtctcttggaggcaacattcttgttaactatttgggtcaggttagttattttcttaacccatgagtttggaaatttatgtaggagatattaccaagttcttatcttttttagtttgttgcaggaatctcataactgtcctctcactgctgctgtttctttgtgcaatccttttgatttggttatagcagatgaagatttccataagggttttaacaatgtttatgacaaggccttgtcgaaatctcttcgtagaatatttagcaagtaattgttcgttgtccacatccgtcttatcttcttgccatttagttattgtcacatcactaattcatctttatgcagacattctcttctttttgaagacataggaggtgaatttaacattcctttggctgcaaatgctgagacggttagggatttcgatgatggcttaacccgaggttagctttgtcaacatctacttatatcttctccttgatactttgagaagacaagggcatacagctacaaatcatttgtttctttatttcatgtaacagtctcgttcggtttcaaatcagtagatgagtactattccaagtcgagcagctccaaagctataaaacatgtccgcatacccttgctttgcattcaggtgaattcctgaacaatgagtgatgaacccataagcttagaatctgttttttctcatgttcatttgtttatatgatatgcaggcagcaaatgatcccattgctcctgagagaggtatccctcgcgatgacatcaaggtaagagatgaatgatcattcatttacacgaaaatcatatgattttgagtctatctaagaactagaagtgtcaggcaaacccaaactgcgtgttgattgtgacaccaagaggagggcacttgggatgggtggcaggtgaagaagctcccaacggagctcctggacccaaga

SEQ ID NO: 153486 - DNA, 1413 bp, Arabidopsis thaliana landsberg
ctttcagccgccgctttcacttacctcttcctcttccttcttcttctaccttcatctcgtaaaggttatgctgcacactgaagctcgcaattctggctatcgaaaaccacaatcacaagctcaacttcggggccttcaaggccaatcacaagaaagtcatggtgagtcttctatcaactctttttgtttgttttaccttattatctatctatcttctccagattctgatttggtttcgttttgttcagggaccaatgataagaacagaggaagaagaagactatacaagtccaccgtggctaatgccaatgctacgagggagttacttcgtcccctgttccatccatgtcgattcaaacaaaaacgaatgcaatttgttctgtcttgattgtgctggaaatgccttttgctcttactgtttagtcaaacataaagaccatcgtgttgttcaggttcaatatctctcttcttcgttttatcctcctcaaaatctcggttttttaattataatgttaatgaaaagaattaaatttgcagataaggagatcttcgtaccataacgtggtgagagtgaatgagatacagaagttcatagacatcgcttgtgttcagacatatattatcaacagcgcaaagatcgtgttcctcaatgaaagacctcagcctagaatcggtaaaggtgttacaaacacttgtgaaatctgttgcagaagtctccttgattctttcaggttctgctctctcggctgcaaggtataacacaaaaagactctccctctgttttttttgcctgttttcaccatttttatttgaaacaattcatatgcgtttaacaaaaatgtaaactttcttaaaacccattaacgcatttcacttcttaatgatatctatatcaaattttatccgttttgtttagttttgttcgtgattcatgtggatatgctctgtttttgtaatgttatttgtggaaatgactatattgtcctttggttgtttttgttctgtttagcttggaggaatgaggagaggagatttatctctaaccttctctttgaaagggaagcatgggagagagtaccttggtgggtcggaatcagatgaagctactacaccgaccaagatgcgtaagaccaatgctttcaaccgtctgatgagtggtctctcgatctcaaccgttagattcgatgactacggtcccaatggtgatcaaaggtcttcaagctctggtgatgaaggtggttttagtttctctccgggaacacctccgatctataatcaccggaattcaagcagacgaaagggtgtacctcaccgtgctccgttctaagaaaagataattactaaatttccaaccccataataattaattatatatatatatagataatggtataatacaatgtataactgggg

SEQ ID NO: 153487 - DNA, 372 bp, Arabidopsis thaliana landsberg
ctcttggagttcaagaatatccagatgggttttgtggcattgagcatagtatgcctaagattgaaaccgcaaatgtttatgttactcatactgagcagattctttcttttcttacttcaatcaagtaactcggattacgtttaacgacatcaaaggtaattattattagctctactctatatacttatttaagaagattttatcattgatatattggataataaactcccttgtctgaattatgatgagagacacacatatatagagatatatagagatacatatagctctagaaagctatatctaagggtatgtcaaggcgctattccaatgactattcttggtcgcttgaatatgcgatattagagcggg

SEQ ID NO: 153488 - DNA, 778 bp, Arabidopsis thaliana landsberg
acaaaaggaattgaagcctaagaggattgttgaaaccgttgcatgtcaagctccagctacatcaaagaaaactgagatcctaactcctttgttggctacaagagaaaagaaaacaagtactaatggttttagtttacgaagtaacgaacgggccgagaagaagaaagaggtatacatagataacttatctcacttttactctgttccgaatttcagagttaaatttttatctgatgagggtacattttatgatgctgtagaagaaggtggaagctgtggtacgtaaagctcttaacttaaaagcaagaccattgcctaaaagcacacaagctagacctcaacacacgtcaacaggtcaggcaaaggcaaaggcaaaggcaagagatgatcactcatctacagctagttgtgatcggtcattgacaaatagaatggccaaaagtaaggtcattattaacaaacagaaggcggatatgcagagaagtctaaatggaattcggccaaagacaagcgaccagaccgcgagaaacagcacgaacataaggagtttagcggttaggcgttctgcggttcaggttgctttgtgagcaatttcactgtctctgcttttgttctttagtactattggcctcaaatgtgtctttgtgtttgtgtttctaggctgtaatgagtagaatgttacatcatcgaaacgcaaaatacaaataaacaatcagaacctatgtaaccttatgttagaatcaccattgcaccattaaatttttaaaagcttataact

SEQ ID NO: 153489 - DNA, 616 bp, Arabidopsis thaliana landsberg
tctaaatcaaaggcatcgctcgggaactcagcttgtccaagaaataagaaagcaggctgatgatgtaatgttttccctcggattcaatttcatttctctgtcttttcttcttttctttctatttgtactaaattcaactttaaaacctgtacaggccaggtcttctactctgtctatgccatatcgagtgcagcgaatagaagagtttgtgaaagaactcgattcaggcgatctgaaactccgtgttcgggttcttgaggtaaagcagttttttcatggtctaatcaccctgacagaactggtattaaagtaaataagctttgtcatggttttgtaaagcaatagatacccattgtggattttgtttgttcgtattggttcagtcggaaagagcagcccggaaagcgacaatactgcagatggcgacgatgtatacagttcttggaggaactctacttaatattggggttacatttagcaaccaaggaagtcagcttgttgccaatggatccttcattggagcaggtatcaaagctgttgtacacacgtgcatgtagatgtatatgcaggtatatttcaggtctatgacaaggatacataagcttcataaatattc

SEQ ID NO: 153490 - DNA, 347 bp, Arabidopsis thaliana landsberg
gttttttccactctgtgacaaaactacaggtggtctctaattatgctaaagacagaccagtaatcttctcaagtttccaaccagatgcagctaagcttgttagggaactgcagagcacttaccctgtatgttccattctcgctcttttctttgataaataccaaaaaaaacttcttgacttcttcatggagaaatcacttaagatttaacaatgtcatatgaactgaacccaggttttctttctgactgatgcgggaaacgagattcacaatgacgagagaagaaactcgctcgaagaagccattcaagtttgcttggaaggaggtcttcaaggtattgtttcagag

SEQ ID NO: 153491 - DNA, 1064 bp, Arabidopsis thaliana landsberg
tccattaaaatccacttctttgggctaaattcagggttttgtgaagaatgggtaacagagtaatctgcatgaagaagaaagatgttgttatcagaagtggaggagatgggtccagaagcaagagagtgaatcgttcacagaggaagttgcttgctgatgaagagaatttgcatcgaagagctttgtctatggctattcatcaagctcaagtttctcagagatttgatggatccatgtctatacgaatcgggtctactagctctagaagaggaacactctctgactcattttctaataacaagcaggtccaagctttttgataataatgataaagtttggatttttaaactttgaggagagaattcaaaagtatttataaaggttttaaatttgatattgttcttaaaagtggttgggaccaaaagaacagaataagtgttcttaaaaggtcttgtagtgcgttttgctttttaaaatgtttatatagggtggttgtcatattactttatgggtctgtctagttttgattagaacaaagatggagaaaagaagcttctttgttggagaaggcagtgaactttgttcgtgtaaatattacttctttgtaattgagactgcctatgactatgagaaaccaggtctctagagatcagtacacaatttatgttttgactttactgatgctagtatctttttatcgtttgttgagtgttgttctcaaatgatagttattgtcttattaccctacgggcctgtcttgttgtggttagaacaaagagtgagaaaagaagcttctttatggttattgaaagcagaggactttgttcgaacactcgagaatttgttcatgattgttcctgtcacacataattgtcattgctttttatgttcagttttacttatgctagttttttttttttttatctctttaggttcctgagtttttggagagcttgaaggttaagaaattcgttttggtgcatggtgaagggtttcgggcaccgtgttggtacaaaactattgcgtcaatggagaaaatctggactgtctcctgttacggttga

SEQ ID NO: 153492 - DNA, 965 bp, Arabidopsis thaliana landsberg
gtaggcggaattcaagtaatcatggatgccggcaagggcgctctgtgcaatgtctcttgtgcaggacctactctatttggtcctgtaatcaacgctgctgcaacaatcgctagcgattcactcgctcaaagtgcaaagaaatattacgtcttgttaataatcacagtgagtttagacacaacaagacgtgtgattttcctctgattcttgtgtttttatctatatgaaaataccatgtcggtttttttgtaggatggagtaataacagatcttcaagaaacgagagactcaattgtcagtgcatcggatctcccattatcaatcctcatcgttggagtcggaggagctgactataaagaaatggaggttcttaaacaaaaacgttatgcttaacttcatttgaaaaacttcttgaaatagattcttacaaggtttatgtattggttgtttgtataggtactagatggagataaaggagagaaattagagagctccagtggtcgaatagcatcgcgcgatatcgtccagtttgttgcattacgagacatacaatgtgagtctcgtgtttcttgatttgtcaggcagagttttggtctctgatcattgtggttgttgttgttgttgttgcagatggagaggtctcagtggtagaagcacttctagcagaattgccaacacaatttttgacgtatatgagaaaccgtaatattactcccaccaccactactccatcttctacttgatccacactctcaacactgtacatacatcagtcagtcacagctataaacgctgtcgtcttatcttggcttttatttttgtttttttcgattttatattggctgggaattttttcgtttttcagtattccacgtcaaattatatctcatcactcttcattattatatttgttgccaaaaacataatttattatatatgccaaattattagttggtttgggcgta

SEQ ID NO: 153493 - DNA, 539 bp, Arabidopsis thaliana landsberg
gatgaacattggcaagctaaatttaaataactaaattttacaattttggttcttcaaactttagagaagaaaagaatccaacggtcaggttcaactccaacccgtctgtttcaatcatctattttgaccgcttattgtagctgcctgtaacagttcaaacccagccactgtcaacaatcaaagccaagtttgtttccaaagatggacacagctaagtagtcttttttgtcctcttccaattgttggttctaagaagtcggttaagcgagaacgcttctccttgaccatcgttaagcgaccgcagttccagacagcaagctgttagttgtcggagaagtgtctctagatgagaatgcgattgatttttgccctttggttttgtagataaaatcgcagcattcactgtgtctgccactacttccctttgagtctcttctaggaaataccctacattcgattcttcggggcgttcgtacactagcaaagcaaagcagtcctgaaatagataacaagatgctcgaatctctttaattaaacca

SEQ ID NO: 153494 - DNA, 1144 bp, Arabidopsis thaliana landsberg
gatttttttttgttcgtttggcttgaattacttgttacagataataaacttgtccgattttgtgcctgcggaagctggggaaagatttctgagtatgttgccatcatggcatgcttatgaacgggcttgtgaatacttcatatttacatgtggagttgagcaaaagtatacgtctataagattcttaaaggtaagtctttctatgttatgttacacaatgacatttcaaaagaaacatcttatccttggaaatgggagacgttgagactttgcactgagtcaagcattcatttgtatttttccctttggattagaaactttttttttttgctttttggtataggatgatctcaagcgttatcaaccacactatcttatttcagttcctttagtatatgagacactctacaggtatgcgctttactaggaaaattgtttcataagatttacaatgaataagtttttttaatgaatttaatcattaaaccttttctcagcagcatcctcaaccatttaaattgctaaacacttttctctcttttgtgagctctgtagtgggattcaaaagcaaatttctgcaagttctgctgctcgtaaatttctagcacttacattgatcaaagtcagtatggcatatatggagatgaaaaggatatatgaggttcatgataccttctttaacacttgttcttacgttatagtttgttttaagagtttttctgattatccctttttgtggttcctgaagttttgattttttggtctggtttacagggtatgtgtctgacaaaagagcaaaagcctccaatgtatattgttgcttttgtggattggttgtgggcgagagtaattgctgccttgttgtggccattacatatgttggccaaaatgcttatctacaagaaaattcattcgtctattgggatatcgaaggtagtttgcgaattctattttctatttcgttttgttagatttatattaatagttaacactgatatgattttggtttccacaggctggtattagcggaggtggtagtctacccattcatgttgacaagttttttgaggttaagccgtctatattttctcttggaaagttagaacaatttcttttttttggctttgaaagtttcgacatctaa

SEQ ID NO: 153495 - DNA, 419 bp, Arabidopsis thaliana landsberg
ccagagattagatctaaaaccctatcagagaccatttcgcgtgaacaaagatggcggggcctttgcttcgatctctttggtcaaacaccactcgaagatccttctcttctcattcatcaccttccaaattcggatactcgctctcctccttacgctccttttcagcagccaccgcttccacagctgcagccggagctcctaatagctcgcttgaccctaatcgactaagaaacgtggctgtgatagctcatgtcgatcacgggaagacaacacttatggacaggcttcttcgtcagtgtggtgctgatatccctcacgagcgtgctatggattctattaatcttgagcgtgaacgagggatcactatttcttcaaaggtatcgcctttcgtatgtttggattggaattagagttaattg

SEQ ID NO: 153496 - DNA, 3589 bp, Arabidopsis thaliana landsberg
gaatcattcaggataagagttgttcttgatgcgaaaaaaatcgtgaaacggtctttgagtattatgggctgcatttgctcaaaaggaactgcagaagaagaagttagtgaccaacatgagaaaccaaaagagaattggaacaaaacgtcctcagttcaattgattgctcctgtaacttccaagaaagatgagttttcacataaatccgttgatggaagctctggtggacttaaagctgatggtttagcacataaaccatccgctagagctagtggattgattgttcctgtagatgatagtgacggtaaaacagtaattgtagagagacctacaaggtgtcacaggagatggccaactgcagatattggaacaggaggaggaggattcaatatttttccaccgagtaatattcccacaagtgttccacatagccctgaggccgagcttattgcagctggatggccttcttggttaacttctgttgcaggtgaagccatcaaaggttgggttccacgacgagcagagtcttttgagaagctggacaaagttagttccttatactctctttgttactatttttaatgtttcttgattgctataacgtttctattgtgttgtctcttttaacagattggacaagggacttacagtagcgtgtacagagcccgggatcttgagacaggtaaaatggtagcaatgaagaaggtcaggttcgttaatatggatccggaaagcgtgagattcatggctagagaaatcaacatcttgcggaaactagaccatccaaacgttatgaagcttgaatgtcttgtgacctctaaactctctggtagcttgtaccttgtgtttgagtacatggagcatgacctttccggtctcgctcttagacccggagtaaaatttactgaatctcaggtacgttcaaggattcgattataatgaaaaaaggtaacaaagaaatcttggactaatagggagacaaatcttgtttcatgttgcttcttgcagatcaaatgttacatgaaacaattgcttagcgggcttgaacactgccatagccgtggaatcctccaccgcgatattaagggtccaaatctcttggtaaacaatgatggagtcctcaagattggagattttggtctggcgaatatctatcattcagaacaagatcaacctttgacgagccgtgtagtaaccttgtggtacagagcccctgagcttttactgggagctacagaatatggtccagggatagatttgtggagtgttggttgcattctcacagaactgtttttagggaaacccaatcatgccgggaagaacagaggtgagttacatgtagattcatcagacaatcagttctttgaatccattaagcacaaattattgatatctttgagaatgtctcttaggtggagcaaatgcataagatcttcaagttgtgtggttcaccaagtgactcattactcgcaaaagacaaagctaccacttgtatacaagtttcaagccgcaacaacgcttatgaacgggtccttctagagactttcaagaacttaccaccttctgctctagctcttgttgacaaacttctatccttagaaccagcgaagcgtggcacggcttcttcgacactaagtagcaaggtagctttatatttcttcaactagcagttcctgattcacctcctcaatgcaaactcaattctttcttcttcttttgttctctagttcttcactatggaaccactcccttgtaatgtatcaagtttgccaaagtatcctccaagcaaggaacttgatgcaaaggtccgtgatgaagaagcaagaaggtatgtgataaaaactccttatacaagtattattgcaccaaaatgattcatgtgaattcctaaacacaagttctatataaattcaggaaaaagtctgaaacggtgaagggtcgtggacctgaatctgtgagacgaggttcgagagacttcaagagtactgctacaacaccagagttcgttgcttcagggcagtcaaaagacacaatcaccaccaagagattcaatcctcaggaagacagtagaacaggcttgagaggcgacagagatcagaaaggcttttctcataccaattcaatgattcatccaagcataacagcaacatggagtaaaaatgagagctgtaggaacaatgtagttgagctaaaggctactcgatcaagcaatgtgcccatgactgggagatacttgtctccttcacataaagaagatgtagccgtacaaaccacaacggtaatatataaaagatattagcaatacactttttccctattagattacatggatcctaagatgttctttttttcgtgtggtttcagacatacgtacgcaagaagaacagaatgcattgttcgggaccattgatgcctcctggtggaaacattgaggacatattgaaagaccatgagagacaaatccaagaagctgtaaggaaatcacggcttgagaaatctgctacaaggaaaaataacaaaacatgtgtaaagtgaaagaagacatggatgaaaccttgctaacatcgaaacaagaaaaaagattacctgaactggaagaacgaagatcgaagatggtatcatcggctctgctattcgattctgcggtgaaatagacattagtcttacacaatgttaagcaagccaaagccacagttatgttcgtggtagtaagatctgttagtactatgtggttcttgtacatggaaatttcagttttctctgtctgaccagcattacatgtggtttgaggaaggaaacaagtgtgcatatttagcaatcgtgtttagttgtgcaacttaatatgtagctagaagattctacagtcattaacctctatacaaacaagccaactaaataagctaacagtgacacacctaactgatcaatcaaaagcaacatgtcttgtacataataaaacccatcaaaggtttttaacccttaaggctgcaatgtcgtcaatattcttcactacctctataaccgaagaaggcgacccaaaacaagaaatttcacacgaagagccaacagaaccatcgaaaactaaagttcaaactcgaatggggactgaagaaagtgaaactattgtgagagagaagaagaaggacatatttacgtgttttgcccttctttataaaggactttatttgtatcttgtcgaatatctgagggtaaatatgtcattgacatcgagaactcgtcgactgtgttgtttcgagtcaagccaagcgccaaacttttggaactttggtgaatcgattgttctcctttcttcgatatcgaattagggtttctgtagaatccagtttttgataggaacaatgtcaatttcggtggttgatagcagtctctgccatccgactgcgtcgtttccgtcatccatggttcattctaatcgattctcgaagagaatatcagggaacgggaattgggttcgcgaaaggagaagactttatgtgaaatcgagtaactcagaaggtaaaaaggaggaagcagcacagaaatcgagcagtaataatacctctagcttcttgtcttttctctgtccatg

SEQ ID NO: 153497 - DNA, 1218 bp, Arabidopsis thaliana landsberg
  unsure (1)..(1218): unsure at all n locations
tttcttttgttctattggatttacagtgaaaaatcttgcaacagcgggtgccaaaattgtgatcattagtaattcttctagacgtgcttcaactacaatggaaaannnnnnnnnnnnnnnnnnnnnnnnnnctttcttcaccggagctataactagtggtgaactaactcatcaatctttgcagaggttattattaccaacaacttcttcttcgtgattaagatgctatttacttactgagttactagaacttactgatagatgtctcttacaggagagatgatccttggtttgctgcactgggaaggaggtgcattcacattacttggaatgaccggggggggatctttttggaggttacttatcaccttatttcttgttgctggttgatttatcgttgaaggttattggtaggtatatgatatagtttatgtttcagggtctagatctaaatgttgtggagaatgtggaagaagctgactttgttttagcgcacggcactgaagccctaggacttccttcaggcagtgtatctccaaggactattgatgagctagagaagattttggagaaatctgcagctcgaggacttcccatgatcgtagctaatccagattacgtgactgttgaagcaaatgtttttcatatcatgccaggtacatatatttacatctcaaaatgtctaattgtgtcttccacatatgatgccatataaaagactgatatactcaatcacaaatttgttaggtacactagcttccaagtatgaagaactgggaggagaagtgaagtcgatgggaaaacctcataaggtgtaaaatccgtttgaacattaaaatttgctacttctctctgtaccacctgaatttgactgtgtgtatatttggtagatgatctatgagtctgctatagcaattgcgggagtcaatccgtctgagtccatcgcagtaggagattcgctacatcatgatataaggggagcaaatgtttcaggaattgaatcaatattcatcactggagggattcatggtaatgagcttggtctcacttcttttgatgaaactgcaagtctagactcagtcaagacccttactgctaaacacaatgcattcccaacttatgtattatcagcctttaaatggtagttttcgttttgttgtacaaatcatattattgcttttttgactacattttgccttcatttaacactcagagaga

SEQ ID NO: 153498 - DNA, 672 bp, Arabidopsis thaliana landsberg
atcatcgtcgtcctttgagtaatttagaaaatcaaaatgggtcgcaacgtcaaaaccaaggcaaagaggaagaacaaggtttgaactttttgaatcccagctttatcttgtttcgattctccaatctgatgttctcaaaccaaaacctaattgtgtgaattggatttatttttgtttggttttgaattataatagaagaaagcagaggcgtcttcttccgagataccatcgataccaactagggtttggcaaccaggtgttgatacccttgaagatggagaagaacttcagtgtgacccttctgcttataattctctccatggcttccatgttggttggccctgtctgaggtaatatcatttctactcctatacatgtgttcatgaagctgaaagcgtgagacttaagggataattcaaatgagaagcttcttctttgtttgtcaacagtgtaaagaaatgtgtttgcaagtttacgattcattaagttaagaaaactactgtttgtgaatgattacagtgaaagttttggtgatttgatggctttcaattatttttctcaactttgacattttaggtgataacgttgggtttgaaccgaactgagtttcctcacacactctatatggtggctgggactcaggtaagttttgaactttatatatcttcatat

SEQ ID NO: 153499 - DNA, 310 bp, Arabidopsis thaliana landsberg
tgagtgttgagtaaataaaaatggagataacaaacgtgatggaatatgagaagatcgcaaaggagaaattaccaaagatggtttatgattactatgcatctggtgctgaagatcaatggtctcttcaagagaatcgaaacgctttctccaggattctgtaagtgaaactattcacaacaaggactcaaaatgtgtttttatcctttctctgtcttttaattgatttgcttgcgttatgagttggaaacagatttaggaatcggatacttatcgatgtaagcaagattgatgtgaccacaacgggtttagg

SEQ ID NO: 153500 - DNA, 228 bp, Arabidopsis thaliana landsberg
atggtgctggagcctgcccatggaggtgtgctaccgagtaagtaaagtactagatgcagtcttcttcatcaatggaggtttttgattcgccccaagctctcgcgattcctgatgttcttcagtaatttcttgcaatccttataaacaaagagcgtggagaatcgtttcagaggaaagaaaactaaaaatggcgactcttttcaacaaatttcagcaggttaataatct

SEQ ID NO: 153501 - DNA, 417 bp, Arabidopsis thaliana landsberg
caagttaagagaaaagaaaaaaaaaaaccgttcttggaagatgggtttcaaactcaactctcttttccttcttctttcgcttctcatactcacaatcttgtccggagccgaccaagccttggcttacgtcaagaaaccacatgtgagccaacgcaacaaaacggcgttagcagccgtcgccggaagaggaggaggaaaagagatgttgaaagggaggaagcagacgagtggttgtaacttgtttcaagggagatgggttttcgatgcttcttaccctttctacgattcatccacgtgccctttcatcgacggtgagttcgactgtctcaaattcggccgaccagacaaacagttccttaagtactcttggcagcctgattcatgcaccgtcccaaggtatgtaacatcaacatcaat

SEQ ID NO: 153502 - DNA, 856 bp, Arabidopsis thaliana landsberg
aatcaaaccctatataaacagcatccactgatacaccttctcttcattttagaaaaaataaacaaacaaacaaaccaaaacaccatggagcttaaaaatacaatctttctagtcatacttctatcaataaccattctccaatcttcatctgcaaccccaaaccggtcggaatcagaccagtttattgtgtcttcatgccaaaccacccaatatccatcactatgcgtgcacacactctctgcttacgccaccaagatccgccacaacaatgaccaagatctcgcccagactgctctcatcatcagcttggctcgagccaaatccgttactatcttcgtcgccaaactaaccaaagagtacgcttttccctaacattttttttttgtgaaccacacacttaaaaccaggcagtactctctgtttgcagcccaagccggtgtttaagagattacaaaagtttatttatccctaacatttttttcattatatttaggacaccaagatttaaacgtagggaatatctagcaatcaaagattgcatcgaagtgctaggcaatagcgtggtccggttagctcaatcggttaaggaacttgctcgagctggtcatgctgtggctagtgaggacttcatgtggaaaatgagtaacgttcaaacatgggtcagtgccgctttgacggacgagacaacgtgtctagatggattctcagaacgagccatgggaggcaaagtgaagagactgattcggtataaggtggttcacgtggctcaagtcactagcaatgctcttgctttggttaatcagtttgcagagcagcgaagtgatgaagtttccttaaatggacataaatgtgaaaa

SEQ ID NO: 153503 - DNA, 1057 bp, Arabidopsis thaliana landsberg
ctgaattttcctcttatataggttaatttgcagctattagccaccagctacctgcagaataatcaagcttacagtgcatatcatctgctaaagggtgcgtggcattgtttcttgacttgttgcttgctagccttttagtcagaattttgcaccttcttttgttaggtcgttttgattatctttgtatatatattttttttttgttatgtaaaggaacacaaatggctcagtcccgatacttgttcgcattatcatgcttccagatggaccttctcaatgaagctgaatctgcactctgccctgttaatgaacctggtgcggaggtatttaatgttctctggtattttgcctttattcgcttactgaatgtcattttacaaaaacagtgtgtcagtttctggaccttatttattgatttagttcagtgaagataacaacatgcttctgattattgtgcagatcccaaatggtgcagcaggccattaccttcttggacttatttacaagtacgttttttgttctgtctatgcattttttcttgattctgaatggcttcgatgagatgattcctcatatataacagtgacctttcaggtatactgatagaaggaagaatgctgctcaacaatttaaacagtccttggcaatagaccctctactttgggctgcatatgaggaattatgtatattaggtgaacataatccgttttctgcgtacttcacagatttgttatggttctcttacacttttctgtctgctcaactttcaggtgctgctgaggaagcaactgcagtttttggtgaaacagctgctctctccattcaaaagcagtacatgcaacaactgtcaacttccctcggcttaaacacttacaacgaggaacgtaattcaacttctactaaaaacacgagttctgaagattatagtccaaggcagtctaaacacacacaaagccatggccttaaagatatctccggaaatttccattctcatggagttaatggaggtgtttcgaacatgtcattctataatacgccttcgccagtggctgcacag

SEQ ID NO: 153504 - DNA, 284 bp, Arabidopsis thaliana landsberg
cacgaattgtttcttcttctccaaacacgtgttcttcaaattcgctcatattattctcgattcccacaaacagaaaaagaagatactaaaaattataaaatcccgataatagaatcatgaaattgtttccgtttatgggtgttttaattgcgtctaatcggaatctcttgccgttatcgtctgcttatcaggtaacgaaaaacagatgctgttctttactcttttattgattttgggaatccattttcaaagcgttatacgatgttttagggatttatggtgaa

SEQ ID NO: 153505 - DNA, 2265 bp, Arabidopsis thaliana landsberg
atggagattgattctgaccagcctgatcggttatgggtggatcctgcttcgtgctgctatgcactttactccaaattggatgctgagaaggtccttctgcaaccatcccctatatccctctcaaaagccttgaaggtaataaagaatgatttttgaaacgagtgatctctttcgacgtgttttagtttattcatacatgcttattctcacttatgttagaacccggttgagctcgaagggatcaagaatgcacatgttcgtgatggtgctgctgttgtccagtaccttgtttggctcgataatcaggtactgaataaatgaaaattttgtttcttgaacactactactatattgatgattgattatgtcactcaacattgtgaaaccatagatgcaggagctctatggagcatctggatacttcttggaagcagaggcaagcaaaaagaaaccatcgtaagcttcttctttcttctttgttttgtttttcccgattttgcaaaacatttttccatgattcatgacgcaatgagtttttcttctgcaaaaaacaaaacaatacagagaaacctctaagcttactgaagtgactgtgagcgataagctggaaagtcttcgagcttcaaaagaggtaatgtttacatataacatattaaacttttgtcgttccatgaaagagatgaatcacatttctcgtgtggttgcagcattttagaggtttaagctttcctactatatcatcggttggttcaaacgctgctgttattcattattcaccagagccagaagcttgtgccgagatggaccccgacaaaatttacttatgtgattcaggagcacaggtaaatatcacatgattgagtgtatactataagcttaccttgtatttatcaaagtctttgctctataatacaatttcgttgttgttgtctttctgcaaagtatctcgatggaacaactgatataacccgaacggttcactttggaaaaccttcagctcatgaaaaggaatgctatactgcggtatgtacttattgatgataaccttttgaatattacattcttatttatttggaataagcatatttgctgatatatgttcaatgtgccgcatccttaggtcttcaagggtcatgttgcactaggaaatgctcggtttccaaagggaacaaacggtaagttatgatctccttgaattttgtttctgtaccaacttgagatttggctattgatcttttatatgttgcattggctacatctgaatttacaggctatacacttgatattcttgctcgagctcctttgtggaagtatgggttggattatcgacatggtactggccatggagttggttcttacctttgtgttcatgaaggcaagttatgagatacctctttttattctctctttcttataaatatcgagtcattgataataatgtttttgaaattctagatgtcatcaactaactttctgcgatgattatgtatggtttaatatgtaggacctcaccaagttagtttcagaccgagtgccaggaatgtacctcttcaagctaccatgactgtaacagatggtccgtctgcaacaaaaactcggtagttctcctgttcgggttaaccttgatcatattctaaaagctgtctatattcatttatttgcagaacctggttactatgaagacgggaactttggtattaggttggagaatgttcttgttgtcaatgacgctgagactgaattcaattttggcgacaagggctacttgcaattcgagcatatcacttgggtacttactcgttgtctgttaactaataccgtagttctcatatcaacatgcacatctgagtaactctcgatctctctctctctccaggcaccatattaagtgaaacttatcgatctagacgagttgacacgggaagagattgactggttaaacacatatcattcgaagtgcaaagacatcttagccccatttatgaaccagactgaaatggaatggctcaagaaagctaccgaacctgtaagtgtatccgcttgatcccctcccagatttctcttaaatagatgtttatcaatggctccttcacttctctcactagtaaaccaaaaacattcaagtcatacacagattattttctttagttttgcattcaaagttcatgtttctggaccacatgtctttattcatagcagattctcagttgttgaactataaagagaacattatgtttatcgttttgatattattaaattgtcaac

SEQ ID NO: 153506 - DNA, 1469 bp, Arabidopsis thaliana landsberg
  unsure (1)..(1469): unsure at all n locations
ttggggtctattagcgattcataacttatgtgcttttgaatccagagtcatggtaaatgtctggcgtttctttgtggagcgttgcattgtgatcttgttgtagacacagctcggcttaagtccaagtgtaatcctgcagctgctgcaaaaaaccggcacttatgtgaggtacatatttttttagttttgattcggtcaatatcatatgacaagtttggactctaatactcaaagaaaccttgtagcttctgagaattgcaaagaacatttcactgaaagatttgaacacttctgaacatattgtcttcgttctgtttcttgtgttcccgtgcttatctgctctggtgtggttgcattgcagagtttggctaatagttgttttccggtaaataaaggtccatcagccaaccgtcttcacggtattagaaccttcctgaattttactatcttatttcaacagtttttgcttgtattgatccataaagattcaccactacttttggggtttaaactttacaattgtagacttcttcgtggggggttttaatgatccatagagattcaccacccttttttgggggttttaacttttaaaactgcagatttcttctnnnnnnnnnnnnnnnnnnnnnnnacatgttcaggaggatcaaagcccttatctcaaaaaccaaaggtaacataataaaccctttttttgtaaatgatattatatcatatcatatctcatttaatctcagtcatatgttttgcagaagaggagtatagtgtacattattttctccatcatcgttttggtagtgcttcttctctattacagctttgtctatttgttccgaaggtaacaacaacattaaaatactgtttcagatttccttacaactctaaaaccgaaaaagcccctcatgaactcattgttcttacgttttactaatctgtagaggattaaagagaagatctcaagatttgaagcgtattagacacaatggtctgaagaagaaacccttctaaccatatcaagctttagctttaatggcggctgagagagagtacattttttttctttgcaagatgattacaattaggatcagattagtgcattttgcaacatcccttacaattatatcactacttacaccaatattgttacttagaattcaatagtgtttactgcaactagagcggtacaatcgcatttaacatttctaaaacatttcaaaggttcaacttaattgcatttttcatatttggtaggatcattcttaattatgtggttgagacttttgagtcttgatcaaccatgattatctcgatcattttatcaattgggccgtttgatgaaaggccttttgggccaaattacaaaacagatatctttggaagaaccaaaacgacaacgtgggatagacgttagagatgacgtgaagaaaaaaaaggagataagtggaacctactttttcccagtataa

SEQ ID NO: 153507 - DNA, 1324 bp, Arabidopsis thaliana landsberg
ttactttagacaagacgactacacgaccccacctagagaaagtctgtcaaatttgaatcagccttattatcctacagaagctcggcaactacggttgctcggagacccttctcggtcagattctcctcggtccgaacctccgcggtcatctattcaggatcctcaactcaaatacctcaccattttatctaatattcggaggtacctatggtgaacttttatctttgcccaaatatgtcgatcatagctcactgaagacctgaagttgtagccatcagatgtttaaaatcatagctaaacctgagaactctactaggttcctccactcttcagatgtttacattgttcctatttcctggctttgcagttacttatatgtgaatgtgtaatcatagggcttggtttttttgcaatgacagatatggatctgcatcagatcgcttggcctcagaaaatgaatatcatccggcaacaccatcagagaaggaccagtttgctgtaccttattctgataataaaaattacccttcgactttatctgggagtgagcatccttctgcttctgcagctaatgggagtgtgtatagaagtgagttctataattcagcatcacaaaaggaaggggaagctagtcagcagcatgagatccctgctgggacttaccatcacccagaagcatcaacagtttccaatactacaaagtccatgcaaccagatatgcaggcagttagtgttgctcaatctcataccgagacagctggctatcctacaccggcacatggtgaagcttcacaaccacctgctggagcaattggttacacacaccaacctcaaagtgtagcgggtaattatagcacacattcacagcctgggaatgtggaagaaagtacacaatcatatgctggaacagatagttactcacaacagcaatattatgcagctatggggcctacaactcaactccatgctggtggatatattcaaaaacctcatgaaattgggtactctcagcaacctcatgatgcggcaaccgggtactctcagcaacctcatgatgcagcaaccgggtactctcagcaacctcatgatgcagcaaccgggtactctcagcaacctcatgccgcatcaaccgggtactctcagcaaacctatgctgcagcaaccgggtacactcagcaaccccatgcggcggcagccgggtacactcagcaaccccatgcggcggcaaccgggtattctcagcaaccccatgctgcagctaccgcgcacgctcagcaatcctatgctgcagcgaccgcgcacgctcagcaactccatgctgtag

SEQ ID NO: 153508 - DNA, 1823 bp, Arabidopsis thaliana landsberg
aattcagatatttgagttcatcactgcagcatttatgaattgatctcaataaccgccaatttcgttccttgtttcgaatttgcagacaaagaaccggacattgtccagacaggattgcgcttccaccaccaacttatgctactcaatctatgcgcaacagcccaagaacttcccgatcaaccagttttcaaaacaaaccatatgataatggtgtttcctctacaccaccttcaactactcataacgagagccaggtatgatttacaaagaaagaaacaacaatgcattgataatcttttgctgctcgtcacatctttttgttggataaacagcaacagttttgccccgtatgtctagtgagtgcaaagaacatggctttcaattgtggtcatcaggtgcatttccactcccgagttacctaagcatcgcacttgaatcaaaatcgttaactttcctttgtttttcttattttgctcatcagacttgcgctggatgtggggaagacctccatgtgtgtcccatttgccggagctcaatctcggttcgtatcaagctttattaagataagtctctcaagaactgaaggaacccgaggtggtctgagatctttcacagccaacaccatcccaacttagatctcatttaccagtgtcctaacatttgtttttactttgaggggaataaccggttcctctcaaaggttttgtagataatctgttgtcaattttgcattctcattgcacatgaaaaaaccacagcagactctctcgtgaataaaggatcctttctctgcggttacacatttttacttaaaagaatttgaatcttgaatggtcctatgacatatgtatcaaacaacacactactatatacctttcttgtttgaaacatctagtcttcaacacagtagcccagatggtcctgctttaacttccataattgacatcttatggggtcgtatctattctctgtcgttaaagattcataattgatgtaactgtcaacgaaagatggcaaaaacacaaaggctattataggtttctatcaaactgatcactttttactgtaagaatatatgcgatatacttttcttggtcttcttccctcagtaatgaacaagatcccaatctgagtctgctattctttcttactcttccacaagtttgtattagttttacgtatatgcggttaagcagtccgggcggtgatcctctccattcattcatttgcttacccagagtaaatctagtgtgtgtctttcatcacgaaaagtattaccacagtgataagatgtgtagattttcaaatctgaaaaagagataaagctatgtttcaagtctttgaataagattccagtcatattgctcaacaatctttagtttcagggaccctactaatatttttatcacgcaaaccaaagagacaaagctgttttgtgtttagtaaatacatattcaaagtagagtctttttagaacaacaaccatttaccatgaatttccgacgcgacatctctgctctgaatgaagacatcatagttgagcagctacttcgtagccatgatccagacggtcgctggcttgattccgaaatgctgcttcaagatgtcgatttcatcttaagctttgttctgcaaagggatgggagctatatccatcccttggggtccaattcttcaaagagttgtcttgattctggccaataacaatgccactaaactttcaggtttctagaccgcttctgacagagaattgtatcaccaccattgaagtttttgactcaaaggaaacactaccatacgctatcttcagaatctccgttcag

SEQ ID NO: 153509 - DNA, 273 bp, Arabidopsis thaliana landsberg
  unsure (1)..(273): unsure at all n locations
tttgcgactgatcactgatgtgctttcgatctctcgtgacaacatcttcttatatcaatcgagttcgaattatgtctnnnnnnnnnnnnnnnnnnnnnnnnnnnnnnnccgaaacgctttcacgtaccggaggattcttcgacggcaaagagagtgatagtgaaattgacgatcagttagcagattcgttgtttgatggttttagagtacgagtcgcctccggaggaagaagacgaatttgtgtttcatcgatcatcatcaccacaaccctag

SEQ ID NO: 153510 - DNA, 572 bp, Arabidopsis thaliana landsberg; identical to SEQ ID NO: 18938
  unsure (1)..(572): unsure at all n locations

SEQ ID NO: 153511 - DNA, 2009 bp, Arabidopsis thaliana landsberg
atgaggaacgttgttaataacagcgttgagactgttaacgccgccgctaccgccatcgtcaccgccgagtctcgagtacagccgtcttcttctcaggtaaactactaagcttcttcttccagattttccgtgattgaaatgtgtttttcttctgctcatagatcagtattgttacttgcttgatttagatcgtgattccgagatttatagcttttgtttgaatgattgctctgaaaatttgatctgttcttagttttgaatttcgcgattttgctgttttgatttagctcatagttacgaaactgtagtgaatgtgatttgaatttgcgattttggtgttttgattttgattacgattctagatcagagctaatggtgagcttagttcttgatttcacgactttgatttgttctctctggattacaattgtggtctcaaaaaggtaaaaagatgcgttgttgctttttcaatctttttgtggattggctttacaagtcataatagcatccatgattaaaaaggttaaaagcgtttctatttcatgtttggttaattttccacggatagtataaatttctccaaaagtgaattacaaacgtttagctacttattggaaactaaacaagattaactttattatcaaaagcttttactttgagaaagttttgttgaaacagttctctctaaaggggatcaagatgagtctaattttgtgtgtttaatttgtacagaagggaagatggggaaaatgttggagtttatattcatgttttggaactcagaagaacaataaaaggattggtaatgctgtgcttgtacctgaaccggttacatctggagttccggtagttactgttcaaaactcagctacttcaactactgttgttcttccctttatagctcctccttcatctccagcttcgtttttgcaatcggatccttcatcggtttctcactcgcctgttggtccactttctcttactagcaatacattctcgcctaaggagcctcaatctgtctttaccgttggaccatatgctaatgaaactcaaccagtcactcctccggtgttctctgcgtttataactgagccatctactgcaccgtatactccacctcctgaatcatcagtccatataactacaccttcttcacctgaagtgccctttgctcagttgcttacttcttcgttggagctaactcggagggatagtagtagtgggatgaatcaaaagttttcgtcttcgcactatgagtttcggtctaatcaggtgtgtccggggagtcctggtggtggtaatctaatctctcccgggtcagtgatttcaaactctggtacatcttctccttaccctggtaaatcacccatggttgagtttcgaataggcgagcctccaaagttcttgggttttgagcactttacagctcgtaaatggggatcgaggttcggttctggatcgatcacacctgttgggcatggttcaggtttggcttcaggcgctctgacaccaaatggtccagagatagtatctggaaacttaacacccaacaataccacatggcctcttcaaaatcagatctctgaggtcgcttcactggcaaattcggatcatggctctgaagtcatggtagcagatcacagagtttcgtttgagttaacaggtgaagacgttgcacgttgtcttgcaagcaagctaaatcgatcacacgacagaatgaacaacaatgaccggatcgaaacagaggagagttcatcaacagacataagaagaaacatagagaaaaggtcaggagacagagagaacgaacagcatagaattcagaagctgagttcctcatcgattggatctagcaaagaatttaaattcgacaacacgaaagacgagaatatcgagaaggttgcaggaaacagctggagtttcttcccggggttaccatctggagtcagctaaccaaattaaaatgacatctcttcttcttcttcctcattaccaaagacagagatata

SEQ ID NO: 153512 - DNA, 1677 bp, Arabidopsis thaliana landsberg
aagtcgccctcgaatcaagattaaaacctcgtttagttctcaatttcagttctgtggatccgtgcgtgacctcaagttttttttttttttctgtctcgaaattcagaatcgtagaggtgttgaaagttgaaaccttttttttggtttgcttggttaatgggtttcttcaaacttgatcgataattggatttgaatcaagggttttagtgttcttgctttgtgtattcgtttggcaatttgggataatgaatggtttgcaagaagtttgttcgtcaagtgggtcggtgatgatcggactaccagctgaagaagacgaaaacgccgcacattcgtcggaggattcatcttgccccgacgagtcagtgtcagagacagagctcgacctagctttgggtcttagcattggtcgtcggaaggttcgatcgtctttgtcttcctcgtcttcttctctgaccagggaaagtgggaccaaacgctctgctgattcttctccggctgccgcctcaaacgcaaccaggtaaaaaattcatcttcgagactttatattataacctatatgaatgattggtctcagattgcttattgttacagaatcaaagcaacttagaggatagagcttttagaccttaaactttgagaatgaatgaatcacaggattgaatcaaatagagtgttccctgaaatgtttagttaaacttttgaatcatattggtttatacttgttcgtcttttgatttaatatcttttggtaatggagcagacaagttgctgtaggttggccgcctctacggacttacagaatcaacagtttggtcaatcaagcaaagtctttagctacggaaggcggcttgagttctggcattcaaaaggagactacaaaaagtgtagtggttgctgctaagaacgatgatgcttgctttatcaaatcgtccaggacttctatgcttgtgaaggtgacaatggacggagttataattggaaggaaggttgatctcaatgctctggattcttatgcagccttagagaaaactttggatctaatgtttttccagattccttctcctgtaacaagtcagttactaattctgtttcatgagattccatgtgattctgtttttcaaattctgtgtctcttgaaattgactggttttgattgatcgatttgtaggatccaacacacaaggatacaagacaattaaggaaacatgtacttcgaaattactggatggctcatcggaatatatcattacatatcaagataaagacggagattggatgcttgtaggagatgttccttggcagtaagtgactacccttataacttcccattcatcatctgtatttgtaatgtggcacatccatttcaatgaaaacgatcttttcatcttctcaggatgttcctcgggtctgtgacaagactgagaatcatgaagacatcaattggagctggagtaggtaagtagagagtcctatatagcaaaaacagtttacatctctttggtctgtaactcatatatcacattcacatatatacatgtgcatatgtttatacatggagtgtacatatgctctgtggtccgcttgtgaatatcaaacaacagcttaaccttgtctttaaagatctttgtatatttaggggttttcactcatatggggcctgatccaatataccactat

SEQ ID NO: 153513 - DNA, 2106 bp, Arabidopsis thaliana landsberg
atgtttaggatagttttgcatgcatgttgcatatttgcgttgatttcaggtgatttggagctgttgacgagctatttggaagaagcggacctgatcacgataaaccactcgaccaagaggtcgagtaggagcttcaagatctcaagagaccactcgacccccaggtcgagcagaggacatcaccacttcacttcaccactcgaccacgaggtcgagtgccctcatctccatcaccagaccatcactcgatcacttcactcgaccatgaggtcgagtgtcttcacctccatcatcagaccaccactcgacctcttcactcaacctggaagtcgagtatcttctaacaccactcgatcacatcactctacccccaggtcgagtgccttcaccttcactgccagaccactactcgacctcgtcactcaacctagaggtcgagtatcgccatcacaacacttgactgcatactcgatgacaagcttcagagccttcttcattccgcactcaaccagacactcgagcacaaggaagaaaagaagactccagctattcactcgacctctcactcgaccacctgggtcgagtacagttcttaacccgtccaaatacttcgtcgttttgagtattagggtttcgggatatttggctataagtagcatgtacttctcattttcgcagacaagaagttttttacctagttttatttccgcagaccttgtgttctagactttttgtaatccagatttctctttatctattcagtattcagcttttgttcttgatttcgtttactgttgttcattctgttatcatcttgctgttacactgttgttagcatgttttcaacttgttcaatgtttatgctttctgttatgatgtttgagtagtgaataggtttctaaggatgggttagagtagtgtagaattctcagtattctaggtgattgtgtattgattgatagatcccttctggattagttgttcttaatgcctattgctttctgatcaactggaatttgagcccagacatttccgcgctcaaaaggtgttcgatgaaatgtctgaaccactaattccagagattcgtgaccctgtaccaaggtattggttgtagggagcgttttggctttaacttgttgatttgtaatgcctgttatgttagctctcgtcaatggtgattgagtctgggactaggttagcttgagagtctctgttgcggtggcacttagatttggttaatgaacttgttgtctaggattaatttattgagcatgtcaatcacgtgtaaactgaggaaacgaaactactcaattaccccatccttaggaattctttatctgattgaattctttgtttactctactgttgtttactgcatcttgttatctgttgcttagtttctacaattctttcctgttactcgacctgatactcgaccacccagttgtctggcaacagactatgcagtcgagtatccctgtttcactttctgcctgttactcgacctgtcactcgacctcatccagtgctctgcacagagctgtgttggtcgagtgttttgctgtttctgtttgattttctgttttctgcatattcacttaggactgctagaacacaccaaaacctgttattgcttggcttgacttagtgacttctgatcacatcttgattgttagcatcacacctatttggattgaacgatatgatagtgctttaggatgaattgatcttaaaaacctattatcaatttggtgccgttgccaattgagtgtttgtttgttacatttgagatttcagacttgcttatatcaagttctttttcaattttcaattcggttgctaactgtgtgtttttcttgttgtcttcttgatccaggtacacctctgttgtatgcaaactcgatcaacaggcaatcagaacctccttttcaacgacaacatcgaccgcatagctggcaaactcagagaaaggagaaacacagtcaaccttgttccccaacaaccactcgaaatggctgacaaacagaatcaacaaaatggcccttccaacattggtgctggagatgcaccacgtgataactgtggatgtcgaattcacacactcaa

SEQ ID NO: 153514 - DNA, 402 bp, Arabidopsis thaliana landsberg
aattcctacgcaatcgggtcgttagtccttgctttctccctcctctcgcatccattctcgcttctcgtcctcctctctctcttaggctcctggatgtttctatacctcttccgatcttcagatcagcctttggttctctttggtcgtagtttctcagatcgtgagactttgcttggtcttgttttgactacgattgtggttgtgtttatgacgagtgttggatctttgttaacatcggcgttaacgattggaatcgcgattgtttgcttacatggtgcgtttagggttcctgatgatttgttcttggatgaacaagagcctgctaatgctggtttactctcgttcattggtaattctgctgctacttctgctgctgcttctgttgttgcaggacgagtttga

SEQ ID NO: 153515 - DNA, 803 bp, Arabidopsis thaliana landsberg
ttcagttatccaccacggaattctccctccggccaaatcggatcgaatctttcttaccattccggtgttcccgccggatttcagagctcgtggatggactaagtctcctttctctctccttataaatccctctcttgcttcaggtcctccttctctctttctttacattttctatattccttatctgtgtgaatggaagaaggattcatctatctgagtcatgctaatgtgcttctgggttacgattctttcagctgccaatcgtcgtctctctcatcttcctcctatcgcgtgttccagaggtattgatcaggaagatgaaggtgaatgcttcttctccaatattttcttctgtttttttttttcctgaattgtctgtgtcagtcttacttttgctagcaagacacaattgtatataaaggaagaagctttatcttgtgacaataatttgtttatggcatgttagtacagagaaggagagcagagaacttctaccacacaaaaacgatgagaatgcaaccacttcacgctcttcttcatcagtagatagtggaggcctgaaagattatcaacaagaagaaacttacaaaacttccttcaagactgttgccttgtgtgttagtattctcttgcatctactaagtgataatgcgtttttgatctatgtgcgagacctgatttcatagttatctcaataggttggcactgcggtggcatttggaattggaataggtttgaaggaaggtgttggcaaggcttcagagtttttcgcagggtgtgtagagcttactatatatgatata

SEQ ID NO: 153516 - DNA, 1199 bp, Arabidopsis thaliana landsberg
taaatatacttgctttttgttgatagcaacagattgtggagattactatttttccttctttgtgatgtatacagttttttggttttttattgagttactgtaactttaccagaagaacaatagctattcttgttttttctaatccttgaatgataaattgatgattttacatggcagctggaactgaaggtaggacttggaggaacctcttatgaagattttataaggagcttacatctacccttgcaattaaggtactactactagttcagtagcttgaagaccaatatgattgaaaacatagtcaaactagtcaactttacttgtcctgaatctgaaacagcgacattgatttttttttgttttttgttctgtaatgtagccaggtagatccaattgtggcatctttttctggcggggccgtgggagtcatttcaaccttgatgctaatcgaagttaacaatgttaaacaacaagagaagaagaggtgcaaatactgccttgggactggtaattttattgtatatatcatgaaaattcttgattttttcttcgaattacttctcaaaatgagttggagaaatgctcactggtctgtgttcacatgataataggatacttgccatgcgctcgatgctcagctagtggtgtgtgtttgagcattgatcccatcacaagacctagagctacaaaccagcttatgcaggtcgcgaccacaaaaagatgtctaaattgttccggcgcaggaaaggtaagattctctctatttcatgcaatctgatctgagtattatataattcattgttgtccttgtaatgttgaaatgtgtatttgtatatgaatcaggtgatgtgtccgacatgtctttgcaccgggatggtaacagctagcgagcatgacccccgctttgaccctttcgattagaaaacaatggcctcctttgaaattggtccttgcaaaagctaagccaagcctatgagaactgaggagagccaaacctcgtcatataaatgttttacataataaaagtaattacataataaaagtaacattagaatttttaacttttgtctatagtaaacatgggaaagtatcggttatgtaaagtacttcttcacaaactaaaaaaattcaccagatgatctccggtgaagataataggatatatagtagccatcaactccgtcatcataagctgt

SEQ ID NO: 153517 - DNA, 1325 bp, Arabidopsis thaliana landsberg
aggtaggaagcatagatgtgctacattgttactatgcacatggggaagccaacgagaatttccagagacgttgctactggatgcttgaacagtgagtctgagtttgtgcatatttcagtgttttgttgttctctgtgtatactgaccttctagcttggacggaaaaaaatagtgtttatgatcataactttgaaggtactattatagaaaagcctcatctcattgggttttagtcgctactttgtctttgttttcctttggatatctgaggccttcgtgggttaggtgtggaacatggaaatagtgaacattggaattttctttagtgtctcctaaatagtttagtgtctcccttgtacgagttgactttgctttttgagtctgttttcacttttgttcttatatactttgttttatgctgtattgttacagacatttgatgcatatcgtttttgtgcactacttggaggttaaggtatagctcgtcctgtctgtgatattactccatcatttaacattaaaattatcttttgtagtgtagttttctactgataagtgttcttaagtttattttatattgtaaattatacagggtaaccggaccagtataggaatgaaagaaaacaattcaaattctgtaaatggcacagcttcagtgaatattgattcaacagcaagcccaactagcacattgtcatcattatgtgaagatgctgataccggtatttctttctctattattttgtatgtttggtactttggtaacttttgtttataatatagttctttccatggaagaatcatcgattttcatcctactttgtgaggtgtgatgatttacatatcatcacatgctcttggctctgtgtgtaattttcaacaccaccttatatcagttttggtgcaggggatagtcaacaagcaagttccgtcttacgaccatctcctgaacctcaaactggtacttctcaaataagggagaagcaggaagttagcatattaaattcttactgttagagctctgttttgggtactcacctctctttctggtttcctgtctgcatttttgttaagaaggcctttgttttcctgtctaggaaatcgctatggttggacacctgctcctggcatgcgtaatgtttcacaggttcatgggaacagagtcagagaaagtgattcccagagattagttgatgtcagagctttggataccgttgggaattcgctgacaagatttcatgatcagccttattgtaataatttgttgactcagatgcagccttctaatactgactcaatgctggtggaagaaaattcagaaaaag

SEQ ID NO: 153518 - DNA, 2041 bp, Arabidopsis thaliana landsberg
gtgatgcatgctcaagcgaaaagaaggccatgtttcgctctaatctcaacgccaaaagaaagacacccgcatagagtctcctctcgttaggtaaaccgtttttagcttctttctctttttgttgatgtcacttctgggttcctgcaattctaaaaacctctaactgaacgaatccggcttaaaatttgtgggttctgggattgggcttgagctgtagttgtaggtgattacaagttgggatgaagagtttgttctttggatttgtaggtacaacgaatcagaccagcctgtgtgtcgagtttgcaatgtcgtcttgaaatctgaatcactctgggatgtacatcaagcttctcgtaagcaccacgaggtaaacttagtgtcttctgctccataagctttacttcacattctcttataacatgggtaacaacaatgggatatttgataaacaacatacattgaagataggtagatttcatgctcttatagggattatggaatgctactgaatcatttagtagctggctttagagtctctgttttatgttctttaatctcattaacttagctttggtaaaattatgttgggataggcaatcgataatctaaaggctagtgcagcgggaacccaacggggtagcaaacctgttgaaactcggccaacgaaaactgaagttttggctaaatcatccaaatctctgacatcatctggtcttcccccaaatttcttcgaaaatcgtgagcctgctagaggtaattggcgctttcctcttcttgatcttatctttttcgaataaatttcttagtagaaggcttttggtttaggtgctagttatgtggatgacatgcttaaaggctctagtcttaggttttttgaaagattgatgatagtttcattcgtcaatcgaaaaaaaaaacttattgatcaaatatatgtgcagcagaagtagaaccagcaaaatccaagaatttagagcaatcaaagctcgctataggatctgaaacaaataagtcaaagggacctcttccagccggattctttgataatcagaaaactgattcttcaaataccaaaaccaccagtgaacctaaacagagtcagacacagaccactggtccagaaacaaaaccaatggtgaatggaaaccttccaaccggtttttttgataataaagaagctgacctgcttgcccatggaatcaagctcgtcaaaccagatatcaagcgagtttcttctctttttttttttgttgcttttacttttccagatgcagaaaatcaaagtgaaacctcattgttgtggaccttgtgatccagttactttcctacattctcaatttgaatggttcatatgatcttatgggtttgtacctaagaattctcttcgtgaacttatataaacatggatcttcttacagggatgaatataaagaatttgagaagttgatacaagatgatttgcaggtagtggatagccgcatggaagaagaagaggtcagataactttctgtcactatgataaattgctgacagtatcataagctctttcttaaacttaaaatcgcttttctcgcactctaattgtcaggttgatgctgcggaaactatagaagaggaggaacaacgagagcaaaggtaatttgattcattactttgttatagcaagaagatggaaatgttgagacttgtttaagattaagtaaacacttggcttctccttttaatcttattctgcagatcatacaaagagaaagtagagattctgaagaggaagaaaatggaacttaaagcggcaagattagcgaagcgcagtaaaacctctgaggggtctgttaaaaagccgaagaagacagaagaagaatcgcccagcgatgaggaggatgacgaggattctgctgttgattggagagctcaacatctttgaataaactagaaaagactgtttaaaaatctgtaccctggtaaaacatacaatgttctatgacaatatacagtgaaaactaatcaatatcatgatatatacaattatcagtttcagagg

SEQ ID NO: 153519 - DNA, 325 bp, Arabidopsis thaliana landsberg
tgttttctcaggaattcctggatctgctaaatctgcactttgcaaggagttattgaacgccccaggaggctttggagatgataggccagtgcatactctgatgggtgatcttgtcaaaggtattttagaatgtaggttttttttgggtcaaaactgctctggtctctcaatttgctatgccatctcatgcaatattctacatacgggacaggaaaatattggccaaaggttgctgatgaacgtcgtaaaaaaccacaataaattatgttggctgacaaaaatgccccaaatgaagatgtctggagacaggtaattaatcgtacgt

SEQ ID NO: 153520 - DNA, 231 bp, Arabidopsis thaliana landsberg
acgaagtcgcgttgagattcgacaactctgagcgagttttatgttttgtcatttacctttgtcgcttcgacgtgagacgagctgtggaagaagacgaaagggctcttaagctctctttactctcgtcttctcctcctctttttgagatgggaagccctaacgccgccgccgagacggatctaacaaccaatgatttcatcggagacacacgacggactctggtctgataca

SEQ ID NO: 153521 - DNA, 1691 bp, Arabidopsis thaliana landsberg
ccccacttggtttcttcactgtgtctataattctttgacttctccgcctcctccgatcgcactcctatctctctacgagtcattcttctatggcttccattgctgcttctgcttctacttctctccaagctcgtcctcgacaactggtctctcttttctcttcttccctcgaatctctcatctttttcttactgaatttatgtcgggatttctcccatcttgctatagatctgatctgattcatctcgacctagctgttcttcttcttcttcaactgtagatctaattcgcagaatcgcttcctcatctctatattgatccgttgaaattgctctgtattcattctttgccctgtaatcttttgcattgaggtaagttagctttccttttctggaattttaggctctgttgaatctattttacttaactcggtcgaatcaccggaaaaattatcctattcctcttcgaattggatttgttttatatctgaatttgcatagattcgaactcttggtaagagcatgcgggttacatagattttagttgcttttgtttccttcttttggtttgtttcagtgcaaatatattgctttgcatttggagtttagttttgtactgatggaaagttatattcgaatatgatggcaggtgattggggctaaacaagttaaaagctttagctatggaagcagaagcaatctttcttttaatcttcgccagcttcctacccgcttgactgtttactgcgctgtaagaccttgtctcttctctcatatgatgttgtttctattttacttttgatctctcgagccaattcatcattcaccattgttgattgttgataaacaggcaaaacctgagacagtttacaaggtgtgtgcagttgtcagaaagcaactctcactcaaagaggctgacgaaattaccgctgccaccaaatttgctgcacttggtgctgattcccttgatacggtaactactttctcatgtctaataattggattcaacttttgaaatgggattgttcattggacttattgatgcataatcaatgcctctttaaacttgtatcctgctttcaagctcatattgtcgaatgtttagattgcaagtcttgtgaaggatcgctgcttctccttatacacacatctctaaacatgttactgagatacacatactcatgattcttgtatattggtaggacgtactcatgcttcgtgtgtcggggttccaggtgaagatagttatgggattagaggaagagtttgggattgaaatggcggaggagaaagcacagtctatcgccacagttgagcaagcagctgcactcattgaggagctcttgttggaaaaggccaagtagaaaatcctttactacattagcaaaaacgaaaaaaaccaaaacccaaaccactatcttcttattgtttggttagctagagagcaattgtgtccgttgagattttatgctattttcggataattattacaaggcttgtattttaatatttactttcgtctgaaacattttactttcacctttaaaatattagtactttctggtattcaaacataagttttaaataatataatatggttgatgatctaatgaaagatttgagtgcttgacatttttttgtttctttataatctagaagttttgttgtccgaagattccaaaattcagggga

SEQ ID NO: 153522 - DNA, 251 bp, Arabidopsis thaliana landsberg
ttctgtggcttatacatgcaggggtatgcacttctttgtgtgggtttccccacatctgaccttgaagtagaaacacaagacgaggacgaggtaactcattataagaaataatcttctgaaaatccaagaattgctgcaacaatacttgtattctctcatttaattctagttacgctgttctaaatcgtatggcatacacaggtctactggctacaatttggaagatactttgctcgtggaccaattgtaag

SEQ ID NO: 153523 - DNA, 1192 bp, Arabidopsis thaliana landsberg
attaatttattttatttttcctttctctcctgagagagactctagactggtcctagggtttgagctccttttgactcttcttggattccttcttccttgtgtgtttttcttctttctcgtacttttgtttgttgaatttctgctccttttactttcttctccttcttcttccgtcaatttcgtttcttcactctcttgcctaaagctctaaactttttttttgttttctctcaaagtttccatttttgagctctctcttctttgatctgcttcaagttcttccctagttcgttacttctagggttttataatgagcttaaaaacaaacccttttcgccgaatctcctaaatctttggttttttttgaaatgcatttttctctgtggaagcaaattcatcactgtgcttctctgatcttagacaagagtaagagcagcaggagaagaagagatgggtctgattcgtctctcaatgtcaagaaaaaagctgcactgattcggaaattgtatgaagataagctcagggaagctttagaagaagcttctgagaatggctcactcttcaaatcccaagacattgaccaagataatggagatggaagcttgggtcgttccagatccttagctagacttcacgcgcagcgtgagtttctacgcgccactgctttagcagctgaacgtattatcgaatcagaagactcaattcctgagctccgtgaagctttgaccaagtttctgagcatgtacccaaagtatcaagcttctgagaagattgatcagttaagatctgatgagtatagtcacttatcatcatcagcttctaaggtatgtcttgattactgtggatttggtctcttctcttatgttcagactctgcactattgggatacttgtacgtttagtctctctgagataactgccaatttgagtaaccatgcgctttacggtggagctgagagtggaactgtggaacatgatattaaaactaggattatggactatttgaacatccctgagaatgagtatggtcttgttttcacagttagtagaggctctgcttttagattgttagcggaatcttatccttttcagtcgaataagcggcttttgacaatgtttgatcacgagagccagtctgtgaattggatggcgcagacagcgagggagaaaggcgcaaaggcttataatgcttg

SEQ ID NO: 153524 - DNA, 459 bp, Arabidopsis thaliana landsberg
  unsure (1)..(459): unsure at all n locations
tcccgatctctcagcttcttccatttacaattctaccctttgcctcttggaacctttgaacgaaaatggcggaaacgatcggctcaggtacatctttcttttacttcttcacctttcttaattgaatctttcgtatgtcaacatgcgaatgttctggaactaataatgtatggacgatatcgattgattttgtatagtgattgattttagatatcgtcaaaacctttagtctttaatttcgcagcgtttttataattgtgcagaggtttcgtnnnnnnnnnnnnnnnnnnnnnnnnnnntcgtcgcgggtcatcgtggtttggttggatctgccattgtccgcaagcttcaggaacaaggtttcaccaatctcgttcttaaaacacacgccgagcttgatctcactcgtcaagccgatgttgaatccttcttttctcaagagaagccagtttatgtaat

SEQ ID NO: 153525 - DNA, 727 bp, Arabidopsis thaliana landsberg
gaccaagtctacacttcacaacagcagaatcaacccaaacccttcgttctatacaatcagggtcaggggtatgttcctaagcagcaatatcaaggtaactatccacagcaacttccaccacctgggttcacgcagcagcaacagcagccagcttcaacaactccagattcagacttgaagaacatgttacagcagattctccaagggcaagcaacaggagcaatggatttgtgcaaaaagatggcagaaattcacaacaaggttgactgtagttacaatgatatcaatatcaaggttgaagcactgacatctaagatcagatacatagaaggccaaactgggtcgaccgcagcacccaaatttacaggaccttccggaaaatcaatgccaaattcaaaggagtacgctcatgctatcacacttagaagcggtaaagaattacccacaaaaagagagtccgaaccagaacactgaggacagtgtggatcaagatggggaggatttctgtcagaatggagattccgttgaaaaagcaatagaagagcctatactcgaccaacctactcgaccactagctcctgcagcatctcgtcttgttgaaaaaccagctgccgccaaaaccaaagacaacgtcttcgttcccccaccttacaaacccccactcccatttcctagtcgattcaagaaggtcatgatacagaagtacaaagctctcctggagaaataa

SEQ ID NO: 153526 - DNA, 653 bp, Arabidopsis thaliana landsberg
ttttcttcttctgagtttgcccgggagagatctattaactcatcagtgatgcatgatgatattgtttgtttcgttgtgtttgtcactgtactcttttagatgtttaatccatatttaagaaactgcttctttgatacagtgattaaggttgattgttcatggttgatatgatgatatggagaagtattgatgttactcactatgggaattgtttgtggcatcgcaggttgggttaccaaatgttggaaaatctactcttttcaacactcttacaaagctttcaattccagctgagaatttccccttttgtaccattgagcctaatgaggcacgtgtgaatatccccgatgagaggttcgattggctttgccaaacttacaagcctaagagtgaggtaagtttgtaactttatttcatgacttgctgttaaggaagagattactactatctgaattactttatgaatgggctgacttctgtctgttttgatgcctcagattccagctttcttggaaattcatgacattgctgggcttgttagaggagctcatgaaggacagggtcttggaaacaacttcttgtcccatattcgtgcagttgatggaattttccatgttttacgtatggtttttccctctcgctttttctcctag

SEQ ID NO: 153527 - DNA, 1159 bp, Arabidopsis thaliana landsberg
cgggtattatttggctgatatagtgcatttgtatcagtctcttagccagagtgatggaagatggcgctacagctccaacaatcccgaatcaagcacttttgctgctggttagtagtacatattggattaacccttacctaacgttaatgatgagccttttagattatgtatcccttcctttcttgcttcagcttgttcacttcttttgctctttgttatttcactcattcttctcaacatgcgattttttttctcaggcttagcctatgaaacgcttgctggagtgatttcattagcaccttcagagtttgatccatctttggtaagtgagatgtttaatccactatacttctgatttcctgagaatatattttgatgagatatcactacgatatcttggtttagtgatgatctacttttgcttctggaatctctaagtaactaaaataaagagttttgttttgataattataaattccaaatcttagctacagggaattgtgatttgataatcacaaagaaagattcgtgttttgataattatgcatgtccacctgacttctcatttggttattctggtggtttctttttcattttatctggtagtttattaatcttggttatgtaatgatcgtcattcatgtttgtcctctgttagatccagtcggtgaagacgggtatcctgaagctttctgacagtatccaaaaatatggtatgcagtaaattacttgctatcctatgtattgcatgttatattctcttcactcacttcatagtttttgccagcttgggttttgcatatgtgggctttgaattattatttttggtcttttagatgatgggacattttattttgatgagaagtctgttgatgcaagtcaaggcccgatctcaacaactgcatcagttattagagggctcacgtcatttgcagcttcagaatccacaggattgaacgtatgtaatacccatattttcatgtatcctattctgacaaatgtgttgatagttgaccttcgcattcccattatctcatgcagcttccaggtgataagatagttggtctggccaaattctttctgggtgttggaattcctggtgatgccaaggacttcttcaaccaaatagatgcactagcttgtttggaagacaacaagt

SEQ ID NO: 153528 - DNA, 398 bp, Arabidopsis thaliana landsberg
gagcagttgagagagagagagagatagatggtggcgaagacgatgaggaaggcggaggagctggtggagaaggcgatgaaaggaaacgatgcttctcatgacgcctggcacgtgtggagggtccgagaccttgctctctccattgctcgcgaggaaggtctctcttccaattctgactccatggaaattgtgagtttgaaaaatccctaaatctcaaagttctagttcagctgagcctgatgaaccttcttctagttagttcttctagttagctatagctgtttattgtcaaatttcagctcttttactttagagtgaaccatttctgttgatactttgcaggtggagcttgcagctcttctccatgatataggtacttggttttattttcatttctg

SEQ ID NO: 153529 - DNA, 1615 bp, Arabidopsis thaliana landsberg
cgttatgttgttttgaaatctcaggttataattagacagttggaactgagcaaggctggtccttccaagttaggatttgatggagaagaagacgcttgggtctttgttaaaaagcagagactcttcattgtctcgccttctcttccacttcctcaacaacagcatttcactttggagaaacctgcaatatctcctcaattagaagctgggtttagagaaagcatggaggttacgcaagatagtacctttgttcacactgtggtgccttctcttcctctgcctgaacatttcattaggcataagcctgaaacttctgagtctcaagctgaattaagagacgttcttgcggatccgcacaaaactactcatgttcccactatggtacctgctcttccttaacctgaatatttcactttgcagaagcctgcgtcttctcagtcacaagttgagttcagagacgtcatggaggatacgcatggaactactcctcttcaaacagagatgtcttctcttccattacctcaacacttcgttctgcagaagcctgctggaacttctcagtcaaaagcggatacacgcaaagctactcttgttcacacggtgatgccttctcttcctgtacctgaactaatgtactttgcagaagcctgcaacttctcaatcacaagctgagttaagaacggatacgcgcaacgctactctcgttcacacagtgatgccttctcttcctgtacctgaacattacagtctacagaagccttcaacttctcaatcacaagctgagttaagagcgaatacgcgcaaagctactcttgttcacgcagcagcgatgccttctcttcctgtacctgaacattacagtctacagaagccttcaacttctcaatcacaagctgagttaagagcgaagacgcgcaaagctactcttgttcacgcagcagcgataccttctcttcctgtacctgaacattacagtctactcaagccttcaacttctcaatcacaagctgaggtaagaacgttgacacacaaagctacccatgttcacacagcgatgccttccctttctgtaactgaacattgcactttgcagaagcctgcaacttctcaatcgcaagctgaaactagtcgtgttcaaactgtggaacctgaggcctgtcctgatttcacctcagtagacaaaccggagatagttatgagtcgcagtctcacaaccaggaaagcttcagcaccaaagagatcactgcaagaaagtaggaagaatcaggatagaagagtggagatccacaggaggcgtgcgggtcacaagcccataaggtttccaagagtgatgtgtagctctgttgttatggataatgagaagctgagagtgttgaatctggagaagaaggttgagaaagcgggagggttgaacgaatgggttggatctataggattagggagagagtttgagaggatgttgagaggacagaggatgagtaagtttcagatggcgaatttgacaatggagaagcttaagcagatgggtgctttagccgttgggccaagaagaaagcttatacatgcaataggttgtgtctatcacccacattgtctacgtgcttcctttaactga

SEQ ID NO: 153530 - DNA, 1006 bp, Arabidopsis thaliana landsberg
aaagaacctttcgatttctctcatccaatcgaatcgaaaatcttgttatctctttctctctaactctactgcactcagaatctctctgtatagaaaaaccctaagtaagttgtgatgttgcgagctttagcacggcctctcgaacggtgtttgggaagcagagctagtggtgatggtttactctggcaatcggaattgagacctcacgctggcggtgattattcgatcgcggtggttcaagccaattccaggcttgaagatcagagtcaggttttcacatcttcttctgctacttacgtcggtgtatacgatggtcatggtggacctgaagcttctagattcgttaacagacatctctttccttatatgcacagtaagttataatcccactcttccttccctaaacttgttttaggattctttcttcttttgactctttgactacgtttttgatggtcaaaacttatgagatctctattaccctgatcatttcaatattaaaagattcgaattttgctatgaagttttggtctttgtgaacatgttcaggtttgtaaattgcctcttgaattgattttgtagtcatgttcttgttagtgaaatttacaggattggttttatgattgcagaatttgcaagagaacatgggggattatctgtagatgttatcaaaaaggcattcaaagaaacagaagaagagttttgtggtatggttaaacgatcccttcccatgaaaccgcaaatggctactgtaggatcttgctgtcttgttggtgcaatctctaatgacacactgtatgttgctaatcttggggactcgagagccgttcttggaagcgttgtttcaggggttgatagtaataaaggtgccgtagctgaacggttatctactgatcataatgttgctgttgaagaagtgagaaaggaggttaaggcacttaaccctgatgactcacaaatcgtcttatacacacgtggagtttggcggattaaaggcattattcag

SEQ ID NO: 153531 - DNA, 97 bp, Arabidopsis thaliana landsberg
aaaatgccaaaggttaaaactaaccgagtcaagtacccagaagaatgggagttgatcgagcctactcttcgagagcttgatgccaagatgagagaag

SEQ ID NO: 153532 - DNA, 1792 bp, Arabidopsis thaliana landsberg
cgatgatgtaagcttaagggaagctccacaagattcttcttcttcttctgtaggtatctgaagtcactaaacacgtcaatcacaaattcctttacttttcctctctgacaatctttctacactccatctctctctctctatatatatatatatatcgaatcttgaaactgatttgaaagaagaagaagaagaaacctaacgaagaacatccgaaaaaacctaaactgtatttactttgagcttgaatctgtaaatggaaggcattgaatctgggtctaaacaaggaaagagagtggttgtgatcggcggcggaatcgccggctcactcgccgcgaaattgcttcagttcgatgctgatgtcacactcatcgatccgtaagttctttcaccagattcttaataaaaacaacaaattctttttgtaatgttcttcgttttgatcataaaagctcaaaacttgtgttgagatcaggaaggagtattttgagattacatgggcaagtttgagatccatggtggagcctaagtttgctgagagaacagtgattaaccacaagagttacttgaaacaaggccgtcttgtaacttctccggcgatcaatatcacagagagtgatgttatgactgaagatggatctgtgattggatatgattatcttgtgattgctacaggtcacaatgacttgttccctaaaactagacaagagaagctgtcacattatcaatctggtatgagatttctgtttgttttggttggtaatgagattgtaagtgaagatatttagtatgacttaacaacatttgatctatttggttgcagaatatgagaagataaaatcttctggatcagttttgattgttggtggaggtccatctggtgtggagcttgctgcggaaatcgcggttgatttcccggagaagaagattactctggtgcataaaggaccaagattgcttgagtttgttggacaaaaagctgctgatagagcatctgatcggttagaatcaaagaaagtggaaattatatggaaccaatccggggattggagttcagcttcggatggaaacaaaatatacccggacttcaggaggagaaactataccacgcagacattcaacttcctcctgtgttgggaaacctttgtcttctcaatggctcaatggaactgttctgaaagatagcttggatggtaaaggaagagtcatggtcgatgagtacttgcggattagaggtcgaagcaatgtattcgctgttggagatatcactaatatccctgtaagtacatgatatcatcgaaatatccatcttttaagaaagtttcttggttagtctcttgttttgattatatgattgctaatgacaggagatgaaacaaggatatatagcagagactcatgctaatgtggttgtgaagaacataaaggtaatgatgtcaggtgggaaaaagaagaagatgtcgacttacaagcccggtccagagttggccattgtatctttaggaagaaaggactcggtggctcagtttccgtttgtaacagttgttggttgcctccctggtttgatcaagtctaaggatctgtttgtggggaagactaggaaggcaagaggactaaatcctaaacttgtataagtttgattcctatttgtgttttcaggttacatcttgtgtgcagatgtaatcatgttgtttgtgtttgtgtttgtttttgtgttgatttcatctctttcagcgtggctgattttgcttatgttggtatctaatgtataaataatggaattatttgagtcgac

SEQ ID NO: 153533 - DNA, 507 bp, Arabidopsis thaliana landsberg
ttggcatgggtggtgggggcgccattctttcgaaggtctacgctcgtaaggtttggtcagattcatcattctctctctctctgtggtttctggattcgatattcatccttggttagattactagagcgtcgattatacaagtagatcgcttattctaattactttgtattatttcccctaactatacatttgttcattgaaattcgtctttagttttatgattgtaagcgtgtattatgcgaaccataatgttatttctccatttggatgttatgtgtataggccgacatcattctgcgaggatattatggatggaactcttctcgtgctttggaagttgtcgaccaagtgttccccaaggtactctttcaactcccttttttttcttgcttcttctctctttagactattagtttcttcaatactagattatgataaagattcagcgttttataggtctttttatattagtccgtataggttgatgtgtgcttatcatttgaccta

SEQ ID NO: 153534 - DNA, 164 bp, Arabidopsis thaliana landsberg
agatactgtagcatggacggtgaagcttttgaaatctcattacttgatggagaggaagacagatttggaggtattgtggtgaacttgatggaagtggaatcaatgactgttgatgattttgatgcaaagcttgatgtttcacttaacgcttggaaggatcaggt

SEQ ID NO: 153535 - DNA, 501 bp, Arabidopsis thaliana landsberg
cttaatcgtgattcgggatagccttgcagataacgttgttgaagagcttcctgcatcactctgcaatctgattcagttaaagtcgctttccttagacaataatcaagtgaaccaggtaaacagattgaaatgtgtttttttttgtttttgggtttattgaatcactatcttcttcctttgaaatctgtaacacttgttgttttccagattccagatggattgctgatacattgcaagagtttgcaaaacctttctttgcataacaatcctatttccatggatcagtttcagctggtaattcaataatccataacctcgaaagaacactttttaaagttgtttgtttgaattgggttttgtgtaacatacatttatataaaaatggatagatggaaggataccaagactttgaagagaggagaaagaagaaatttgataagcaaatcgattcgaatgtgatgatgggctctaaagcacttgatgtaggcgttgataaatgaa

SEQ ID NO: 153536 - DNA, 522 bp, Arabidopsis thaliana landsberg
atggttctcgccatcatagatctgctcttcaggtgagactaagactattgtttttggtcacatttgttacgccttctcttgatatcggcaatcttatggcaattagatatgattttacaagggaaagaacatatgtttgaaatgattggtattctttgggcagcaccatattggttatgacatcgctgggtgctctatcgttctatggtgcaagccagctcaagtttcactgggtggagcggtacgacaaactactggttggttcagtcctgtgtttggtaggtatcttaacccttctcttccatgatcatgaccatggcggtcatgaagcacatcaactccacaggaaaatcattactctttagataccgtttcgagtctctgttttgcctatctgtcatgtctgtttgttgtagagcgtcttaaggtctatgaatctttctgcttcgcgttgtatgtctataactagttgtaacgctctctgttgcacgtgaagaaacatatggaagcattaaattcctt

SEQ ID NO: 153537 - DNA, 577 bp, Arabidopsis thaliana landsberg
taatcgcgtctgctctcaactatggtctcttgacatggtcaaataaaattttgggtccttccttggttgctctctataatcctcttcaacccgcagcctcagctttcttgtccagaatcttccttggaagccctatctacttggggaggtttaaaatctctctccttttctcttagctattctcagccatcaacgggatgtgtctgaagtttcctaactaactaggcttttttctcatcctctcttagcattttaggcggatgtgcaatcatagcaggtctttatagtgtcacctgggcatcttacaaagaaaagaaagcggcagcagcaaccgctgtgatcccgatcacctcaaaggaagctgaacccttgatctacaaggaccataagaacaaaccaataggacatctattcacaaaatctcccatctcttcaccaaaatccgctgattgaacaaaaactctgacttcttgaattacttgggtgctccgatgttttcttaaccttttgccgacgaaagagtgactattatatttttttaacagtatatatatgcatatacacatcaatgtttaac

SEQ ID NO: 153538 - DNA, 955 bp, Arabidopsis thaliana landsberg
atgagagagagatacccgatcaacccagagacgagattcattggtgaattcgaaggaagggtcatgaagaaggtcagacttgagaacagaataaacgttgagaaaggttgacttgagatcggtctccattgaagagctttggatacgacgacgatagagactcccaccaagacttctcagatgcaaatgatgtgaaggtattgccttttttattgtcttgcccagattcctacgacagcaaatcgcactcatattcctccttcttctcccgaaaacgcccctcctgtttcttccttatttactacttttgccatcgtcatccccaacacaatcggactgactttctctcccagttgtacatttgtcatgtcaagccaaagaaacagataataaactctgtttttttatagtacaacatgtgcttcaacattagtaaaataggccttcctaattgggctcaccaatcacaatgtggcctctttcaatggaacggtgtcgttttggacgtgccaattgtgctctaccagagtgatctattcccagaagaagaagaagaagacactcctccaatggcgcctcagcttctctcctccagtaacttcaaatctctctttgactctgtcgatacgttcctcttcgactgcgatggtagattctactttcttccattcgattgttatcctctttagttactactctgatgatggatgatgattcgattcaggtgttatatggaagggtgaaacgctcatcgatggcgtctcccaaactctcgaccttatccgttctaaggtgctttcccttttccccactctctattccttttcaggctctctctctctgatcttttgcgattgtcagggtaaaaatgttgtctctgtgaccaacaattccgtaaaatcgaggaggcaatacgctgaaaagttccgatctttgggtgtcacttctgttactc

SEQ ID NO: 153539 - DNA, 884 bp, Arabidopsis thaliana landsberg
atggagacgttgaagctctcgaagattaaagagaaagagtcgagaactttggactcaatcggtgctcacgccggaggaggaggaggagctccaccgatgtcacaagcgaaacaagcttatcctccacctccgaatcaaccggagtttaggtcagatttcatgagagctccaggaccaccgactggagcagtaatgcagatgcaacctccgagacagcagaatccggagtttcagctaattgaaactagtcctcctttagcagctcgtatgagacaatcttactattacagaagcagtggagataaaacgtcgagcacatacgatctcgttgagcagatgcattacctctacgttagcgtcgtgaaagctcgagatcttcctgtcatggatgtttccggtagcttagatccttacgttgaagtgaagctagggaactacaaaggtttaacgaagcatttggagaagaattcgaatccgatctggaaacagatctttgcccttctctaaagagagattacaatcgaatcttcttgaagtcactgtgaaagataaagatcttttgactaaagacgatttcgttggaagagttcatattgatctcactgaagttcctcttagagttcctccagatagtcctttggctccacagtggtacaggttagaggataagaaaggtatgaagacgaacagaggagagattatgcttgctgtttggatgggaactcaagctgatgagtcgtttccagatgcttggcactcggatgcgcaccgagtgagccattcgaatctttcaaatacgcggtccaaagtttacttctcgccgaagctgtattacttgagaattcacgtaatggaagctcaggatcttgttccgtctgataaag

SEQ ID NO: 153540 - DNA, 760 bp, Arabidopsis thaliana landsberg
atgagaggcgtcacacccataaaccctcagaagaagatagaagctgattcgaatcccgtcaaagaatctgagtaagcttacctaattcttcctatagaaaccaattcaatactctctctttctctctaagtctgtttccaaagagtttctaaggatttcgatttctccggttcgtcttgtagttactatgaaggcgaacgtcttactcatctactcgacttgattcagaggtaaactctctccaaacccttaaaaaaaaaccatcacaaatatcggtttttgttacaaaagttctctctttttggtgaattagaggaattgagacgtccaagctttcgaatgtgaactcattacctgagaagatatggctcaaggttactacttactactcttgctatggtttctttttgtttcttcaagattcgattctcaaacaccaccgttgtgatgtatttcagaagcaaatagctattgggatcaacgaagtcactcgagttcttgagaggatgaatcccaacaatactagtgaccaacaacaaaaccctaaacaacttcaggtacgacactaaaaccctaataactctcattagaaaaatggtattgatttagaaagagactgttttcaattcatcacaggtagtgattgtagtagcagattgtaaaccgaggatgctgaccaagcatatacccaacttagctgcttcgagaaacgttccggttctctatgtaagggacaacaaacgagcctctctcagattag

SEQ ID NO: 153541 - DNA, 679 bp, Arabidopsis thaliana landsberg
ccagggcgacggccaacccgcccaagacaatgttgaatggtgtgggagtggtgagtggctcggtgatgggtccagttgtaaagtcgaagccagggaaagcttttttctcaatggttccaggggaggttctattggcttcacttgatgctcttagtaagttaaatttatatttattagctccacattgacattagattagattatctttgtaatgatgaactaaaaatagtttgatttgatctttgaaattagataaattactagacgctgctgaagccgcagagagacaaactctttctgctacgtccaaagctactacaagaatggttagtgagaggtaagtttcacagacaaagtcctcaattttgcctcacgtttagtgtaaatgtctcacataagtgaggttacattaacaggttaggtgagagcgcgggagaagctacgaaagatgtactaggcacggttgggcaccgcagccggcactgcgtggaacgtcttcaatatccgcaaagctttctctccttcctcttcagtcacatcggggatcctcaaaaacgcttcacgaaagtgatatttggtgtttgtatttatttgtgggcagagaccataaggttaaaattaagtcagaatatgcaaatgtgtaatcttgaatctcaaacaaaggaaacctctcttcctt

SEQ ID NO: 153542 - DNA, 1319 bp, Arabidopsis thaliana landsberg
tcatgtgggcttttctcgtccacccaccaaactatagaaaaaaaaaactcgatcggctgatacttaatcacccacttgattttgtatttttgtacctttttttttgttgtaatttttccatacacccaatttcccgtggaagaaaaggagtcagctttttcgtttgctttaaagcttgaatctttacatagttccagttactttctatagagcttcataatccctagttgcccaaaaggattctgggttttgtgagaatgatgacgtcatgtcggaatatagatttaggtacgatgatgatggcatgtggttgtggccgtcgtcagtttccttcattagcgaagactgtttgtaagtttagtagcagcaatagaagctatggcggtctggtggggagttgcaaagcggtgccaacgaaatcaaaggagatctctttgctcaatggtatgtatgattctcacttaaagtcttaaactttttgttttatgtgattagatatttgatttagtttttaagtgttcgtgaaccttgttctacaatagttacagatttttaagaatcactggagtttatgcttattgcctcatgagaattgtaggtattggtcaatctcaaacagtgagttttgatttgaaacaagagtcaaaacagcctatttcgttggtgactctgtttgagctagtagctgttgatctgcagactttgaatgacaatcttttatcggttagtgtttcttataaactctttctggcactgtcttttttaatcctgtgtttgaagtttcacttggggatctaacaaagtggttctttatagattgttggtgcggaaaatccggttttgatatctgcggctgagcagattttcggagctggtggtaaaagaatgagaccgggtttggtattccttgtatcacatgccacggcggaattagcaggcctaaagtgagtagtctaaagactttactttattttgttggtattcctttcattcagttgggtatccatcttttatcacaaaatgatcatattcagatgtcttgatgcagggaactaacaacagaacaccggcgtttggctgagatcatcgagatgatacacactgcaagcttgatacacgacgatgtgttagacgagagtgacatgcgaagaggtgagttttgttaatagttatgagattcatctatttttgtcataaaattgtttggtttggtttaaactctgtgtataattgcaggaaaggaaacagttcatgagcttttcggcacaagagtagcggtgctagctggagatttcatgtttgctcaagcgtcatggtac

SEQ ID NO: 153543 - DNA, 847 bp, Arabidopsis thaliana landsberg
ccctttttcgctggaactgcttcttttcttctctctctctctctctcttccttctgggcttttagggtttgtcctctccagtccccgatttccgctttatccgatcggccgccgccgagattctaggttacccttcttcacttcatctattcaactttctccctaagatccatcttcagattcatcacttcccaattcgcttttttttttcctgattcgatctcgatcgttcaatcatccatttccaactttagtttcgatttgttcactgttttatgatttgaactcgttcgtaatctgagatttgcttttcgattttttagttagattcatttgttctattaacttgttgatttggtcatcttagtaactagtttgatttcgtgttttatattcgatttcgtgctcggatctgttgttctggctgttatagttgattctgacagtgtttttaagcgtcaatggctcgtgctttgatctcttattgctattacatggttttttcgattcatagtgatttagtagtctttcacctttatggctttttggatcgttgacgagtttcttcatggtgttggcttaatttactgattctgtcttacttcttctttattttcagttttcctgaatctgtttgtttctgttgcagataaacctatggcaatggaggttacgcagttgctcattaatgctcagtcgattgatggaactgtacgtaagcacgcggaagaaagtcttaagcagtttcaggagccaaaccctgcgggtttcttgttgtcgcttgaaagagagcttgcgaatgatgagaagccagtagatagcaggaaagtagttggtttagacctta

SEQ ID NO: 153544 - DNA, 515 bp, Arabidopsis thaliana landsberg
tcaggaagttcaatatggtgcattggtttccagagaatgtctcatcgtcgtataacaattcttggtggtaactactcttgtttgttaactcaatcaagtgaaactgtaacagtgcaactatttttctcaatgagtgattgctttgcagatttggttcttaaagacaaagtggtggtctacgatctagttcgccaacgtattggatgggcagaatacgactgtgagtgtgttatctattttaccacaaagcaataacgaaattggaatacaaagcagataatgaaattgcattgcaggttctctggaggtgaatgtttcagcatcaagaggaggacgaagcaaagacgttataaacacaggacaatggagagaaagcggttcggagagttttaatagaagttattacttgttacaactagtagtcttccttgtccacctttttgctcgtttcttgtagtaggcttttagcattcactccaccaattatggttggactttgtaagcttattattgta

SEQ ID NO: 153545 - DNA, 841 bp, Arabidopsis thaliana landsberg
ctaaacatgtcaggccactaagatatagctttaatgtgtactatgcatatgtagattaaagcagagtgataatttttgtgtgcatatgtttgcagctcactcttggatggagcagttatctgaatcaggtcaagaacaatatgatcaggatgggtttggttgtgaaggattggagaatgggggatgttctttctccacacaatgcgtttctcgggaacaagactatagctttagcgttggccagttagagcaatcaacagataacgattttaaatcatcgttctcgacattcctacctgcggataacacactgccaaattccggttttgatgggttttcttttgatgggaaacaaccggaatcaaccacagctggcttctcatcaactggaattccctctatgccaagctttacctttttttgtacaagcccagcaaggacacagaacaacgacataactgaaatagatggaaaagttcgaggtacctctttcgcttttccttggcttacaatgtttggacttgatgattgctagaaatgtagagtcatatactttctaaatatggcaaggaaaataagtgaatcaatatctggaacagttgactataattgagtttgcattagtatcatcttctttcttggtgttttaaacggacatcagtcttgagctaatcaaatgatgtgtgtcccatttttacagactcaagcccaaagaggttactgccttcaccagattcttcttcacaacttgagaggcgtgatgaagcaggggagaatcagacagaagcaggaggaaagtcagagacaagaaggcaaagagccccctggtcaagaatgtcag

SEQ ID NO: 153546 - DNA, 619 bp, Arabidopsis thaliana landsberg
atttaaattatttattgatgtcttaagtttttgtgaattaaaaatcaaagctcgagcctcctccattacccaaaatattggcaaatagcatgacacaataatgtatatcatgtgtttaggcaacgcaaagttcacaaaatgccgtcgtaaatcgcaaggagaattttacaccggaagggcaacgacttccatcacctacttactaaatcgccaagaaggaccttgactgacagatcagagagacatcgagattgccgaaaaagatgaagaagaagaatataattaagaaacattttgattgttcacatagaaacagtttgaaatttttattatcacctttgtattttcttggacttttcgtttagagaccgcaatttgttttttatgatattaagaaagtgaaaattttcattaattatttaatctagtaagtaattatatattcattttactagcatgttgtgatttatgaataaaaaacatcaagttgagtaatggagatatgcaattttaggcatgcaaatgcgtttagcaatttaatcgttatatcttatgaaaattttgaataaatacaagtttacaaaataatgtaaatactaaagtttagtatccatcaaaa

SEQ ID NO: 153547 - DNA, 388 bp, Arabidopsis thaliana landsberg
agtttcttgaaacgttcagtaaaaagaagggattgttgagtagaactccacttggccgtgttggagagccgaataaagtttcatcactagtggtcttcttgtgtctacctgcagcttcttatatcacaggtcaaaccatttgtgttgatggaggtctcacggttaacggtttctcctatcaaccacatgcttgagaaatagtcttgtcgctctcaaagttctatatctaataaaagttctcattctatgagtttataaacgtaaacatcaatgagtttgcaattccatattggagatactaatctcgcacatatacaagattcggttacacccgctacgccaacaactcacaccaatgtgatctctcattctctctcataaatgaaat

SEQ ID NO: 153548 - DNA, 455 bp, Arabidopsis thaliana landsberg
ggacgatccggaaaagcacagtataatcgaccgtataataatgccagagtccatcgagaagcatggagtcaactggataggcgttgactttcttgtcttcaatagttacatctggtggatgaatactgtctccatcaaagtcctgtaagtagtaatgttatagtatacacactcacacatacttatgtattgaatatctgaggattgaagatttgtgatgatggaaacagacgtggatcgttcgatgatggggacacagagtatgatgagatcaaacggccaatagcgtacgagagggtgttgaggacattgggagattgggtggaccataacattgatcctctaagtacaactgttttcttcatgagcatgtctcctcttcacatcaagtaataaatttctcccatccataacattttttttttgtatctaatgtttatatttgattgttgttc

SEQ ID NO: 153549 - DNA, 1274 bp, Arabidopsis thaliana landsberg
ggacttgataatgaaaatatgttgttggggacagtgggattactctcacaaaacttgttggagtgatcgtgcttggctttgcaagatctgagatatgtgtggtaaggatacccaaatccgatgccatgagcagatcttggtcctcttgtttgagttgattcaaatggatatgtattggtgcaaacaggtgtattactgccaaatgtacttggctttggttataatcggcttcttgcatgggctcggtttcttacctggaagttaagctggatttatctgctagcatctacttatatgacagtaagatgggtgattgattaggcacttgttgtgaatttcaggtcatactgagtttagctggcccgccgcagctgaacttggacatcgagcagcagcagacagacgaagcttcctcttccctactgaactgagtaactccacagactctcttacatgttaactcaaccttaaacattactcctttccttcaaatgtatcacacaatgtcaaaaactcaaatagtgatcactggatgtcctttgtatgaaagttaagtgataggcccatggcccaaagtatggcatgttggtacactttcttaactcgagtaaaaaaggtttaggaaaaacatgaaaaattaaagagtttatagctaaagaacaaaaacagaaaagaaactgaagatgcaatgcaactgtagattattatagataatgtttcttacaaaatcataatagcctcaatgaaagctagtatcttatatagtttttgaagggggaaaagatgggatcacaagaagtcaacaactaacgaatacatttagatcaaacaagtatgttgcatatgttaaaaagatatacaaaccaagccaaaataaatagatgtggtgacgatggtggaattagccaaaaggttttaggatatagttaagaaccaaaggaaggacgagaaagaggatggtgaaccaatattctgatagtttctttaagagaggaggacttgtagacttgtatgcactcctcaagatcagcatcgcacgtcaagagaacccattcttgatcatcgtctagatacttgagactgaagttacttctcaaaacatcatccatcccaaaccgctttgcgatctctcttctgaggtctgtgagacgagagtgtggaagcaggctcattctcagcatcgaatctccaaacatagccttcactttcatcccgtcctttgctttccttggagtagttgcggatggcagtgggggtagggatgaggtcacacg

SEQ ID NO: 153550 - DNA, 450 bp, Arabidopsis thaliana landsberg
ctgctattggaggtcttaaacaaatcaaagttgatgattccaataatcttgaagaagaatgtaaactctctgatccattttttctctttaaaaccttctcatacaaaaatttgtaacttttttgtttataatttttgtttcagctgctaagagaaagataatgttggaagagatggaacgtgaatttgaaggtacttcaagattctattactgatctcatctaagttctaagtaaagaaagtatagattgacagtttctgattccaaccttcttgttctgcagaagcacacagtggtattaatgcaaaggctgacaaagaagaatgtaagaaacaaccataagtctttaacttttttgcttcactcactgactcagaaatgttttctaagacaattcttgttctcacagctgcaattaaacagagcggctctgctataccagaggttctt

SEQ ID NO: 153551 - DNA, 2951 bp, Arabidopsis thaliana landsberg
atgaaaagaaagacacatagaaacagaacatttggccacttttgggagaatggcgtaggttgtcccattggtaccgttcctatacctcgagtcactaaagacgctcttttgagaatgaaatccttcgatagcgataattctaatccgcaaagttcgtggagcaaaatctataaacctgcatcttctattgacgatcatcatgtaagtgctttctttaaattgttatcttacgagtaagaaatgttaaacatatattactgaacttcgcaataacaagattggtggaatagctgaaattatagatgactatgttagcacataattattaatttaaacaatgattaaaatattctttttaatttgatgaatacaaaaatatttaagtagtttttttttatgttaataatacatagctttattacaaacacgtgaaatttttgattaatatttcatggcgagtatatatatggtggatgatatattaggaaacataagtaattgtatattgtattcataatttaatattatctattaactcatacagttatatttcgatacatgaaaaatattggtttctattaactcaaattactcataccaatttataagatattgattctaatttttcagcattacaatttagccatatcagaatgttagttttctcaaccattgcattcactattcagtttgctgtggtgcgaactactaaaggaactaggagttacaatggtgcatctatgaatattaatacattcactccttcagttggacctatgcaattcagcgcttctcggatgcattttcaaattggaaatgaattcatccaagttggttggatcgtaagtcaatattaatttagatccactatttttttatacttgatgtattatagtaaatcttttttctattattaatgtatatgaatcatattttctattcattttaggtacacccacaattataccatgacttcaactctcggatattcgtatttacaaaagtaagtgggctagttcttgtttttatataatttaattataccatatatatacacgatgtatgcataattgataaaccaatgacttatggtcgcatattatatggttgaattcagtcgggaggaaatgcgtgttataatctcttctgtcctgacggatccggaatgatactagttcgtcaagacttaactcctggtctacttgccgagcaaaaaagtattgacttcgccataatgaaggtcagttcttttccaactagtatacccataactttgtatatttcgggtattcaagaacgtttgagtatatgatatgtctagtaatatcaatatgtagatgcatgcaaatatgaatatggatatgggtaaagaaaatttagtgttaggatatttgtatcccatccaacatatataactaactttcatttattcatattagatttttaaaagaatacataaattaaatccagtgaagattttgtcaattatagtttaacaaaaaaaataagaacttaagaaaaaaaagcttcgttctctcccagacacggtaatcaagatatcttctgtaatcatgcttaccggcgccggtgagactcatgttcgccggcgtcgggacctgcaaaatcttcttagtctgtttcagtctttcttaagcttctggtcttggtttttctctccgttaagttcttctctctcgcaaaatccaaaactttcctttcctttggtcttcttctctgagggtcttctttgcgacggaagagtgaatgtttactctacaagccctgccccgaatcataactcagacgcagatccgcctttgaacccgacaagagaagaatcgcacttctccatcatcgccctttccaaatttctagagcagtttttcatcgacacatcctttggctccagatctgccgtattagcagtaacgcctttagttccttctcaccggatttcgttgatggcaagagattctcttggaccatcagttgtgccttttccggtgagaacgtcgacgacacacgacgagcttcattgctggcaggtgtttttcccaggtgcttcaccgtcgaccatcacttccgatctttacgacggcggcgctctcccttcccttctctcaaccgtaacaactctagggtttggtgggatgggcctcaattttcttgacggcccagttgcaacaatccatgcttttggtggtttgggcctctctcaattcggcggcccaaaaactctaaacctaatttggcccatatccaggtttgctttactcagagttttgtcgactctctctctgaaccattgcttcacgataacggatggtcgtggactccattcaatcgttggaaccttagtcttagaggatccttgcaatcacaatactagaaacctgttacatagagtagattggttgccaacagatgtaagtttagtcttgaagcttagtggattagttttgatctcgaaccataggctatgtgatgcggctcacgcctttgtttttatatgtgatcatataatgagtctgaaccttcccactatcatgcttactcatcccgtcccatgtcgtttgttggacgatgcatcacaaccctcttggaattgttggctaaaactgcttcggcctgctctatcaaccctcttctcaagccccatgaatccggtttatctctgtcatttgattagaagattatctgtgctttggacttgtaatctttgttgccgattgcattatgtttactcctctaaggagataccttccctgaaaccttactcctctaaggagatatcctctttgaaacttgaacccggagaaaagtctcacaccgcagcctcctctttggagcatttcaacaaaagcttttatgcgtcgatcgcacgagcttactatgatcacaagttgatccgagatttctcgaagctagtcttcaagcttgaatctctgcag

SEQ ID NO: 153552 - DNA, 3580 bp, Arabidopsis thaliana landsberg
  unsure (1)..(3580): unsure at all n locations
ctcaatattaaaatattcggttttatttaagacggtgaaggtggtgaatatcaagaaggtgatcaggttgaaaaaggaagtgacggcggaggaaaagatgaagattggcgttgtcccaaccccaggtaatgattgcaaattatttgggattccattctttctgcatatgtaatgaattgaattagctgttgaattcctttgtgggagcatgttttgaaattgtttaccctcgaaactgtttgtatagttgtgggaacgtgaactttgcaaggagagttgaatgtaacaagtgtggtgcacttgctccttctggtactagttctggtgctaatgatcgtggaggtggtggatatagccgaggtggaggtgacagtgatcgtgggggtggtcgtggtggtagaaacgatagtggtaggagctatgagagtagtagatatgatggtggaagtaggagtggtggtagctatggtagtggtagtcagagggaaaatggttcgtatggtcaggctcctcctcctgctgcagccattccatcctacgatggttctggaagttatcctccacccacgggttatggaatggaagctgttcccccgcctacaagctattctggtggcccgccgtcatatggtggtccacgagggggttatggcagtgatgcaccgagcactggtggtcgtggtggtaggagtggcggctatgatggtggtagtgctcctcgacggcaggaagctagttatgaagatgcagctactgaaaaagtcaagcagtgcgatgctgattgtgatgataattgtgataatgctagaatatacatctctaatttacctccggatgtgacaactgatgaactcaaggatctctttggtggcattggccaagtaataacactggtcttttacttctgttgtgttttatatcttggaataagcctttcccttgctataagttattaagttcttgtttgtgtacatgtttattggtgtgctgataaagtgtgtctggttggatctattttaggttggaagaattaagcagaagcgtggttacaaagatcagtggccctataatattaagatttacactgatgagaagggtaactataaaggtgacgcctgtctggcttatgaagatcccagcgctgcacactctgcaggcggctttttcaacagtatgtactatggaattgctgtctagcttaaaattgtttaaaagttctgtttcgtgaatggtggtggattgttttgtagattacgaaatgagggggaacaagattagtgtaacgatggcagaaaagtctgcgccccgtgctcctacctttgaccagaggtagctgtcctgatcatttatcagcattcttttttgttaccatttagctgttaccacctgctccatcttataggtgtttgtactctagttgttttaggcttttagctttataattttagtagggaatatgagtttttgcaatgctaagtttatgttccttgtctctgaagactgtttggatcttgtatcctactggggatttgctttgtacactcatctgggtatgacagaaagggttgggagttcgtatgtcatcaaattatgccttaggtctatgttcatgccataggaaataaatctatgtagttatcttgtaacctatagctgtggctgctcttggttgtgaagagatctgttgtttgttcatgcttcttataagctcctagtaattccccatataagttgtatctttatctggttttccatgctctataagactcgtctttgttgtgtgttgagtcacttcatctggcgtagtaagctggttttaatccanacccctgtgtctgatctaataatgatgaaccttgcaaacttgtgaatgtcgcagaggtcggggtaaagaagaagaaggtggtggctatggtggtggtgggggagacagaagaagagacaactacagttcagggccagacagaaaccaccatgggggaaaccggtctcgtccatattgagagaaagagaggaatgaatgaatcagctgttatgtgttctaagagttttgtgtgtgttaaggagggaattttagtaaaatgttctatgaatcctcatattggagatacaaaaaaagaggtaggtttttgttcactttgaccttgagcaaaattaccccttttttctccctacttgttctgtttctttggggatctattattcatgcatctccggtttatttttagtttgtttttcacgatgtgaaatgtttgttttttgttttattgaaggaagctgatatttaactgcaaaatgcattgcaaattggtgctatgatgatttcaggtgagtgcattcatcttgattacttctttcaacaccagaagtcccttttttgcttctcttccttctttttttgactctgttcaacacaaacaaaacagtcgtatgttttcatgttgtattgtgtaatgcattcatttaggcaaccacacttctctttacaattttcggagttgttatcgttttttctcgcaaacttcttttatagcaacatgtgttcctcgagaattggcaggagtgggggatggctaggcacttgtgtctgatcagttgatctgaagtatgcagtgacctttcaaagatcaacttgatgattttattgccaacttcactcactggggctatgattaggattagggttttacaaatgagtggcctttttttggataaaagacgttgttaataaatagttaatcgttcaatctggatcccaaggactaaagagaagggtgtctcgtaaagttctctatgtgtatatgtcatgaccttttggtcaagtgccggattggccaactctttaatgtgttacatgtaacgaaagtttatgttgaaattataggaacaaaaaagactaatgccgaaaatcccaagagaaagtttattaatgacttgttgtgtagaaaatatggacgagagaaagaatccaggaaatttggaatcctgtaacattagtttcaagattcccattctcaattcgacaaagagaatccatcttctaacattgcatattcacagctcaatcgctggctggctctagcacatggcgatattacttatttaccatccctttcacacacatattggataatatacatattcttaataaaagtccaccagtagtcttaagcataaatttacaaaaaaaaaaaaaaaaaaaaaaaaagtaaggcagtaacaatgtaattctaacaaactgcttaaatgtgtgaaatccaaatatttgtaagttgtaacttgtaagaccacactatttaatacttaatgggttcttaacctcaaattgacaatacctgcgatttttctcactttcgacacaattttctatatgatttgaacttcaacaattctatataaaaaaaggtaaaatatttacatgcaaataataaacttacccattaccatatcttgtatacaagaagataaacgaaggagggaatgaagtaggaatcacatataagcaagaagaagctatggaactcaggatggatagcgccaacagatatacatgtacgcatatacaaaacatacagctctg

SEQ ID NO: 153553 - DNA, 571 bp, Arabidopsis thaliana landsberg
catcaattataagattttcctttaggttctaaaagtcacaggaatgtttacttggtcttctttaattgtcttgatctttgctcagatttgtttaacggatatataactgataaatgagcagagtgctgctagagcaactgtaccaggaggtccaagtgtggcatgtagcacagcaaaagctgtggaatgggacgcagcttggtcacagaatcttgacccatcaggtcgtgcggctcttggagttcatgtttcagcttatggggaagataaaaccgaagattctcgtcccgagaagctacagaaactagcagagaagactccagccattgtttgaggataaacaaacaaggtttcagctaatgttgaatcgtgcaatactcttattgtctcaaagacaatagatatcctcttctataggttctaaaaaggcttctttttttttttcttgttttctggggttctttgctgtgtacctaataagttgctggtgaatttctgtgtttagtgttattagacaatccatgatagcttgatacttgagattatgaacgttatttttcatgaatccgat

SEQ ID NO: 153554 - DNA, 602 bp, Arabidopsis thaliana landsberg
atgaagaaagttcctggttgcagctctatcgaaatagattctgtggtccatgagttcatcatcggggataaattccatccacggaacagagaaatctacggaatgttagaagaaatggaggtgttactagagaaagccgggtttgttccagatacttctgaagtcttgcaggagatggaagaagaatggaaggaaggagcattgcggcatcacagcgagaagctagctattgcatttgggctgatcagtacaaagcctgggactaaacttacaatcgtgaagaatctaagggtatgcagaaattgtcatgaggctacaaagcttatatcaaagatttacaaaagggagattattgctagagacagaactcggtttcatcattttagagatggtgtttgttcctgcaatgactactggtagccatcatttcagaggatcttgttaccaatgatgttggtcaagaactgtaatatgactttctttgtgtggtagctgtaaattacaagaagattagtcaagcaagtaaattgcatataaggtgtgactgattcattgatgtaagggtatacatgtaaagaaagagttttcatttttcaaataac

SEQ ID NO: 153555 - DNA, 463 bp, Arabidopsis thaliana landsberg
ttttctcataggctggggttcaaacgtcgagtgggacagtggtggaatgccatacctttcctcacgtcatcggtggtggtagtttgtggggtcatttacctgatatgcctcttaactggatatgacactttttatgaagtatgcttcttaccctcggcaatcatatcgaggttccaaggtatgttctcatatttattgaggcttgcatgtcatgtagaagatattcctattggcactaaaacttacatttccaaagttatttcgtcttgcaaactggtaattttaaattcagatgcctgagctgtcctgattttttttgtttcctcttgttcactcgtttctcgttatctgtgcagtttataggttctatacagccattattttccatggatcactgcttcatgttctgttcaacatgatggcattggttcctatgggctctgagcttgagagatcatgggat

SEQ ID NO: 153556 - DNA, 1630 bp, Arabidopsis thaliana landsberg
tcccctggaaaatttcagatatttgtttcttcatcttctttccttatttctctctttctcgtttttaccagatttgtcttacgaatcaattctcaaagatacccaaaagtggtagggaagcaaagtactgtttttttgcttttgattttaatcaaaatcgacggtgaaagaaaggaattttttttttattttccgagataagagagattcttgataatcgaatagacctagatttttttttgaatttagggcttttttgatttttgagaaattgattttggtaatggagacagatagtatggagtgcgtctcatctacgggtaatgagatccatcagaatggtaatggccaccaatcttaccaattctcttcgacgaagactcacggcggagccgctgctgccgccgtcgttaccaatattgttggcccaacagcaactgctccggccactagcgtgtatgagcttctggagtgccctgtctgtacctattctatgtatcctcctatccatcaggtgaatctccgatgctcttttggttgtttggttcacaattgattcctaatgatacgttttagctttatgtgtttgtgttcttctctgcctatatgttgtatagcgtttaatggggatatagattatataatgtggttgttcataggttttgatgttgcttgtatcctataattgagccaggggaagtaattgatctgaaaagtgtgtctcttttttgttattgttgttgttgcagtgtcataatggacatacattgtgctcgacctgtaaagtaagggtgcataacaggtgtcccacatgtagacaagaacttggagatattagatgtttagctcttgagaaagtagccgagtcgcttgagctgccttgcaagttttacaatctgggatgtcctgagatctttccttactacagcaaactgaagcacgagtctctctgtaacttcagaccttacagttgtccttatgctggttcggagtgtggtatcgtaggggatatcccttttctggtagcccatctcagggatgatcacaaagttgacatgcacgctggttccacttttaaccaccgctacgtcaaatcaaatccgcgtgaagtagagaacgcaacttggatgcttacggtaattttgatagttatgcattcccttatagctaaatagtcattgttaatatgtatttgatgttacctttcacatatgtatttttctctaaggcattttattccatgtataagaaaaggaactgacaatttcactacttgaattgaatcctgttttcatctgatgctgtttaggtcttcaactgtttcggaagacagttctgcttacactttgaggcgtttcagctcgggatggcaccagtgtacatggcgtttctaaggtttatgggagacgagaacgaggctaagaagttcagttacagcttggaagttggagctcacagtcgtaaactaacatggcaagggatcccaagaagcatcagagacagtcacaggaaagtccgagatagtcaagacggactcataatccctagaaacttggctttgtacttctctggcagtgacaaagaagagctcaagttgcgagtcactggacggatttggaaagaagaataa

SEQ ID NO: 153557 - DNA, 764 bp, Arabidopsis thaliana landsberg
atgtcatggatgaaaggtaaatcatctggttggactgcgtttgatctcaagcagagacagaaacaaggtcttgaaagtgaggtcgagggtgatccattcccacctgtttcaactagtgttaatgcatcctttggtgtaaaaggacggttgagaagaaaccatgaaccttctaaaaagtctttttcgtccgagctcttgcctccttcgagatttccggcattgacagagaataaggattgcggaaaccaagaacgagggggaggttgtagaaaaaagccggacactttgagtctcccggtaaacagtcatgatttagccttcacgaagctgaagcaaatgaacagctgggcggatgataacttaataagggatgtattgttatccacagaggatgattttgaaatggccttagcttttttgaaaggaatggtttcttctggtaaggaggatgaggagccaacttcaaagattgaggggtattcatccgataacagaagatcggaatatagaacatttgagaaaacagttacaagttcggtgaagatggctgcaaggtccacatttgaggatgctggcaagtatgatctggaaaatagtgatggaagctcgtttctggtcaatgcatctgacaatgaaaagttccctgatgatatttctgaactagatagtatcattcagcggcttcagtccattccgatagaacctgaatgggaagaagatgatctatacttgagtcatcgaaaggatgcgctgaaagtgatgag

SEQ ID NO: 153558 - DNA, 1319 bp, Arabidopsis thaliana landsberg
gattatttttattgacttgattcttcacaaaacaaaggcttatagacacttactctacaatgttgttaatcaagaatctgcaaatgttcaggtaaacatattgtgaatcttggttttgtaaagtttgaattctaaatagtaatctacaatgatctgatctttagagggtttaacaatttggcagcatctattatggaaattggtcttggcttatcttcttctagatacttgtatcctttagcttttctatactctatacaagttgtattttggagagagcctttaacaatatcaaaagatagaagcttgctactgagaagaaccaatgacgaatcaaatgtgtcgatgagctttctttttgaatctctagaggttggttcttttctcttgaacgttgtataaatttgggttgatgagaacttaaaattgtatgccttttacaggttctggtcaatgtactatctgcgaatttcgcatttgttttctcatttgcatttgctgctaagttgatgctggttatgccaaggtatataggcttttcttttattattcgccggagtcttatctttacgtgccctgaataagttagtatatgatttgcagagggaaagagattcttttaacgatcttaatctcgagttacgtcaagatctttctacttgctatgccggtatgtttcgttagaactcctcagaatcttgtatataatatcatactcaatggacatagcttcttcttgcttccatgctaagctcttaaaccgatgaagataccgaagtagatataggtctgtaaatgctaaaatgtgataagtctttaataatactctggttacaggtctgggaattcccggtttctgtgatcttcatcgtagatatgctcgttttaacctcaaacgcagttgctcttaaaggtcagaatctttgaatctgccttaggttgtgcatagatttatcgatcttatacctgacatgctgtttcgtttttgtttatttactcatgattttactagtgatgactgaatcagcaacgagcagatgcttagcagtgtgtttcattgcacactcaattagattcttggtggatcagatctctggacacttaggaactgtcatgtaatcttctcttgcaaggaacttgtgatctcataatattttttttagggtcgttaaactctcttgtctaaatcacttgtgataatatgtttagaaaaataaatgtagtatcttgatataatttttgatcaatccaactccttgtggggtgattcagcaacttctgttacaaatgaaaaatgatataacaaaacccctaaaaat

SEQ ID NO: 153559 - DNA, 446 bp, Arabidopsis thaliana landsberg
atgcagtccaagacacaagtttctttggaatcggcaatggaaccgtaagaggtggtgttccggcctctagaatcgccgcttacaaagtctgcaccgattcagggtgtagctcggaagctctactgtcttcgttcgatgacgcgattgcagacggtgtagacctcatcaccatctctattgggtttcaattcccatccatattcgaagatgacccgatagctatcggagcttttcacgctatggccaaagggattctcactgtaagttctgcgggtaacagcggtccaaagcccacgacagtctcgcatgtagcgccatggatttttaccgttgcagccagcaccacgaaccgtgggtttataccaaaggttgttctcggaaacggcaagacacttgccgtgagtatcaagtaacactctgttatggtaatctttctctttcttaca

SEQ ID NO: 153560 - DNA, 1066 bp, Arabidopsis thaliana landsberg
taaacaagaatatgaaggagaacacagcgacatgtattggaatagagagtacgcagatggtgaagatggtgagatgtcgtggttcaacgctggtgtgggaattggtcttggtgtctgtgtaggtttttggcattggggttggcctgctggttcgcacctatcaatcaaccaccagaaacttcagaaggaggattatctagtttcattcaaattgcctactctctctctctccctctaggctctaactccaatccgttgcacatcacttttgactgcagaactctaagctatatagtctaagctaatactgctgtctagtataatttttgttttatgtacttttttttatctctttgtgccttcaaattttgaaagaattcattttcccttcttcttgtgtttggtcagattcagattgaaagaaacaaagcttgttgctggtaatgtgaatcttattttctgcttcctgttaataaaatgcttatgagtgtaaagagtttttggattcacttacaagccttgcaagagttactaatacacacacacaacccctctttattttattcaaatgctatgtctaaatcatacaacctctctagttagcatcaagagctaagattcaaaagtgttggttataacaatacattgcctttaaaaacagtcaagggtgtgtttggactggctcaggggcaatctcagctccagaaaacccgttgctcgcgtgcagctggttattgttactgttacacaatccccaaaagtttgcagttttaacatcgtcttggttcatttgcttggagaactcttcatagttatattgcaacaaagctttccctccaaattcggttgggattttcctcgtcgaaaaatgtgctcataagctccacgctttcctggttctttgggtaaacaaacttcaccttgacgaatgtctttgcatgttcctgcacatatagacgaacaaaacacacacaaagttgtcttaaccaaaccaatgtattgtctaactatgagtcatagatgaagtgattcgtctaaccttccagaatgcctcaaagagtcttgg

SEQ ID NO: 153561 - DNA, 739 bp, Arabidopsis thaliana landsberg; identical to SEQ ID NO: 42165

SEQ ID NO: 153562 - DNA, 4399 bp, Arabidopsis thaliana landsberg
  unsure (1)..(4399): unsure at all n locations
atgggtaaggctgttattgtctcctcctcctcttatgacagtgagactattatgttagttcgtcataattctcggtttgttcaaagccgaggagatgaggcccagtctagtcgagccaatcagattgagatcctgacgttaagggatgagccagatcgagaagaagatggtggaaatctgattattccccatgatgaactggtggatggcttagatcgatttgaatgcatcatcgatatagaagacgagtacgacggtcatcctaagtatactgaagccggaggttgaagcgaagctactcccgattgagattgttgacttcaatcttgacccgatcgtcgcttagaacgacaagatcaccccaaatccgaccctttccacggagcgctctatcgcgacatgttgacctcctgtggttttgtgaattacgggattacagacatgattcccggaacagatgaccacccacggaatcccccaaagggctatgtctagttccatgaggcgtatttcaagcagtgccatctatggtgcccgattccgtctttaattatttctttcctctcttgccgtcgtttcgcgatatcccagcttactcccgcggcgatctgtatctactcttatggtcttttctttttatttcagatcgctacaaagccagccaaaaattcccagcgaagtttgtgagagtcaaaactcgcacaatagaatttattttaggggtttcttcaaagaatggatctttgtgagattctcaaagaacaacagaattctcaattaccgcggacggtgttcttgattgtattaatgagaaaataatgattttatcgtacaagtgtgttagaatatgagaaataggtgtttttgccttcaaagtcagagcgtttttgatagcctgaagtttagagcgttttttgtacgtccccttttgtttgttctctggggtgcttttatagggtccgagactatcacctctcgcgatattctcggaagattcctctttatctttatcttgttggagattgtttttatcttccgaggattctgggatttctgtatccggtgatatcttcgaagattatctatttttgggttttcggagatgatgtgttttgaacttgtgccggctaagtcttttgaagttttcctcgtctaacccgagactcttccgagccgtgattaagctggcctcggatcgtgctcgggatgctcagtccgcggtattcgaggacagattcccgaggtgtcttggagcccgtctcgggacgatttgccaggttttatgcccgaggcgtttcgaggtcgggtcgggggaccatttcatgagactgctccgaagcgttctcgacatcgcctcggtgtggattcttgacgagatctctgaggcgttttgtggttggctcgttatcctgggtggaatccgatcccaacagtttgccccccagctcagtgacttagcagaaagatgatgagctacatgaatggatttttccgagcggactgttcgtcttctagttctgtcgcttcatcttctcggacggtcaaacttctgtcgcgtgtcgccgactattcttgaggagtggaaacgtttctcgcttattcccgaggatcatgcggatctttttcttctgccgagcccacgcgcttgaacgcgttttgaatgtttaaagcggatccgacgcgcctttgaaaaactctatatatacggcgagccactccttcaatacttcatttgaagttttcgaagaaaataaacaaggtttgtttacttctctttgatcttgatatttctaacgtttttnnnnnnnnnnnnnnnnnnnnnnnnncttcttgttatttttgattttgccgggatagaaattctagtttgccggttgtttcccttctcgtccaacgtcccgagccgagaatgagttcttcgcaatcaccgtcgtcccctgtcgattctagcgattcaaaccatccagacgatcttcctccgatctataaacggagatcagtttggtcttctgaagatactgtttcttcatcgaattcccccgagcagacgactcccttcacggctcgggaagacaccaacgccgacatcgctcgggagttggatttacccgaggatcccgagccgcctcttgttcggaggtcttctgctcctacggtcgatgaagctgggacatccaattggcaagatgcgtcaaagcccctcatgccgacagttaagattgaggattttctttacttcggcccgaatgagacagaggatatcttgcgtcttaacgagcagaaggctttcgagaaagctgagaagaagaggaaaaagaagaaaaaggcggtaatgccaaatcctcccggttcatcaatgtgtaccgagcaatctctctcggatcttaaggctcgatttggtcttggtgctgtaaccttgcgtgttccgagccctgaagagcgagccgacagttctcctgcaggtttctatactctgtacgagggattcttctacggctgtttcttatggttgccgatcccgagattggtcttggaatatgtgacatcgtatcagattgctctttcccagatcacgatgcggtctttgagacatctgctcgggattttgattcgaagttacgagtctgagacggagataacgctggctcatctgagaaattttctcgagatccggcgggtgccaaaatccgaagcggaccggtactacatttcccccgctaagggaaagaaaattatcgatgggttcccgagcaaagacgagccatataccgatcacttcttctttgtagccattgaagatgctattcatgaagatctcctcgggactgttctgacaagatggggaattttgggtagtagttagaaatttattagtacccgaggtgatgttaatttcgttctctaattgcagttttccttttgcagaacgcactctcaagtttctcgagccgattccagacgattttctttcggcttttcacgcgttgtcggctccaaggtgcgattggctgaaacatttttctcgggagcgagttgagcgtgcgcttcgtcttcttcacggcgtttcttgtcccactagttcggaatcttccgatcatcgcactcaatttttcgtggacatgcaatcgacgaaacttactttgcgggaggtctatgccaagaagaaagaggacaaggagaggcgattggcggaagagaggcgccttgttaatacgggattgatctcgccgcgggccgatcctgaagcgatccaagatgggaattttattcccgatgctatcgcgccgcagactgctcccaaggcgtctcgagatggggtcgatcccgctgaggctcagggagccgagccatccgctgctgcacccaaagcggttgtggcgttacctgcaagtgacaaagcggcgagtaagcgcgttcgggttgacgatgaatcgtcaaagaagaagaagaagaaaaagaagacatccggctccgaggcggagaaagtactcccgatcttcgaagatcgcactgccttggccaatctgctcgggggatgcgttggtcccttacttcctcctccagatactcttctggaatctcagaaatatgccgagacggcatctctgtttttgagggtatgtgctttgttatgtataattcgcttttggcgttgtcattataaatctaacttttccttttttatgctgtcgctttgatgaaccggatggtacattcgtatgattcggctatgcggagcaacatggaggtggctggcaagttagccgaggcggagtctcggattcaggttgtcgagcgggagaaaaacaaggcactctccaaagttgccgcagcgaagttggaaagggaggaggttgagaggatggccttcgtgaacaaagaaaatgccatcaagatggccgagcagaatctcaaggcgaattctgagatcgtccatctcaagcgaatgttatcggaggatagagggcttcgtgatagcgaggtggcttgggccattcagacgacgaggcgggaggtttccaaaaccttcattgccaagataaaaactgccgagcacaaagtgtcgctccttgatgaggtcaacgaccgattcatgtatttgtctcaggcgcgagccaacgcgcagctaatcgaggcactcgaaggtggcggagttttggagagagagaaagagcaagttgacaaagggttgaaagatttcgccgatgctgaagctaatctcaatcgcttcatcgccgagctgaaagatgatctcaaggctccagctcccgagtttgctcctctgagtccgggtggtcataggtcggtcgaatcactagtcgacaaggtgggagatacggatcaagctggatcgctccttcctgccaaggataaccgtccatctgaagatcttgattag

SEQ ID NO: 153563 - DNA, 385 bp, Arabidopsis thaliana landsberg
ctctcacagaaaaacaaaaaaaaaatggactcccaaacaccttttctcacatttctcctctggattttcattttctctcatttttcaccctcaacttccaaatctctgacagaaaagcccttatctttctcaccgtcggcgagtttgccgactctcacggcggagagacttatcaaaggattcaatttgatgcctacacgcgacgtcaatgtcatcgatgaagacggttctgaggctccgagactagtcgagagatcattcgatttgccggcggctgttgaccgtcgtggctccggtggttctccgtcggttcaagattttggtcaccatgctggttactacaaactccctaattcaaaagcagcaagctaacttccattttatt

SEQ ID NO: 153564 - DNA, 237 bp, Arabidopsis thaliana landsberg
gtaaactggtaaaaattggtggtctcttctttgtctccgagtatggagaaaatgagagggaagcgaatcagaccaagagattccggcgagttagtcgaagatgggagatctgaaaacgagcataagacgaggaagaaagagaatgatgttgtgagcaaaagaagaatcggaagaggaagaggagaggtttcgaagcgatctattgaaatagacatttctgatgccgagaaggttaat

SEQ ID NO: 153565 - DNA, 1215 bp, Arabidopsis thaliana landsberg
atggataaggtcaggccaaaagacttttaactcatgttgatacttagggtctgattggtaacacgcataatgacataatgacgttttctaatactatgcaagaaatttcccaatcaacaaaaacgcaggatttgtattatgtaaaaagtaggtatatagttgcttatttgtataatgatctttaattcaggttttgtgcattgtctaggccgacgttttggagtattatgatcagactgttagttctcctacgggttcgttctacataccagctgtattaagggtatgtagaatatgagtttagttagccagtttttatctcttgttgccagtttgaaacttacttcattgtcttgcttcaggttccacatttgcttcaggttgttaaaagaagaagagtgaaaaactcacttagccgtaaaaatattttactacgagacgattatacttgtcagtgagtggttttctatctctactcgcaatcatatctctctgtttttgcggaatcaaacaattgttgctgacagaactttaattatttgggatatagatattgttcttcgcgagaaaatttgaccattgatcatgttatgccggtttctcgaggtggagaatggacttggcaaaacctagtatgtgattgatatcgaagtagcatatatgttgtagccaggaatattgaagatgggttaaattgttttcttcaattggtttcatgaaacataggtagctgcatgttcaagatgcaactcaaggaaaggacagaagacagcagacgaagcacacatgaagttacttaaggtcccaaaggtattatttctcatagttgctattggtttactaaccagtctaagatataataaaaccttgttttgatggggaattattgattgttggtaaatggcaggaaccaaaagactatgacattgttgcaataccattaacaaatgcagctataaggatgctgagatcgaataagggcatgccagaagaatggcgtcagtatctggcaaaacctttatccgagacatagtagtttctctcaggaatcaaggagcaaaagggataggtctggccttccttgtaaacacaaaatcgtggcctcgtatcttttctcccaatcgtgacttgttttgagttggactcaaatgtatataatacgtaaatatttgtccagtgtaaactaaacttcataatctgacctcagaattcctt

SEQ ID NO: 153566 - DNA, 1458 bp, Arabidopsis thaliana landsberg
  unsure (1)..(1458): unsure at all n locations
atgaccgtccttactgtgtacgtctttttgtatggaagagtttatctggtatgttacggagccttctatcttttcattttttcactgtatcttcttttaaaatgatgggtagtaattgctctctgaaaggtgtagagtagcggatgtgtactctaaaatcagtgttgcttactgcataattttttaagagtacaacctcaagtagtttaagattgatttgccgtcaactatattctgtaatcctataccaatatggatgcgtagtatttgacccaccttttcaaatatcaaaggcatattgcacttttcacacacaactgggcatcaaacttgttgattgacctttttcatggaaaacgttcttgggaaaagtattgttatctaattcttgcaacttggttgtattatgcatttctttcctttttcatctgttgtcttttatttcttaagacacttcccttgcctcctttgatatcatttacttcttggtatttttcaggccttttctggtgctgatcgtgcaatatcaagagtagccaaactgtcaggtaacactgcattggatgctgcactaaacgcacagtttttagtccagattggaatctttactgccgtccctatggtgatgggtttcatacttgaacttgggttgctaaaggttggttgacctattcactccgtttccttttggagttcgagagagctcttctactaaagtgtcctgaagcatatgttttttcttctatcacaggctattttcagcttcattacaatgcaattccagttgtgttctgtctttttcacattttctctcgggacaagaactcattactttggacgtactattcttcacggtggtgcaaaggtatacttgcttttatacatagcaatgtttccgtttttttcttttttcttttaaactttctcaaatgcctgtgcgttctttatttgatcaacagtatcgagcaactggcagaggttttgtggttcagcacataaagtttgccgataattacagactttattctagaagtcattttgttaaagcgtaagcccatttgttaatcagttacatatgccaaataacatttatcatgtggatgcttagtgaactgcttcttactaactttgnnnnnnnnnnnnnnnnnnnnactgttgatcatttacattgcctatgggtatacggacgggggtgcctcttcgttcgttttgctaactatcagcagttggttccttgtaatatcctggttgtttgcaccctatatcttcaatccctctggatttgaatggcaaaagttagtactgtgcttgttacttggtcttcattccatttccgtattcaattgattttctctggtgacacagatggcactatgtcttaaattgcattggatcgtgacctgtaatctttcatgcttaaaacaggactgtcgaggattttaagactgggtcagttgg

SEQ ID NO: 153567 - DNA, 2955 bp, Arabidopsis thaliana landsberg
atggccacgaataaaatcaaattcgtggtgacggatggtgtcaatggatggctggccaggtgctgtgcttcgccgaaagggtggagtgggtgagaaataagcggctgggtgttggttggggtcgccggccattgggatgcgcagaatggtcatgggtcaaacgaatccattgtcgggccgatcggccgtggcggtgcaacttcacttatccattcacgtgttggccatcattggccgagtcttggctggctaagttttgggtcggccgaacaggcgggcgtgatagtatgttgcccaggtcgtcgggcttgctctgctgccaggtagggcagctccggccaaagtgtggcacagccgggcgccctccgaccaaaggttggagcgcatgggcgggctacggccaaaaattggcacgaccgggccggcttcttcatgccgtgccagttactcgaatcagtagtcgggcctgttgtaagggtgcctagtgacgggttctggtgaccctccttccttctcttctttttgggtttttctattttttatttttcttttttgtttttaaaaagtcttgaaacaaatactggaaagatcaaaagcaaaagtaaagtttaaatcctaaagaaaatatttacctagtgggttggctcccacatagcgcacttgtttaacgtcgttggctctacgtttgggaagcaattaggttcaatgaggaggagcttcagggatcgcttctcctttgggcatcgttgatatattgatatgctgccccagcttctacggtaagtgataactgtgcattttacatgttttgagcatccatttgtcatcgctttagcatcatatcaccattggtttataccatttctcatcatttgtcatcactttacatgtttaggatagtttagcatgcatgttgcatatatgcgttgttttcagatgatttggagctgttgacgagctatctaaagaagtgggcctgatcatgtcaaaccactcgaccccgaggtcgagtaggagcttcaagaactcaacagatcactcgacccactggtcgagtagaggacatcactacttcatcccatcactttaccatcactcgatcacatcactctaccccgaggccgagtgtcttcgccttcattgccagaacactactcgacctcatcactctacgtggaagtcgagtatcaccatcaccaccactcgactgcatactcgatgacaagcttcacagccttcttcattccgcactcaaccagacactcgagcacaaggaaaaaaagaagactccagctattcactcgacctcccactcgaccacatgggtcgagtacagttcttaatccgtcccaatacttcgtcgttttaagtattagggtttcagaatatttggctataagtagcatgtacttcacattttcgcagacaagaagtttttatctaattttatttccgcagaccttgtgttctagaccttttgtaatccggatttctctatatatattcagtattcagtattcagcttttgttcttgattttcgtttattgttgttcattctgttatcatccttctgttacactgttgttatcatgtcttcaacctgttcaacgtttatgcctcctgccctcatgtcttagtagtgaatagatttaaaagaaaaggttagagtagtgtagaattctcagtatgctaggtgattgagtatcgattgatagatcccttctggattagttgttcttaatgcctattgctttctgatcaactgaaatttgagcccaaacatttccgcgcccaaaaggtgttcgatgaaatgtctgaaccactaattcaagagatttgtggccatgtaccaaggtaatggttgcagggagcgttttagctgtaacttgttgattcgtaatacctgttaggttagctctcgtcaatggtgattgagtctgggactacgttaacttgagggtctctgttgcggtggcacttagatttggttaaagaacttgttatctagggataatttattgagcatgtcaatcacctgtaaactgaggaaacgaaactactcaattatcccatcctcgggaattctttatctgattgattttattatttactctactgttgtttactgcatcttgtcatctgttgcttagtttctgcaattctttactgttactcgacctgatactcgaccacccagttgtctggcaacagactgtgcagtcgagtatccctgttacattttctgtctgttactcgacctgtcactcgaccacacccagtgctctgcaaagagctgtgttggtcgagtgtttcactgtttctgtttgattttctgttttctgcatgttcatttaggactgctagaacacaccaaaacctgttatgcttggcttgacttagtgacttctgatcacatcttgattgttagcatcacacccatttggattgacaacctaaaatactacaacgacatgattggtgttataggataattgaccaaaaaaaacctactatcagtttgcaggaagagaaattgggaagaccgttccatcttggtgaggtgttcatccagacacacactaagtcggatggcacttatgttgatcggaaggcggagaagattgctcaaacttatgggcagaatgtgagatcaaagctgtctgaactggaggctgcagcttctactgtctctaatggcacttcacgaccttgggatctcacagtagatgagtataaagccatctttctcgaggtaagatgttgtagtctaattcagagtcttagagtccattgatgcattcattcactaattgtcttcctctctatttcttgcagtccacagatagggattcaagaggcaatccttatggacttggatatcttaaagacactctaggcagtgccaaccgccaactccccgaagactcagcatcctttcaagatttagaagaacg

SEQ ID NO: 153568 - DNA, 658 bp, Arabidopsis thaliana landsberg
  unsure (1)..(658): unsure at all n locations
cctttgcgtactgtcccaggctactggttcacagttgcgtttattgatatcattggaagatttgtgatccagctaatgggatttttcatgatgaccgtgtttatgtttgccattgcattcccttacaaccactggatccaaccagacaaccgtattggattcgtgatcatgtactctctcactttcttcttcgccaattttggtccaaatgcaaccacttttattgtccctgctgagatattcccggccaggctaaggtcaacatgtcatggaatatcagccgcggcaggtaaggctggagccattgttggagcctttgggttcctatatgcggctcaatcacaagacaaggccaaggtagacgcaggatacccaccaggcatcggagttaagaactcattgatcatgcttggtgttcttaactttatcggtatgctcttcaccttccttgtcccagagcccaaaggcaagtcccttgaagaactctctggtgaggctgaggttagccatgacgagaaataattatgtatttttattttgttatttggagtgcgatgtttggttttgttttcattttattggctcgttgaccttaagttatgatgttataagaatatntatgatatcatttaaatcttgttgaatatttcgaaatcga

SEQ ID NO: 153569 - DNA, 1150 bp, Arabidopsis thaliana landsberg
  unsure (1)..(1150): unsure at all n locations
gttctgaggtcatgggtacaaaagactctaatgtgcttaaagattatgttaatattagatttattttggctgtaagtttgtattgcttatctatcttgtatgttctccctttgtcttgttgtaggagctacgtgcctaccaagcaaatatagctacagtgttgcgaaatggtactgatataatatgtcgagtgatttttattactactaactataatttaaactgctgattattccgactgtttttctgttggtatctcctctagagacactttgtatcttgtttagcaaacttttcttctgccaagccattgttttacgttaacaattccctgtgttgtcttaaaaatgacagctattgacattcagaattaggtttttgtaaatattttggcacatttttttttttcttttaagtttttagcttgggacattgttccagttgtagtaggatatctgcaagttttttctaggttgttaacatgttcataattgcagggtgcttctctatcctaccagcaacagagctggttccaggcgacattgttgaagttactggtatgtttgttctactatacctagatgatattttgtggcaatggcttagacttttactagattctaaattctgctttttttgatgtgtggatgctaaacagtgggatgtaagattccagctgacctgaggatgattgagatgtctagcaatacgtttcgagttgatcaagccattctaactggtatgtcatctgtgtcaccataagtcataactcttgatatgcgtagccacaagaactacctatgcctattggtacttagtacaacttcaagccaatcgttttctccaccatttaatctctggaatgaacatgcattctcttattacattatagcttcaacaacaatagtagattccttttatgtaaataattttttttttttttttttttgtcaatcttatgtaaataaattcaaagtgaacatttacagtggactatattcatactctcactactaattgttttccccggaaattgcaggtgaaagctgttccgtggaaaaagatgttgactgtactttaacaacaaatgctgtctaccaagacaagaaaaatatttttttttcggtaggagttataactcgnagctgca

SEQ ID NO: 153570 - DNA, 332 bp, Arabidopsis thaliana landsberg
gacgagcaagatctgggattatagtgttaccttgtggtgctggtaaatctctagttggtgtttctgcagcggctcgtataaagaagagttgtctttgtttggcaacgaatgctgtctcggtggatcaatgggcctaccaatttaagttgtggtctactataaaagatgaccaaatatgccgtttcacttctgatagtaaagaacgattccgtggaaatgctggtgttgttgtgacaacctataatatgattgcctttggtggtaaacgatctgaagaagcagagaagattatagaagaaatgagaaacagagagtgggggttgctgcttatg

SEQ ID NO: 153571 - DNA, 583 bp, Arabidopsis thaliana landsberg
atgatcaacgaagaaagcgcgcaagagatcatggtggcttacaaatccccagagtacgtaaagcaaagccgtgtgaccaagaaaaccgatgtttgggggctaggtgtactcatcttggagattcttacgggaaagttacctgaaagtttctcacaagtggataaagaaagcgaggaggacctagcgagctgggtaaggtctagttttaaaggagagtggacacaagaattgtttgatcaggaaatggggaaaacaagcaattgtgaagcacatatactcaatctcatgagaattggattgagttgttgtgaagtagatgtggagaaaaggttagatataagagaggctgttgagaagatggaagatttgatgaaggagagagaacaaggagatgatgacttttactcaacatatgcgagtgaagctgatgggagatcgtcgaggggactatcaagtgagggaattaacttgtcatgaaaagtaaatcgacaagctatcaagtacccttttcatgcaaaagttgtcttaaaaccgcaacatgcttggagctaattgatgtcgacacttcaataggggaatcccc

SEQ ID NO: 153572 - DNA, 383 bp, Arabidopsis thaliana landsberg
  unsure (1)..(383): unsure at all n locations
tcgtttactcatctcgaancttctcggcatatctcntaccggttcgggtcaaattaccgtgtccaaatgtgtatgtctcgtgctcactgaatcaaccgtctgatgatgcttccgacgccgccctttttctcgaatcaaattcaattgctgattacatgcggttcaaacgccgtcccgaccccgaaaatggtaccagcgagttgcagactgcaatcgtgagttacaagaaacgtttcccttggattcttctcaacccttttcttcaggttacatcaccatctctgttacttgctgggtttccatttaaatcgataaaggtaacatttttatcgatttcatcatctctatattgcaggtggatttggtctcaactattcatattg

SEQ ID NO: 153573 - DNA, 626 bp, Arabidopsis thaliana landsberg
tatggttttggaaaaacatggcataaacaggttggaaaacttgaagaaggtgtgaactatggcagactccagttagctaaatttgttgggttaactggatttcaagatatagtcgaggtaccaatgtctcctttactcctttctctttcaagcaagatctggtttctgagaatatgtatgtattgcgttcagatacagagactatatatgttgctgcttcgcttaggaactctattttcttgttgattattcaggactgctttgctttgctcgcgtatgaaaagcctgaggaatcatcggtctggtatttcctagaagactcacagagggaattagtggctgatgcggtgaatgcagcaatactatcaacaaatccaaataagaaagatgtgcagagaagctgtcacttgcaatcccatctagagaaactgctaagacagttaaccgtgtgctgtttagaaaggcggtcactgaatggagaccaaggtgaaacattccggcttcgacatgttcttaacaacaacagataaagaagatgaaaatggcttagccgcgcatatattttgaaaactctgtttttctatggtcgttatcatcataagtggcttttgttcattacttgtgtg

SEQ ID NO: 153574 - DNA, 779 bp, Arabidopsis thaliana landsberg
  unsure (1)..(779): unsure at all n locations
tctatctctctctctctttgaagcagtttgttacttcttacttttgtgtttcttcatattcttcagaagcaagcacaaggctannnnnnnnnnnnnnnnnnnnnnnnnnncgtatctcactacgatcacattaatggatagaatgtgtggtttccgctcgacggaagactattcggagaaagcgacgttgatgatgccgtccgattatcagtctttgatttgttcaaccaccggagacaatcaaagactgtttggatccgacgaactcgctaccgctttgtcctcggagttgcttccgcgtattcgaaaagctgaggataatttctctcttagtgtcatcaaatccaaaatcgcttctcatcctttgtatcctcgcttactccaaacctacatcgattgccaaaaggtgatctcgctgctttcgtgttttgtcttttctttttcttgttgtgtatgattttgtgctttcaaggtgatttagattaagcgtcaggaattttacatgtattcatcgtcgtatttaaagatagttctcttacttttttttttctattccactttaaccctaagataagattggagaactagagagactgtgtttatatgtgagagtgattttttttttttttttggttattgattgacaggtgggagcgcctatggaaatagcgtgtatattggaagagattcagcgagagaaccatgtgtacaagagagatgttgctccattatcttgctttggagctgatcctgagcttgatgaattcatggtttctcac

SEQ ID NO: 153575 - DNA, 770 bp, Arabidopsis thaliana landsberg
aatgaggacagaaataaaaggaaaccaagtctgaaacacaatgattgattaatcacttataaggcctaaactcacttttcctagttttgcccttcttttagctcatcaacagagagagagatagatccatggagggtcttcaaagatcaacaatctctttccgccgtcagggatcttccggtatagtgtttgacgatcgtctcatcgccgaactcaacaaatcgggaaacaacgagcagaaagacgaaagtcaacgcgacgaacaacctaagcctatgtcggaaagctctgaacaggtcaaaccaatcgatgagaaagacaagcttagaccgattaaaaccggtggaggagcaccaggaggaatagagaggagtcgatctaacggtggaggagctcaacgacatcacagaacaacgggaagagtttctccggcagtggacccgccgtctccgagaatttcgtcatgcggttgttgctctgcgtttgggaagaatccgccggggaagaaagttaatccgaggaaaaggccgccgaaacgtagatcgaggtaggcgtcaggattaataatattcatgaggaaaaaatagtatacactgtctttcatctttcttcttcttcttttttgtatgtgtgtgttctttgttataaaacactttacatttgatttttcgatttgatcaacagactctggttatttgtaaattatctgtctttctttgtcttcggacaattcccatttctgtacaaaatcaaactttctgatttggtga

SEQ ID NO: 153576 - DNA, 656 bp, Arabidopsis thaliana landsberg
tttgtttgtgcattgcctttgcaggattgaattaagaggtttttaagtaagttgagatgtcagttaaagcaaggagaatttctggtagattagagactgtagtaactaaggttaattatgcatttgatcctgttgacgatgacaaaatcataagaaaccggcttctaacccgaaccacgaccactcgaggcgagcctccattgaagaaacttcagaagaagttcacttcttttgtactcgaggtggataaagaagaagagaactataacgactgcggtagacttgccaaagcttttttacaggaactgtcaactttcgagattccgcttctgaagagccaagcggttgtggaagcaaaccttagggagaaagagagctttaatgaggtgaaagatgagacgaaaaggcagataatgcaggcgaaagctgagattgaagatctaaagaagcagcttgaggagagtaaaatagatagacagcataaagaagagtgtgagacgataagaaaactgatttctgcgcaaccgccaaggtcagagacagagaaggttatatatgaattgaacaaggagattgctgagcttgaagcagagagcactgcaagttggagattgcttgagctaaggaagaagcagtttgctctcctgatgcatgtg

SEQ ID NO: 153577 - DNA, 380 bp, Arabidopsis thaliana landsberg
ttcttagaccatccacacgcaagaagttgagaattgaaggggaaactttccatcgagtcctctctgaatacctccagacacttccttcataccttggtagcaactgcaactgcaaaagatgctcaaatctcaacgaacaagatccaccacagccacaaacacacccaagaagaaagagtagaagctcgagtgaaacagagaagctagacgacagccactggagttacaatgcccagacacctgatttagcctatgaagacgagccgagtctgaacatatgcagccaagttctgcgaacagcagtggtgttcttactcatgatatggctcttcggtgcactactagctggattcgctgatcctgagagcagacccttttaa

SEQ ID NO: 153578 - DNA, 1445 bp, Arabidopsis thaliana landsberg
atggagaaagcagagaacgagaagaagccatcggctgtatctgacgtcggagcatgggctatgaacgtaacgagctccgttgggatcatcatggctaataaacaactaatgtcatcatctggattcggcttcagcttcggtttgttttcctgatctctctatctctcccattttcattggatctgcatgatcattatcgtttcattcaattgtgtgattttgggaaattgatttgtgatttgcagcgacaactctcacgggatttcactttgctcttactgctctcgttggtatggtgtcgaatgcgactggtttatcagcatctaagcatgttcctctttgggagcttctttggttctcactcgttgctaatatctcaatcgctgctatgaattttagtcttatgttgaactctgttggcttctaccaagtaattcatctcgatctcgatcttgagcatatagaatcaaattgctttgatttgagcatatatagactttgattttggtttagtggattcacatttttttgtgttgattagatctcgaagctgagcatgattcctgtggtatgtgtaatggaatggattctacatagcaagagatactcaagagaagtgaaaatatctgttgtggttgttgttgttggtgttggtatttgtactgtgactgatgttaaagttaatgccaaaggttttatctgtgcttgtgttgcgattttctcgtcatccttgcagcaaattgtaagtctttttgtttggtgatttggttttgtttggtgatttggttttgaagcttgtggaattcaaatctgatcaattggtgttttttccttctgtgttgcttagttaataggttctctacagaagaaatattcaattgggtcctttgagttgttgagtaaaacagcgccgattcaagctttttcgcttcttgttgtcggtcctttagttgattatcttcttagtgggaagttcattatgaagtataatatgtcttccggttgctttgtaagtatctctcttcatggctctgctagtattgttatgttatcattggctaatgttctacaatttgcagctattcattcttctctcatgtggtctagctgtgttctgcaacataagccagtacctttgcatcgggcggttttcagcagtatcgttccaagttattggtcacatgaaaaccgtctgtatcctcacgcttggatggctcctatttgattctgcaatgactttcaaaaacgtagcggggatgattgttgcgattgttgggatggtaatctatagttgggcaatggaattggagaaacagtcgattattgcagcaaaggctttaaacagtgtgaaacatagcttaacagaggaagagtttgaacttttgaaggaaggtgtagaaactacacaatcaaaagatgttgaacttggccgcacaaaagattag

SEQ ID NO: 153579 - DNA, 314 bp, Arabidopsis thaliana landsberg
gtaacaacacaaatccaaaactgcattgtttctgcttcttcagcgaaattttgttcaatcaaaagcaaaaaatgcgttttctttttctagaaatggttctatgagcagtgacattatgaaagatgctgcaggtaggttttgaaggcaaaaatgaaagcaagagtagaagaaaatgaaggtaaggcaggacaaagatacaagaaatcttcttatactctatacacatctttgagtaaatgatggacaatacatgaagtactactagacacaatacaattcactggcggtgaaaatcaatcaaattacaccaatat

SEQ ID NO: 153580 - DNA, 1351 bp, Arabidopsis thaliana landsberg
atgcgctaataccccatggcagaggcgtaagcttgggaaaatcttaaatgactggagcgtattccatgtgcaggttataccatttgtgcctttgttggaactgtattattctttacttaactatatgtaagctcgcgtaccctaaaattgtttgcatattgatttgggtttttgtgtcaagatctcattcatacatgttcctttatttggcagatggggattgctgttggtcaaatgatgcagcaagatacatcacgcagttcgaaaaacggggtaggtttactaccatcactatgcgttgcaaagacgccaggtccatttaatcaaacctctacctgaatctagttgacggctgtctattcattgttagcatgaacaaaccagtagtcaaaattcctacaacttctgttttctctttcggaaaattttggctctattgataagcagatattgaattttgtgttaacttgcatttatgtacctttcaggataagtctctactcattttaaaccatatatatggtggattagaagagcaaattaattgggtggcaattcgctttctcatgctgggatttgacctagacctctactcggcaagtgaatattgcatggtatactggtacatgtatattatactctggaagcttgcagaaagggcacgtttcagggtcttaatcgttgtcaacactggtaagcattcatatatccatttgtttttattttgtgtcctagtgtttcggagatgaaccatctgtacagtaattggtttggcataactgcatagtgtgtatttatatctttttataatgcatttgtcttcatctggatcagaggaaagaaaagcaaagaggaataaggagtattctagggacatggctcgggaagatcggattagtctatgggtattgtttctcaaatgtcagacctgtcttgcacaaggcctcacagtggtaattttgtcttcaatctcttggtttccagctccttctattgctgatatcaagtactctaaacctgaccaaaccttgtgtatttacccgtagatgattgcagctttgagaaatgaaggaatgtgtttaaagagtcaaggaccttttaataccgaaaatgaggtaagcataagtctctttatctgttgcatagttattgaattaatgtgtaagataaaaatcctcagccttagtaatgggtgagtggttttatcccttcctgtgtatgacttcaactacccattttccttgacatgcagaaatttatacagcattttgaactccttcagaaggcatcgcttccagaatatgacgcatatgaatcgttctcaaagtccacatctcatgctcgtctcgac

SEQ ID NO: 153581 - DNA, 1896 bp, Arabidopsis thaliana landsberg
atgcagagatcaaacctacagggagaattgatgatcaatgcaagcagatgtgttcggcaacgtacggggacggtaaatgtgcctcggactgtaggaaggctggtttctcatccggacgttgtctaacttcttctcctttcggaaataaatgttgttgcaccaagtgatacaaaccgatctatatgagttttctcttgttggattgccacaaaaaaaatcataaattaaaaattccttaacaaaaaaaaaaatcataaataaaataattttattattatattttttccttataatcaaaatcaaaagtacgagttactggcacgatgcaccagttgattagcatactcttattactctttaattagtcaactattacatacgacaagtttttgatttcaatattatgaagtgatgatattattgacacaacgcctatctgatcgactttagatcttttggactgggcctagctgatcgactttagatctttaggactgggcctattcagttcggttagttttgtttcatttcgattttagtgatcagggttcctcggttcctcctagtagaccagaagaattatatcgtatgttggttacttagtttctagccttggacattcggttatctatttggtttcggttcgtatccattcagttatcgattctttcggtattaatgtatagtatccattcagttattttaaaaattttgtttggtttcggctctggttttaaaatttaatatccattcggttattttgaaatttcggttcggtttcggttatttttgatattttcaaatatttttgggttattttcgagtgcttttacgattatatatatatatatatatatatttaagtacttttaattatttagtctaaaaataactaatatttttaaaaatatctttaagataattttggttatctaaaatattttagtttgtatccattcggttttggttctttcggttatagaatttaattttcattcggttattttcaaattttggttcggttggatttggtttttttcatcggtttcggttcggtacattcggttcggtttatttgcctaggcctattgatttctaactccaactctacatagccaattgtgaccaaactcaatccaacttttactttccgagcataacgatgtattgatcacatcatctcagtttcagttcatcgactcaaaatgaaaccaaaataagactaactatttgaagaattctaaaagaaaacaacaaagaacacaaacactttgtattgatttttatgtaaaactaaccaacaaacaaagaacgtatctctaccagaaccaaagatctttgccttaaaggttcagcataaatcttgacacagagagactctaatagtagtagtagtattagatatatgattccaaatttgagattattactagtgtattgttgatttagctgcatattggacaacgaacaagaccattctcattacactccttacacttcaccaccactgcatcattcccccatccttccaccactttacagcttccattacaacccgaacacggcaaaaacgctaatccgccgcaaccaccgcaaccgccgccacaccgatctttcttcctcggaatctctttaagcaattcaccaagcaatccttcttccaccaatctcatcacttcctctgctccaccaatgtacttccccttcacaaaaacccgaggcggcaacaccgccgccgtcgattctaccgccattagattggataactcttctctaaatcctctatccattgacacatctctctcacaaaccactacaccaaaactctcaatcgcagctctcacggcgttacacgcctcaaacgtccgtcgaacaccgcgcaacgacgtcgtataa

SEQ ID NO: 153582 - DNA, 1184 bp, Arabidopsis thaliana landsberg
atgagcgatttgaagttgcaagatcctgacgaaattttttctcagctgatgcaaaaactttcagatggaaactcattacctttgatcaaattatcccagtttcgtgttttagctttactgaaagtattcttcaacttccctaaaaaatcaattgccacttgtttcggattcttcaattcttcatccacggaggatgtagcaacggggaggtatctcattactcatatgacagaaaagattaatgatattgatgccgctagtattgaacctgaagtagacgagaattctggtcagacaggttctaacaatatagaggctactggtaagaatgcagaagggttgaatggtgtacaagaagcatcaaacagtctaacgagctgcttgttagaaatggtaatcctctgggtagtgtagaatcaaaataagtagcctttgcttttcttagcgtgttatttatttgtgtagggctttagttattatttttccctgtattgagcatcaaccgtgtcactcattttattcgcttgctctgttcttggaactttgtatggctaatgtgtaatgggtatattcaaatctgatagtttcaagaatccttcgtgcaggttattaggaagagttcctccattggtaggtgggccttctttcagtataagaaaatatgcagcctgtcatccttcgtggatatatccagtgctgttacttctctagagggaatctttggatttgttgaaaaaatatcaagttagaagattgtcaaatggacagtgacgaggatgattatggaaaattttcagtttcacatgtgaaacctcacagttctgcagacaatgatgtccgctctagtgctggatcggtttatgatgctggaggttcacgatctatggattttgagactgttgaccagagagacttgtcatgtggtagatcttcagtcccaaggggattattaaaccagcatacaccatctccttctgcaagagggccttcagatttaaggagtaactctacggatcgtaggaacaattttgttcttgcaggatcacctgtttatcaggcagtaccccatggcccttcatcagggcaaattgcttggtatttggatggggaccccactgcttttgacatttttccggcttcggggcagttgtggttaggctatttaggaccagatgaaacagaag

SEQ ID NO: 153583 - DNA, 2012 bp, Arabidopsis thaliana landsberg
cttccgacaaggcaatgccggcgataaaaacgtcgccggtgatcggaagaatagtgagcaacagttagaagggaagctaagatttgcgattttagcgggaaaagctacagctttcatcttttcttctggggaattagggtttatagtttatccccaaatggattttgttctgtcggtgtcgaccaaaaaaggtaaaaaggagaaagaaaactgaagggactagatttaaaagaccacaaaattgagggacgaaaccgaaaataacaaaaataaatcgccgttgccggggatcgaacccgggtcacccgcgtgacaggcgggaatacttaccactatactacaacgacatttttgattgttaaaaccaaaataattatttttaattcattgaatttctgctaaacctcagttagcaattagtttagtgatagtttatctatgatttagtaatttttaatcactcattagaacgttggtcctatcacaaaccccgacctaacacagaataaactgcaatgttaatgtcgtcatcatatacgtacgtaagttaattcgatgaacaaataatagctgcttaaatttccacctgttgacaacaaaaatatccatctttgcgtatgtgtctccaccgtacggtcagacttaaattcacaatttattggccggaattacttgtggacagtatgcgttccatctaaacaatatagcacaagtcaaatgtttaagggtaaattgtattataagtaaaacttaaggggctaatttgaaatcctatttagtcggtttcggtaagtggtgtacctgccgctcccgttgccggtagccagtcaacggtaaagtcaatacaataatttttttttcctcaagttgttttcatttctatggtatgttcattgtccttttcctcggatatgatttttcttgcttggaaagaaaacaagagaaaataaactgaaaaagcaaacgcagcttataaattcagcgtctgagagaggagagactacatcaatctgcataaaattgaagacgacgaaagacggagactgagaagaagcgatgcatctgtacaatgaatggttaccgccgcctgtagcggaggagacgaagaaggagaaagagtccttcgcgcgtgtcgtgagatgcgtcaaagagttgcaccgacccgatgatccagagtctgtttacgccactcttaaatggatctccgttatcgaactgtgagtcctcgattttgattgcataaacctcgttgatttttttattttttctcgttcgaattggctgcttcttattgggatttgtagacgaggatgatgaatttgagagacgattagctcagtttacaatcgagtcagtatatcgaaataaactgctgggggttttgggtgttcgcgatacatgactaggatagagttcaataaacagttggaatttgcgtgaaaattgtagttaggttcagattttatacttaaaccatgcagtctagtagtctgaaatcattttacagactggttccactggttatccagtagccactatgtacctgtgattgattgtgtagtaatttccgtcttgtagttttctcacttatgtaagttgggcatacatgattcttattatgctgcatttggctattccgtgtctgatgacctttgttttttcctttagcagctttgttagagtctcatttagatccatgtctctttgctttaattggtcacaatgcttcttctggttttattgcagcggaaacggtttattgaacaaacgaagactctttatggtatgaatttcctggcatctgtttcaagtttactttctaaaacctggaagttcggcacatgagcagttccttttagaacagtttgtttacttaaacctttgacgcccttttgtgtactggtataaacctcctgcctcttctctcatctgtttcaggcttcgattccacccttcatattacagtcgcaattacaaactagtgtcaatgagagaacccaattcgatcagag

SEQ ID NO: 153584 - DNA, 1152 bp, Arabidopsis thaliana landsberg
atggagctagccatgagtaagattaacgaggatcaagctaagcctttagctccactttttctcactacccgaagcgaccaaccagacgaagaagatcagtaccaccacgaccgaaccaaatacgtccattcacagaccaaactcatcttatgttgtggtttcatcgcatctttaactatgctcatcgcagtcaccttcatcgtgctctccctcacggttttccatctccatagcccaaacctcaccgtcgattccatatctttcaaccacggttcgattttgtcaacggtaaagtcaacacgaaccaaaacactacagtctcagtcgaaatctcgttacataatcctaatccggcgttgtttatagtgaagaacgttaatgtttcgttttaccacggtgaattggtggtggttggagaaagtattagaagaagtgaaactattccggctaaacggacggttaagatgaatctgacggctgagattgttaagacaaagctactagcatctctaccaggtttaatggaggatttgaacggtagaggagtggatttgaaaagcagtgttgaagttagaggtagagtgaagaaaatgaagattttcaggaaaactgttcatcttcaaacggattgtttcatgaagatgacaacgaacaatttcttaacgcctacatttcaatgtttttaagaaacaataaatggcaaaaaacagagccaaatctaaaagagattaaattttgtttccctttctacgcttattagaggtctgtaaataaaagtagttgattgtgaatagaaaataaatgcattgtagaatcaaaagataggaaatatttcatcttctggcaacactaataataacacataaagaaacctccatccgaaaggacctttcgagttctaagaagatcgatccattcatctttcgtcaacatttggagattgcaccggataatggcagttaatatgactcaccggtgttatttcttttgcgtgtcagacgacttcttttgcgtgtcagtgacacgtcctccggcgaccttaacaatgggttcgtctttggactttataagctttagagccggatgaaccttgaggtctcccattactagcttttgcccgatatccaattggcttagatctacttctatata

SEQ ID NO: 153585 - DNA, 764 bp, Arabidopsis thaliana landsberg
tggattcaaacccagaccgatgacttaaacagcacacgcttcaaagattttcagaccggtgaaggtgaaggatttgttgagccaccaggaaaagtagagatcaaaatatcagcagctgtggttgctaaaaatgaattaagtttcagctacaatctattgtctatggttgggatcgatctttctgacaatctattacatggagagatcccagaagctttgttcagccagaggaatattgagaacttgaacttgacctacaacttccttgaaggtcagcttccacgtctagagaagctgccaaggttaaaggccttagatctttcacacaactctctgtcaggtcaagtcattggaaacatctcagctcccccaggactaaccctactgaacctatcgcacaactgtttctctggtatcattaccgagaaagaagggctcgggaagtttccaggggcgttggccggaaatccggaactgtgtgtggaaactcccggaagcaagtgtgacccggcaaacattgatgcatcacaagaggaaatatatcaaaacgaattggtggaaggaccgatatctatttggatattctgcttaagtgcgtttattagcttcgattttggagtgttaggtatcttttgctcagctcgtgctcgtagttatattcttcagaccaaagcttaactccaaagattgattgatgtatattcagttgtaacacatgcatgtatgttgttggtctgagctgtgaagtggaaatgctcgcttta

SEQ ID NO: 153586 - DNA, 10630 bp, Arabidopsis thaliana landsberg
  unsure (1)..(10630): unsure at all n locations
ttaactgacctaccgagaatcggcctgactgatgcgcgatcttcccctctctgaattctctccacggatccgagtagtgtatggcatatagagcattgcatggacttgcatatgattaagtaaatgagattacttatggctctatgactttcagaaacgaatggtgatcgtgggaaggacttggcttaggcgcgagagactcaaggccgggatgatgggtggtgatagttcggatagtctagggatcgattatatgacttgtaatagcttatatgcaaactcataggttgtatcgaatcctttgcttaatcaataaagtatccgattgtttgtttactctattcgtctcatatattgaatcacggaatcatatggaacggattagactaggaaagaacctcataaaccgttagggccgagtcacttactggcttgggtcgagagaactcgtccggactttaggcagtccggatcggggcctttcaagttggtatcggagcatgcttggttctaggactaggtgttgggttaaggggtatcaccactcgtcggcttgagaatctcgcggtagttactctttactcttttgcgattttactagaagttatgtggattaactttggaggtttcgcagatgggtaagagcagcaaaacgggaaagagtaagaagaacaagggcattgtcgaggagactttggttgaggaggaaacgatgatcaacgagaaaaccagagtcgggacgatgctcgatgggacagactcggccggacctgaggccgggaagaagtccataaatgaggaagcaccggagagtagtggtgcaagggacagcacggataaccggaacaatactccaacgacccaagaacagtgggatttgatgaagggaatgatggcgcaactagccacattgaccaaggccgttgtagcggattcggtggtcctaaaagtggataaccaaaaggacgatgactcggaagttgtggaagtgaatccacaattgaatcatggacggaaaaggggagactatctgagtcttctcgaacatgtctcaaggctgggcacgagacacttcatgggcagtacggacccgattgtggccgatgagtggaggagtagactcaagaggaacttcaagtctacccgctgccttgaggattaccaaagggacattgcggtccacttccttgaaggagacgcccataactggtggttaaccgtcgagaaacgtagaggggacgaggtccggtcctttgcggatttcgaagacgagtttaacaagaagtactttccaccggaggcttgggataggcttgaatgtgcgtacctcgacctagttcaagggaaccgcacggtgcgtgaatatgatcgaggagtttaaccgccttagcgttatgtgggacgcaaacttgaggaggaacaagccttggtgcgccgatttatccgcggactaaggatagagatctgcaaccattgtttggtccggacattcaactcggtttccgaatcggttgaaagggcagcaatgattgaggaagggatcgaggaagaaaggtacttgaatcggaagaaagctctgatccggaacaatcagcacaccaaacccgtggataagaaaaggaaatttgacaaggtggataacagcaagtttgatgctaagaccagcgaatgtgtgacatgtggtaagagccacagcggaacttgctggaaggccaaaggtgtatgtggccggtgtggaagcaaggaccatgcgattcaaagttgcccgagaatggatcacgggcaatcaaaggctcctagcaatgtaccaaggacttgtaatcattgtgggcacgtaggctactttaagagagactgtccaaagttggacaccgagtgcaatctaggcaaggtgggaatcgcgagaggtaatggactcgcgccccctccaaaaaggcaggccctagcaccgcgtgtgtatgaactgtcggaagaagctagcaacgctgggaacttcagggcgatcattggtaagccttgtaaacatgttacttctttcgtgcattgcattgcatcatgcataatggggatgggtactcagcattctaagggaatgtgtagggaccttgagagtaggtgacgtagaaacgcacactctatttgattatggggctacacattgttttgtgagtccggaaatggttgaaacaggtgagttcggaaaagaaccaaacaccaaatattgaatggttagagcagccagcggacgggccatgtatccattttgacttgttcggggcatctcggttgtagtgaacggtgtcaatatgcccgcggacctaatcattgttccactaaagaaacatgatgttatcttagggatggactggttgggaaagtacaaggctcacatagattgtcaccgaggacgggtacaattcgagagggacgagggtatgttaaaattccaaggaataagaacaacctcgggaagcttggtaatctcggcaatccaggctgaaaggatgctcgggaaaggttgtgaggcatatttagccacgatcacaaccaaggaagtgggggcgagtgcagagttgaaagacattctgatcgtcaacgaattctctgacgtgtttgcggccgttagtggtgtaccaccggaccggtcagacccgttcacgatagaactcgagcccgggacaacccccatatctaaagctccgtaccggatggcaccggcggaaatggcgaagctaaagaaacaattggaggagttgttggataaaggattcatcaggccgagtagctcaccatggggtgcgccggttctgtttgtgaaaaagaaagatggtagctttaggctatgcatcgactatcggggattgaataaagttacggtgaaaaacaaatatcctttaccccggatagatgagttgatggatcaacttggaggtgcacagtggttttcaaaaatcgacttggcctcaggatatcaccaaattcccatagagccaacggacgtgaggaaaacggctttccggacaaggttcggccactttgagtttgtggtcatgccattcggattgaccaatgcaccagcagccttcatgaaaatgatgaatggggtattccgggatttcttagacgagtttgttatcatcttcattgacgatatccttgtttactcgaaatattgggaagctcaccaagaacatctaagggcggtgctggaacggctaagggaacatgagctatttgcaaagttaagtaaatgctcattttggcaaaggagcgttggttttcttggtcatgttatctcggaccaaggagtatcggttgatccggagaaaatacggtcgataaaggagtggccacgaccaaggaatgccaccgagattaggagttttctcggactagcggggtattaccgaaggttcgtaaggagttttgcgagcatggcccaacccttgtctcgactgaccggaaaagacaccgcattcaactggtcggatgaatgcgagaaaagcttcctggagttaaaggccatgttgactaatgcaccagtattggtcttaccggaggaaggtgagccatatacggtttatacggacgcatcaatagtgggactaggatgcgtactgatgcaaaggggagtgttatcgcatacgcatcaaggcaattgcggaaacatgagaagaactaccctacgcatgatttggaaatgggcgcggtagtatttgcttgaaagatttgcgatcatacttgtatggtgctaaggttcaaatctatattgaccacaatagcctaaaatacatatttacccagccggagttgaatctaagccaaagaaggtggatggaacttgtggcggattacgacttgcacatagcgtaccatccgggcaaggccaaccaagtcgccgacgccctgagtaggaggcgcttggaagtggaagcggagcggaaccaagtggacttggttaacatgatggggacattgtatgtgaatgccttgtctaaggaagttgaacccttagggttgggagctgttgattaggccgatgtgcttagtaggatccggctggctcaggaacgggacgaggagataaaaggatgggcactaaacaacaagaccgagtaccaaacctcgaacaatggtacaatcatggtgaacggtcgagtatgtgtcccgaacgatagggcattaaaggaggagatcctaagagaggcgcatcaatcgaagttctcaatccatcctgggtcgaacaagatgtaccgcgaccttaaaaggtactacccttgggtaggaatgaagaaagacgtggccagatgggtggccaagtgcccgacttgtcaactggtcaaagcggaacatcaagtaccaagtgggttgttacaaaacctacctataccggaatggaagtgggaccacataacgatggacttcgtcactagactgccaacgtggatcaagtccaaacacaatgcggtatgggttgtggtagaccgattgactaagtctgcgcacttcatggcgatctcggataaggatggagcagaaatcattgccgagaaatatttagaccagatcgtgcggttacatgggattctggttagtatagtgggagaccgagacacaaggttcacgtcaaagttttggaaggcttttcaaaaggccttagggaatcgagtgaacctaagtactgcctaccacccacagacggacggacagtccgaacgaacgattcataccctctaggacatgttgagggcatgcgtcttagattggggaggaaactgggagaaatatctaaggtttgtagagtttgcatacaatatatagttttcaagctagtattggtatgtctccctatgaggcgttgtatggacgagcttgtagaacaccgttgtgttggacgcccgtgggcgaacgtcggttgtttgnnnnnnnnnnnnnnnnnnnnnnnnnnnagagaatgaagttcttaaaaatcaagttaaaggaagcccaagatcgacagaaaagctacgccaacaaacgtcgaaaggaattggaattccaagtaggagatttggtgtacttaaaggcgatgacctacaaaggggcagggcgattcacctcaaggaaaaagttaagcccaaggtatgttggcccgtacaaggtgatcgaacgagtaggggcggtggcatacaaacttgaccttcctccaaaattaagtgcgtttcacaacgtcttccatgtgtcacaattacggaagtgtttaagtgatcaagaagaaagcgtggaagatatacctcccgggttaaaggaaaatatgacggtggaagcatggccggtacggatcatggaccgaatgacgaaagggactcggggaaaatcaagggatttgttaaaagtcttgtggaattgtggaggccgtgaggaatacacttgggaaaccgagaataagatgaaggccaattttccggagtggttcaaggagatgggtaaagatcaacttgatgcggattcgaggacgaatccaattcaagggggggagacttgtaacgcccgcgatcctcaataggatcgttggctaggacttggtccgagagaggaaggtggagtctcggacaagtgagaaggagctggccataagctcggacaaaggggaaatcatgcaggctaagctaggatcgtaaagaaatcacttgggtcagctcgcccaaagctcaagctcagctggaaggagtgacggttactcaggtcgagtgacagtccagctcgggcagctggacgagtgacggacgagctcgaggcagctggacgagtgacggttgaacttgaggtagctggacgagtgacggacgagctcgaggtagctggacgagtgacggacgaactgggcggttatgggcgaagagatacaactcttcggaaaggtgcaaggaacggatgtgttgatttgggaagcatccattcgccccctatataaggaagggcgcccaggaccattccacacaccacaacacaccgaaaacacaagaaaactcaccattaaaactctctccctcttgggagaataaatagtcttaggattcggtagccgggctgtggccggcaataaagaaggagggtcggatcgacctagcctcgagaaggaaggtaagggatcctagactttgagtctaagggttctaggatgtgagttagtagtcggatccttgaaaggaccgactagagggctgagtagtatccgggtcatgtgcatcctacacaagactcggtccgggtagggatcggctgaggcggggacgcggctcggcggaggaccggcggctcttaactgacctgccgagaatcggccggactgatgcgcgatcttcccctctctgaattctctccacggatccgagtagtgtatggcatatagagcattgcatggacttgcatacatatgattaagtaaataagattacttatggctctatgactttcaggaacgaatggtgatcgtgggaaggacttggcttaggcgcgagagactcaaggccgggatgatgggtggtgatagttcggatagtctagggatcgattatatgacttgtaatagcttatatgcaaactcataggttgtatcgaatcctttgcttaattaataaagtgtccgattgtttgtttactctattcgtctcatatattgaatctcggaatcatatgaaacggattagactaggaaagaacctcataaacggttagggccgagtcacttagtggcttgggtcgagagaactcgcccggactttaggcagtccggatcggggcctttcaaataagccgaaagctttatcgaccaccatagaccggacggataaacgattagtacaccgtgggcggtcgtagtaaacgaccagatcggaaacatggatggttcgataagctgagggctgaatcgtccaccatggcaccgaaggggcgtacgtttggaggacggatggacaaatgagccaagagcttgattcggccatcgtgaaccaagggaatcgtatgatccccaatctctatcgtagtacttagaccagtggggttggttcgttgtatggctaagtaacgatagggattggttcatcaatacacgatcggatacgagtcgttgaacgaatggagtaaggcgacaaacgggctaaggaatcaaatccgcatattggccaaggtatgtaacgatctagcttactagttaggatagacgtttgggaattgaccgtgaaaataggataaaggaatatgcgattgttaggcctagaatggttagcgaacaatatgtatgtcttgaacgagtaaaggatcgatctaagtctaagggacaaagacgatgaaaccggtacaagagttggttagaattaaaccaaggttagaaagacttccgctgtgtaataagaaagcgaatatagaatttagcctcgtaaaggcaattctatggttaatcgcaaaaaattaagaggttcggccgggaagaggcgcaaacttgagtacacggtcgccggacgccgagacgtccgggactgggtctcacagcccttggttctagttcttacactcaatcatacccattacatctagctataattgtctcctaaatattaaccaagcttcttcttgcttctcaaacctttgatggtgaagccaaaggttgtatgagtttttggctttgtattttctaacaaggaaacactactttagcatttgggatcatattgcggtttaagttcttatactcaatcatacacatgaaatctagtcatttttgactccaaagcactacccaagcttcttcttgcttcactaagctttaatggtgtagccaaagtccgtattagtctttggctttgtgttttctaacaaggattcgattcttacgcctttaagatcgggttgcggtttaagttcttatactgaatcatacacatgacatccagtcatattagactccaaaacactaaccaaccttattcttgcttctcaaagcttttatggtgtagccaaagtccgtataagtctttggctttgtgtcttctaacaaggaaacactacttaggcttataagatccggttgcggtttaagttcttatactcaatcatacacatgacatcaagtcatattcgactccaaaacactaaccaagcttctcaaagctttcatggtgtagccaaagtccgtatgagtctttgcctttgtatctttgataataggttttttagtcaattatcctaaaacaccaatcatatcgttgtagtattttaggttgtcaatccaaatgggtgtgatgctaacaatcaagatgtgattagaagtcgctaagtcaagccaagcaataacaggttttgttgtgttctagcagttccaagtgaacatgcagaaaacagaaattcaagtagaaacaataaaacactcgaccaacacagctcgttgcaaagcactgggtgaggtcgagtgacaggtcgagtaacagacagaaaatgaaacagggatattcgactgcacagtctgttgccagacaactgggtggtcgagtataaggtcgagtaacaagaaagaattgcagaaattaagcaacagatgacaagatgcagtaaacaacagtagagtaaacaaagaattcaatcagataaagaattcccgaggatggggtaattgagtagtttcgtttcctcagtttacaggtgattgacatgttcaacaaattaaccctagacaacaagttcgttaaccaaatctaagtgccaccgcaacagaactctcaagctaacctagtcccagactcaatcaccattgacgagagctaacctaataggcattacgaatcaacaagttaaagccaaaacgctccctgcaaccaataccttggtacagggtcacgaatctctggaattagtggttcaggcatttcatcgaacaccttttgggcgcggaaatgtctgggctcaaattcgagttgatcagaaagcaataggcattaagaacaactaatccagaagggatctatcaatcaatattcaatcacctagcatactgagaattctacactactctaacccatcctcagaaaccttttcactactcagacatcatgacagaaagcataaacgttgaacaggttgaagacatgataacagcagtatgataacagaatgaataacagtaaacgaaaatcaagaacagaaactgaatattgaatactgaatagataaagagaaatccggattacaaaaagtctagaacataaggtctgcggaaataaaaactaggtaaaaaccaacctttttttgcgaaaatgagaagtacatgctacttatagccaaatatcccgaaaccctaatactcaaaacgacgaagtatttggacgggttaagaactgtactcgacccacgtggtcgagtgagagctcgagtgtatagctggagtcttcttttcttccttgtgctcgagtgtctgattgagtgcggaatgaagaaggctctgaagcttgtcatcgagtatgcagtcgagtggtgtgatggagatactcgacctctgggtggagtgaggaggtcgagtggttgtctgatgatggaggtgaagcactcgacctagaggtcgagatgtcgaattccggtgacacattaggtgagggaaggcttcgctttcttcctctagcagcagatcacgcctcatatcactcttggagatcactcgaccgcggtgctggccgcagcagaaggagagaggtcgagtttcctcagagcggtgctggccgccacagagctgattgtgtcttaacatttgatgatacctgttggcaaaaagatcagattaacccactaggagataatcgactgatcttaatgcattcaccatttgcttgagttatggatacttggtgtacactatcccagttcaatgagtaggctaactgcgatataatcatcccagttcaaaactggtgaagaaggcagaggtggttgaaagttggcatatatggttgaaagttggcatatacgataaaatattagaaaactttgtgacttattctcttgatcccactgattgaaactgtaggagccttcaccatcatgccactttggaatgaccaacacatctgattcattatctaattcaattggatgagctaaatatgggcagtggctggcttggtgattcatgataagtgtgtattttgcatgtcttgagcatccatttgtcatcactttagcatcatatcatcactgttttataccatttcacatcatttgtcatcactttgcatgtttaggatagttttgcatgcatgttgcatatttgcgttgatttcaggtgatttggagctgttgacgagctatctggaagaagcagacctgatcatgacaaaccactcgaccaagaggtcgagtaggagcttcaagatctcaagagaccactcgacaaccaggtcgagtagagcacatcaccacttcacctcaccactcgaccccgaggtcgagtgccatcatctccatcaccagacggtcactcgatcacttcactcgaccacgaggtcgagtgtcttcacctccatcatcagacaaccactcgacctcctcactctacctagaggtcgagtatctccatcacaccactcgactgcatactcgatga

SEQ ID NO: 153587 - DNA, 387 bp, Arabidopsis thaliana landsberg
cctcctcctgctccttgtgaagagcagactggtaagaagagaaagatgagaggcagcattgcaacaccaacggtaccgaaagctaagaagatgcgtaaaccgaaagaagagagagatgttactaacaacaatgttcagcagcagcagcagcgtgtgaaaccggttaagaagagtgttgatcttgtgattaacggtgtgagtatggacatttctggtttacctgtaccggtttgtacttgtactggaactcctcaacaatgttaccgttggggttgcggcggttggcaatccgcttgttgtacgactaacatttcggtgtatccatttccgatgagtactaagcgacgcggtgcaaggattttgggtaggaagatgagtcaaggcgcg

SEQ ID NO: 153588 - DNA, 2333 bp, Arabidopsis thaliana landsberg
tcagaccatagtagagcaagccgacgtcgtaggatcatacagagcaggaagcaaaaacttcctgccgtttgcaccatacgcattaaaactacctcccgttgtagtatccacaagcaaatctccagcgtaaccaggataagctcctttaccataaacgccaggacaagcagacgcagcttcaagcggtgcgttttgtggaccttgatagtaaccattaccaaaagggttcgttgcggttccagctaaaagactagctaagttaataaccatcccatcgagtcccacgtcattgtttggtgccactagtggtggactctgtggaccgtacaccggcgcgtggaaaggccacgcgcattgaccaggacattgtgtctcagagtttccaacccaaatgtaagcaaacttggagccacgtttacctaaaccacgagcgtgtccgtgagtcccgcaacgactcataccaaatcctgtaaccgtaacgtcagctgaagtcaaaacgacgttgatggcgttgcgttggtctcctttcgaagctagggtttggatctttttatcggttaaagattttcctagagagcaagactcgtcgatgatttgtttcccgagagttagagacagaggtgatgagtttttgctgggtgttgcgagtttgtagtatttttctgtggttttccaccacgtggcaacagatggttggtggagagttttggacgtaggagaagtgtgtgtgagtgaggtaatgaagtcggagatgattgctctttgagatggtttgaatttgccgtaccagattaggttaacggagattttgccggagagaagagctcctttgtggtacttgagtagttgaaactggtttggttcttgtgaagctaggtttctagcagagacagagatttgaagaagagacaaaaatagaaagagtttaaacactaacgaatacatttttcttttttttgaggaaaagtgtaatagtgaaagaggtttggtttttgtctttgatgtttagattggtttgtgagatatatgagagtgtgatggggctatatatatgcctctctcagagtggatttattattattaaaaatggaaattagattttgaatatgaattttaaataataaagatggaaaaaaagagagaggtatgttataaataatgctttaaagtgaaagagaaagggaaggtgcagagaaattgaaagaaaagatacaaaggagtaatggaccattgtactgttgccagctaacgaatgatccatagttctacacaacttttggtttatatcaaaatttgaattttcttaattatgttatggtcatatagtcaaatgtcattataatttactcagtttcgagtgcgtcaggcttctgcctacgtccctgtgatatgcgccatagctcgatgcaaacatagagacattgaggcgacttgggaggcgctgaagtacgcgaagaggccaaggatactcgtattcacatctactagtgacattcacatgaaatataagttgaaaaagactcaagaagaagtgattgagatggccgtgagtagtattaggtttgctaaaagcttgggcttcaatgacatccagtttgggtgcgaagatggcggcaggtccaaatctttaaacctttatatatcaaaaaataatctcaatcacttcttcttgagtttctttgcgtttttggtttggttttatgttcgtttagtttgtattaccgaactaattttgttagtaacttatgtttgcgttgacgtttgggtatatttttggcaagaataatttataaaacaaaaggcatgaatggttgtgagtggtttttttatatatagtttttggattttagattttggtttttggattttgcaaaaaataaaaaatagataagtgggaaaaatgttatgttaagaatttggtcaggaaaagtgaaaaactcaaataagatggtttttagattgtcactaaaacattgttaagatctttcaaacactatatgtctagatcatgatagaaaaggcggttttagctgttactagatatattatggattttgtgcgacttgtgacattttacatatttgatcatgtcatatatatatatatatatatacatatataaatatatatttattggatttcaaaatatagtgtgattcaggtcggacaaggattttctatgcaagattcttggagaagccataaaagccgatgttacggtggtgaacgtcgcggatacggtagggatcaacatgccacatgaatacgcggaactcgtgacctatctcaaagcaaacacccctggaattgacgatgttgtcttcagtgttcat

SEQ ID NO: 153589 - DNA, 300 bp, Arabidopsis thaliana landsberg
gaaaaaataaaaaaaaataatgggtcatcgaacaagaatgatccttgtcctaaccctagttgtaatgtccatatggggttcggacgcatcagcaatgcaaaagacgaaattcgacgccccacttttgactgaaaaaatcgcgacaaatagatcgataattgtagatatcgaaggcaaaggagactacacttcggttcagaaagccatcgatgctgtccctgttggtaactctaattggattattgtccatgtccgtaaaggaatctacaagtacgtatacttttaagaggtttaaccatt

SEQ ID NO: 153590 - DNA, 8722 bp, Arabidopsis thaliana landsberg
  unsure (1)..(8722): unsure at all n locations
atggcttttaaaattaaaagaatgggatattatatgcccactatgatcacagattgtgttaagtacgcccagcggtgtaagcttgccaacttcatgcacctctaatccaccagccttaggagttgttttcggatcctctttgaaaatcatacataatatacttagtaagatcttacaaaaagccataaaatatacattggtttgtcctaagtcacgagcggcctctactaggttggttaactaaggtttcccgcacaaaaagtagcatcataagtaatctagtattacttaatgagccccagatctagacagagctaccctaatacctctaccctaagcagcatcgacggatactaatactacgacctaagaagaataaaatacgaataatgcaaataacacacagacaaagaaaacacgcaacaagcaatgcaagcaagacataatacacaaagaaaaatgcatgcaaactcgatttcctaatatgtagtggacaactaatgcaagtatgcttctaacaacctaggtaaggccttctacgaatccttgatctcccaggacatgcctccatctcttagacacaaagtctacaagagacatagcattccttaatactacatcgtcatgtagtgcccggtcggtagcgaccgagccccgagccttcgtataccataacggaacgtggttacacgcgacgcacaacatacggacgggatcctcatggttcggttaatgttagtcatctaattaaagactactaacatgacaacagactcatatactattatgcaactatcctatatacaaaactatactaatcaaacaattaatcgtacttaattaccactaatcacggttagttcccctaatctaggtttaactagtcctaatcatgcttagagaatactaatcctaattaggcatcactaatcctaattaactactactaaacctaattaactatcctaatcagggattaagcgaataattaagctaactaatcctaattaacctcctaagctatattaaggaaataaatgaataaactatcctattcacgtgctacttcacgtgactcaagtactcacatggattttcgagcggtttggcttctaaggtcttctcccgcgagctaggcattttctagtggatttttgggtctgaggaacaaatgggacgaagtggagtatttatagggtcttaagtcggtcacaagatcggccaaaacaagcacgaggtggcccggaccaatcaaaactcgataaatgtcactccacgggcgctccgggacactaatcagtctccgattgggttcctccattttttctggataaacatcatccaaaatggataagctcgaccctaaaggataaggatgaccggaattatagataagcttgagccttaacggataaacatgaaccacagttcaatcctggccgtccgtttcttcattccggcgaaacccatgatctgtcacgggccgcaagaacattgatagggcacacttcatctctaatgtctcatgagggtcaatgacacagatcaaggcttctttaggactataacacgtttcatgccagaattaaccgactaagctcgctaacgtcacttatccgcattttccgttcaatccctcgactattcacgacccatactcatattccactgcccaaatggattcccctatggtctcctagtccttctaaggttttctagtccttctaaggtttcctaaaactaaggttttcttaagctatcctaggtctaagggctagcctaatggtttcggggtttaccgataatcgcatcgtagctaagcttagtccgtctgatggagagtcattcctttacccgtggacttgatccattgcaatgctccttacccatgacttgccacatcaaatggccgaactggtcttgccttttcttggcatgatctcgcattttactcgatagactgcacgttcggccgcatagtcaaggtcatgggcattacatcattggaccattgcactgatcaacttgaggcgtacaatatgtcttggtcttcactgattacttttcaaagtggattgaggccgaggaatacgtaagcatcaaggattcggcggtaaaaactttcatttggaaaaatatcatatgcccgcatggtgttccatacaagatagtcacaaacaaaggaccacaatttatttcacacaaattcaaagctttctatttggattggaaaatcaaagtcagttattccaccccgcgatattgatagtaggattttactcaattaatccctaaaacactatcttgtcgttgtagtattttaggatgtcaatccaatccggtgtgatgcaaacagatgagatatgatcagaaagctctaagtcaagccaagcagaaagttggttggttctaacagtcctagtatgcaataacagaaatgaagtgaaactaaaagcaggaatggcaatagcaggcaagtgaatgacaaagaagaaatgataacaggcaatcaaatggataaacgattcctaaggatggggtaatcgaatagtgtggtctacttaatctattcaggcggttgacaaaacttcacagaagctatccctagacaacaagttcaacaacagattaattcactcccgtgatagaaatcctcaagcaaagctagacactgacctaaatccctttagcgatctctaactaagcaggcattatcgaatcaacatgttaaagtcaataccctctctacagccaatcccttggggtagagtcagantatctctggaattaataggattcaacgcccattaaacgccttctgagcgctggacgtctggactcatattccacattagccggggaggcaagcaataaccgcaactaatctaaaagagattctagtattctaaactcaaccacctaaaacgaccaagtaaaccacaactaatctatcccatcctcagaaatacggttcactactcagacataataaaagacaatagcaaagcaacgattgaaaacatgataacagaaatgacgaaagacttaaacgcaaactgaatatcaaatacttgaaagtgaaaatacaaaatcgcaggagaaacactacaactatgaaagttgcgaaaatgtaaaagttgatgagaaacggaataacaacggatgccttagggaaaaccctaaggggcagtttatataagcgagtgataagtgtgtattttgcatattttgagcatccatttgtcatcactttagcaccatatcatcactgttttataccatttctcatcatttgtcatcactttgcatgtttaggatagttttgcatgcatgttgcatatttgtattgatttcaggtgagttggagctgttaacgagctaattggaagaagcggacttgatcatatcaaaccactcgaccccgaggtcgagtagacgcttcacgacctcaagagaccactcgaccccgaggtcgagtaggagcttcaagatctcaacagatcactcgaccccctggtcgagtagaggacatcactacttcaccacatcactcgaccccgaggtcgggtgtcttcatcccatcacctgaccatcactcggtctcatcactcgaccacgaggccgagtgtcttcaccttcattgccagaccactactcgacctcttcactctacttggaagtcgagtatcaccatcaccaccactcgactgcatactcggtgacaagcttcagagccttcttcattccgcactcaaccatacactcgagcacaaggaagaaaagaagactccagatattcactcgacctcccactcgaccacatgggtcgagtacagttcttaatccgccgcaatacttcgtcgttttaagtattagggtttcggaatatttggctataagtagcatgtacttcacattttcgcaaacaagtttttatctagttttattccgcagacactgtgttctagacctttgtaatccggatttctctttatctattcagtattcagtatttgttcttgattttcgtttactattgttcattctgttatcatcctgctgttacaccgtcgttatcatgttttcatcttgttcttcgtttatgctttctgctatgatgtctgagtagtggataggtttctgaggatgggttagagtagtgtagaatgttcagtatgctaggtgattgagtattgattgatagatcccttctggattagttgttcttaatgcctattgctttctgatcaactggaatttgagcccagacatcttcgcgcccaaaaggtgttcgatgaaatgtccgaaccactaattccagagattcgtggccatgtatcaaggtattggttgcagagagcgttttggctttaacttgttgattcgtaatgcaagttaggttagctctcgtcaatggtgattgagtctgggactaggttaacttgagggtctctgttgcggtggcacttagatttggttaatgaacttgttgtctagggacaatttattgagcatgacaatcacttgtaaactgaggaaacgaaactactcaattaccccatcctcgggaattctttatctgattgaattctttgtttactctactgttgtttactgcatcttgtcatctgttgcttaatttctgcaattatttcttgttactcgacctcatactcgatcacccagttgtctggcaatagactgtgcagtcgagtatctgtgttatactttctgtctattactcgacctcacccagtgctctgcaaagagttgtgttggtcgagtgttttactatttctgtttgattttctgttttctgcatgttcacttaggactgctagaacacaccaaaacctattattgcttggcttgacttagtgacttctgatcacatcttgattgttagcatcacacccatttggattgacaacctaaaatactacaacgacatgattggtgtttcaggataattgactaaaaacctattatcaatttggcgccgttgccaattgggtgtttgtttgttacatttgagatttcagacttgcttagatcaagttctttttcaattttcttttcggttactaactgtgtgtttttcttgttgtcttcttgatccaggtacacctctgctgtatgcgaactcgatcaacaggcaatcagaacctccttttcaatgataacatcgatcgcataactcgcgaactcagagaaattagaaacacattcaaccttgtacctcagcaaccactcgaaatggctgacgaacggaatcaacaaaatggccctgtcaacattggtgctggagatgcaccacgtgatcaccgtcagaggaaagaaattgcacctcctgctatccagaacaacaacttcgatattaagagtggtctcatcttgatgattcaggggaataaattccatggtctgccaatggaggatccactcgaccacttggatgaatttgataggctctacaacctaacaaaaatcaatggtgtcagtgaagacggattcaagctctgtttgtttccattctccttgggcgacaaagcacacatctgggaaaagaatctgccccatgactcaatcaccacctgggatgattgcaagaaggctcatttctgagtggcttttcacagaagactggtgaaagcttctgtgaagcatgggagcgtttcaagggttacaccaacaaatgccctcatcatggcttcaagaaagcttctctgcttagcactttatgcagaggagttctaccacggatcagaatgcttctggataccgccagcaatgagaattttcagaacaaagatgttgaagaagggtgggaattggttgaaaaccttgctcaattagatggtaattacaacgaggattgcgacagaactatcagaagcacaactgactctgatgacaaacacagaaaggagattaaagcgctgaatcacaagctggacaagattcttcttagccagcagaagcatgtgcacttccttgttgatgacgagcagtatcaagtccaagatggggagggtaaccagttggaagaagtcagctacatcaacaacaaccagagtggctacaaaggttacaacaacttcaaaaccaacaaccagagtggctacgaaggttacaacaacttaaaaccaacaaccccaacctctcctaccgcagcaccaacgttgctaatccacaagaccaagtttatcctccacagcaacaacaaggtcagaacaaaccgtttgttccttacaaccaaggttttgttcctaagcagcaatttcacgggaactaccagccgcaaccaccacctgggtttgcacctccgcaaaaccaaggtcctgctgctcctgatgctgaaatggaaattgctacagggacaagcatcgagctccatggaaattgctaagaaattatctgaattgcaccataagctggactgcagctacaatgacctgaatgccaaagtggaggcattgaataccaaagtcagatacttggaggaaaattccgcatctacttccgctcaaaactagataagccaacttccaggaaaagcaattcagaatccaaaagaatatgctcatgctatcaccatacgctgtggaaaagcacttccaaccagagaggaacctaagatagtcaccgaggacacagtagatctagatggggaaaattttagttttagtaaagatcaagctaacaaggaacttgagcagccactcgagcagccactcgagcagtcactcgagcaaccactcgaccagtcacttgagcagccactcgacctatcactcgagctgccactcgaccacttcactcgaccgaccttcccaccaacatcaccaactgctccaaaacatgttgctgtcaaaaacaaaaaaaatgtcttcatttgtcatccttacaagcccccacttccatttcctggtcgacataagaaagagttagaagataagtacagagctatgtttgccaagaacttcaaggaagtcgaattaaggatacctcttgctgatgctctaacgcgtatcccggattcccaaaagttcctcaaagacttgatcatggagagaattcaagaggttgagaaagcagcagttatgagccattagtgtagtgccataatacaggagaaagatgaaccagagaagctaggagaccctggttcattcactctaccatgctccctaggttcattgacattcaataaatgcctttgtgacctagcagcatcagtaagtctaatgccactctcagtagctaagaggttgggttttaacaaatataaatattgcaatatcttcttgattttggctgatgggtctgttagacaacctcatgggttattagaacatttgcctatcaagattggaaatgtggaggtgcctacagacttcatagtgttgaacatggatgaagaaccaaaagatcccttgatcttaggaaggccctttttggctacagctggagcaatcatagatgttaagcaaggaaagattgatcttaatatggggaaggatttagaaatgaagtttgatatcaatgatgctatgaagaagccgacaatagaagaacaaaccttcttagttaaggaagtggaacagttagctggtgaactgctagtggaacttgaagaagcaaataattcaaaaactgttttgaccaaaagtggtaaaggtgggtatctccctagtgaaactttgagttctgagaagtcattagactcacacaaggcagcagttgactcagaggtttacaagggcttgatggggtctggcacaaaggttatgaaagctaatgaagtaagttcaacacatgctcgaccaactgattccaccaacaactcgaagaagcctccaacttgccctaaaagctcatgcttgaccaaacaactcatggcaagcactcagacgttagatgattggttagaactcaaggagagatctaaatggcaggacaaagccatacaagagctaacacatattgtgaaagagctgaaggatcaaatcaaggagctcaatggaaaagccaaccaagtaccactcaacatcaagaacgcccctgacgatggagccactattcttgtcagcaaagaaggatgtgaattcacatcggaatggtctagaggagaagactatcttgataaaaaagaagcttactgtgaggacatggcctctgagtacccaattgcagacctgtcaagaaaccctaatgagtatgatgatcactctactcaagaaagagaggagaccacatttcctctctgcaacctaccctgagcctaacgagtatgagaagtcaagcttagagacttaaaacaagctcacttgggaggaaatcccatgtctatctttgtacatatctttatttttccttgttgattttgatgcatttggttagtgtcttcaggagataagtataaagagacgagtgaaatggattctggctctgcgagtaaagcagtatactcgaccacagagaaatgaaaaatactcgaccatgttttagcttaaaaacgccaagagatcactcgaccgcggtgctggccgcagtagaagaagagaggtcgagtatcctcagagcggtactggccgccacagagctgatgaagtcgagtacccacttgctggagctgatacagaacagggcggctcgtctatggcctgagagcaatcacaggcagccattgacgaccaactccgttcattcttcgactaag

SEQ ID NO: 153591 - DNA, 681 bp, Arabidopsis thaliana landsberg
agagaggtttttcagtaggccaagaggaagatgagtctttgttcggtgatctcggtgatttacctgattgcgcctccgtgttccgccgtgggactgttgcgacggaggagcaacatcgaagatgtgattttggcgccattcctttctgtgatagttctagatgagtttgtgtgtgtagccaaaaccaaaagaaaaaaacacaatttttttattttccactgtaaaggtgtatcaatggtggattcatttttttaaaaaaggaaacccaaataataaatttaatatcatttgagagaattcaagtacaattaaagattctagcggcgacgaggattaccgaaaaggaaagtttcttccattgctcttaccacagagagtagctctaatgtgaagagatcattcgttgtcatgtctccggtgagatttgatccattagccggaggagaagagtcttgttttgtcggcttgagtatgacgaatctacagacaggacattgtcctttggtctttaaccatggaactatacattcctcgtgaaacatgtgtttgcaaggagtgagcatcactgtttccttgggctcgaagtcttctaaacacacggagcatcttttgtcgtcttcttcacctgagagattttgagtgtttcttgagctttcgcttcccgggtttttgtttctgtag

SEQ ID NO: 153592 - DNA, 772 bp, Arabidopsis thaliana landsberg
cacaaacaaatatttgctatctactctatagttttatatacaagtaatccaaaaaagatggcagttatcaagaaacacataaccttctcattggtcttgttgtgtctcattgtggtgtctccaatggctaacgctcagagtggtcttggtggtatcaatgtccccattatcaatggggttctcttttgcaccatcaatggcgcccctctcaatggcactcctgccccggctttcgctagttagttgtccattcttaacctatactatatatacgaactaataaaaagattcacgaaatcatatttatcttaatgacgaatattcacaaaaagataatatttatgatctctttgttgacatactaatttaatggtgcaaataacagatgcggtcgtccagctccagtgtggaaacctaaacagagtcgtagcagaaacaattacgaacattgccggattattcacgttttctacaaacggaattcagatatcccttcccacactcctcaacgattgtcgtatcgtcgtcccaacccctcgctccagctgcgacgccaccctcccttccaccggacaactgatctcccagttaaatctcgtcggcagtatcgtctccggcctcctcaacatagtcgctatcctcccaaccggttttatccccacaatctaactaaaaccaaactataagcataattaatgttcggttacagtgtgtttcccttctctatatatgttttgtgtcatgaccatttacgtttgtttgcgtatgcatg

SEQ ID NO: 153593 - DNA, 414 bp, Arabidopsis thaliana landsberg; identical to SEQ ID NO: 61005

SEQ ID NO: 153594 - DNA, 521 bp, Arabidopsis thaliana landsberg
aagttcagcagatcctgaatgcagcttgtacggcaaatctcgaattccataagagtgagtgctttatttacttttcgtttctctgttttctttgagcagttatatgttctgtgtactgattatcacttctccaagcagatgttgttaaccagcttgatgaaggaaaagacttgacgaaagctgtgcagagtattaaagacgcaaacaaacgtggagcgcttcacttcgctgcgagagaaggacaaactgaaatatgcagatatcttttggaagaactgaaactcaatgctgatgcaaaacatgaaactggtttgtgtttccatgtgttttacaatttgcagaacttttctatatatgtgaaagttgatcactgagattgttatgatttggtaggtgatactccgcttgttcatgctgcgaggcaaggacacattgccccggttaagtatcttttagagcaagaagctgatcccaatatagctagtgaactaggagccacagctttgcgtcatggcctgaca

SEQ ID NO: 153595 - DNA, 203 bp, Arabidopsis thaliana landsberg
ctttcttcttcactctcttcctataaatctctctctgcgctgtaagaaaaatatcttacaccaaacacaaacacaaaacacagattccttcttgctcttcttcttcctttgattgctttcaaagatggttggttctaagaagcgtccatcatccaagaacagacttgtttcttcttcaactcgctcttatgggaaggataagg

SEQ ID NO: 153596 - DNA, 208 bp, Arabidopsis thaliana landsberg
tttcactggttctcatctccaattcacttactccccggcgagtgcctcttctcctaatcgagctattcactgcatggcttccgattcccctcaatccggagatggttccgtctcttctcctcctaatgtcgcggctgttccctcttctttttcttcttcgtccgcttcttccgccattgatttcctctctctctgtactcgtctcaag

SEQ ID NO: 153597 - DNA, 712 bp, Arabidopsis thaliana landsberg
tgggtatagatagtgatgcagctgattttggcagtgaagtacgtgacagtttggctgaaggtagcagtgagggagattttgagtactcccgtgatcatgatcctgtagcatccaggtttaacagactttactccgagtcagataagaaacatattgatgccccaagcaagaataaacaacaagcaagtaaaaatgatggtccagattacattgcagataatgattcaatcggaagttttcatgtgaagattcaaactgatggtggtttttcgtttggttcgtcccaaaaagatgggcagtcaatgcatgcggaatctagtaaatcattatggtcaggcaatcacgaaacggtaaccagagataggaacaccgaacgtttgagtgcttcaacagctatggatgatatggttgcaacttggagacgaaaaagtagtgattcatcaagttctcatagttctgtgaaagataataatgcaacgtccataaaatctctaaactcatctccctcttctctgtcaaattatgcttgtgaagaaagaaagcatgctgataaagaatatgatagtaatgatagtagtgcaatagaggatgacaatgcgacagcacttgatgatgaagaggcagtggctgtccaagagcaagttagacaaattaaggcccaagaggagaagtttgcaacctttgacctcaaaattgtgcatcgaaaaaacag

SEQ ID NO: 153598 - DNA, 721 bp, Arabidopsis thaliana landsberg
agtttggtttacaggatgaaagtggtaatttctcagtttatgaggaccggacctcccgtttttttcctcctgctccaagacctccaaagatgcctggactggtagctggtgactccagtttcatggatgacggtgaagactctttggcagagctatccaatacctcattccggaagtttaacattctttgcactggtgatcgtgatgggaacatatgcttcagtatatttggaatatttcagataggaaagattgtaagtcgctcttttgactgtaagtaattagtaagccgtaattatccattcatgtattatggttgatgatgcttcatcatctttccattccgcttgcatatagaattgcaggatgcttaatgaatttcaacactatttctacatggaaattattttctgagatccttaattgttcgtttataacaagtaattaatattgttaggagtaaagtttacggtttgtaagtttcttatttcttttctagctatgagcaatattctcttagtataattttaatttaagtcttcatttctcttgtttcatgtgtttgctctgctgctcttgcattaccatgatcagaacatacacgagctgtctcttcctgtgcctcatctcgatgagcatgcctcttgcaaactatttaatgcttccatttacaaggtacttggatcctttcaagagccacgctttccaaatgatataaatg

SEQ ID NO: 153599 - DNA, 796 bp, Arabidopsis thaliana landsberg; identical to SEQ ID NO: 12218

SEQ ID NO: 153600 - DNA, 761 bp, Arabidopsis thaliana landsberg
gcgatgggggcggttcaagctggggtaaagagaatgatgctggtggtggatctagctggggaaagcaagacaatggtgttggttcaagctggggtaaacagaacgatggtagtggtggtggatctagctggggcaagcagagtgatgctggtgggggatctagctggggcaagcaagacggtggtgggggtggttcaagctggggtaaacaagatggtggtggaggcagtggttctgcctggggtaagcagaacgagactagcaatggatcgagctggaggaagcagaatgattctggtagaggatcaagctggggaaagcaagatggtggtgggggtggttcaagctggggtaaacagaacgatggtggtggtgggtcgagctggggcaagcagggtgatggtggttctaaaccttggaatgaacatagtggtggtggtcgtgggtttggtgaaagaaggggaggagggggattccgtggaggtagaaaccaatcaggcagaggaggaaggtcgtttgatggtggtcgatcatctagctggaaaacagacaatcaagaaaacacttggaagagcgaccaaagtggtggatcagactggaaaaaaggttggggagaggattcaaacaatagcaaaccatccggttcgtctgctggtggttgtgctggaaactggcctagctgggatactaactcaaagaaagaaaccaatgacaaaccgggagacgatagcaaatcagcttggggaaccagtaacgatcag

SEQ ID NO: 153601 - DNA, 397 bp, Arabidopsis thaliana landsberg
ttagcgcacgttagcatctctcccaagctgcattattattggccgttgtgtgactcccataaaggcttagggttccggattcaggtcggtgtcgccaccgcccttcttcgtgcttctcttccttctttgtcggatcgtcaggtttacagatcagcccttgtggaggatatgggtgaagaagacaccgcgacggtggatcagaacagtttcggtggtggcaaagattcattgcttcgtaatcgtcattcgtcgccattgccttcaccgacacagcttttttctaaagtgattacattgcctaccgtattaacccttggccgtgtagctgccgttccgattttcgtcgccagtaagtttacttttttcgactctgaattctggttggagtcattgtact

SEQ ID NO: 153602 - DNA, 855 bp, Arabidopsis thaliana landsberg
caaggagaactccaggtactgcaccgtcaaacaatatccaaggaagcaacacaagacagagtaatgtctgcatacattgtcagcaacgaggacatgcttccacgaattgtccctcacgggttccagcatctcaaaattctcgtcctactgcaacaaatccgagaaacggtactgatccttgtataatagtttagcaaacaaagatcatcgattagcttttgctagtatgtactatatactagtcaaaattcaagcaaattgtccagaccaagtcttccttattgacatgtaatttatattctagtattgttggttataatgcagatgaaagtacagtatcatgtaacacttgtggatcacaatgtgttcttcgtacagccaacacagaagctaacaggggaagacaattcttctcatgtccaacacaaggctgcagtttctttgcgtaagagtctggttttaccccaatttcttcgcataatccatttttttttccttttacatcactcaacacatcagttttttgtttgcactgcttgtaaacagatgggaagatagcataaacaacagtagtgggaatgcaacaacagggtctaatagcggcgggagcggtagacgtggcagccgtggtcgtggccgtggaggtagaggcggccaaagcagtggaggacgacgcggctctggaacaagctttgtctctgcaactggagagccagtgagtggtataaggtgcttctcatgtggcgatccttcacattttgctaacgcttgtcctaatcgtaatacctctaacggtaactatttctaagtctacttactacgaactttgactatgtatgtagcatgattaattag

SEQ ID NO: 153603 - DNA, 529 bp, Arabidopsis thaliana landsberg
aatcaatggttttgatcttccaaccagatcttattatctatctctttttaaacccttccttctgggctcttcggagaggtgatttatcaccccaaaaaaaagatttttaaagtctaaatccttttttctttctttccttcaacatgcctttaccttggaagaaatctaaatctagtcggatctctagattcgtatcagactttcaacaatctcctaaacatggtggatctctcgttgttgaaactggtttcccaacttctttaatcgatctctttgttaagaatcgcgatcgtctcaaaaaacaatcttcaaaacgtaacaacaagaacaacaaagcccagactgaaacgcgtgttttgtctccacctcctcctcatatgtctttgcagcgtcgtatgtctcttccttccaagcttgatccagctttggttacagaggattctcctttggtgagaaagatcgaggaaacttctgttccggagattgtccatgaagacgacggtggtcatcgcggtggagaaggaggagg

SEQ ID NO: 153604 - DNA, 590 bp, Arabidopsis thaliana landsberg
  unsure (1)..(590): unsure at all n locations
gaaggaaaggctctgaaaacactagcaacggctgctcggctcgacattgaagatttccttcagaagaannnnnnnnnnnnnnnnnnnnnnnntttgcatagaatatgattgattacataaaatggtattttcaagtataggaagttaacaacgtgagtgaatgatgttaaatgaaggtggaagtgaaagtgaaagagaactggagacaagacgaggggcttctcaagtactacggctatggaggacagatccgagctatgtagtatgtgggcttcaaatgggccttgaagaagatgagaaagtgcaaatgactcggcggctcaggttagctttttcccttctttttttttgtatttagccgatgccactcagtctagcttttgtttttaatctcaatcagttgattcctttggaaatttgaactctttcttcttttgttttgtccttaagagtttgttcaaccaaccccactgaatatctcattccatgatcacaggtagtagacttataattaaacaattgcatttaaatttgctttaaaagaaatgaaaaaggtgaagcgtaatttatggcgggggataagtagagtg

SEQ ID NO: 153605 - DNA, 402 bp, Arabidopsis thaliana landsberg
atgggtttcaaatggatattcctactctctctcgctcttctccaagctgcttactacaggcgactgaaatggtcggttctcaagtcccgcaagctggttcttgacgtggttaactaaagcgccgctgaaaagcttttgcattggcctggccacacacagtcgtattttcaacaaaggatgttaaatagagaagagcctttctctgggtaataacgtatcatcatttttatgtgtcataaaaatctttgatgagaccagttctcacctgaaggtgaaaagacctcatcgttcttctttttccttcgattattactagagagttttatgaggataatcacgaaaacttgtttttttcgcctcataataatcacacatgattttgagattatatcatttgttatg

SEQ ID NO: 153606 - DNA, 405 bp, Arabidopsis thaliana landsberg
cagccttgaaacacccgagaactcctccttctaattccgctgtagactatccatcaggtgagtcagaccatgtctcaaagcgaaccagacctatgggaatctctgacgaggtgagaaaaatcttaattaatattatatattttcttatcaataccaattttacatatttggtagtactagtttagactttaaacgtatttcttctttctccccatatgtaggtgagtctaggtgtgaacatgttaccaatgacattcccggggcaggctcatggtcataatcaaaccttcaaagcacctgatgacttgcccaagacagttgcacgaactttgagccaaggctcatctcccatgagcatggatttccatcctattaaacagactctgctactaggtctgactcttg

SEQ ID NO: 153607 - DNA, 754 bp, Arabidopsis thaliana landsberg
tatgatgcaaacagatgatatgtgatcagaagtcactaagtcaagccaagcgataacagtattggggtttctaatagtcctaagcgaacatgcaaaaaacagaaacaataacagaattactaaaatcactcgaccacaacaggctgatgccagaagtaagatgtggtcgagtaacaggtcgagtaaaagacacgatttgaaccagctatactcgactgcacagtctgtagccagacactgggtgtggtcgagtatactggtcgagtaacagacaggaaacgagacaactgtactcgactgcacagtctgttgccagacactgggcgtggtcgagtaagttggtcgagtaattgcaaaaactaacaaacaagcaatgagaacgattaagcgataacgataaaacagagaaatcaaatagacgagaaattcctaaggatggggtaatcgaatagagtggtatcctagcctatccgaatggttaacaagcgcaatcaagctatccctagacaacaggctcgacaacagatcaattcactcccatgatagaaatcctcaagcaaagctagcccagactaattcccattaacggaatctaactatacaggcaataaaaattgactgataaagtcaataaacgctctaaacggccaatcccttgggatagagacaaatatctcaggaactagtggatcaagcattccatcgaacaccttctgggtgcgggaatgcttgggatcgaattccagttgattag

SEQ ID NO: 153608 - DNA, 562 bp, Arabidopsis thaliana landsberg
aaaactttagaacgaaaaaagatgaaaatctttaactcatctcaaaacctattcttggccataacctttttccttgttctcatagttcatctaaaagcccaagacagtcctcaagactttttggcagttcacaaccgagcacgagccgaggttggggtgggacccttaagatgggacgagaaggtggctgcttatgcccgtaactatgctaaccagcgtaaaggtgactgcgctatgaaacactcgagcgggtcctatggagagaacatcgcttggagcagcggtacgatgacaggcgtagagcagttgacatgtgggtggacgagcaatttgactacgattatgattccaatacatgtgcatgggacaaacagtgtggccactatactcaggttgtgtggagaaactcggagaggttgggatgtgcaaaagtgagatgcaacaatggtcaaacctttatcacttgcaactacgatccgtcccggtaactgggttggcgagtggcttactaaaagaaactccatttaaatgttttcgatatatgttaccacatgtatatatg

SEQ ID NO: 153609 - DNA, 721 bp, Arabidopsis thaliana landsberg
ctcccgaaaatttaaatccctagctattaccttactcgtcgttctcttttgattttcatttcccgaagaagcgttttctcaggatatgcttctcgatctctgaggttttccccttcaacttctattggatgttccttttttggatttggtcattattatgtgattccttttttcctgatctgaattcgagatttttattcctttgattaaatcctcaaattttgcatgttttattaatttcctgattcagaacatgttttatttgatttagatgtataaagaatcttttactcaaatgtattttgattgatgcttacagaagaaagggatttgcaaatttgagaattcacattttggattaagatagaaacgatgtcgtctgagtcaccgaatttgcctgctgctgcgggaacagtaccagataatcatcctcctcctcctcctgttgttactgctgcagaagctggaagcgatgattcacctaaaggagtagcatcaaaactatctgctgctgggatttcaaattgggccaaaaacttgaaagttccacagccttttgcttccacacaaaacgactctggtgtcgaaaacaccgagaagtctgcgtttgcaaagtttacaagcgggttagggattcgtttataaccgaaatctcctcaaacgaatgacactaccacagaaggaacttcgagtgctacagaatctagttttattgggacta

SEQ ID NO: 153610 - DNA, 408 bp, Arabidopsis thaliana landsberg
aaaagtctcgaatttaattgattattttatttacacagatttcagttggcaataaaattcggaaaattaaataatgaaaaaagggaattagagggtacaaccacaaaacaagaagaagcaacagaccgtagcagtgatagctaaagattcaatgattgagacaaaactccacaaaagatcatcaactatggagagatcacccgacaaggacaacaatctcatgttccaaccagagctcaaggatgaaagattcacctccgaccaccggaatgcccacgatgacgacaggtacgatggtagatccatcaacgtccattcgggaagctgacattaccaattttttggctctcttcttcttcttcttctctggtttctaggtttgggttctttttggttccgaaattatta

SEQ ID NO: 153611 - DNA, 659 bp, Arabidopsis thaliana landsberg
cttgctttcaatcgacgaaggagttttgagttgaggaagtgagtagaaatcaatggaggaagaatctaagaatggcggaaccacgattccgactgaagaattggcggtggttgcggtgccacctgtagtagaagaagaggagccgatggtcggacctggaccagctccacgaggcaaacgcaagcgtccgcttcaattcgagcaagcttatcttgattcgcttccttctgctaatatgtaagtatgtcttatgctttggaaccctctctgttcctaatcgaatcaagttttggggtttagggttttaatttgagcttattggtttagtattgttgttggtatatatgagcttattatctgtgaattggtattgaaaaagtaactcttgtatattttttcactaggtatgagaaaagttatatgcattgagatgtagttacacatgttgctgtttcaacagctgagttctttataagtggaagtatggatggtaatgtttctcatctttgtgatatttatgatttcattctggttttgtaatggcaaagcataacatatgtatattttgcataatctaggtcacttgaaattttggaagaaaaagggtgttggtatcgagtttgctaagcatttccgctcccatctcggtccaattgaag

SEQ ID NO: 153612 - DNA, 682 bp, Arabidopsis thaliana landsberg
gcggttttttcacaattgatgagctacaacaagcgtgtgttgaacatggcatggctgatgttttccttgaagacatcatcaaagaagttgatcaaaacaatgtaagcttatatgatgactctgttccacattcctcgctaggctaatgtcgaggcatcagctgataaaaagtcttataggctcttatgttggtctgaacaggatggaaagattgattatggtgagtctgaggagatgatacacatggtaaatgctggtgcagtaagattgagctttggaaataatgaaaacattagcatgagagacgcgtagaggttgatctccccggagtttaatattttagtgcgatcgtgactgcgaaaatgttcttattcatggaatcaacaacctcaatgctcaccacctagaaggcgatgaaagaagaccaaaccggattcatacctgtggatggttcgagttttgtttaacgactgtgtgattaatcgtcaagtagttttggaggttttttctttacctctttgttgcttgttcattatggccattgttgaagttagtgagctttgttcatcatctgccattgttaaactttgttcacttgtatttgaaaaaaacaaaaatgtctttgtatgttgtgtgatttctaagcatttttactttgaaaatctatttcttcttttttaga

SEQ ID NO: 153613 - DNA, 692 bp, Arabidopsis thaliana landsberg
tatcttctctgcgatttgaatgaacaaatccaacttcattcacaaatttcaccactccgcaaaaccatatacaatggaagataacgaagaagaagaagaagaatcaccgacggagctaaacacgatcaccggtttaagcggttttgtagctatctctcccgataagctttctctcaaatacactggcgtttctcaacacggtcaccatgtcggcgttgttcaagctaataaacctgctccgtgtaaacgtttcgcttattacttcgagatttatgttaaagatgctggtgttaaaggacgtgtctccattggtttcactactgatagtttcagaatcgcgagacatcctgggtattgtttagatttgattaggttcttaaagatctcgaattttgtttagttgttttaagtttgattaggttcaggatttggttcaattgtgtgatttaggatctaaacaaactaaagttttggattttgtttctatatcattgttgctgagcattgaaattgtagttttgtgatatttcttatgtaatggttagatgggaactcaacacttgtggttatcatggtgaagatgggcttatatatctaggaaaacgtcaaggtgaagcttttggtccgacttatacaactggtgatactgttggtggtggtataaactatgattcgcaggaattctttttcac

SEQ ID NO: 153614 - DNA, 395 bp, Arabidopsis thaliana landsberg
ttgtttatgatctgttcaagtaaaggaacggtcgtaattgctactagaagctcatttcccagattactaaacgggattcaaaatcgaaatgatgttccgattagtgtcatagctactcgacgatcatcaatgtcggtgcaggtgtttcagatgaggttaaaatcatcacagcagaagaggaagatgaacattggttgcggtgtttccccttcttcgccgacgacgacggtggtagatgagcaagtagccattaggcggaaattggcaatgagacgggttttgcaggataacggtggcgatggaagctccgtcagagatttctcgctattcacgaccaagagaggtgacacgttgttcactcagtcatggactcctgttgactccgctaagaacag

SEQ ID NO: 153615 - DNA, 966 bp, Arabidopsis thaliana landsberg
gccaaggtcacgtaaaccctctacttcgtctcggaaagctcatagcctctaaaggcttactcgtcacctttgtcaccacagagcagccatggggcaagaagatgcgtcaagccaacaagattcaagacggtgtgctcaaaccggtcggtctaggtttcatccggtttgagttcttctctgacggcttagccgacgacgatgaaaaaagattcgacttcgatgccttccgaccacaccttgaagctgtcggaaaacaagagatcaagaatctcgttaagagatataacaaggagccggtgacgtgtctcataaacaacgcttttgtcccatgggtatgtgatgtcgccgaggagcttcacatcccttcggctgttctatgggtccagtcttgtgcttgtctcacggcttattactattaccaccaccggttagttaagttcccgaccaaaaccgagccggacatcagcgttgaaatcccttgcttgccattgttaaagcatgacgagatcccaagctttcttcacccttcgtctccgtatacagcttttggagatatcattttagaccagttaaagagattcgaaaaccacaagtctttctatcttttcatcgacacttttcgcgaactagaaaaagacatcatcgaccacatgtcacaactttgtcctcaagccatcatcagtcctgtcggtccgctcttcaagatggctcaaaccttgagttctgacgttaagggagatatatccgagccagcgagtgactgcatggaatggcttgactcaagagaaccatcctcagtcgtttacatctcctttgggactatagccaacttgaagcaagagcagatggaggagatcgctcatggcgttttgagctctggcttgtcggtcttatgggtggttcggcctcccatggaagggacatttgtagaaccacatgttttgcctcgagagctcgaagaaaagg

SEQ ID NO: 153616 - DNA, 1397 bp, Arabidopsis thaliana landsberg
gtcttagaagaaaatacccagtccatgaatacatctcagcgactcttgcttgttcttggtttgatcctattcacattagccgatgcgcaaatgtctccaaatttcagtatgattgggattatgatgataaccggtgcattgatcatggatgctttcttgggtaatctgcaagaagctatcttcacaatgaatcctgagacaactcaggcaaggaaactaaagaaaacacggttctttcggttttcctttaccggtctgttttgtttcgtttctgagattaactcttgttatgtgtgttgtgcagatggagatgcttttctgctcaacagttgttggattaccgttcttgttcgttcccatggttttaaccggagaggtttttcgtgcgtggactgcgtgtgcacaagtaagtaaacaacctctgttctcttttttctggtttgacttttggtcaacctttaaccaaaccaagttaaccttatgagatagtcgtccatttgaagtgaaagtgacaaagagtggaaccttttatttggctttgaaagtacttctatagatttgactcggtttatgattcaaaccggagttggactcagtttagagaaaaagtcaaaatttgtaggattcttggtaccacgaaatgagagagatcattgaccgacgacgtgcctctgaatctgccaaactttttaaaagccaaattgtctcttttaaattcattgattccataacttaagtaccaacgtggaatattttatagtcaaacggtttaatgattcattggttgacatatttaaaaccaattgtgctttgtttatatttgcagcatccgtatgtgtatggagtgcttgtatttgaagccatggccacatttatcggtcaagtctccgttctctcgctcattgctctctttggagccgccacaactgccttggtaaatatctaatcttatctttgaatactcatttgaattttaattgactcaatggtctaaaatcacatttcgttgcgtgaatataacaacggctaggaaaggggttacattgttgctgtcgtatttgatattcacaaagccgttaacggaacagcacggatcaggcttgctgttgatagcaatggggattgtattgaagatggttccaatggatagtaaagctccggccaagattccggcgagaccagcggttaggatcgcaggaggcgatggtgatagagaagaggacgaagaaaggaagtcattggtttgagaatgtgccatgtatttatatatattttatctcacaaattcaaagggtttatagaataatgttggatgaaggagacacaaaatagagttaaagttgtgtcagagacttgttattagattctaaagtgaaattgcaaaagattgagctgtt

SEQ ID NO: 153617 - DNA, 538 bp, Arabidopsis thaliana landsberg
attttcttggtgggaatgcttctctaaggaacagaactgagacaatctatgcgggtgggcaagaaactcatggagtactatcgagtccgtcagagctggtttgggctcctaatagaaatacacctgaccaactgtattatcactcgatttttcaagagaaaatgggttggaaggttcaggttgttgacgggggactttcagatatgtacaacaacagtgttaatctagatgatcagcaagttaagttcttttggaccatagtaggggattcaatatcgattgcggctcgtggtgagaagaaaagtggctatcttgcaattggttttggtagcgaaatgacaaacagttatgcttatattggttggtttgatagaaatggaacagggcatgtaaatacttactggatcgatggagaatccgcttccgctgtgcatcctacaaccgaaaatatgacatacgtgagatgcaaatccgaagagggaatcatcacactggaatttacccgtcctttaaaaccatcatgcagtcatcgagatag

SEQ ID NO: 153618 - DNA, 1134 bp, Arabidopsis thaliana landsberg
atcattcgccggataagaatattagctcagagagtgacgatagagagagtgaacatgcataagtactttggaaatgcgtacaggggagatccaggagtgccacatgcagatgcagatcgtttcgtgaatatatggattggttcagcagctttccccgttcttacctagggataatcgtaacatgtggcagctctctaaccagttcaagtatttctcgctctctctctctcttgaactttcgaattcgaatttgggtactttcggtttttcgtgtttgatttccgaattgggtttcttgttcatgtgtttttgttcttctctgaattgctccggtgagaattatgttttgattcttttggtttgactgttaaagttcttctttttctgctacattagattggttatagcgcaatgtttgaagatttagtaatgtcagaagatactttgatgtctttaggcgaattgaatgaagttgttatcataggcattgctaaaacctcaggtttcaatatcatctaatagttgatggagtgtttagtcctatgatacatagtgtgatcaactgtgtttaaggtcttgtagatcaaataatcatgtttctcccggataagttctgtggcttatccaaagtatggtttttgtatggttgtctctcatactctctaatgtggcagttaccatgacaagtggatgctgtttgagcagtaccactggaaaaaagcaagggcaaagaagcaaccttatgaattcaaggttcttacctttgcctaagaactgaatctgtctttcacaacataactaatgacaacatttctcacacgtttatttgattctactctttgttcctcagtggaataagatacccaaagaagtcagggactcgtactattacaactggccagtctacttcccatagaagtgtctctgtgttgctgtgaatcagaagagaaaccaaacacttgtggaacttctatggaatctatctctatctcttcttgatctgttattcgtagcacttttggattttaagttttttcttttgtaatgatcaatctctcaactcttcactgtttcatctcctctagttgactctcttatggaaatattgaatctctttgaagagcagaaccagaa

SEQ ID NO: 153619 - DNA, 628 bp, Arabidopsis thaliana landsberg
  unsure (1)..(628): unsure at all n locations
gcaccattggaacattcaacatgtcaatctcgttaggcttagagnnnnnnnnnnnnnnnnnnnnnnnnncttcttgtctatgattacatgccacaaggatccttgagtcctatctgtctagaacaagccccaaattgctaagctggagacccgtttcaggatcgcgttaggtactgccaaagggatcgcgtacttgcatgaaggatgcagggactgtattatacactgtgatatcaaaccggagaacattcttttggacagtgattacaacgccaaagtgtctgattttggcttggctaagctccttggacgtgacttcagcagagttctagccacgatgagagggacatggggctacgtggctcccgaatggatatctggtttgcccatcacgacaaaagctgatgtgtatagctttggaatgacattgctcgagctgatcggtggtagaagaaatgtcattgttaatagcgatacactgggagagaaagagacagaaccagagaaatggtatttagagaatgtcttttacttggaatcaattgtaagagagaaaaaaacatatacattgaatcaatgaatcccttttcaggttctttccgccatgggcagcgcgtgagatcataca

SEQ ID NO: 153620 - DNA, 213 bp, Arabidopsis thaliana landsberg
ggtgacttgaatcaagctatatcaatggtttcgtattatggttcatcttcagaggccggggagattcgtgggaaagctgtctatattcaggtactctaatggccatgagattgttaacaatcagagtcctggagatgtccctggaaatgtcgtgttggttacctttgaaggagtggaatctcacgaagtcagcatggatgttatccatctggt

SEQ ID NO: 153621 - DNA, 1193 bp, Arabidopsis thaliana landsberg
atggcgcctaagatcctccgggaagacaacaaatcggttctccgacttccttacagaaccatttccgagtcatcatcttctacgattgctgaagtttccagcttaaaagtgcaggcagcagttctcgatatgatcgccgagatttccagaggtaaacgcagtgcttcagcgttagatgcagtcttgaaaaaagttgcaggattggtcgtggggattgcgtacagcagtgtaactggcctaagagaagcggctttgaatgcgttgagaggacttgcttgcattgatcctgatctcatttggattctcttagctgatgtgtactattctctcaagaagaaagatttgcctctcccaccgtctccggagtttccagatatctctaatgttttgccttctcggccgccagaagattctcgtacaaagtttctctatgtagaatacggtggtcggagctatggttttgagttggagtttagctccgttgagatagtctttaagaaaatgcagtctcttgtctttgtagaccaaatgcgttgttaatactttgcttgtagtaaatacttttctgaaaacagcagtaaaaaaaaacttggtaatatagttcaagtgtaacattgagcaaaaagctagtaaaaagggattataattgtattggggtaaataaaaacattgggggcgagatgcaaaatataaaagagtaaggggtttaagtgtaatttcgacatcgagacccgacccgacccgggattatgaatcctgatcgccgcggggtccaaataaatatatgtcagctcctccgttcttttattttagtccgtcgggaaataatggtaagcgaacggagctccaaggagaagaagagaagcagagctcggagcgaagattcttcatcttccgattgtatgttcttcttcttcttctcctctatgtatatactttttcttccgattcccgagaaatgccatcaatttatctatctgtgttttcgattagattttgtagttggcgttgagagtgtgacttattgttgtgaatgacataatctgatacatagtgatttatgaattgacagacgaagagaaagttaagaggcatcgaggaacagagaaagatgatgaaaggagaagtaggagaagtgataagaaggataagaaatctcacaagcaccacaaatccagtacatgtaagatact

SEQ ID NO: 153622 - DNA, 478 bp, Arabidopsis thaliana landsberg; identical to SEQ ID NO: 58123

SEQ ID NO: 153623 - DNA, 387 bp, Arabidopsis thaliana landsberg
  unsure (1)..(387): unsure at all n locations
ttttctcttcctcacgcaaagcaatacatcgcagtctcccactgattcagcagctctttgaactactcttcgacaatggccgaacgtggtggagaacgtggtgttgagcgtggtggagaacgtggtgatttcggacgaggattcggaggccgtggaggtcgtggagatcgtggagggcgtggacgtggaggccgtggtggtcgtcgtggagggcgtgccagtgaagaagagaaatgggttccagtgaccaagcttggtcgtctcgtggcggctggtcatatcaagcagatagagcagatctatcttcattcactcccggntaaggagtaccagatcattgatatgctcatcggtcccacattgaaggatgaggtaatgaaaatcatg

SEQ ID NO: 153624 - DNA, 507 bp, Arabidopsis thaliana landsberg
atgatttataaccagaacctgccaaaatttgtggccactagcttcaaaagctcatgctctataaatacgatgccgtctcataataggtaagttacatggtcctgtctagcaagcaaattaagatcataaaaaggtttagagcttttctaacaaacgtcaatgcaaatcatcatcaaagcaatcttcaaatcgtcatgataacagtagccatcgcagccgagttgcttgaagaatacacggcggcgctcacacgcatcaccgccacactcctccccccaccacctacaagtcgccgtcgaagtgtccgagctcctactagcggccgagctgactcttccttgcctcgtaacgataacaactcatcatcatgcgctccaaattacaccgcttttctcttaaatttctgattatttttttaatagacgaagagattttcgaagtttctttgtcttgactgtaataatgtttgtgttattcaattggaactttctatttattttcgatatt

SEQ ID NO: 153625 - DNA, 532 bp, Arabidopsis thaliana landsberg
attacagaaatggcatcttttgtgatgggttacttcttattgttcgctgttgcgttcgtgtgtttggatgcgaggacggacaaaacgcaagattatacgtcgtttcagtaccataaaggagctctcctcaccggagacgtttccatcaacctaatctggtacggtaagtttaaaccgtcgcagcgtgcaatcgtaaccgatttcgttgcttccctctcgtcttcccggagatcgaccatggctcaaaatccctcagtcgccacgtggtggaagacggtggagaagtattaccaattccgcaagatgaccacgacacgtggactcagtctctccctcggagaacagatcctcgaccaaggatactcaatgggaaaatcttttacagagaaaaacctcaaagacttggccgctaaaggtggcctaagcttcccagataacgtcgtgtcgacctcaactgacgtgacggtccaaggcttttgcatgaacagatgcgggtcacacgggactggttccgggccaggcaagactggat

SEQ ID NO: 153626 - DNA, 577 bp, Arabidopsis thaliana landsberg
atcacggttcagagaacagcactaaacagtccacttgggcttgaagtccagttgcacattccagaagctgtttgtccagccttaagtgaaccaggtttttcagatatattctcttagttttcagatagcaggttgatgcagatggataactaagactactcgttattctttggaatagggttgcgtgctcttctccgctttctaactggaatgtacttatgcctaaaccgaggagatgtggatccaaaatctcagcaggtcttatatttctcactcacagttgatcttgttaaaggaacggtttacatgaatttttgttctcactctttcatggtatgcctataccagtctgctgaagcagctggacgttctcttgtctccgttcttgtggatcatgtatttctttgcattaaagatgctggttagttaatttgactcaccacatgttagctaaagagtgcagtcttgcatggaaccattactcttgtatcctgggtttaacatttacggcctttttacgtttcagaattccaactggaactgctgatgcaatcactccttttttctcgggtatgtt

SEQ ID NO: 153627 - DNA, 1011 bp, Arabidopsis thaliana landsberg
gtagaagcaggtgagtatcaatggagaagagctacatgaagcatgagctatggggagatggagattttcaagaagatgatgtgtgggatgttcttgatggatatcaatcaccgtttatgattagtagtaaccatacgactaaaccttctttctcaacccaaactttacttccaagcgaacctagaatgattcctgagaggcagaggacagaaggaatggcacctatgagacaacagtcggtccctgtcaatgtccctgattggtcaatggttcaaagaaagaagacaaagaaagttgttgatgatgagaatgtgtcaccggaggaatatttcctgcggcgcagtcgatcatcatcgtcgtcttcagttatggaaggagttggaagaaaactgaaaggaagagatttgagcaaagtaaggaatgcaatattgaagcaaactggatttcttgagtagaccaagattgtataaatgttaagatatgtatgaaccgaatgcttagatatttaccttagttattagaggtgatttcatttcttaaaaactctagtttggtaagatgtatatatataggtggggctttttctattcgtttggtttttaatataggtgatttgatttggcatagtaaaacaataatacagatataggtgaatttttttttttcttttggttttaataaatagtaggtgatttgatttggcaaaaataaaactattgttgaacatcaatgttataagattaattttttcttaacctaaagttaggttgtgaaaaaagacttgcaagtaaagattgtatgagcttaagattcattgagttacacgattcgaaccgtcgatgataaagactattgatcttaattaagaaaaaaaaaaggaatctgaaaaaagtagaggtgagttgtttgtaagttgaaaatcgttgaattaaggatcatgtgctgaacacgtggtcaatgttgattccgtttgtcgccattcttcgacagattcctgaacgatgcatgtga

SEQ ID NO: 153628 - DNA, 863 bp, Arabidopsis thaliana landsberg
tatcacatgaagagatatgcgaaaatgattgttaagctgatgaaatcggaaaacttgtatgcttcccaaggaggacctatcatactctcacaggtttacattatggtttttcatgtatgtttccttcgaagtttttttttttttttaatgatcttaaagttatgtgcaaaacagattgagaacgagtatgggatggttggtagagcttttcgacaagaagggaaatcatatgtcaaatggacagcaaaattggctgttgagcttgacacaggagtgccatgggttatgtgcaagcaagatgatgcccctgatcctttggttggtttttatgtttgtcctgcaatgtggctcatctgccaattttccacttctgaatccgtttttttttagttttcttattgtttctatggtgcctcaggttaatgcttgcaatgggaggcaatgtggagaaacattcaaaggacccaattcacccaacaaacctgcaatatggactgagaactggacgagtttgtatggtcttcactcaaattcactacattattgtgtacttcccaatccccagatataaactactaactttcagctgacccctttgtatagttatcaaacatatggtgaggaaccattgataaggtcagctgaggatatagcgtttcatgttgctcttttcatcgctaagaatggaagctttgtaaactactacatggtaccttttccagtctcactaaaaaaatctctaatgtataagagaagcaagaataatgatgatttgacattgtatcttattttagtatcatggaggaaccaacttcgggagacatgcttcacagttcgtaatcaccagttattatgatcaggct

SEQ ID NO: 153629 - DNA, 421 bp, Arabidopsis thaliana landsberg
ttactctttcgttttctcttcgcttgtgtatctgcgagcgatttctcgaagcacgaaaatggcgtccgtacgactcttcttcactttaatctccttcgtattccttatatccacctctgtttccgaatccaaagtattggatcctcctcacgtcgctgaatcattcaacgttagcctcatccaggttcgtctctctttccccgtttgaactttccttcatcgtctttgggtagaaacttttcccgagaaacttatgattttccttgtatgcgtgtaaatttatatctatgatgcagaaattggggaatacttgtgcttacacagtgatcatctcgacgagctgttcgtcgactaggtacacgcgcgatcagatcagcgtcgctttcggcgatggctatggtaaccaggttagatttcttcg

SEQ ID NO: 153630 - DNA, 831 bp, Arabidopsis thaliana landsberg
gtcagaaccaaactcgtagacaaaataatagaccactagcctgcacgatctgcttcattaactttgtaaatttatttccatttatccctgcgataatagacgcagattttaaccggccaaacttctcctccgagtagctaaaccctagcgacggcggcagcaatggtctagattcaacgtatcgtttcgtggtttatcgggtatttctagtttccaattctcctcatcaaagtttcagtttttaatcaccgttgatttttctattcaatggtacttgaattttctctggaatgatattcaattgttctgttttgattgcctgattgattacagtattctccttttttttttcttttccttttctgtgaatttatgagtttatggatatactaatatacatatatatcttgagatctgccattggtcttgtttttggcctagtataatggtttgacaaaagctccttctatcttgtattgaaggtgacactttggtgagagggagagtatttgtgaaagaaatcaatggatttagattttgatgatcaaccctcggatcatgctgcaccagcaggtaattggggttttcttttgtccactttcattagtttcatggctttttgtttgatgtggctgaaacttatgaatttggatttaatagttagggctggtgcaaggtttaaaccaaaaggcagaccacaacccaagaagaagcaagtctctctttccacaacacaaacagcagtgtgccgggatgttgcccagcaaaaactctccgcgcgaagtgaagatctcgtccctctagacggatcatcggagattcccagcagtt

SEQ ID NO: 153631 - DNA, 753 bp, Arabidopsis thaliana landsberg
actaaacattgaaaaatccaaagctcccattctaaaaatttgaaaatgatgaagaacgcttctctcaagctcccactcttgatcttcattttggtcatcacatctagtaagtttatttttttgtttgtcaacaattgtaggaataaaaccaaaaaaataggtgtaggaagttgtttttgttacaagtgacagaaacaagaagtaaaaacatatgaaaatcatactaactgaatatctaaaatatcgtgaaaacatattcaatcctgaatctttttaagtaataattatattgttttgcaatttgacaagttttaagagcgtagtggataattcatttctaggttttgattcatttttggtggaaaataacatttaccaacgagcaaaattttggtttgatcttgatcgtattaacttttagaacttttattagtggatggaaatttctaaccttaaagccattttgtttatgcaaatgatggatgagaagatcttggagcagaagcaagaaagctggccggagttgctgacgtaattgttgaaggtaaagccgcaagtccacagtacggtatcatcgatgagaatgacactttgaacaaagccccatcttgcaagagggacatcgactgtactttacagtgtaacaggggaggattctgcaacctactccttcaaaaatgtgaatgtttgtaataatatttacaatcgcattataatctaagtttatcaataaaagttatctatcgattcttc

SEQ ID NO: 153632 - DNA, 1446 bp, Arabidopsis thaliana landsberg
tacatataatcacatacaagagtttatgcagagagtacatggacgaaccacgagaccagaatctatggactcaagacatggcaaatctgttaggaataatcaacgtacagtaagttttctctcaatgtcatcaatgttctcttatggaaatcagtattgtgtatttgtgattctcataccggtttttgatcattttttcgcagggagacgaaacgagaaggaaattgcaccttgcatagaagtcaaaacttaaattcttttgattacttttttcttgccagagaatatgataggttagtgtatagatagataggttttataccacgaaacattgtcccaactcccaactcagccaaatgatgtatataagaaagaaagaaaacacacactcccccctcttcttgcaaatctcctagtggatcttccatcttcagaattggtgagtttttggtataacaacaacaccaacaaaaaagagagcatttttatattttgtaaagaatgtaattatagattatgtatggaaacgacttcagataacaatgtgagttggttgatgacgaaaaccagtgaacaattaacacaccaatgcacaattgatacaatagacatcgaaattttggttcacttgccaatgacatttggtaaccaaaattagaactcgttactcgactttgatgttactcgactttgatgtttcttttaattctgatcaattattcactatcacgggattgatcagaagaagctgaacagactggtattgtgactcacgttaacctgatgtggccagtggcctatcggaaatgttgagaagaatgagtggactcgagttaactcggatgtgactcatcaaggagaggtttggtcgtatatgtgtcatcggtttacgaaaccagttagtcttaattttcagtttagtatagtgatcgattcacattatcatcatgatgagaatactaatcctgcacttgaataaatctcgtattaaactaaactgttgtttttttatttgttgcgttaatttatagaattatgtatctagctacatgcttacactgtctggctcgaggacatagatccattaatacattattagattacaaaagaatcaaaagaaaaagatatctattcctcttcttccaattattatcgagttattatttgattcaggagaaaaagaaaagaaaacaaaaaccagaagaatgtgatttttctcctcctttaattttgttattcaactatggaaaaaagggaatgacggattggtcaaatcttctttgattatctcgtttttattttacctattggagcaagaaaaacacgttggagtgtgcttcaagcctgatacatcgaatgactccaagaacctttgatccgaaactctagctttagccgctgcaaatcgcttatactcatcgagtatcgatgttatgcgccatttct

SEQ ID NO: 153633 - DNA, 1189 bp, Arabidopsis thaliana landsberg
  unsure (1)..(1189): unsure at all n locations
caaatcaatggctgtttcagtttcaatcctcaccgtcgtcactgctcttcacctccttgctttcgtcttcngcttcggtgccgagcgtcgccgtagcaccgtacccaatttatctctctcttactaaaatttgtcatttttccgatttgtgttgtgaattcgtgttttcttgtttattcaggctgtgccggttccggatcagtacgatgagaagactatttgtaagtacggaactgaggcgtcgacagtgtacggtatgtcggcgtttgggttgcttcttgttagccannnnnnnnnnnnnnnnnnnactaagtgtctctgttttggaaagggtcttgttactggtacttcttacactgtctgggctattgtcttcttcgttgtttcttggtaaagtttattcctttactctctaattgaatcttttgtacatcaagatttgaaattgagttgatttaagtggtatttggtaaccaaaatttgaaatttctgattaggggcttttaagttagatttggaatgaactaatttgtgatttgattgtgtatatttatgggttttaactttgaagtgaaaaggaaagttttttccaactcttttcagtattgtgaacatgaaaagtagacacttttagattagtgggtattgaaatttggttatgtgatttatgatttataagtcactttgttgcaaacttgacttcttatttacgtccttaactcttacttgtgagttgtggatgtctctatctaaagacaatgatagtggtaggcttcgtcatggtcacaattgaatattctatatgtttggttttacagtttgttatcttaccaaactatgtggattctataagaaaagaaacgaccttacaagaataagaactagttagttcatctctatgtttgagtacgtttgtcttagtcattggttttgtgtatctttagggtaagctttttaggagctgaggcgtgcttgttgggtggatcagcgaggaacgcgtaccacactaaaagtgaaggcatttacaaagggaaagagctttcgtgtgccgtcttacccgttggagtctttgctgctggagctgctttcactctcatgtctttgattgcaaccattctttactacttggaacattctaaggctgatactggcggatgggagaagcatcagaacgatggcattaacattg

SEQ ID NO: 153634 - DNA, 424 bp, Arabidopsis thaliana landsberg
cggaatataaactctcgacgacgaaaatctcaaaatacccaaaatctcctccgactccgagctatggctacgtgttccatcttgccgtcaccgtctttctctccccgccggcgattctgtagcttttctcacaatcgccggtctctaccttcaatattcagtttcaacaaagagcgtgtctcacgaagagtcttctgtagctccaaagagaacgatataaacagagatcggaaccagtctaccggaattcaagtctacggagaaatcgagaggtaaagccactcttgttttaccgatttttgtaactaacttcatctttaagctcactgtggtggattcattacgatttacaggttattaacagagactgttaaacactctcagagtagctccggtggatcctctgattggtcagaagttgagg

SEQ ID NO: 153635 - DNA, 632 bp, Arabidopsis thaliana landsberg
tgactttgtttttgctttatttcagactattggttatttgttttgaaacttgttgtacttattttcttatgctttgttggaactattgatgtgtgttttactgatttaacagtctaactggagaatccatgtgaaaacactaactaaggctctacaacaatgcgcagaattcacaaagctaagcgaaacgaccagagtgtcaatcgacaccaacatggtatcgatcgacaccactctcaggtggcaactcacgttttctaacttttaacttttgcttacttctctttcgattcctctaacttaataactatggggacagtgttatctaagtctgggggagttagtgactaacttcatctgtttttttcttatgagtcagttgtgtcattttaacttagatagtcgttttattgagtcaaaacttttgtctgaaattatgatctatctctcgagtttattgcctggattgcttaagtactgcacattcaaatcaatccgactaatggaaaatccagaaagcaaatcaacaaacttaaggacatccattcccaacataatccacaaaggctggagctaatctcactgctcttccttttacctcatcaaatcggttagtgctcataggacttggc

SEQ ID NO: 153636 - DNA, 1898 bp, Arabidopsis thaliana landsberg
ctcctcagctcgtcctcaagctcctcagctcgtcctcaagctcctcagctcgtcctcaagctcctcagctcgtcttcaagctcctcagcgaccaactcctcgtctagctatcagctcatccctcgactgcaaaactcatctacctcctcgcctagcggcagttcgtccattgactgcatagtccacctatctcgtcgcccagctcgtctacaccagcaaacaactcggtttgccaactcgtctcttaccacggttcatccagctcgtcgcacatttgccggctcgtcaaccacctgccgacctacctccaatgacggcctaggtcacttattctaatatgaactacgtgtggcttgatccctttctaagagatcccattttcgtacttgtgtgattcatgcatcaacagttggcgcgccaggtagggggatagtttgaagatatctctcaaaactacgaccccgcgacgaagcaaagtgacaacaaacagactacatggagcattcgataccgactcgtcaggctctggaagtaaaacactctattcgaggaaagtctcggtaatcgcgcgattcagtttccttttttacgtcgaggatgttcggtctcgaggtgacgatccgtgattcttgggataatacgattcggattttcttaagtccccgaactggatcacttcgaggacttggggggcaaattgtggatgtcggattcggtccatttcggcccaatccgcattcaatgggcttcaaggtgaattgggcccaattcaccgcccagcgtgagcctggccgtttatagaacgatccgacattaatatagaaacggaaggatcacgacttaaaccgcgcattaaagtcccgagttgaagattcgtgacgtacgacgttaataacgcgagatccgcggcgtgaagtcggcaagtattttaatacgtttgattcgatgtattgagtataaatacgagtcgatgacatttgtaaagtggacgataaaagaaaacactaatactatacacaaaattcaaaagcactttcttctcttttcgattcgatagttgttcgtttaacaagaccaaagatccccgtaaaaacaaccacaagattctaattgcggattccgacatccacaatttggcgctagaaggagggcaactttagtcttttacttcagagcaacgatcaatccaccatgagcaacaccgacgatcagagttccggcggccaagcttccactctcgacgacatcaagcagctgcttcagcaactttctgagaaaaccgacagacagcagctcgccgtaacgacgctttccgatcagctcgccgagatcaggtcagcacacaatgcgtatgccgagcgggttgattctctttctgcaggaacggcacggactacaggagctcgaacacgactcaattttcagggtgccgcgagcccaagcgtccagaattcgcaggaagcttctggtcagcaatctccttcgccaccggttgacgtcggagcaacgtcaacacaaaatccagtcatccaatctccgtcggcaggtcttcctgcagtctcagatgagacaatagctcggactccggctccattaggtcccgccatcagactcccgaattctaatcctcgaccagagccgagcacggtcaattcggagctgcaaaaccttcaagatcaaatctaggcaatgaacacaaaggttcatcaggctaccacgtcggcccccgaagtggaaaaagttattgaagcaacaaggagaacacctttcacttcgagaatctcaaagcttcgtattcgcgatttccgagacttcaaactccccggttataacggtaagggagacccaaaagagtatctgacttctttccaggtcatcgcaagtcgagttccgcttga

SEQ ID NO: 153637 - DNA, 389 bp, Arabidopsis thaliana landsberg
gggatgggtataccggttggtaagttggcgttatattcagcacttggaggtgttcgtccttcagcggtaatggtttagttgtcctacggttttaagcaatatttctgagtcaggaacttgagactatattgcttttggcagtgtttacctgtccccattgatgtgggaccaaacaatgagaaactgttgaatgatgagttctacataggactcaggcaaaagagagcaacgggacaggtttgttcttgtatagtctactctattaagaacttaaaacatgatcatatgaacttccacgcctcagtaggtttaaacattattgcaggaatatagtaaactcttgaatgaattcatgagtgctgtgaaacagaactatggtgaaaaagtta

SEQ ID NO: 153638 - DNA, 1764 bp, Arabidopsis thaliana landsberg
catggcacaaagaccgatgattttgcaccatttccagttaaagttcagctttccggagtcgaattttgtgtctcgagctctgcaaattggcgtatgcttttttcttttcatttagattttgttatatagttgtgttctattagcagtaaaattatgtttagtctttaggataatgaatttatgtttcaccgatagtgatgaactatacgatttagtttaaattagggttgtatttcttattaatctacaaaacttgtttttaaagcgtttgtgattatataacaaaaatttcagttgaagcatttccattattcatatgagttatttagtcgatcgtcaccaaattctctttgatttgtcaacaatatatgtttgagaaaatgatatggttttatatgattaatggtgcagcggaaggaatagttcttgggtttcaacattacattgtaatgcttggaactactgtaatcatacttccatactcgtccctctaatgggtggtggcgacgtaagcattagccctaatctcatctaatagctcaaattcacgagaagaaaactctttctaaattaaataaattaatgtgaaatgacgtcatttttcttcaggtgtagaaagcggaagtcataaacacagtattgttcgtgtcaggaataaacacgttgttgcagagtttgttcggaagtcgacttcctgtggtcatgggagctttttatgcttacctcatccctgctctttacatcactttctcttatcgattcacttactatctccatcctcatctcgttagtcacacaatccattgtcttcttctttgaaaacatttaaagtttcaaattagtcgaaaacagtaaattaatgaatgtgttaaatgcagagatttgaagagactatgagagctattcaaggagctcttatcattgcttcaataagtcatatgataatgggtttcttcggtttgtggagaatcttggtcaggtccggagaaaaaaagataaaaagctcatgtgttgtattatatattattacttgtggaagaagtaactaagacgttaaggttttgcttttgctttattaaaactacttcaggtttctttctcctctttcggctgctcctcttgtgattctcaccggcgttggcctcctcgcctttgcgtttcctcaggtagacgattcaagatttaactgccataaagatcgaattggttttagggtttttgtttgtttgttgagggagcttaaatagtctttgtgttgcagcttgcgagatgtatagaaattggactcccagcattgatcatactgataattttatctcaggtttcggttaatttcgtgagattttatataaaaccttatcatctctgaatttctgacaatggttgtaatgttttcagtatcttcctcacttgtttaagtgtaagagatcaatatgcgagcaattcgctgttctgttcacaatagcgatcgtctgggcttacgcagagattctgacagcagctggagcttatgacaaaagaccggacaatacacagctcagttgtcgaacagaccgggctggtctcattagtgcttctctatggtctggtcatcttccatctttcattggatctcctctgtttcagtaagaacacagagcattctctgacaattccttcattcttagggtgagaattccatatccattgcaatggggacgtccaagtttccatggaagtgatgcattcgcaatgatggcagctacttacgtggcgattgtcgag

SEQ ID NO: 153639 - DNA, 1498 bp, Arabidopsis thaliana landsberg
ctgatgtggcgactggtccagaatggtcacattcttggccttcactgtcttgactatgcccagagtagtgaaaccagttccgccgccgacatcgaccactcgcatgtccggatggctgagatccgctggctcaagagcgtcgtctctcatatcctcggtccaatgcccaggattgatgacatggtcgtatacgatggataagaacctgtagaaccagtaagcctccttcttgtgctgaatgaacctaggttgcgccgatggccgggaagacgacacgctgctgctgctgcatctagtagccaccgagagtctaggtgtggaggttcgggtaactgagagtaaggtcggccgaggaatcgatctggcatgcaaattggaaccaggggaacctaaacctttggggaaggtaatggccccgttgagcatcaaagaggccatcgatgacagatccaccaagttgagaagagggaagaagaagcttatctatcaccaattctccgccaatcaaaaacacaaacgagaatgagagtgtgactaaaccctctaactctaacagagtcagtactgactccaaccacatgtttatgtacggtcacgttgtttgttgcgacaacacatatccctttgttgagcccatgggctcatttgcaagaattggcccaaataatagtattgggcgttttggcatttttctgcaaatggaagggaaaagtcgatttgagtcagagagagagagacttcgacgacaattcaaacttgtacggactaagaccagactctctctgacgttgtcagatctgcgacctgctagcgagaggatgcgagaggaaactgtggtttacgagcaggaggagcctgtttctcacggcgggggcaagcacaggatccttgcagagcttgcccgcgttgaacaggaagtcgctttcttggaggtagctaaactaactcgtatctctttcaaattccgacgtaggtctctcgtggatagctcaattatcctttttagatcaattgttccaacaattaggtaaaggtcgctaagattgtgtcctgtgaaagcaaaaaccagtatggcagatctgttccaatcagaagagcatggtagttctcttgacaataagtggcaccatttcagtcagtcttgtttatgactctatgaattgtattcctaaaatctaaatctgctgggttctctttggatccactattggaatggttctctgttgatcttattcttagggatgtgcaagaatacttttgatcatagtccaattagtatcattctctcttggttatcatctatcgaggcatgttaaaagttaaccttctcccaagtttctctgttgcacagataatgtgtttgcctattgttcctactagtgagctctaacacttactaaaaatagctttactctctctttctgtttcatgtactatatccagaaagagttgaaggaggtcgagaacacagatattgtatcaaccgtgtgtgaggagt

SEQ ID NO: 153640 - DNA, 1100 bp, Arabidopsis thaliana landsberg
cagggtcgattctgttgtctttcctccggcggcaaccagagagaggttagttttcttacttacttcccttgattcttcgaaaggacaaatcttgtagaatctgctgaacccaatcagagcgtacataacatggggtcgaattgtctgactctttttgaaaggtcttactcaattaattatgcttgttactgataaggttctgaacaagtttagcagctcaactcttagctatatgtctactgtatctagtctaggactgagtgtagcagattaaatccgctgtgagttagattcgagagtaggagtttcataagtttgtgttgattggccatttggctgagagtttcaagttcctctttaatcaactctctctggtttggtgaattcgtatgagaatagcagttggttagcaataacttcattccaggaagtacaaaaacccacactttctatctctctgaatgaaaagttttatgacagagcgacaaaactataagagagacagataagaggtagcttcatgatttggtggctaatactctgccgttcgatttccttgattgtgcaggagcaagctcgtaaatcattggaaagcgctcttggtgggaagaagaatgagtttgagaagtgggacaaagagatcaagaaaagagaagaatccggtggcggaaatggtggtaaaggtggaggaggaggaggtttgcgtttggacgggtggtaggttcgccttactcggggggcgattatctgtaaagaggctcaacatattgcctttaccctcttagcaatacttgccgtggtatgctttaagaaaatgcatttggtcttttatgaatatgacttttcgttgttgttggttttgaattgtttaatggttgctgcagtatatggtggttgcgaaaggtgaagtcatggctgcatttgtgttaaacccgttgttgtatgcgttgcgaggaacacgggaaggtttgtcttctctaagctccaaactcatgggaagagaagcttccaaagtgagtggtgacaactcagaggagatgtggaagaaggaaggttccactgctaaagagagcgttgtccggaaatggggaagtgactga

SEQ ID NO: 153641 - DNA, 814 bp, Arabidopsis thaliana landsberg
tgaccaagaagcagctagagagctcgagtttcttggaaggatcaagcacccaaatcttgtcccattaactggatattgcatagccggtgatcaaaggatcgccatttacgagtacatggaaaacggtaacttgcaaaacctgcttcatgatctgccatttggagttcagacaacagatgattggaccacggatacatgggaagaagaaactgacaatggaacccaaaacatagggactgaaggccctgtggcgacatggcggtttaggcacaagatagcacttggaactgcccgagcattagctttccttcaccacggttgttcaccgccaataatccatagggatgtgaaagctagtagtgtttatcttgaccagaactgggaaccaagattatctgattttggtttagccaaagtttttggaaatggtttggacgatgagattattcatggctcacctggttatctccctcctgagttcttgcaacccgaacacgagctgccaacaccgaaatctgacgtctattgctttggagttgttctgtttgaactcatgacagggaaaaagccgattgaagatgattatcttgatgagaaagatactaacttggtgagttgggttagaagtttagttaggaagaatcaagcatcaaaagctattgatccaaaaatccaagagacaggctcagaagaacagatggaagaagctctcaagattggttacctctgcacagctgatcttccttcaaagcggccaagtatgcagcaagtagttggtcttcttaaagatattgaaccaaaatctaaccagtga

SEQ ID NO: 153642 - DNA, 369 bp, Arabidopsis thaliana landsberg
gctcagaaaacctgcagcttcctgtagactttctcattttcaagaggaaacatcatcttctcagatgcggcacttgcaccactgttctcagattctcacttcagtccagaaatcatttagttcctgcagtaacacatgacataaatgctaataggaatagcaattcaacatcagagtctcccatagacaaagctccctccaaacctgaaaagctgagatcctctgttcaggatgaggagctacctgtggctagaggctctccgcttcaccgactaatgggatattctactgtaagccaagtctttaaagtttcacagcgtcctccttctatatagatctctgcttcagatgaagcaacgagaactatga

SEQ ID NO: 153643 - DNA, 306 bp, Arabidopsis thaliana landsberg
agagagtgagaaattggatgcaaaacactcctcgaccatgtgtatatataccatcgctaacttaagacatatatcaatcaatcccacaaacctaaattgaaaacaaatatatttccacctgaaacaacataaacagaatggaaccttcaaaacaagaagttccaaagcttatggagacaccaccgaacatatcaaacgattcatcagcaacccagaaaggagaagcaccaaggcaacaacagctaccaaacaataggtacgcactcacagttgacgaggtgatcgagccacacattggaccacttg

SEQ ID NO: 153644 - DNA, 360 bp, Arabidopsis thaliana landsberg
ttttttttggctttattgattttaagatcagattaaataatcggttacataatttcagagttaggtacattaacaatagaatgagagatgaatatcccaaaataagcttatagctatgtctaaaatgtttcaggccttcttgttcttggccatggcagcactgatatcagatgcagtgtgacagcgaaggacgagatcagagagtgagagcttgagatcaatggtgagtttctggaacaccttagataagagtaacacatctgacaaggccctgtgagcatcaccctcccttgtaagactatagtagtcagcaagcgcttccaacgatgaacttagattaaccgttggctctgcaaaatt

SEQ ID NO: 153645 - DNA, 3469 bp, Arabidopsis thaliana landsberg
atgcttccgatggaacatccacttccactgtcgttcgtcttgccaaacccggccacccttcccggtctcgcactaggctttattgacggtaatttcgtagacctccaagatctgctcctccgcgcttcgactctgacgtccaatttaaaccacgactgttctgatctaaacgaccgtcttctccatctccggacggatctcacgaagcacgccgtttcctggatctcaacctcactttccgctaaagtttcactcgaagatttgagattgaacctggagagcctcctctgtctccgtaagttaccaaaccctcgtgttttatttttggtgacgtaaagatattgagttttcttattgtctccaatttttcattgtagctacggattctgtcggaaagcaaacgaattgggagttacagcaagtcgtagaggaattgtgtcgtatacagaatcggcgtaaatatttcggtgagtttgactcgatttttgattcttgaacattatcatcaagagctagctaagaaagattcaatttttcagtgactgccttaaagttggaaagtcttgttggcgatcttgaagattctgtgtttcatccgataagtaaacgcaaaggaagtacgcttcaagtaaagctttttcaatccacaagttaagtactatatggagttgtgattggtaaatatgaaagattaaaactttttatttgtacgtgcaggatcttgcattgaagcaagagagattcagtcatgctattaagaccatgaatgagattgaagaaatacttggtgatgttacaaggcatcactcacggtggcgtcgccttgtagattctgttgatagtagagtagataaaagtctgtctgttcttcgtccacagattatcgcagatcaccgagcttttctctcatctcttggctggccaccaaaacttgcaacatccaaagtcgagcatggagaggttgatagtatccctaatcctctactcttgatgcaaggagataaaaaagagtcttattcccaaagctttctactcctctgtggtttacagcaacataatacgcagaaggaaaaacgaaagaagcttaatatgaccaaagaaactgataatgatggactttgggcgaccgatgaactagttaaaccggttgcatctcggatggagtatcattttctaaaatgggctgagcaacctgagtttatttttgaacttgtctataaagttacaagagactttgctgatggggttgacgatttcttacagcctttgattgatagggctatgttagtaagctgtagtgctaaagaagcttgggtttcagcgatggtccaaatgctatctggtttcttagagaaaaaagtttttcctgggcttatagatatgtacaaggagaagcacatgaaatctgaaggtatttcatcgtggttccatcttgtcgatcagatggttacatttgataagcgaatgcagtcttttgtgaatacagatacttgtctatcttatgaaggctcttcgacagcgttttctcaaggtatatcagtaatgggactgttttgtaagaaacctgagtggctcaaaacctgggggaagattgagctaaaggatgcttatagaaaaagtaaagaggatattaagaatgagaaagcttgggtaattgatagtgaaagaactagacttggtaatgaatccaactcacagtctgcaaagtatgttctatctacaagagaagattataaagcgccattagtagcagactcttttcttaataggacttggaggttgatagaccatggtctatctctaccggccattctaccaaggatccaatttataagagctactgccaccagatttctctggtgtatattcaaaattctgttattggagttcaaaaagactgatctctctcattatggtttgtctgaagatacactgatacaagcatgtggaccggttaatgctgctcggtatcttgaatcaaaactacgagaatggagtgatgatttggtttttgtagagatgtgggctgccgaaaccagtgtcaaagttgatagaaaacctgaagtttcctgccaaggctgcttttttggggaagaactgaaaagccttgttgagttggaaaccaattggcttatggagattataacagtttttctccaccaatttgacaatctttgcagcgaccacttccacaacaatgcagtttcatgggacgaagacgtcattaccagctccagcaatttaacagtgtctcatggtgtcgcagaagcattggacaatttaagaaggcatctgtgtgttcttcatctaaacatgaacccgaaagacttcttggacttgtggagaaatctcgcggaagggcttgaccattatgtttctcgtaaatttttctcaggagaacctgttttacggagacaaaagtttgataggtttgaagttgacgcagaggcacttcttactgtgcttaaaccttattgtgttcgtcctggtgcatttttccctcgtgtgcgagagattcttaggctgttgaggatgcatgaggaagaaaaggcacgattgagaggagctctaagtcgaagtggaaatacttgtctaaagttgtttggtatttctaacttgtctcctcaacttgtggaacaattttgtaggtcttactagtaatgaatgcctttttgtaaaattgtatcagtatttgagtccatgatcaagaagatgagaagtgcagcagaaattggataaattgaaaactagcaatggtgtgttaaaaatgatacaaccttgcttttgattccgtagaagtacatacccatgactctaaagatcatcttcaataaacaaaaaaaggattaatctggtctggtgaaactaaaagaagaatagataagttaagtgaagtgaagaatcaagagaactcttggatcaagggctcatagaagagtctgtatgcgtccatgacttctaaataccacatggcttcacgatctgggctcaccgacaggtcaaccatcttatgaacctggtttcagtttaaaacaacaatgacaagtttcagtaatcaaagcattgcatgtaaatgcagatgatactttgactcgaacatcacaagagaagatgaatcttaatcactagtgattacaagcatcttcatgccacacctagatatatcatcacaagatttttactaacacattgaaactcaaaacctcttatggaacttaagctccttagtcacctaagcttgtgtcagcctgatctagtgatcataacatctaacattctcacttaactctttaatgtgccaattggcataataaaccaatttgactagtctgcaactctagcgaaactaaaatcacattggagtgatccaatgtgcatatcaaagacctaaagttttcaaattaaccttaagtagaggtatctgcccagtacggacttggtagacaccaacaaccatcacgtacattcc

SEQ ID NO: 153646 - DNA, 176 bp, Arabidopsis thaliana landsberg
ctcctggaaagaacagatggagacacagcctgccaagttaggaagaggaaggaagcaataagtctcaagatttgttttccgtttgtcttggtatcaagattttgatccatttttgtttgatattttgagatggtagggttgtcaagattcgttctaaagcttacgactttttttta

SEQ ID NO: 153647 - DNA, 144 bp, Arabidopsis thaliana landsberg
aaccacagagattggtgaacttgctgttagcttgtatggtttatgggttctttatatcatgagatctgtcattaccatgtatcctcttcttcttgaacccataataatacttacggtattgcaatcaaactacacactttactc

SEQ ID NO: 153648 - DNA, 362 bp, Arabidopsis thaliana landsberg
ttaataactccagtcttatatatgctaaaacagatgaagcaacaacaatataagtttttaccaaacataaataaaacatgatacatacgcatgaaacgagcatatctgaaacacatgatctattcattgacttgtgatgatgatctctcacaaagaaaaagaaacaaaacaaacaccaagagacacaaagaaaacgctgcaagcaatcaagcacattacagatggaaaattattaacaaaagggtcacttagaagaaagaacaagtccagaggctgaagcaggattttgatcacttagaagcagtacttgatacccaatcaacacacaatggcatctcctattaacgattttcaatcacctg

SEQ ID NO: 153649 - DNA, 271 bp, Arabidopsis thaliana landsberg
taacgaccaaaattcaactaattgtaaatgataaaccgttttttgcggaataaataacttgagaatcttccaacacagaaaacatgaagagagaaaagtaaactggcaggtaattttaataggggacgacgactaaacacaggacaatataaagaaacataaacttagagagtcgcttcgaccgaccacagtaacccaacgagagcttctctctcagcacttgaccttcttcaaaccatgagcgaagtacaaaaatgttgggttagttgaa

SEQ ID NO: 153650 - DNA, 98 bp, Arabidopsis thaliana landsberg
cataagctccaatcctacaaatatgcaaggcccatcataagcagatgagacaattatggtcggtgagggcaaaagttgaggggactaaccaaaatgca

SEQ ID NO: 153651 - DNA, 250 bp, Arabidopsis thaliana landsberg
cgacgggttacaaggttgtccctagagccacagcagctagtctacttgaccatgatgatccaccgcagaagagaggagcttttactaataaccaaatttgggttactccctacaataagtccgagcaatgggctagtggtttattcacttaccaaagccatggtgatgatactcttgcggtttggtccgacaggtgattagttgcaaaaaattaccctttttattagttatattatagttaatattgttc

SEQ ID NO: 153652 - DNA, 460 bp, Arabidopsis thaliana landsberg
tttcggattcgtcaagccttcaaagatttgatcataagtattgatatccatcgtcttgtcaagatacacaccaattgcagtgctggtgaatctctcactacagatcagctaaaagctctctacacttgtcatcaccaagcaaagtcacccatctaggtgtctcagaagaatcagaaccctgacatttcacaccactctctaccttaccagagtaaaatccaagaacaagattcttagcaaagctaccaacaacaactgaaacaaaaccagttccagcctctgagaaaaccttatcaatcactctatcaacaacactcgagtctgatgatttctcaattcctgaatcaccaatagacgattcggatttgtacccacgaaagggcaccaatagtcacagcctgagaaaccctagaaagcgaatccgtaaactcattcgaagttgtgatcttcgcgatctgct

SEQ ID NO: 153653 - DNA, 409 bp, Arabidopsis thaliana landsberg
aaagttaaattcaatgttattgataaaagtcattacaatacagaggcttaaaaatttgagaacccaacaaattggtgctcataattaagcccttcttggtttccagagatacggctataaatatgtaccatgtctagaataataacaaaacagactatttgccaccattcttgactaaagaatcaaactagctcaattataatgtagttttatacttggcttcttaaacacgaaagacaaaagaagatggttgattctgtgaggaggagacatcagaagtcagcttaaagctgtgagaagcttttgaattggtgagaggatgagcaatcttgagatcgtagtcaccatggaagagagaagcttcaaagtatccatcagcatcagtgacacctgtggtttgtctggcgaa

SEQ ID NO: 153654 - DNA, 438 bp, Arabidopsis thaliana landsberg
ctcataattagctcatcaagctcctccttcattttcttattcgtactagatttctcttttgccttttttatttggtagagctctgctggttcatggatattgagccctgcttgaagttttgggggttggttttttcttctttaaaattgcatggcaactacaattgatcaaaccagcatcaagtcattgcatctccatcaactcatccgtttcatcatcacaatcatcttcttagctttcttatttctcattggccctacaagttccatgaatcatcaccttcatgaatcttcatctaagaacactatggctcctttcaagaggttccttctacaaccttccactccatcttcatctactatgaaaatgcgtccaacagctcaccctagacgcagtggcacttcttcttcttcggcgagaaagaggagaagagagttt

SEQ ID NO: 153655 - DNA, 555 bp, Arabidopsis thaliana landsberg
tctattaacagcccataaatgaaacccataaatcgagcccatgaacagatacgaaatctgtaaatcctcttattacaaatacagagtcctctgttctatataactaaactaaaacatgtagctaagatactttcagttatgagccatgatctgttcctttcaaatgtgacccgtaaagctataaggcaaacataaaaaaaaacgtgttcgtttttaagggaggactaattgcctcatagcttcttcaaaatttcttcgcaggctcgctcgtaataagtcattctctgtatacattttacagcatcatcaaacttctggctttcaaacgcttcgacgaaagagtcagaccattgctttagtttctcttgtaccttgagaaaaacaacaaaatcgcattggttagatcagtttggcatattcaaccgatgcccagagctacagattttaaggtgtttggaaagctaacggaaagaaagaccatttgaaggaagctagctcaatcaggaattttcaaggtacctgggatcggatctggtttaacgatgttgaatcatc

SEQ ID NO: 153656 - DNA, 465 bp, Arabidopsis thaliana landsberg
cagtttcgatttcgaatcaaatatgattctgtaagagtttttctgaatctttatcttgggatcggttatctgaattctattcgccatggaagctgtgcttctctgctcgaagcttgttcctcgagcaacgtcgttggaagataaccgaaagttttcgttcaggcatttgaacaaacaccttaagtgcaattcccttcgtgctgattccacaaacactccgttgctccgaggttttgaagcgataaagagtccgtctagctggagttgtgcgccgttcccagtgagaaaaggttcatgggttccacccagatgctcgatttctagctcgactgtttccgattccgataacccattccttagccaatttcgaaccttctcgtttgggtcagtagtgaagaaagttcgtgagttgaaagtgaagcccatggatgttgtgaagataactcttttgctatcgattttgac

SEQ ID NO: 153657 - DNA, 567 bp, Arabidopsis thaliana landsberg
aaactcaaagtcaattcaatcgtaacacttggccactcatcgggaaataatacaaaggcacaaattctggcacacatgttttctccatctctcgcctttctctttttgctatattttagaggactacagaacaaacaatgaacattttcttctttgaaaaaaaaatatatatgttcgaagcacaccaaaaatacttcacaaacacatgcacaaaaggggtcgctaccgagcggacgcagcggcggcagtagtacataatatgcaccgtaaacgcgaccgcccaggtctgtctccatcaccatcctcatcttcttcctcatcctcttcctcctcctcatcaacaccgttatcgtagctatattcataccccgaagaacctttggttgtcttgtgattgttgttactgaaggcggcatccatgaggcacgtctcgtggtaagcatggcagcagaagaagacccccacagtgtcccctcttatcgagactgggtcgaagcacatacaacaccgtgtgtccccccgtgtcttcgacttcacttctgtcatctttatgctcaaagatttatc

SEQ ID NO: 153658 - DNA, 331 bp, Arabidopsis thaliana landsberg
gacccttgaagaaaaagtttaatgaaggatgaaaaaagtctaggttaaatggaaaacggatattaactagccctaacaaaaatagtaaaaagcaacagcaaatatcacgtgtccccaacttacgattaaatagcctaaaactcaaattatacgttctaaattaagactaagagtctcgatgattatcttcatgaatccggtgattagtgccgttaggagaacgaagaggaaacagcggcaaaagctccggtgccggctcggagccgcttctcggactcggaaggaagtagaaccctttttccgctatggctttttgctcttccttgtccgg

SEQ ID NO: 153659 - DNA, 424 bp, Arabidopsis thaliana landsberg
aagttgaaacaaattcatcatcactgataattcaaatatacatggtaaagtttttgaatgataaaatgtgtcttattatgggaatgcagattaaatcaaaggaaagcaaatttggatgtggagaagaagaacaccgcattagaaagacaatatataagcaattaagttttcgagattccgaaatgatgaacctccaagcttaaggcattgttcaacagtttccttcatgggcataatcctcttgcggatctcttccccttccgagctcgtcattagtgttctaaccgcgttttcgatcactagtctctctaccttgttttccaaatgcaatccgatcttccaaacatcgttaatgtatctcgcgttcacatgctggtccgtgaaacatgacgtacatatcataggaacaccttcacatatgctc

SEQ ID NO: 153660 - DNA, 389 bp, Arabidopsis thaliana landsberg
aaaccaagcaacaatctcatgtgtatttttacatctagagattctaaattcgatttttctaatttatacacttacataataaaatcaaaggcaaaagaagggtgaccaaaaaattcactcttcacctcactcgtagaacccaaacccaacaaaaaaaaacccaaaacgaagccacacaaagtccaaaatagaagctcactctatgtacatcctattttgttagcgcccttaccggaagtttcttttcaaaaaagaaaaaaacctcccaaggccatttgtgactctaaaattttcagaaacaaaaaatgaaaatccttgtcttttcttcagctcagtgactcatggcaaagctctttcctcatccgttgattaaacagcctgcaagcatc

SEQ ID NO: 153661 - DNA, 314 bp, Arabidopsis thaliana landsberg
aaatacgaaattaacgtaattttattaaaattactagtcgttgagtctacgagttcttttctagaactgaatagaattacaataaatgagccaatttttagaaaatattgtttatatatgtaatgtattgcagttcagtacaaatttttagtgttaaattatatgttttaacattcgtcgcaaatcaaacatgaaaataaataaataaaattcatctttgtggttataaacttactccaaataaacaaaaaagtttggctattttaaaggggaaacaccattttcaccatgtgataataatcggtaagaacaat

SEQ ID NO: 153662 - DNA, 253 bp, Arabidopsis thaliana landsberg
tcacaagcagtgaccgtagaagctcgacgtcgtggaacattgctccggcgaattggaagtttggtcagactttcatgggaaagaacttcagagtctgagggcattatcggaaactcatctatcaatattagtattttcattattactattaaaatttccagccgaaggcattagtaatttgagaaattttaatatatatattttatgttttttaagagaccactaaaattccaaattttcttacctctgatgg

SEQ ID NO: 153663 - DNA, 288 bp, Arabidopsis thaliana landsberg
ttattccttctgttagaaacaaattgaatgaagcaagtactatagtaatacctgtgatggattccaagaacattgatttataaacgaatcaaggatgcaagagagttaaaacgcagaaaagagctcaacgaaccatgtttctcattgtatcttctggtggaaaaaaagcacataaacaagattacagatagagtgaagagagaaacaaacttcaagcccgtttgccgctgctagggttggacttaggacagaggttccaacgtcccttggcacgtcggcgctttatgg

SEQ ID NO: 153664 - DNA, 851 bp, Arabidopsis thaliana landsberg
cagtaccaacatcctataggacttttctaaactcatcctcagtccagttctttggtatgttaccaatgaacaacctattcttcgtttcggaaagagagcaccttatggtttttccctgtacaaaaattaggtataggttaaacaaaattgttataagtaaaatgcaaactagcaatgaccgataaacttaagctacagttagcagttgagcttgccttaaactctttactgtgcaactcctcaatggccttttgtgcaacgtctttggttttgaaagctacaaaagcatagcctttgctatcaccagagtccctatctttcatcagtctcacctaatagaaaaggaattaaaatcagtcgtaaatacagaaccaacaaagagtatatcatgaaacacaaagataaaagccgctccaacctcaaagattttggatatctcttcacatacagccctcaggtcctcttctccaacatcccttgggagcccaccaataaaaacttcagaaccatgaggaggaagtgaaagaagatgggagtacttttccctatcttcttcatcaataggagatgctggtttctcatcatcatctgctgtctcaatatcaatatggttgtcgtcatcttcagctatttcctcctgaacatcttccatatccccaccttttgtatcaccataatcctccacctcacgttcttcggcattctgattgccaacgacatcatcatcatcatcttcttcttcctcctcttcatactcttctacttgttcctcctccacttcatcctccatcacactgtagctaccctcctcgaaatccacacggtcatcattatctcttgcgtctgacatc

SEQ ID NO: 153665 - DNA, 75 bp, Arabidopsis thaliana landsberg
ggtaaaacttttggctttcataactttaaaattaagctggagcttttaaagttttttctcaagagtcacaaaaaa

SEQ ID NO: 153666 - DNA, 553 bp, Arabidopsis thaliana landsberg
agagattaaagcctcttagaatagaataacacatagaagccacacacgttcaagcaccatacatagattaagacacttaagagaggctaaaaccattcttagttgttacttttaggtagagacttcgaacataacaagggctggttcatggagatggtggccaaatatgcggttccatgtctaaaactgcgttttccgcataaaaattatcgtcccaaccatgctcaaactcatcctcatagaactctcccattacaccatcttcaaaaaactcccaagccaagtaatcagacccatctgagaagtaatctgagcagcaatcctcccaatcatttatcatatcatagaatccgatcacgcgtggacctaacactttcatatccggaaacttctctttgaaaaacttgttatcaagttgcacgtcccaacagcctctaagttccaagaactcaagaaaaacacagcacgataagatcttgagtactccttctgtgctgactcggtggtaagctatctctaaccgcttcagcttcggcattgtattggcgatagc

SEQ ID NO: 153667 - DNA, 452 bp, Arabidopsis thaliana landsberg
aacagaatgggatacagatcagtttcttacagatgttggagaagcaaccatggttatgatgagtgtcatcaaaaatgtatgtaatattaaagacactcgctatttttgggaatttcattgtaaatttttgaatgtaagctcataagagcttctgtttttcacatatgaaacagggtgggattgctccaggcggcttcaactttgacgctaaactgtaagagcgattcttgattcacaatgttttactgtttcatacagaattaagccgagaaagtagcttataatgtttggttgattaaacaggcgaagagagagtacagacgtgtaagactgattcattgctcatattagtggaatggatgcaatggcacgtggactgagcaacgcagtcaagatcttggaggttagaaaagaaatgaatagataagttttatgaaagatccaaagagtgt

SEQ ID NO: 153668 - DNA, 436 bp, Arabidopsis thaliana landsberg
cagagaacagggcaaaacagagcactgaagaaaagagagagaaacttaaaaagtctgagatcagtggcagacagagcagtggcgatgagagtgagaagaaggacataactgtgaagaaacaaagacaaatcgttgctcaaaatcaagatagcccaatgaagagttacgaaaggagccggtcagagaatcacgagggctcgaagaagagttcttgtgtacaactgaagagatcagagacagagagacctgctgatagaattgtttctgatgatgagctacgatacaaaatcgagtctttcattgctagacagaggaggaaccaaaaggatgaagagttctgtattatctaaaatgtataaatactaaaaagcaaagaagaaaaaaagaaaaactttagtttatgcaataccattcacatatatttgtgagtgtttgt

SEQ ID NO: 153669 - DNA, 501 bp, Arabidopsis thaliana landsberg
ccagaatgattcaggtttctccatggattcatcagaaatcgagaaataaacaaaggaatcatcgtcgattgcgaatgtatacgtcttcttgtgaactgtatgagaaaacattgaatgatgaggaggcgtgttctcgatgcatcgtaaagctatagcttcgattcctggctcttgccttgaaacgaactccgcgagaactacggttcctttcgcaatgcaagtgtacgataataaagttggatttgaaatcatccttttcaatggagatcgaagcgaaaaaaaagaagagatcgctttaggtttctgaaatcattagggaaatgatgcgatctcgatcgaatcacagaggagatcagaggatttctctctctttatagaaatacatgatctctttctctggctcaatccaatctgtgacaatggagaacattatgcatctctctctttacagggcttgcgaaaatttctagggaaaaaaacagaaatggagaaccattattg

SEQ ID NO: 153670 - DNA, 453 bp, Arabidopsis thaliana landsberg
agatgttgctttccccgctgagattgttggaaagcgtactcgctaccgtcttgatggttccaagatcatgaaggtatcgtatcatttactatgagaatatactcagatattgatacgaatgatattgagcttacctttacattctgttttgactaccatgtcacaggtctttttggatgccaaggaaaagaacaacacagagtacaagctcgagactatggtcggtgtgtaccgtaaacttactggcaaagatgttgtttttgagtacccagtcgaagcttgaaagaagatgatgaagaaccatcaggatagtgaaagagagcttttgtttatgttttgtggtatttaggatgaaggaaactctcttgattcagttccttgttcacaatctttaatgttctatttacaatgactactttttgtgtttttcaattttgaaacctctatgatttc

SEQ ID NO: 153671 - DNA, 259 bp, Arabidopsis thaliana landsberg
gaaaaactacttcatccgggtatgtgttatatcaagtatttcattgtagttgttaattggtctatatgaaaatatataaatttgaaatctaattaacataatcacgacaaaataaatatgcttttaaaataaagaaaaataaatatgattgttagttatttacattttttaataccggccagtagtatatgctgtggctagctctttgccatatatgatacgtgccggtgcatctttgttttgcttgactactaatttt

SEQ ID NO: 153672 - DNA, 151 bp, Arabidopsis thaliana landsberg
ggtgaaggcgatttttgggggaaattttgaataccggtttggtacaagtgagttggcaccactcattttgctacccttactatttcctttgatcactttgtgcataaagttcaacaagtcgcttctactaagcgtgttaaggtactacatt

SEQ ID NO: 153673 - DNA, 247 bp, Arabidopsis thaliana landsberg
cataatcgttttattgagattttcacatttggatttccgacatacactaacttaacggattctggggtaattggtgggttttgcacaagtgaatcacactgagtcagcaagtttcgattttttggttttgttttgtaatgattgattaaatgtctaaagatatcacgaagtagatacagaagaactgtaaaagcaattgtgaccaaccattatgaatcatatatatattcaatgaagcatgagctta

SEQ ID NO: 153674 - DNA, 57 bp, Arabidopsis thaliana landsberg
gattagtttccgagaagttttcctagagattggcctggtaatcgcatagaagtgttc

SEQ ID NO: 153675 - DNA, 190 bp, Arabidopsis thaliana landsberg
atgaagaaaacttacaatctcaagagatttgagagcatcagccatggcgatattggtcatattagctgggattttgttcctcttgcagagaaattgaagatcccttctcaaaaggctgtggaactccattaccgcaaaatcgagagagagtgagagaattttctggttgggagagaaattgaaattggca

SEQ ID NO: 153676 - DNA, 272 bp, Arabidopsis thaliana landsberg
tttgtaaattatcttcttcatattattcttgcgttacaattcaaagaacaaaagacagaaggataaccaactaatgagcccaccaactaaatgctttaattaaaagttgtatacaaaaggttgatcactaaaaaggagtaaaataaaaagaaaacaaaactgcatcctacctctcggattaactgagaagaaagagagaaacccgaccccgaaagaaagaaaaattacaggatgaaacacaaaaaccgccggtgaccggaacaccactttct

SEQ ID NO: 153677 - DNA, 156 bp, Arabidopsis thaliana landsberg
gtttagtgattgaaatttgtgaaggctagtgcagaagacgccataaatcatctcatttggtgtgtaattttttaagaaatgagaaggtatggttttagtgtttggaatttgagaaggctagtacagaaaaaactatgaatcatctcatttaatgtg

SEQ ID NO: 153678 - DNA, 122 bp, Arabidopsis thaliana landsberg
ccacactaatcggaaaaaatggcacagaggcttaacttgcttaatctcgccgtccctccggtcacccaccgctctaacttcccttccaccttcaccttcggcgtcgcacttccgcttaccag

SEQ ID NO: 153679 - DNA, 593 bp, Arabidopsis thaliana landsberg
ccagggaagatcgccaagaatgccacgtctgagataacagtggaccaatatcaccgttacaaggtattaaactatactaatcgaatcttaataaatattatccaaatattagaaaagtgcttctgatttatttacatgcatgtgttcatgacaatcacattttaggaagatgtggatttgatgaagaaactgaacttcgatgcttacagattttccatttcatggtccaggatattccctggtattatataagtaaccatatatagttatataattctgattaagattagtataataacattaagcttatgaatgcagagggaagtggtaaagtcaactggaaaggagttgcttattacaatagattgattgattacatggttcaaaaaggtatcaaaccataacgtttcttataaaacactgatttgattatagaatgaagtttaacaaatctaatttaatgcttagggattacaccttatgcaaatctgtaccactacgatcttccattggctttggaaaacaagtataaaggcttgcttggtagacaagtagtgtaagcaccaatatgcaaagctctatatatgcattcc

SEQ ID NO: 153680 - DNA, 107 bp, Arabidopsis thaliana landsberg
tagtgaaaatacatttgcaattgactattagcagaagaatcgtaactggctttaggaagtatcttttcacccaaaaatatgacgatatacagaatttaagctgagta

SEQ ID NO: 153681 - DNA, 252 bp, Arabidopsis thaliana landsberg
catctcccacaaaaatggctctctcacttctttcagtctttatctttttccatgtctttaccaatgtaagttattcttactttttcataacaaaaggtgttattatgttaaagactacataatagtatacaattatgtgcattacgttttcgcgtattgtaactaactatgtattttgattaatcaccgagcaggttgtttttgctgcttcaaatgaggaatccaaggccttagtacgttttctaatttcca

SEQ ID NO: 153682 - DNA, 422 bp, Arabidopsis thaliana landsberg
gctttggatgatgtaatgttcatagggggtttctgcggtgaaagcatttttcgagttgttgaaccaatcctcgttaagtcttcaacaccctgaagagggcaagcctgtaactccggctgaactttgtcccatcttaaagatgctctacagaattcttataacaaggtactctcatctctttactgggtaaataacatatcaacttggacctcattcataaacatgattcacaccttgatgatgtttttagagagttctcgtgtgaggcgattcttgaggcgctgagagatgaaacgatgaatgacccacgtgaactcatcgagattgctcacagccatctcttcttccagccatggcttcttggtcagaaaccttgagcactttcttctgtataagttcccctgctaggctgtggtgcacac

SEQ ID NO: 153683 - DNA, 336 bp, Arabidopsis thaliana landsberg
atattttcatcctcaatctcgaattttgacataggctatccatatgtcataacatattttctggaatattatatttattcatgaaactttgacataggctatccatatgtcataatatataacattattccagaattacaaaagcatctataatgcttgtcatgcatagcatgattatacatatggctataatatattacattgatttttcgttgtcatgatcaatcgagaaaatctgccatatcaagatgattatcatcatcttggcctttaacggaaggttccaactcatcacagatgagattagtttcaacatccctttcttttgccttttat

SEQ ID NO: 153684 - DNA, 588 bp, Arabidopsis thaliana landsberg
gagagaggagaagtactttttatctttaaagatagtgtgcgtataagcactgtccgccagacatatatcttcatcctcaatcttgtattttgacataggctatccatatgtcataacatattttctggaataaaatatttattcatgaaactttgacataggctatccatatgtcataacgaatatttattcatgaaatttgacataggttatccatatgtcataactaatatttattcatgaaatttgacataggctatccatatgtcataactaatatttattcatgaaatttgacataggctatccatatgtcataactaatatttattcatgaaatttgacatcggctatccatatgtcataatatataacattattccagaattataaaagcatctataatgcttgtcatgcatagcatgattatacatatggctataatatattacattgatttttcgttgtcatgatcaatcgagaaaatctgccatatcaagatgattatcatcatcttggcctttaaaggaaggtcctggctcatcccagatgagattagtttcaacatccctttcttttgccttttat

SEQ ID NO: 153685 - DNA, 112 bp, Arabidopsis thaliana landsberg
ctaacttttttcaaagtctctgtctttctgtggaaatctggggaataaacatatgaatctaaagagaaaaagaagaaagttaaaaagcaaaatccaagtttttggtcaattt

SEQ ID NO: 153686 - DNA, 148 bp, Arabidopsis thaliana landsberg
aatctcttatatgttcatgttgtagggttaactactactcagattgcaagcagtgtatttgcggttggaactaccgcggttttacccttctatactctaatggttgtagcaccaaaagctgaaattgtaagtttaattttgttgcaag

SEQ ID NO: 153687 - DNA, 275 bp, Arabidopsis thaliana landsberg
tctacttctgggttacagtcacagatgggacgggtaaaggcaaaggcgagaagggttcacgtttcaagtagtctccatatatgaagaggctttggtgattatctactactacagtacctctatactgtatatatatcaagacttcaaagagatcaaattacctgtataaacttcaccaagtaagcatcttccttgtacatcacttattcagatgataataggaaacaataagatcgtgttatctacttggttaatgctagagatatatagtactc

SEQ ID NO: 153688 - DNA, 221 bp, Arabidopsis thaliana landsberg
  unsure (1)..(221): unsure at all n locations
aacacgccaaagtttattaattagtggattgatcaaaacaagaatcactgagaaaacatatataaaagaaaatcaaaattttcttaaaccacatatctcanagaacatagagcaacatacaagggtacaataacacatactcttaaaaatacacaaagaacaagttgtggaagacataatcagatgttgatggtggcattccacagcccgagaactccatt

SEQ ID NO: 153689 - DNA, 606 bp, Arabidopsis thaliana landsberg
tactctttagtccttcgcctcccgcttccgccactctcgctcactggatcatcgccgtccggtgaaaatctctcacagctgaaggcaagtcatcgagtctcttctttcttctttatgcttttggatacctatcgcacgtgaatttcctactactgaattctccggtttgaattgcttttgttggtgtatctcaaaaatggacttaaaccctgaacaaattgtgatatgagatttagatatatacatttccttagttatgattcatttagctatcaaattgcttaggttatgtaacgttaatgatttgatttttcattggtgttttggttctttgcgcaccaagtgtttgacaaaattgctcaatgaacatgtgcaggaaattctcgtttccaattttgttaaagacgaagccatgaagagtctgatatggttaacagcagaagaggctgcaaagaacagaggaaaagttctttctttgtatcgacaattacttaggagcattaactcgccaaaattgcagcttagttatgcttcaagacttgcgaagaaagctgaggttaggaccatcttcttgtttggctctgaggagatttcgaaacacaatgt

SEQ ID NO: 153690 - DNA, 555 bp, Arabidopsis thaliana landsberg
acttctttaccccagccgccgcgattttgtacttctgcatcggtgcgttcttcttagccacctgtagtaaccaaagttacattggtttatagccaaaatattagccacaatatatatggtgtggacatacaaatcaactgcaactaaaccgaaccatgtgttttcatgaatggttagattggtttatatatgtaaatccaaagaaaccgaagctaaagccaaacgtaaaccaattaatttgagtataaacgaaccacacgaacttaaattaagaaataatttctatgttaaactatctaagaaaaattagatcgaaccatgtttaatatttcttaaaaataattatagctaagtacatagtagctatttgtatatgttttttacatcaacctgacccaaatctatcatagttatttatgtcttatatttattttttattcataaaagaagaaaagtaaatttgacagaaactacatcaacctttccaaaaaattatccaaagaaaaccgaattgattatatacaaattatcttatatttagtattaatcttatat

SEQ ID NO: 153691 - DNA, 459 bp, Arabidopsis thaliana landsberg
aaatgattaaaaatgaaacaagaattgaaataaaagcaaaagaatgcttcttgtgagacaactatagtgttacaacattgatgaaaattgagatgggtttttctatccgacgaaatgttacaacatcaaatcaatagtagtttctgtaatcattcctctggtaattctgattgtagttcggctgatttaattcagcagtaagttcagaggacaaggtactagtcgtcttcatagctcttccttcaggttccttgagatacatccggtcatctaagtacgctgtgatttcggctatgatcacaagtagatccgacgtgtccttcttcgcccgcaatttctgcaagaaatgctctctcacaacattcacaaccttcagaaactgagatttgtacctctgatgaagaccaaacccagccgtctacacatacacacacgctcccgaaagaatgtcagtggtag

SEQ ID NO: 153692 - DNA, 216 bp, Arabidopsis thaliana landsberg
tttaaggtaaataaattgagcaacttgccattctggcccatttttcttttcaagttgctgtccatcaacttgctttaagtcaattcataagcgtttttgttcatcaacttggatccggttaacccaaatcccggttttacaattaaacccagagaacaacaatcttttttatggttctcaatttgttcatcagaaagcttttttcatcatcgttca

SEQ ID NO: 153693 - DNA, 301 bp, Arabidopsis thaliana landsberg
aaaatcgagagagggaaacctgaggagcgaataagaaaggagatggagatcgagcaggacttccgggaggagaactgctcatagagtctgaagaaggacgacggtgacgactgcgtgcagaaggatcgccgccattagatctcgccgaggacgaggtaacatctgcaccaccgctaccggcggcggcgtcttcgtctttgccgttcgcatttcccattctgaaaagcccaaatcacagaagcgagagagacaaagagaggagagagattgaggaaaagattgaggaaaagagagagaaaac

SEQ ID NO: 153694 - DNA, 605 bp, Arabidopsis thaliana landsberg
cttattccaaaagtataaatattacataagacatgtaagtttggtttcatccctctttaactgtctactcctaacctaaccacatctagtatacatttctccggcggtaagttcgggttttgtctggaaaatctttctgccttaatgagccgcagtgaagttcatacagataggaggtctaaccttagccagagccagcaaagaagaaggcagaatccagagaccatctccacatatcaaacctgatgcaacagctggaaccatcacatctgccttcttacgattcacctttttccaaacgtataccactaagctcccgatacacatatcgattgcgaacgacccacccaccaggaacggtacagccattgccatcgggagtgggatccacttccctggcttatctggtaagaggtctcttgccaagttggcagcaaccgcaaaggcaaagaatccgtagcaaagctctaggcaatgcttggggagagcggagagaccttgaacaccgataatagccatgtttctgtatatcatagcataaggagctttgtattcaccattttggtttccaacatcaaacgccttgtagaagaggaagaaggtga

SEQ ID NO: 153695 - DNA, 524 bp, Arabidopsis thaliana landsberg
tccacatttgagtgaagttgaacactgctagttctggtaataacagattgagtggtgatagttatgtattgtgctcttctgggttacatgaacatagaggttatgctgataaatatgagttcttggaatcaaaaccactttgctctcaagatggcttctttgattacctcaactttgttctgttctggtgtctggcttccatctgaatgtggcattcctatgatcagatattcttaaaatgggaatcggcaaaacggaaatcaatttcatgagattactttcagctgcacctaatcagcaaaaccagtctaagcttatgcatgtaaccttcttttggatattttcatgtataaactattagaatttgtgcttattataacctctctaactgttacaattttgattttgatgttgatgtgtgaaccatctgcagtatgttgctactttgagggaacagttggaacaactctcggaagagaagacccttgaagggcatcccacgttacttactctcttccttgtac

SEQ ID NO: 153696 - DNA, 285 bp, Arabidopsis thaliana landsberg
gctgtcattgcaaattgggattgacttgacaattccaatttcgcttgtgtaaagcatcagtcacacgtcggtatgattcacgcttactggaaaatatttctagttcccacattctttcgagataactcgaattgggatttcagatttcgagaaaaataacatatggttttttgttttgtttttcttctttttgttcatgtaatatgcaaagtgcaaagtgaaaactgcctcagagcattattttttgaataatgaaaattatgtttaacttcatgtcaaagtttt

SEQ ID NO: 153697 - DNA, 749 bp, Arabidopsis thaliana landsberg
agagtgaagcattacctgtatggattactggaccaggacgagatgtgccaagctctttctatggtttacagcaccatgggcaacacgtgacttatgctccagcacaagctggtcacgtcgcattcccaggtatgtaccatccgggacaagcagtaacagcaacaggagtccatcatccgcttttacaacagtctcaaggtgtggctggagctgaaatggttgcacctgcgcctaacgttttccaacagcctcagcaaacacagatgaattggccaagtaattactgaaacaggaagtataaaggagaaaaagattttgaagattcaacaagtttcaaattccagagaaatcaggaaagatatatgggtgcgggtttttgttgacttgcgtgtgtgtgtgtgtgccatctaacaaattaccaaagagatgaagctatgaagttgaaggcttaagcatgaaggagatttacagagagaatgatcataagggtagggaaaggtattgtatgaaaccagtgttttggtgttttctatatctttttttttttcttttgatttagcaaatttttttctttcttagcttttaagaggtcttttttagctctctttttaagtttctgagctaagacaagaactttgctacctgagtctgtatctgaagactcttcctctcttccttcttttcttagcctttggtcaatgttttcaaatccgagtcagcaatcaaattggacaaatttcttgctcgcg

SEQ ID NO: 153698 - DNA, 292 bp, Arabidopsis thaliana landsberg
aaaagaaatcgagatttcatagaataaagcacacgcatttaatagatcacagatcaaaaaccctaatttaagaaatcaaagcttgatgtggacaaacaaaacggagatcgatgattggagaaaggatagagagagagaacatacagtcgccgagaacatcaggagcaccgacggcaaccttcacgcagatatctagagccatcgatctttcttcgattttttagaaaacttatcgcacggagtcgaagaattataattctcgttttaaaagcaaaatatgaatgaaataggc

SEQ ID NO: 153699 - DNA, 425 bp, Arabidopsis thaliana landsberg
  unsure (1)..(425): unsure at all n locations
caataaactcctccgagaaccatcagcacagggatcaccaataagatgaccaaaccaataagtagcggatgtaatttctttttttcctctctaggaacgggggcctgttcatttctaggaataggagcctgggggnnnnnnnnnnnnnnnnnnnactgcataaattctttgcttttactaaaactccaccctagtatatactggttactggtcaatctcccatttgatccagagaacccaatatacatcttatcttgaaaaatttctgacagattgatgtctcttgatataagaggccggtttggtttctgaatctctagaggggccagtgtaacatttagcaacgatccatcataatcaatccacacctgaacaggctccccactcacgagatttatgcttatattcttccccaaggcgtcaga

SEQ ID NO: 153700 - DNA, 422 bp, Arabidopsis thaliana landsberg
ttgagggttcctcttctctgatccttttgataattttcaccgtttttttgggggttataaaatttcttcaaattctagttgatttcattttcaaattctggtgaaacattatttgtgtttcaatggtgaagcttagatcttgagctaagagttaaaaaaatttcatctttttcctgtgaaagttttgtcctttgtagattatgtttttttttattctttaaaccgctcattgatttcttctgagtcgttagaggttgatttattgcaagcaaaagggttttcaattgtgtgttggttgctgtgatctttgaccagattctatggtggaatttctgaaaaaagtatcaatccggttcaagaaatgatgaagagaccgatcccaagttggccatggtggtattagcaagtaaaaagagaaagaa

SEQ ID NO: 153701 - DNA, 176 bp, Arabidopsis thaliana landsberg
ctaatttagaaaagattatataaaaccaaaaatgttatatggtatgtataatgttactatatatgaaattaaactataaaatataaatgtattagagaatgatacaatttgcaaaacttttatatataaaaaataattcttaaattttaaaaattactactttaaaaaaaaatcac

SEQ ID NO: 153702 - DNA, 106 bp, Arabidopsis thaliana landsberg
tctcacttgccagctacttctctctctcgcgctctctctttcttttttggcaatggctactggatcaacaaccgattccgccaggtctccttcctcaggtttgatc

SEQ ID NO: 153703 - DNA, 396 bp, Arabidopsis thaliana landsberg
caagacaagattggaatcttcattaatgtgaacatgttgtgagactttcaaatatttgacttgacccattggattatgtaataaaaaatatttagttattaatcatttacaggaagatcaaatcaaatctcagacaacaaatcaaatgacgatgggaatgatgatttggtcgggtaagaaggcatcattgctataccacatttcccaaatggatcatcgatgttacgttggagcttaacgtaaccgctatctccccaattcaacccccatgaattgcgaatgatccaataatcttcaccacttgtggatccatatccaaccactactacaccatggtccaaagatattccacatgttcctgtcatcacaccctgaaaaatgaacacaaaacatata

SEQ ID NO: 153704 - DNA, 479 bp, Arabidopsis thaliana landsberg
ctttcgctctacattggctctgtgttttttgaattatctattgatttccattagggttttctcacttctttgatcgattgaattatatatgttccgtcaatccatggcgtttcctccaccgatccatggttccgatgcaccgccgccgccacagccgccgtcggtggtgaacgggattgaaacctctagacggcagcagcaacagattgcagcagcttcttcttcgccggtgaaatctcatccgcttcataacttccctttgtctgatctcagatgggctatgaatcacgccagtacacaccggctccgcaaagcatcgagtagatctccgcttcgtgaagctaatactgggaaaggaaatctggtgattgaggaggtgaacgaagcttcaggttcttcgtttgaattgagaccggagaagaagaagggaaacgcgtctggtgttagcgattccgccgcagatagatccgcgacgaagt

SEQ ID NO: 153705 - DNA, 108 bp, Arabidopsis thaliana landsberg
gagacatctggttcgaattcgattcagatgatacatcaaccggttttgaattctttccggtttgaggagaatccgtttcctcctcctgctccttgtgaagagcagact

SEQ ID NO: 153706 - DNA, 264 bp, Arabidopsis thaliana landsberg
gcaaattagattgtgtatatatattagttttgggtttacatagatctacacttgcagaaaacagagctgtgcaacagtaaataattgtaaagaaattgacctcatgtcaaattattgaacaggaattgacctcatgtcaaaccgataaatggccgaggaaaaaaacgaaaaaaatgtgcgaagcttgtaagaaagaagagacaagaaacaaaaagaaaaaggacttgaatcatggggaaagaattctcagcatttgggcaagtc

SEQ ID NO: 153707 - DNA, 115 bp, Arabidopsis thaliana landsberg
tgcagccactatggttctttcgtatcccccctttgtgctttgcgtaaagttttacttattatccctcctgccgtagcattataaactgtattgttactgttgctaccatcaggat

SEQ ID NO: 153708 - DNA, 394 bp, Arabidopsis thaliana landsberg
acatccaaggcacatagcttgacatgtatggatctttatgtgtttgcaacgccatacaggatcacttgggactactatttctctgctagagatcatactttgaactttgattcttgggaagagaaagctgaattggaatatgtaggtttttgatttagttaatcttctttatagtcttaagagggtttgtggtgtttgttttcatggtgatttcttcgatgagtaggtgaaggagcatggcgtttcagtgtttctaatgccatcaggaatgcttgggacgttgctatctttgattgatgtgttacctcttttctccaatactgcttgggggcagaatgcgaatttggcgttcttgacgaaacatatgggtgctacctttgagaaacggtctcga

SEQ ID NO: 153709 - DNA, 255 bp, Arabidopsis thaliana landsberg
acagctaaatttgtttgtaccagagaatgtaattccagtaagaccaagtgtcaatatcattggaatggagactctaaggtgttcccattcggctgtgttatctccagtccaaattgctccgtatctttgagtgccgggaaagattgctcttgacaatacaaaaggcctatcctttccttcttcacgcataacaagtccatcggaagtcgccatgtgaaagtaatatccatatgcgttatgaacttctctgtgttc

SEQ ID NO: 153710 - DNA, 445 bp, Arabidopsis thaliana landsberg
ttattccttataaccacaccacattcttattcagaaatcaaaatatttctaagcaagatctatacattgaactgaacaactgcctgagagattcggcagaaacatttctctatatatacactaccagaagatcatgaagcttttcttctaaccagacttgttcatcatatgcttttctttccttcttgttcttctgcattcccattctccttcagcttatatgcaccatctacatacaattccgtgtcccacaggaatgtcccaaacgccacagcctcgagaaccaaccgcttcagactcgaaaacgatgtcactatggtctcatcactctcttccgtgccaaaaagagccaaactttgcttctctatcagattccttgcctcctctgtccttggttttgcgcatctctgcaatgtctcgggatcaaagtctgagatgtaatgtc

SEQ ID NO: 153711 - DNA, 137 bp, Arabidopsis thaliana landsberg
agaccaaccatggggggaagcttcaattggtaaatcgatttcacggctgctcaataacgtttttgtgtggtcttctttgttgcaacgtatctatatcacttccagtaatagtggaaatcttcggaggagatccttag

SEQ ID NO: 153712 - DNA, 244 bp, Arabidopsis thaliana landsberg
tcaagattttgttcccacaaatcaaggttaggcaataactaataaagcaatcagtaatcttgctcagatagacaggtagatatactttgtcatagcatagtaatcttaattacattgcagatggagaagttgacagcttcaggttgattccagtcgctcaagttgctaatgtggttcggaagactagtttttttaaggacagttgttccctggtcattatggacttcttgtttcggaacgggta

SEQ ID NO: 153713 - DNA, 135 bp, Arabidopsis thaliana landsberg
gtccctcacttccctcattggacctctctaactttcctctctttaccttctcctgtttaaattcttctccttcctttccacaattgttgcctaaccaattccaacaccaaaaaattcatttcttgacgatgaaac

SEQ ID NO: 153714 - DNA, 405 bp, Arabidopsis thaliana landsberg
gagcgaatctcagatccaaaattttgcaaaatcctcagatcgtcttaccttctccgaatcgatcgatttttcatggaggacgacgacgagattcagtcaattccatctccgggagattcttccctttcaccacaagctcctccttgtccgccgattttgccaacaaacgacgtgacagtggccgtcgtgaagaaaccacaaccggggctttcttctcaatctccgtccatgaacgctttagcgttagtggttcatactccttctgtaaccggtggtggtggtagcggaaacagaaacggacgaggaggaggagtaagcggtggtggtggaggaggaagagatgattgttgaagcgaagaagctacaaaggttctaatcgaagcttggggagatcggttctctgaa

SEQ ID NO: 153715 - DNA, 193 bp, Arabidopsis thaliana landsberg
acgaagatgcgtcgctttttaggtaaatggcattttagttgggcccttaagtgttaggttttaggcccaaataagtccaatctcctaagcgacttttttgttatccccccaaaccttagttactttgtgattttacatacaaaacaataaacccctgtctggaggagtgttatgtgatgagtgtcattccgtt

SEQ ID NO: 153716 - DNA, 120 bp, Arabidopsis thaliana landsberg
tgaatcacgcttccaatgcatactcctgcctcaccctctacaacagacgaccccctaactgcaccacctctaaagtatgatggggctcttgtgaaccttccacctcgagaccatgacatg

SEQ ID NO: 153717 - DNA, 486 bp, Arabidopsis thaliana landsberg
gaggaaccggaatattattgtttatctgtgtttctgatcccgaggaagaactagacgaggaagaaggacggctagagttggaagaactgcctgatgaacctctttgaaccaaaatccgagtcatgctgcttcttaagtctttgctgtcctaatcaaagatgaaagattagagaatatcccaaggtttgtccctagttcttgctttaggacctacgataacaatcccttgagagagggattccttccaaccgttctccacctcgcagcaaaactttctctgcattcccctaccaatcatcaagattcccaagttttcttggaatttagatccgaaaaattccccaaaaacaaccacctttacaatctctacttaaccatacagaaccaatatcgaaacacacatgaaaactgacaaaagttgcagtagtttagctcaaattctcctctattcccgatataggaggaagctataaacatgaccaaaca

SEQ ID NO: 153718 - DNA, 470 bp, Arabidopsis thaliana landsberg
cttagctccttcactgcatattttttttataaattacgcctaagattttgatttccgattaatttcattctaagaaaaaagatttcatatccttgtgagttgagattagacttattaggccatggttatttcaaaacgtttaacgtatacaaaaggaaacaactctgtctccaagtaatttacacattctcattccaaccaaagaatagtagaatacaaaaaacgaaaagttgacactgcatatacaatagcaacgaacctagttatgttaggtaagccaaaaaacagactagtctgatggaaattgaccttacacaattagttttcatcatcttttaggtgtttttttaccggcgtggttcattcatagactttccttcagacaactcacccaacaatctttcaagatcttcagctgtatactttatgtatttctgaggattcttgccactctcaaccaaaggcctgcg

SEQ ID NO: 153719 - DNA, 393 bp, Arabidopsis thaliana landsberg
agggattgggctttcttctaatgggcctgatagaaaccaatgggcttggaattggcttgaccattggatgtcttcccagccatacactggccgtcaaactggtccgggtcccggtcccggacagtacaatcctcctgcgtatccgccttttccgacagctgcggcaaccaccacatctgatgatgtatcttagaagacggtggaaatggacgtgaccactccgactagcctcaagggcaatataatcgggcttattgatcgagagtatatagacttaggatcatatagacaaggccataagcaacggaaaagcccaacccatataccaagctatatggctccaaccgcatctgctaaggctaaagttcgagatcaaggcccaaccgtcaaact

SEQ ID NO: 153720 - DNA, 98 bp, Arabidopsis thaliana landsberg
ccacaagcacgacgtgtacagtgaacattagtttccatttttgaaacagctcttagcttagagtcctgaatatcacattgggttgatccttcaacacc

SEQ ID NO: 153721 - DNA, 97 bp, Arabidopsis thaliana landsberg
atattcagataaacgaatacattcatatgaagtaacaaatggagtacataaaggtttattggtccacataaaaagattataatcaaatcaaaacaat

SEQ ID NO: 153722 - DNA, 161 bp, Arabidopsis thaliana landsberg
aagataaaaccaaaatccttgacaagcgttgtgatcttttaagcacgatagatagccatcaactcaggctacagctgcttgtcctcatgcctcttgacatacctgtttaagaacacctgatcggtacatacgaagacacgcgatatcgaagggagttcact

SEQ ID NO: 153723 - DNA, 349 bp, Arabidopsis thaliana landsberg
gtcaccgtcgagagatcatgcgaagtaatgctcctcaggcggatgatactatcgctctcttcgtcgacgttcagaaactttacttccgggaacaacggcgacgctattccgatctctaccttcacgaacccttctttttcaatcgctcccggagattttctcgttcgcgaatggaaagactggtttaagtatctacatgtgaaacagagccaccaattaatcgatcgagtctttgacatccttcgagctccttctaacgatggagacgatagagctttttatctccacctctccaatctccgacttcgtctcactgagaaattcgtcctcgacgtgctttcacacactc

SEQ ID NO: 153724 - DNA, 195 bp, Arabidopsis thaliana landsberg
gtaccagtgcccaattcctattgagttggtgaagccaatgggcgatattgattatgaaggacgaggtttgtcaacaacactctctgtgttattctgaatctcccttgtacttgctttctttataagtgtcctttttcacttttcttgcagagggttcacctggtggcagagggaggggaagaggaagaccaaaca

SEQ ID NO: 153725 - DNA, 588 bp, Arabidopsis thaliana landsberg; identical to SEQ ID NO: 77589
  unsure (1)..(588): unsure at all n locations

SEQ ID NO: 153726 - DNA, 156 bp, Arabidopsis thaliana landsberg
cgccgcagaatctgagatcggatctttagagagagagagaaagatgcagagggacgtgtcgagctgcaacccttacaactatggagacgctctctattggaacgctcgttacgtgcaagacgcgctttctttcgactggtgccaaggtttctcaac

SEQ ID NO: 153727 - DNA, 399 bp, Arabidopsis thaliana landsberg
tttattcaaacttttcagaaacagatccttcctttgtgattttctgaagtatttactctcatcatcattttcttgggttgattcaatggcagaatcaaggtaacaatcattcatttcttcgatcttcttttaccctcttaacgattctcgaaatatgatcggaaagcttttctgcaaattgttgtttcaatatcgaaatttctctccataagcatggtaaaatatgaatgttaatacacatttttttatatgtttttaacaggtaaaaacagagattggctgaaacagaatcggaacataagaataagacaaaacccgtgttggcaaaagatctgaagatatgttttgttgcggtggtgcggatgaggaacccgccggtccgcccgcaaaccagtatgc

SEQ ID NO: 153728 - DNA, 214 bp, Arabidopsis thaliana landsberg
agcaggtactgtataccaatggagcgaggaagtttgcgttgataggagtcggggcaatcggttgcagcccgaacgagctagctcaaaacagcagagacggaagaacgtgtgacgaaagaattaactcagcgaacagaatctttaacagcaaacttatatctatagtcgacgcttttaaccagaacacaccagacgcaaaattcacttacatcaa

SEQ ID NO: 153729 - DNA, 93 bp, Arabidopsis thaliana landsberg
ctcgtcggagcgtatatctcagacacttacgttggccgcttcaagaccatcgctttcgcctcattcgccactctcctcgtacgtataatattt

SEQ ID NO: 153730 - DNA, 352 bp, Arabidopsis thaliana landsberg
tgaacctatagagccaacgaaaccagaggacagtgaacaaagaattgtataattcgatctcaactcgttcctttgttgattctttactccgactattatgaggattgtacgtgcgacagagacgttctcggcggagcttaaagagttcatgtgcgccgctgtgcaaaggaggaaagacgacgacggattcagaggctctcgtggcggtggtaaatctagaaatgccatggatcttgattctgacgccggaaacagattggtttgtgttactggtggtgtttcttacttggtcgtgcattgttaacgtctcttgtcatggaacccgttaaacgtcgtgattgcaggtaatcac

SEQ ID NO: 153731 - DNA, 113 bp, Arabidopsis thaliana landsberg
aaaattactctgttaatttgggttgacaaaccaacaaagtactttgtcagcaaaattatggctagttatttgttaatgttataaaatggactaaccaataaagatttttaatt

SEQ ID NO: 153732 - DNA, 455 bp, Arabidopsis thaliana landsberg; identical to SEQ ID NO: 32444

SEQ ID NO: 153733 - DNA, 531 bp, Arabidopsis thaliana landsberg
  unsure (1)..(531): unsure at all n locations
gtcaaggtcgataagcaaaggagctcattcggtagtaaaaagaagttaccaaaaatgtggacttgtggaatgaagtcgaagctgcattgcctgtgcctcagtgaacaaaggtacacatagaagaagtcattcatcttcgatttgacatgaggatttgaagtttttgagattggttagtttagctgaaatcatctgtcaaaattgaaatgaaaggggatatagtttgaagagaatcttgtcgttgagattaagaagctatctctctaaggattggtgctggtgaattatcaattttcttactgaatttttttgaacatgttgtatataaatggaatgtaacatttttcaatatatcggaaacgatgagcctaatcgcttcatggccttgctgatgaattgaatctcgaatgtcttttgttggcatgggaccatgttagcttcatgaaannnnnnnnnnnnnnnnnnttatgtaagaccaaaactcttcattataatgatatttacattcttctccaaaacaaaaaaataaaa

SEQ ID NO: 153734 - DNA, 118 bp, Arabidopsis thaliana landsberg
aatggagaattaggtcttgtttcttaatacttctcgtcatatacgagttattgtatacaaatgcatacattgactatgttataactgtcttatagtgaaacaatgttttcagcattag

SEQ ID NO: 153735 - DNA, 202 bp, Arabidopsis thaliana landsberg
agataacaaaacaaaaaaaagagcgtggctttatctatcatctggtatccactatccacaactggggtcagcttctggttctctctctcggtaactttctgagctgaagaaccctaattcttatcttcaccggattccgggtatagggctttgtaaagttgttgaattttcaaagaaagatatgctggtttgtctgggtttt

SEQ ID NO: 153736 - DNA, 953 bp, Arabidopsis thaliana landsberg
accccaaggcaacgagctcatgattgaggtccgttcttctgctctttccctctcagtttcttcgcagctgttttctaatttgcaatctattttatggatttggggtacttttgttaagggaacaaaacctatcattttccaggtttcttatggttgcgctttagattttatagtttagtgtaatttaatctgatttggggaattgggtgttggataagagtgttttgcagctgagaggattgaaaaattgaatatttatgatatttaagctcgctaatgaggttctcttacttcggattttgctcagcttcgctcctgtcaagtaatttttgttgtgatctatatatgaaatttccttttaatgttttatggtcgctacttgtgatttcatcatctttggaggttacaatcatcttattcaatcctttcttcggcctcagattgtggcttttgagtaaatgattcactgctcagctagagacaatggtgttggtaacccataaattgcaggtatcttagacatagatctgtaaagtcctaaattctactttgttttgtgtctctgtaatggtcatgtctgcaaatggttgtaccttccgtttcactcttgtaaagccttcttttacttgccacactagaaatatagatgtttacctcccccttgttctctcatgtagggttcacatgtcttgtctccttggagttcgccaacatggaccagaggcttgtgtttaaagagacctgttacgacagtgcactttgttgagaggaaagataagcatttacgattgaagcaaaaatgttgttttaggtgagtatcccactttacaaatccctgcttaggttatgtactacttagtttgagactcattactctctctgtacgactgtactctaggaaggtagatacgtagttatattgtggattaaaatgtacctcttaatacgctgag

SEQ ID NO: 153737 - DNA, 71 bp, Arabidopsis thaliana landsberg
tcgtatgagtatgtctcttgtagagatgttcaaacatggctgccctgagtttacaatatcctttcctgaag

SEQ ID NO: 153738 - DNA, 125 bp, Arabidopsis thaliana landsberg
aaaattcacatgttttgccctttctattgcttctttctgtacagccttctactgttagatagtggccatcagaatgcaataaactctaccttagattcatttgagaatgataatgagctattgag

SEQ ID NO: 153739 - DNA, 180 bp, Arabidopsis thaliana landsberg
aatcttctgtggagtgtttgatggacatggtccatatggtcatatggttgcaaagagagtcagagacaatctttctctcaaattaagtgcttattgggaagcaaaagtaccagttgaaggtgttcttaaggcaatcacaaccgacactgtcattaatgtaaccaacattaacaaccctga

SEQ ID NO: 153740 - DNA, 402 bp, Arabidopsis thaliana landsberg
gttggtgttaagctggaaaggttggtcttttagaagatatggttcttgatgggattgtatcatcaccattacggaggccacatgctcttaagaagcaatgggatgacttgggtagctgctctactgttgtccagaggcatcgtttccttttgactgctatgcttcttttggcattcctctgcaccatttatatctactttgccgtcacactaggcgctaggcacttgttgtgctcagggatgactggaaaagacaaggcaatgtgtcaaatggaacacatccaagccagtttctccaacggaaaactgaaattcttctagagtgtcagcctaagctgattgcattatataaacatttgtctctctgttgaaatgtgtgtgtaatcgcctaaagaatggcttg

SEQ ID NO: 153741 - DNA, 193 bp, Arabidopsis thaliana landsberg
tatcttatcatttcctcgaatagataaacaatagccgacaccggagatccttaccgtctcactttctccgcttctcttgtttgtcacttttcgataaaccccaattcacggcagaatcttgataattggagaaaacgaaagcgtatatggtggtgtgggagaacaattcatagctgtgaagttagttgatttc

SEQ ID NO: 153742 - DNA, 367 bp, Arabidopsis thaliana landsberg
aaagatgtgtacgtgtttgcagggacgggcgttatatgcagcagaagcagatagactaaggaactgggcagagaacaggacgaggttgtcgttaacagacgcgatggagatgtatacagagaatacttgggtctctgttttctctctttctgttgtttgcgctttcatcatcttacaaagcacaacacctagctcttttccaggcacataacaaacatcttcctcggatgtgttttaagaaaattgtaaacgtacatgttatgtataaaaaacatatatataacagaaccgatttgttcatgtaaacacttcttatagttgtagaatgtgtcgttgttgaaaacaatgaaaaaatagattgtaaact

SEQ ID NO: 153743 - DNA, 116 bp, Arabidopsis thaliana landsberg
ttagataaagactcaaaaaatctttcaataacatgtaggcaacagaaagtcgtcacattctacagtataagggaaataaagagacaagtccgaagagaagaaagtgatgattcatc

SEQ ID NO: 153744 - DNA, 436 bp, Arabidopsis thaliana landsberg
taccctctcttttactatttttatatgatatatatgtaaaagggacctctctccttgtcccaaaaccgaacataacccgactaaaccgggactgtaccgaaagtctcaagaatgtagtaaagaacacataaaagaaacaataattggtatccctatcttgctgcaattggggaatccaacacacaacaaaacagaggagtaaacagctagttcaaagtaaagttatgttggattctggtccttctcctctgcttgtttctgactccagctttgtggaactagactctgtttacctttattgcaccagagattgcgagatatgtgtggtaagtatggagtaatgtcttttgccgagagttattcaccatttgaacaaagcagaaactattttctcccgttagcccaattcctgttgctcattccaggtctcttgagt

SEQ ID NO: 153745 - DNA, 414 bp, Arabidopsis thaliana landsberg
atttgtgtgaaaatgacaaatacattgatgtacgtggatactcgtaattaaataagtcgtttaagttagtggcagaccaatagcccatatattataattcttcatccgtccgattcaaatcagctcaaaatttcaaacaagatctacggataaaatgacagggaatttttggagatatttttcgatcactgcgaaattaatcaatgaaattaaatcagatacgaataaaattaaatgatttacagagatgcataatcaggcagtctataatttccatttatttttataaagttataaatttaaacacacatactgacatacactatacattcatgatttttgttttctactcaaacaagaatattatatagatgacaaccgattaaattaataacataattctaaaataattct

SEQ ID NO: 153746 - DNA, 230 bp, Arabidopsis thaliana landsberg
agtacatatgggagatttagcccacaattttgatcaggaagaaacctctagctgcttttgtaatggatatccaatactgtggcactcctttggttttgtaaggtttgaacccaatctatgcatttttggtgtttccaaagtgcatcgattggaaacaggccataagtaaataactaaaatcggttcatggtatatataccacgtaggattttgaccttaaatgtaaaaga

SEQ ID NO: 153747 - DNA, 945 bp, Arabidopsis thaliana landsberg
gtcgtctctcgaccaaaccacaaaaaccagaacaaaaataactaaaaaacaatcagatctgagatcgaacaaaacaacatgaacacgttaatcccatcggagaaaagatggatcatcaccggcgttttactagccggtttagttggcggtgctttgcttttcacaagcttcatacgagccgctgacgaaacgctcttcctctgttccacagcaagcgccaaaagcagagcggtggctgcggcagctgattacgaagcgactccgattcagcttcaagcgatcgtccactacgcgacatctaacgttgtcccacaacagaatcttgctgagatctcgatctctttcaacatcttgaaaaagctagctccggctaactttctcgtgttcggtctcggtcgtgactcgctcatgtgggcttctttaaatccacgtggcaaaaccttgttcttggaagaagatcttgaatggtttcagaaagtgaccaaagactctcctttcttacgtgcgcatcacgtgcgttacaggacgcagcttcaacaagccgattcgcttctacgttcgtacaaaacggagcctaagtgttttccggcgaaatcttatctccggggaaacgagaagtgtaagctagctctcacgggactgcccgatgagttctacgatacagagtgggatctgctgatggtcgatgctcctaaaggttacttcgcagaagctccgggaagaatggcggcgattttctcggcggctgttatggctaggaaccggaagaaaccgggagttacgcacgtgttcttgcacgatgttaatcggagggtggagaagacttttgccgaggagtttttatgccggaagtatagagtcaacgccgccgggaggttatggcattttgctattcctccggcggctgcgaacgctacgattgactctggtgattataggttttgc

SEQ ID NO: 153748 - DNA, 185 bp, Arabidopsis thaliana landsberg
aattaaccgagacgcctgcccggagcaacataattaacaaaggtggtttttggatgaaaagaatattaggaactgagaaatgacttacggctcgagcaaaagcagacatttcctcttcaccagaaagcattgatacgatcgaagaaggcgagccagctgcacttatgctaccttctgcaagcaca

SEQ ID NO: 153749 - DNA, 376 bp, Arabidopsis thaliana landsberg
aactttgaaatggggaaatttaaactgaaaaaattaacgcgaaagagtacaatacaaacgagtttttgacctaatcagttactaagaacttacggatactcctaccatgaaaaatcaaactactgtaacaaaaaaaagtaaatgctaaaaacaatgaaagtaatatacaaagaaacaagtcaatgagaaactaacttggggctaacaactgaaccggtttggatcctaaatctctgctctaattaaggccctatttcttcaaaaacttggtacagcttgtggggactgaaccagctggtttaaaccggtttcgttgtcactggttggttccttcttccgcctcatctctatgactttccggtggtggttcgagtgc

SEQ ID NO: 153750 - DNA, 356 bp, Arabidopsis thaliana landsberg
tgtctttagagaacatctctgcctgtaacagtgacactaaaagattgcttctcgttcactttcttaaaatacagaacactaggcgtgaccttgacgctgagcttagatccgtgacctgcgactacctttgatttgtatgtagagtttggcgtgccgacgttggtcaacgttctgttgaaagtcacagtgaaggtgctatcggttcctgacaattttgccgacattgaaggatagttaaggtttctaggcaagattttgtttttcttggagcacttaacggtatcacccgatatgattttaagggtcttcgaagtgtagttcatgccgcagagaaaggcaatgtggtcagctttgtc

SEQ ID NO: 153751 - DNA, 426 bp, Arabidopsis thaliana landsberg
gtagacatacagggcaaacagggtagttcttgagaagggtagtctcagggtcaccaaggccacgagcagagatgtcaagaaagtagtagccctgcattttgagacggttaagataacgaccttcgtaaccaccctcatgaggagcgtaaatggcgattgccttgtgttcttccacgtcttgaagccattgtccgatgtccggcttcaccaagtcacctccgatgtagtcagctatgctgctacatttcacaccagtgcttcttcttctcttactcctagtattcaccaaaaaggaaccaactgttttgatcttcttcacttgcgaggcttcaaaacacggtggtgccacacgttgtatgcatattgcacggcttcccatttctttactaacaatgacttcttgtggaagtagctcataataaacat

SEQ ID NO: 153752 - DNA, 557 bp, Arabidopsis thaliana landsberg
accttttgtctcttcttctctaaaattctctttctccctaaaactaaaaaaccaaaaaaaccaaaaaatgtacgcaatgaaagaagaagactgtcttcaaacatttcacaacttacaagactatcaagaccagtttcatcttcatcatcatccacaaattctcccctggtcgtcgacatctttaccttcttttgacccactccatttcccatctaacccgacccgttattctgacccggttcactacttcaacagaagagcttcttcttcctcttcttcttttgactataacgacggttttgtctctcctcctccttccatggatcatcctcagaaccatctaaggattctatccgaagctcttggacccatcatgcgtcgtggctcgtcctttgggttcgatggtgagatcatgggaaaattgagtgcacaagaagtcatggatgctaaggctttagctgcttaaagagtcatagtgaagctgagagaagaagacgagagagaatcaacactcatcttgctaagctgcgtagtatattaccaaacacaaccaaagt

SEQ ID NO: 153753 - DNA, 859 bp, Arabidopsis thaliana landsberg
acaagagcttctacatctagcagagtctctccagctttcactttcctcgtcatcttcttcctcttatctctcactgcttcagtagaagctgctggtcgtggagttaacaatgacaagaaaggcggcggattaggagcttctttcatattcggagattctctagtcgatgccggaaataataattatctatcgacgttgtctagggctaatatgaagcctaatggtattgatttcaaagcctccggaggaactcctaccggccggttcaccaatggacggaccatcggtgatatcgttggtacgtaacaaaaatgaaaaaaagttctataacccatatatagtaaaatgatatatgtggtatacattattagtctagagattatgttcaactaacacacctacacatgtatgttgacgtttattactctttttctttgttaaaatgattaattttttttagtgaatgattctaaaacgttaaatatttgatttacgtttttttcaggggaagaactcggatcagcgaactacgcgatcccgttcttggcaccagacgcgaagggaaaagctttattagccggagtgaactatgcatctggaggaggaggaatcatgaatgccaccgggagaatctttgtatgtaccaaactaattttaatcatatgtgcatttaaaaatttctaaaatttattctagagttatgaagttttaaggaattgtaaatatttggtaggtgaatagattaggtatggatgtacaagttgatttcttcaacactacacggaaacagtttgatgatctacttggaaaagagaaagcaaaagattacatagccaagaaatcgatattctcaatcact

SEQ ID NO: 153754 - DNA, 750 bp, Arabidopsis thaliana landsberg
cctgaatctcaaactcaacttttggattctacaatgagtgctgaaggagttctacttgctggtgttcctggagctggtggatttgatgccatatttgcaatcactttaggggattccgacagcaaactgacccaggcatggagttcgcacaatgttttggccttgctggtgagagaagatccacatggcgtttgcctcgaaagtggtgatccacgcaccacaggtattacttcaggcgtttcatcaattcactttgagtaaacaacattgtttcagtgtccaattattaggtgcgtcaccaagttcggttgagtatactgttatgcatatagacttgggtgctaaatttcttggtgtaagcatttttatacccattgtaaggtctttaactcttggaaaacttgcgggaaaataaaataaagttgatttcaaatcttctcatttgtgtttgttccattcactgcttctgttattggtatatcttcatgcttgtaagagtctggaacaggaaattaacattagagaaagtgacggatttaaagctaccaataatctttacaagaacaagttccacctttaaacaggtgaaacctgtttctgtctcttacaacaatctctctttcgtagatcatggagattttctttgtataagtgtgacagtcactacacatcctcaggtttctagctattttaatgatagaccctggaggtgtatacaatagtccaaaggcaatagccaccttttggctg

SEQ ID NO: 153755 - DNA, 202 bp, Arabidopsis thaliana landsberg
tgtaaacgctctctgattggtaagggaacatccagctgaatcagatcagtttttttcccatgagtatcaatcctgccatggctcttcaggagtacctcctcatcgtcttcaacaagctcagatatatccatagatttgtatttgtctgtacgaaagaagtctatgatgtaagagttccacatgaagaagtgaattacaaaaa

SEQ ID NO: 153756 - DNA, 210 bp, Arabidopsis thaliana landsberg
ttgaatgtatatttttgattatacaatttcaccagaattcataaataaaagaataataacactcattaaaaaaaagaagctagaagatcaatgcatctcttgcgacatgttccaaccaattcgcatgttccgacatagttggttgttgattcggatcctaccgtacacacaactctgccacgtcagcaagtttcaacaacggctccacgt

SEQ ID NO: 153757 - DNA, 60 bp, Arabidopsis thaliana landsberg
agaaaatctgaatcgcacattgtgagttctctgttttttttgtatatggagaagaaagtg

SEQ ID NO: 153758 - DNA, 158 bp, Arabidopsis thaliana landsberg
  unsure (1)..(158): unsure at all n locations
tatatatattttttgaaatatatttttataactatattataataaatataataagaggtccgtttgaatctttcaaactacaaaaccgactctggttctctagagagaccgcacctgatacttttcagaaaacataaganaaacaaaaaaagttttga

SEQ ID NO: 153759 - DNA, 623 bp, Arabidopsis thaliana landsberg
aaatgtaatcgaaccaaacacattatgaaacatatgttgtgtattgtactattcatattcatttatcacattacaatcatcaaccaaaccaaaaacacaaacataacaacaagggacaagaagaacaaacattgatccatacctaaagtttcataattcgaacatcaaaaacatattttttaattatcataagtacgacactcatcagtctcaggattatcattgcaatactcttccaaaggatcggagccaccagctttcttcttgtccctagcatgactcgccgccgcactcagctcctccacctcgtcccaagccgctacacactccccgctcaccggatcatcagcgcatgtctccttagcttcttgtatactcttctccaccttctccgatatctctccttccgatgtagccttaaccacaaccatccgcttcatcgaaccgaatttccacgggtaattcaaccggaccggacctaatacacgagccacaggtcgaacgaccactcgtggagtcgcgacgttgaggccagctgcagctatggttgtcatcgtcggaggattttgatggaggagaaaacctttttgatgtgaagagatgaagaagataaaatatactcg

SEQ ID NO: 153760 - DNA, 138 bp, Arabidopsis thaliana landsberg
tgtgatgcaaacagatgagatgtgatcagaaatcactaagtcaagccaagcaataacagttttggggtttctaacagtcttaagcgaacatgcagaaaacagaaataattacagaattactaaagtcactcgactaca

SEQ ID NO: 153761 - DNA, 118 bp, Arabidopsis thaliana landsberg
tcactttgcctttgtctttgatttttctctgtatcgtcggtctctcttttgcgtttctcgatcccaccgtctaatccttctccggccaatgactatgatgactccgcctcccgttgat

SEQ ID NO: 153762 - DNA, 436 bp, Arabidopsis thaliana landsberg
taagctctaaccatacatatactattcacttcattaaaataaaataactaagtcaatattttcccgacataactcgtgtgacctctttatgtatgcagttcaacaaattatcgaagtaagtgtacctattcaagcgtatattaactagatatacattaataccatgtcccaattcctggagtctagagcttgagaatcaaaggcagaggtcacgagcaagaaacaaagtagacgcagaggcacgaagaacccacaaagaatagatcgaagataaacccagtgagctatactagacgagccaaccagagaccatttggctgtagaaatttccctagttgaagaaaactattggatttgacttgccaagatcctaaaattgcacaaagtcaatctttttcctgaaaatgacaatttgttgctcatgaagggatgtttg

SEQ ID NO: 153763 - DNA, 375 bp, Arabidopsis thaliana landsberg
  unsure (1)..(375): unsure at all n locations
actctactgcaaactacctcttgtggacgatccagttcgagacttggctcaacaatcaacgtttgcttggttttgttactggtgctaatccgtgtcctaatgctacgagatctatcagaaatggagatcaagttacagaagctacaaatcctgactttctcacatgggttcaaaatgaccagaaaatcatggggtggctccttggttcgttggctgaagatgctctgcgttcagtctacgggttacacacatccagagaggtaaggatttctattgctaagaagtacaaccgtgtctgtgtctctaggaaaagtgacttgcaacgttgtttgaactatgtctctaagaatgggaaatctatcctggagtatctan

SEQ ID NO: 153764 - DNA, 330 bp, Arabidopsis thaliana landsberg
gatgaattctgcttctggtttcttatgtatacttttcgcgattattatcattaggtggactatgacgaagctattttcctctggcgtgtggacaagagggatttttcgctttggaccatcactagcaccataacattgttcttcggaatagagatcggtgtccttgttggtgtgagtattcagatactatagtatgttcagattcatctaactaatgtatatatgatttctgcataggcctctaaggactcacgcagttgcaatgttttcaattttaggttggtttttcactagcattcgttatccacgagtctgcaaaccctcacattg

SEQ ID NO: 153765 - DNA, 591 bp, Arabidopsis thaliana landsberg
ttaacaaaaatcacaaggtttaagcatgaggtactaagttattgttgtatagtttttgtagttatgaaagtgtaatttataatgacatcatttatgtaagggcaatatagaaatttgaagaacggtcgcgccgaaagttagtcaaagtgtcaaaccctgcttcgagaacttaaaaatttatagtaagtacgattaatgaccccacattattatggatcgatccctaacttctcacgttatttgtccagaatttgtttgcttattgcgcaaattacattaacaggcccaaacaaacgcttgataaagcccattaaacatctggcctaggtccgaattattcgttaatctaaacgactgcgttgtaactgtcgttaattgtggcggacaagaaaatgcgagaagccgatgacaacaatgcataaatgctaccgtttacgagagagatgcatagattctctcccatagtcgagtttcttcttagcaaacgccaaattttcttacattattctcaatttaagtctcgctttgacttgattcaccgaagttttcacgtttctagagctctcgaagataatttccggagaagtaacg

SEQ ID NO: 153766 - DNA, 524 bp, Arabidopsis thaliana landsberg
  unsure (1)..(524): unsure at all n locations
tgaaaatagtacttaagaggattaaaaaaccaaaagcaagaagagtcatagactcaaaaacataacaagacacaaagtacttaaagtagcaaataaattacttgctaacattttcttcttcttttgtctttcnnnnnnnnnnnnnnnnnnnnnnnnntactcatcagccttctctactggagctgtcacggaggcttccacggcgggtttctcctcctctgcctctggcttcttctcttcctccacaaccactggagcttcctctgtcttcttttcttctacttcttcctctttcttcgcctctacaacttcctctgttttgctctcttcctctacaaccaccggagtttcaacaggagtttcaacctgagcttcttcatctttactgatctccacaacctccggagtttcaacttgagcttcctctgtttcttcgattggtttctctgtctcttccacgaccaaatctttagttgttacttcgactggcgcttgagattctgttaccggaactggaagagact

SEQ ID NO: 153767 - DNA, 565 bp, Arabidopsis thaliana landsberg
atattttaagaagataagatgatctcaatctcatgatagtaatggtccatacaatccaataactctaagtaatgtggtgaaacaaagtaaatggccctaagactaaaacagtacaaaagtatggggctccattattgttcgaacaaacaaaaaaagaaatagagagagactcaagaagagaagagagactagagagagatccccattcagaaaataaaaatagaacccaacaaaaccaaaattcccaaattgaccccaaaatttacgttcctcgtcaatgaccccgcgttccctggacctcccgccgctgttcctggggtagtcgagccactggtgcccggcgccggagcagatcccggcgaaggagcagagcccggtgctgcatcttctgtgaaactcaacacacggtgggagcccaaattatcaggaccgaaaggatgtacaccgggacgaccgttggtaacattgccgccgatctgccatacctgattcacactatcagctcccgccggaaccttaaccgtcgtgaaaatggcgatcctaccgccgcttaacgactcggcgc

SEQ ID NO: 153768 - DNA, 205 bp, Arabidopsis thaliana landsberg
atcgttagtgttgttctcttcccatattgttaaaacgacttcgtttggttcaagaaaaagcttcctgtggttgaagtctctctgctcaacctaagagatgaaaatgtatcatccatcttccattgtgtttttgttcgattccttctctatttttgtagttaaaatttggtgtggttgttgcagagtcaaggcaaatgcaggagca

SEQ ID NO: 153769 - DNA, 409 bp, Arabidopsis thaliana landsberg
tcagtagagagaactcactcggttgagtcgacttggatcgagtctttgatgacgtggcgactcgatctgattttgtgaatattttagagatttttaaggtgttgtggataaatgacgtggcggctcgatcttagtgacggtacaatcggacgatgaagaaaaaagcgttaagagtaacaaaaaaaaggaagaatttgtaaagagatgataatgagagaatttaagagctattcttttggcttttttctctgcagttttttttattgttttcgttattttcttgtttttattttggttttcggctttattttgtttgttgtttattaatgttatatcattttgtaattagttctcaaatgtatttggataacatcttaatttgagactttagaaaagaacatttcagttg

SEQ ID NO: 153770 - DNA, 289 bp, Arabidopsis thaliana landsberg
gttcattttgaccatagtagtgttcatcattagtcgaacggttaaatggcaggcattctgagttcaagcaaaactagaatccgctcttaaaccccagaaacatcataaattcatctgccaatccagaaaaaaaaaaccttcgttgtacagacatggagattccaatagagacttcttggaaaaaatttgcctggaaaccgatgcgattggtttcttatctctttctcttggcaccagagcctcttcctgtagctttcttctcagcagacgtatcagctgctttccctct

SEQ ID NO: 153771 - DNA, 428 bp, Arabidopsis thaliana landsberg
gcgcatgtgaacctgtagaaatgaatcatatagtcatgaatgcacgattttgtgtatgtaggcttaggaaaaacaggataaagttttcaacttgatcaatgttttttttttgtctttgttctgtttttcttatatgcttttggggatttggatgttgcagaacaaccaggtgtgattcaagttgtgccaagccagacttatcagctgcacaaacctggtggtggtggtggtttcaagttgacctaacttgactttgtgtattctctacttctcaactgaacctgttgctttacagaaactagtctgttgttgtattgttgcgactttgaaccaagtatctaactaaaataatgttatgaagttgcttttattagagttgttcagggttggtgagtaactgagtttttgccaatatattattctaagaa

SEQ ID NO: 153772 - DNA, 120 bp, Arabidopsis thaliana landsberg
tggacaaccacatcgagtttggccgatttagaagttatctaaggcattggcaaaggaagtcgtggtaatgtccagttggtcaaacacaaactcactcaacagtttttcgctcttaaggtc

SEQ ID NO: 153773 - DNA, 480 bp, Arabidopsis thaliana landsberg
acacagaaacgacatcaaagatccaaacttaacacaacgaaacaaaacgtcacttcctcctaaacatcttgagtacatactacataggaccaattaatcatcatgatctgtcttaagggaaccaccgcttgaacttgaacaccaccaccactagtccaccaccgagtccaccggggaaccccattgcaccacccaaaccaccaagcccaccagccccaccaagaagcggcgtcccactcgggagtgggaaagtcatgccagagccaccacttccaccacctggcatccccatgaatccaccaactccggcaacaccgccaattccaccgccgtagatgaagttcttctggtcctcaagaggggcattaaccatatgaggctcatctttggtaggagcagctcctcctccttggagaggcagagtctgagtttgctgtaaagtgcgagcacttgcgtggaccaaaagcaacatagctgcag

SEQ ID NO: 153774 - DNA, 171 bp, Arabidopsis thaliana landsberg
atcaaagatggactatgtgagaatctttagtgtttttgtagtaacgttatggatcataagggttgatgctagggttttcggaggacgaggaatcgaaaaatttgttactttcggtcagaattatattgtcacgtggggacaaagtcatgtttctacactccattctggcga

SEQ ID NO: 153775 - DNA, 89 bp, Arabidopsis thaliana landsberg
cgttagataatcagttaacgactgttaacagttagtttttttggcctggtcaacgaatgtttatagtttaaacggttgtcaacgaatgt

SEQ ID NO: 153776 - DNA, 118 bp, Arabidopsis thaliana landsberg
atttcaccaggagcaagagaaagatgagcgatgcgagaccagtgcccaggaaacagagtccatggggtttaccggaaggtcaccgtgagcccaaagcgcaccgccgcaacgatcgtgt

SEQ ID NO: 153777 - DNA, 602 bp, Arabidopsis thaliana landsberg
tgctacaaacaaacatcactaatctctgcaatttttactctcctccttcacgtcttttcctcttaattttttctaggaaaattcttaaatccatctccgcgatacgaacaggtttgtttctccgatcatactctctctctttttgttttttccccaatcaattttggtttggtatctgattgttccaatcacttttcgatataaatgatgtgtaccgaaatttcagaaaaaatgatttaacttttatgtgatccagcatttttgtgtgattccgttgaaaattcccattatgttgtttagatcggtgttttaagtaatcgaatcttcgctcttgttgttagtgtatgccacgatcgtgatctttttttttttttgagatttgtcatgttgatttattgattctgtgttcgaagatcttggggatcttatttctggtttgtatcgttgcgtttatttgagatcaatcatgcatgaatctgttttgttttacatatatctttcttaaatttgtgatgtatttatttgtttggcagagagaagaagacttagaaaaatggctgttcaacctacaagaataggtctagctggacttgctgtgatgg

SEQ ID NO: 153778 - DNA, 78 bp, Arabidopsis thaliana landsberg
ttttttattttttttttttttttttttttttttttttttttttttttttttttttttttttttttttttttttttttt

SEQ ID NO: 153779 - DNA, 108 bp, Arabidopsis thaliana landsberg
agagatcagaaatcggaaatgctttcattaaagcttgctcgatctcttcttctccacgagactctcaatctcactcataattccggcgatacagacgacgttgatgaa

SEQ ID NO: 153780 - DNA, 269 bp, Arabidopsis thaliana landsberg
tctctcttttttctttttagataactttttggccacatccaccctccatgatacacacacgctagtttcgaggatcagaatacatacatacctatgtttattatatagatagaacgataatggaacacagagcacatgcctcatctgttgtctttttattattacttattactcttctcctccacttctgtattattacagtctgttaaagtagaacccccttttgtttttttctttctatgtctcaaaaattaaaacaagttatgagg

SEQ ID NO: 153781 - DNA, 398 bp, Arabidopsis thaliana landsberg
aggcgaaaattaaagtttatagctgtaacatgaacttcataataatcagtttatacttaatagcataactaatcgatcattgacttcgaccaaaaaaacgaaacaactcgactacaacgctttgtcaagaatgttagattttgaagagaaaaaggacgacataacataactataaagaaacaagaccaaattctcatatatatgagtttccacattcctcatacaagtacaacatcctctgacttaactcttcgcaattcagcttgtaattttcaatcttctccacttgtaaatgcaaagtgtagaaaagcctttctccttgagaccttgaagatgacatgtccacaagaacaaacctatcttcttctaacccacttaaaacattagatatcgaaaag

SEQ ID NO: 153782 - DNA, 182 bp, Arabidopsis thaliana landsberg
aaaagaaagaaaaatgtcaacgttagtatcgtaggttagctttgctctcttatgcagtgatcaattattcacataaatgttttgtcaaatatttaagtcgccctcatgcattaaattagtgaagtgaacattgatcaaagatgtatatattaagccatgagctttcctcatgaatcgtaata

SEQ ID NO: 153783 - DNA, 90 bp, Arabidopsis thaliana landsberg
tcagactaaaccggtccaatgtcattttaatggttcaaatttgatagcaactacgggaccacaaaccaattacacttaaccaaacaacta

SEQ ID NO: 153784 - DNA, 535 bp, Arabidopsis thaliana landsberg
cttcttcttcttcaccatttatttctcatcatcatacttataaaaagtaaatcagaatcccgaagcaaactttcaatcttccatcatcatcatcatgtccgatacacatacatacatacatatctttcgtgtgatttatacttattaaagagagattctctcattaagaagaagtttccttctttcttttctttttcttctctctgttcatggcggttcaagctcatcaccatccttctactctcttcttcctcaacaacggacaagaagggaatgatcagccgcataaatctcagtttcattcaatcaacgccggtttgttttctaaattctcgtttttgttgagaaatcaatcggtttattaatatctaaccggttatctttttgggcgggtaaaaaaaacaggggttgatacaagaaagcgagcgagagaagtttcttcggtgattgatttagatatcacggcggctccgatgaaccctccgccgcaaactccaccgcaagttattggacgtcgacaaaatccgaatgttgt

SEQ ID NO: 153785 - DNA, 297 bp, Arabidopsis thaliana landsberg
gagttacatttgatctccgattcattcattgaaagattcagaggcaccacaagcagatcgattaaaggaaagatctttgaatcttcctctggtaatcagctctacaacatctttggccattgggacaggtaaagaaacttggaatcataaagtcactacagctcttaagaacatgaaaagctttgaatgatgaattgatgatctccatgatgtttcagaacggtaatggcgaaaaatctgaagactggtgagctcgaggttatctacaatgccaaggagaatatcacaggactcaaa

SEQ ID NO: 153786 - DNA, 104 bp, Arabidopsis thaliana landsberg
tagatatcttttcccgcccttctcataggtcccgtctctctttctctctattttacgcttttaacctgaacgattcttagggttttgattctctctctctcccg

SEQ ID NO: 153787 - DNA, 121 bp, Arabidopsis thaliana landsberg
cccgaggaccgctctgtttgtgagcttctttgcaatatatatagaaaccctctagaaccctaatagagcatctcaatccaattaggaggtctgaaaaaaatggaaggtctcgattcagtct

SEQ ID NO: 153788 - DNA, 99 bp, Arabidopsis thaliana landsberg
tctttctcctttgtttccacattttagtccacaaatctccatttctgtcggtgctccaagctttttctcaagatccaagttctcatcatctcctccagg

SEQ ID NO: 153789 - DNA, 563 bp, Arabidopsis thaliana landsberg
tgttaatctcaccattatcttgtcactacgcatcatctcatctccttcctatattggaaactccgactttacctggaatcgtacccgatttgatttcactcgagataaaataattagtgcaaaaaagttctcaccatctttctccgtcttgtcggtcacgtttttgtcctcgtagctaaaaaaatcagctttctacaactccgtaaggttgtgactttctgtgctaatcctctttttctcttttctctgtaaattttgatcagatcataaattttttataagattttcttctggggggttttgattattatcactgattttgtggattggtctttgttttaaggtggaagcttgagattatgcagaagaaacgagagatctgtggttatagagacaaattagacaagaccttatcttctcctgaactcactaatcacgagactctcaaatctcttctcagaaaccagcttgaaggctttgttcctctgaaatctgaaattttgcttttggatttttacaatttggagtttactgttatgttaatagattttggtttgatggat

SEQ ID NO: 153790 - DNA, 311 bp, Arabidopsis thaliana landsberg
ttagccaaaatccactaaaataccattaatccgtctgttataacttagatcctacatatacacaaaccgttggggttgatgcaaatttctaagagtcgttgatgttcgaacttatacgagcttgttcaaaccgttgataagctcgtctagttctaataaacaacacaagactcgaacctagcccaagaagagacaagcaaccccaccacacaaaggtcaagtaatagcaatctcgtcccatacacaccaccgactccgaggtcattgatttggtcccggtgaaaccatgtgagtcatagaccaatgcagcc

SEQ ID NO: 153791 - DNA, 362 bp, Arabidopsis thaliana landsberg
  unsure (1)..(362): unsure at all n locations
gtcttgctccaggagtagctgctgctggacctgagacagcnggatatctagctccaaatccttcttcagggaacgatggatcttctttgattccgacctcgttcacaactgtactcagtgccgtactgttcgttttgttcttctctagtgcgtaaaaaaaaaactgaatcttttttcaccagctagatttggctgtatgaaattgattaatggtttttattagggttaatctatgtatgttttggagtgttctgtttttagaccatatcggtttctctattactagcgtttactcttttagtttatgttattactttgtctcacaacattggtccttttattcgatctatcgcttattcctt

SEQ ID NO: 153792 - DNA, 638 bp, Arabidopsis thaliana landsberg
ttcgttgatttctggttcgattcatatctgcgctgagcttcgtctccgtcaatctccgtcgtgtttaacaatctcttcttcgcggccaaaatttctctcttcccgtagtaagcagttctctctcgaccattttcctcagatctcacgtccgatcaaagtcatcgcgagaagcgccatggagacgacggcggagacaattaccggcggtgttcccaacaacacgatgaagttattgttcgttgagatgggtgtcggttacgatcagcacggttacgtcagatctttagttttcttactctcaaaatttgcgtcttcatcgatcataccgatgtgagaattgagatcgaatcttgaaaatgttgaaaaaattgaaacaggcaagatgtgacatctgcggcgatgaaggcttgtaagaatgcaatttcttcgaattcgattcctgcttttaggaggggtaccaaattgaatatcatcatcttggctcaacaatgcaagtaattatctagcaatttcgaacttttaacttgatacttagtggcgttgaatgtgttggtgaaggttcgattcctggagtttcatttggagaaatgaagttgcagattaagcttggagtgcctcattctcttcaccagcagctg

SEQ ID NO: 153793 - DNA, 583 bp, Arabidopsis thaliana landsberg
aaagcagcaaatcattgataagagattttgggttcaagaaaaacattgaaagtaacacatacacaaataataaggctttttaaagaaatataaattgagtcttataacaatacacaacagacccaatctattgggcccaataaaactaggcctctatagagtaacgcaaagaggaggaggaagagcacagttttattttgaaagatacacaagtagaggggagccatggcatcaccatcctctgggaggtcctcctgaggactgcccactcaatctgtcgaggagggtgttgaagtcgatgggttggccactctcttccatccgctgaataacagccatgacatggtctcctctgaaacccatgctcactagcttctctatcagttcaccgtattttgatctcaacacaggtggtgcaccaatgttaccgccacctgcctggtgcggctggggagagtatccaccaccttgtggaccttgcaagtaatgggcttgctgctgctgctgcggctgaggtggtgggtattgcattcgcccaccttcatacatggcattggcatacccggaaggaggaggaggtcct

SEQ ID NO: 153794 - DNA, 784 bp, Arabidopsis thaliana landsberg
gtgtttttttcaggtaacagataaacacgaatgttttcagaagtagaaatggctcgagacgtggctatatgtgccaaacacttgaatggccaatcgccgcaccaaccaattctatgcagactactccaagatttaatacacgagaaagcgtgcagggaacacggattctatctcggcatcaccgctctaaaaagcatcggtaacaacaagaacaacaacatcgacaacgaaaacaatcatcaagcaaaaatcctcacattcccggtgtccttcacatgccgcacattcttgcctgcaagaggagatatcttgcaagggactgtaaaaaaagtgttgtggaacggagcttttatcaggtcaggaccactcagatacgcatacctctcactcttgaaaatgccacattatcattatgtccactcaccattgtcggaggacgagaaaccgcattttcagaaagacgacctctcaaagattgctgttggagttgttgtgcggtttcaggtgttggctgtgcggtttaaagagagaccacacaagagaagaaacgactattatgttcttgcaactttggaaggcaatggttcatttggtcccatctctcttacagggtcagatgagccatacatgtaacccaaacaaggcaccaaaagttaaaagtctttagatacttttttgcttttaggttaacctcagattcgttggggttgtttcgtgttaaactggatcgacaagaaatatttgtaaacaaagttgacagaaccaattacattctattaatttc

SEQ ID NO: 153795 - DNA, 236 bp, Arabidopsis thaliana landsberg
  unsure (1)..(236): unsure at all n locations
agttgattaaaatatataaactttgttataaaatgcagtaaatnagttggtgtgtgagaaggagctcttacccntgttgaagaatggataaactcaggaggaatcttgtagagatcttcatcaacgggcttaggtggcttacaagtcagagcaacgtcgttttgaactgcttaacaccgttgacgtcaatgtaatacttgtccgactgtgcactgacgtcacgcacacgccttgtg

SEQ ID NO: 153796 - DNA, 87 bp, Arabidopsis thaliana landsberg
ttgctcctgtcacagtgataataatctcattcatctttcatttagatcagattctgaatctgttgtttctactgtttatatgcatta

SEQ ID NO: 153797 - DNA, 460 bp, Arabidopsis thaliana landsberg
tccaatcaacaaacacctctctgtttcactcccgccctttttcgaattcttctggtaaatcaatcttctctctcaacttctctgattcattgcttcatttcaattttccctttttcatatcttattaggatgtgttttgtctctgattttcttcgttttctgttgatgggttttgtctattttgtgttaattgttgtaaagttagggtttttttttttctttctgagatggcggagtcgcaggccaagagtcccggaggctgtggaagccatgagagtggtggagatcaaagtcccaggtcgttacatgttcgtgagcaagataggtttcttccgattgctaacataagccgtatcatgaaaagaggtcttcctgctaatgggaaaatcgctaaagatgctaaggagattgtgcaggaatgtgtctctgaattcatcagcttcgtcaccagcgagtatgt

SEQ ID NO: 153798 - DNA, 243 bp, Arabidopsis thaliana landsberg
agaaattaaaggagaaaaatcgatcacgatggatattcgtagtgatgatgcaaaaaaacctatgatgatgtggttcttagggatgctgttgttttccatggtggccgagtcaaatgctcaactgtcagagaattattacgcctcgacatgtcctagcgtaacctcacgcttagcaggcggttactcaaaattcaaacaaactgtcacacggctcctgcaacgttgcggatgttcttccggcta

SEQ ID NO: 153799 - DNA, 286 bp, Arabidopsis thaliana landsberg
cttttcttcaatttcgggtaaaccattttcgttctttcttcttttaacaagaaaccaccgctctgtacaaaacaaattctccgtcgtttcttctccgttctccggacaattcaaatttctcagaaagaaatttgtgctcgcgagttccgcgtgaaatacatggcaatgttggcggcgatggactcacgttcttctctccatcatcaatcgttccatgtttagcgatgaccctttttgccggtgtatcgtatgaaaaccatctcattacaaagtatctggtttccga

SEQ ID NO: 153800 - DNA, 2268 bp, Arabidopsis thaliana landsberg
gattaaccaccatttcccgtcatgaatccagctactgacccagtctccgccgccgcagctgctcttgctccgcctccacaacctccgcagcctcaccgtctctctacctcttgcaaccgtcacccagaagagcggttcaccggtttttgcccttcttgtctctgtgaacgtctctcagtcttagatcagaccaacaatggcggttcctcttcttcctctaaaaagcctccgaccatctctgctgcggctctcaaggctctctttaagccttccggaaacaacggagtgggcggtgtaaatacaaacggaaacggccgggttaaacccggattcttcccggagctccgtcgtacgaaatctttctcagcatccaagaacaacgaaggattctccggcgtgtttgagccacaacgtaggtcttgtgacgtcaggcttcgaagctctctttggaacttgtttagccaagatgagcaacgaaaccttccaagcaatgtcaccggcggtgagattgatgtcgagccgaggaaatcaagcgttgcggagcctgttctagaggtaaacgatgaaggagaagctgaaagtgacgacgaagaacttgaagaggaggaggaggaagactacgttgaagctggcgactttgagattctcaatgattccggcgaactaatgagggaaaaaagcgacgagattgttgaagttagagaggagattgaagaagcggtgaaaccaacaaagggtttaagcgaagaggagttaaagccaataaaggattacatagatcttgattctcaaaccaagaagccatcggtacgacggagtttttggtcggcggcctctgttttcagcaagaagcttcagaaatggaggcagaatcaaaagatgaagaagcggcgtaacggcggcgaccatcggccaggatcagctagattaccggtggagaaaccgattgggagacagctccgggatactcaatcggagattgctgattacggatatggtcggaggtcgtgcgataccgaccctcgattctctctagacgccggaagattctctcttgacgccggtagattctccgttgacatcggtaggatctcgcttgatgatcctcgttattcgtttgacgagccgagagcttcttgggacgggtctttgattggacggacaatgtttcctcccgccgcgagagctcctccgccgccgtcaatgctctcggtggtggaggatgcgccgccgccggtgcaccgtcacgtaacccgagcggatatgcagtttccggtggaagaaccggcgccaccaccaccggtggttaaccaaaccaacggtgtgtcagacccggttatcatacccggcggatcaatccaaacccgagactactatactgactcatcgtcaaggaggcggaaaagtctcgacaggtctagtagctccatgaggaaaacggctgcagccgttgtggcggatatggacgagccaaagctttcagtgtcgtcggctatatcaattgacgcttactcaggatcactgagagataacaacaactacgccgtggagacggcagataacggatctttccgggaaccggcgatgatgatcggcgataggaaagtgaatagtaacgataataacaagaagtcgagacggtgggggaagtggagcattttaggacttatttacaggaagagtgttaacaagtatgaggaagaggaggaggaggaagaggataggtataggagattaaacggtggaatggtggagagatcgttatcggagtcatggccggagctgaggaatggaggaggaggaggaggagggccgaggatggtgaggagtaatagcaatgtgagctggaggagttccggaggtggatcagcgaggaaagtcaacggattggataggaggaataagagttcaaggtactcacctaagaatggggaaaacggaatgttgaagttttacttgccacatatgaaagctagccggagaatgagcggtacaggaggagcaggaggtggcggcggcggagggtgggcgaatagtcacgggcattctatagcgaggagtgtaatgaggctgtattgatcaacaaaattgttcattggatggtttaattagctctatgaagctgaacctttgtttttagtatttcgttggtttaggtttaatttcggttcaattggtttactttgtaatgttaaggaggggatgcattctcaaacgaatcacttgttgtcgttgtctattttaaccggaataaaccgccattcgacc

SEQ ID NO: 153801 - DNA, 366 bp, Arabidopsis thaliana landsberg
gagtcacatctcctaactgaaaaaaactcgccgccggagccaccatttgcgatttagattgccgtcctctcggtttcctcttaggtcttcctttcgccttcctttctctccttctctccatcatcggtgtcattatctggatcgtcgggtcagtttatctcatctctgatttttttgattttgaatttggaatcatcaatttagcttctggttgaaatttgttttgtttggcagattgttgttatcatgcatatgtccatgttgcttgtgtgtgactgtactagtggagatcgcaattggtttgattaaagccccaattcatgttatggagtggttcatgtccaagatcccttgttgagatcttct

SEQ ID NO: 153802 - DNA, 631 bp, Arabidopsis thaliana landsberg
tgtgcgtcatgatgagaggtccactatataggcgtcttatcttccttggtcgattaagattcatttagatattagaaggaatcatccaaacttgtcttattcgcgacaccaagatttgttttctagtaagaaacccaattcagcccatattaggcccaaatttaggaaaggttctcaccaaaatttgaccgtcaattattccatcgacggtctataacgtgaccacgcgagatattttgaaatgtatcgctgtttttagtttcttttaaagtagttgaagataatcagtctgaagacaaacggtgtgtaagtgaagaagaaaaataaggaagaagaagaagcagcagcaatggtggagaagtcaggaggagaagtcaatttcccaaaactggagaaaccaacaggcaagaaacagacagcgacggttgttgtgggagtgttggcggtgggatggttggcgatagagctcgtgtttaagccattgttcaagaagctgagctcctccaaggacaaatccgattccgacgatgccaccgtccctcccccgtcgggcgcctgaatatggtgagtgagaatttaacaaagcctctgcgggagacacgtgtgttgaagctcatatattattagcaaa

SEQ ID NO: 153803 - DNA, 174 bp, Arabidopsis thaliana landsberg
  unsure (1)..(174): unsure at all n locations
aatgtttttggaatgcatacatactatantgtaaaatgattgaattacactttgtataagaaatgataaaaatgataaaagaattggtggagatacaaaaataagagatgctcgaaataataatagaattgtgaaaacaaaaacancaacgcattaaaataatatgattgtttt

SEQ ID NO: 153804 - DNA, 460 bp, Arabidopsis thaliana landsberg
aaagataaactataagtttataactttagttggcattaaaagtctgaagttacttatccttctacagagtgttattttcaagtgtttgcttttttttttgtaaacagtaaactactacacagtctctgcagaaagagatgaagcatagaaaatgttgtagaacatttggaatctaccttaaaaacaccaatgcacccatgttcgatgatcggttttcgaagagaacccacttcttggttgcttcttacactgcatcaaggttgaaactttactttgcggtgatgactagctcggagaaaagtatcttacatgatcaaaattgtttctgaatgctgcagcttgtgattgttgttgtgcttgaacttgtggttgatgtgttgaatcgaaactgtttcttaagtagagacctgtgttaaagtataagccagttccaccacaaggaggatcaacaaactgagga

SEQ ID NO: 153805 - DNA, 394 bp, Arabidopsis thaliana landsberg
cggaaaccgaagagcttatcaagagaaaaggctagatcatcatagcggtggctcgaaccaagatccatcttcctcaaataaggcacaccatccatgctcactttcacataccctaaccccactttcgtggtcgaagcttccttacagctgtttttcttccggtaagaacaaaccggcggccaccccaccacctgggttttcgccgccggcgaatcattaaccttctccgcgtcaccacctgatgaaacgacgccgctttcacattgatcactattactacccgacgacgtcatgttcatctccgtgaaagctctcttcttaatcatcttctctgccacatctctccccggaagacccaatctcagctccgttatctcaagcccgagtccttcct

SEQ ID NO: 153806 - DNA, 92 bp, Arabidopsis thaliana landsberg
taactttttcaggcgttattcgagggaaacccattcaagacagttccaggacctttcaaactcttctaccgatgtatgcgctctaagccagg

SEQ ID NO: 153807 - DNA, 356 bp, Arabidopsis thaliana landsberg
cagcactgtacacttccttcagcatctttatttggttattccggggatgataaatgcttttgaaggaagagattatcatagattgcttctaacttgattagtatgttatcttgatgactgctaccttgcgcagtggaaacgttagacagattggtttgtgactctttgtttcatgtagatcaactcaagtctctaaagagcattctttatttggacaccacaaaagtaaacgagagagagattcacaaagacacaatttacaccataaaacttaactagcaaagaccgcagaacctactgtgatcttgaatttgaagctgatacacgttagtcttccgccattcttgtcgttgatt

SEQ ID NO: 153808 - DNA, 216 bp, Arabidopsis thaliana landsberg
ataaacacactaccactatgtcaaatgtctaaacacacacacacacattattgttcaaagttcaagggaaaagggactgaaatctaaacctattgatcattctgtggagtagctggtagaggctctgtggttgtcgaagattgagaggccatgaagtcaaggaattgcggatctgtttgtcggagatacttctccactaaggacaagtgttcgagc

SEQ ID NO: 153809 - DNA, 53 bp, Arabidopsis thaliana landsberg
agagagagagagagagagagagagagagagagagagagagagagagagagaga

SEQ ID NO: 153810 - DNA, 406 bp, Arabidopsis thaliana landsberg
  unsure (1)..(406): unsure at all n locations
ggcttctaatccatcgcatgctaaaatccacacaaatttcagcatagtttcttaaatgacttttcttattcttacctcgccatggtagtttgttgggaggccacccatgtgataatgatccgtgggtaagacaggaattggctcgttggtaacatcaacaccagcaaagatggcagcggtctcagagattccaggaagcctttcttttagagcttctggaggaagatgattcagatggagatacatatgatccctatgcggtcgtggaagatatcagcaaaaagttgtccagggtgagaatcaaactagacggatcacaataccaaagcatttcatgtaatgagagttcactctgaaaataaaaagtagtttcaagtggaacatacntacaccgcgaccttccgtg

SEQ ID NO: 153811 - DNA, 642 bp, Arabidopsis thaliana landsberg
atatgaaaacacatatataacaaaagctataatttaggaacatcgatcatatcggctaaaaataagactgaaagccgattgggagatctttgcgccaagtaattattggcaacgtacagcgctttatccactattgaataagtgaatcagagactctaatttgttgccttaataaagctactaaccaaatcaacaactcaaagtattcaaagataatagtaaaacatgtaagggcttttgaatgcacatggaactatcaaaactagtccaagtaccagaatatcgccatatctatctcggcaacgtacagcgctttatccactattgacataagtgaatcagagactctaatttgttgcctttcctatcaccaaaacgatttcatataacatgtaacacataagatttcaaacaaacaaactaggctcagattataaaaagaagtttacatcaacgagcgaaaaacctctcaaagtttgatggtaatcttgtttcatcatcatcgccgaagtaaaaataaaactaatgatcttagatctaaagcctcagaaagtggaggtaatcgtcaaggagaaactcagatggtacggacaatctcaaacatcacaggctacgatcctaagataacctctaacaagaact

SEQ ID NO: 153812 - DNA, 400 bp, Arabidopsis thaliana landsberg
attgaaatatattctctaaattggaaatagagaacccaaatataatattttaaatttatttctaatttattttggttgaatagattttatataaaattgtggtattattattgtccataaaacttattttagtgttacttttaggaatttcaaataattatttgagtgctatttatgtgtaaaaaactttttaatgctatttttgtccaaaaaacttaaaagtgtgctatttgtgggaatttctctacatataatacttctacttgacacacacacttgcaaacttgcacttagacctaatgatggctcttacacaagacaagtagccaccccacatgcattggaactctcaccccttgattcactcttctactctaacttagacttacaacacaacact

SEQ ID NO: 153813 - DNA, 447 bp, Arabidopsis thaliana landsberg
ctcttggatttagcgccaaaaacgctcggtctagtgaaatctaacgtcacgctttgttgatttgcctgaacgaagctaaccggtgccggagcagagatctgagtgggagccggagttgtcactttcaccggtggaggaacggaggaggaaggaggggaatgaaccggaccacgtctaaaccgggcgtgaccggaacggttaagaagagagataactttcttgaacttagaaactgtgaaatcagtgatctcagagcaatcaacgttacgttcttcgggacggttagagaggacacgaatcaagtgttccatgctttttaagccttgtgatgcagcttcttgtatagccgtttgatcttcccatcttaggtaaacgcataatatcaacggtcatgatgagaaaccagaggagaaacttgaagatctgagaagatgtgcaagttttttt

SEQ ID NO: 153814 - DNA, 222 bp, Arabidopsis thaliana landsberg
caagcttaaatccttcaattttcagcttctgtttgttaaatttcaggtttttgttgtttttgagctaattgaagaccctatttgatcttaagaagcaatcagcttttagtttaagcatctagaaacttgaattttgcgaacctttttggtaaaatacacaatttagtctcactgtagaactttggttttgtgtccgatgatcgttgattggataataactga

SEQ ID NO: 153815 - DNA, 192 bp, Arabidopsis thaliana landsberg
ccgaagagccagaccaatgcagcggaggagatagaatgaccaaaacaataaatacttagaacaccaccttgtagagctataaacataaaagcaacttgagatataaacatctcccaccgctgacaaatccccatgtatctgccctgtccatcttcaagaatgggtttgcgcaagaaactattctgcagcagt

SEQ ID NO: 153816 - DNA, 677 bp, Arabidopsis thaliana landsberg
tctgccaagtcctatctcctctcttaatccttcctttagcttcactatacgcaagctcataccaaagtgagctactcgaagtgttaccaaaccggttcaacgtcatcctcgatggctccatgtgccattcggataaatccaagttcttctcaatctcgtcaagcacggctctacctcccgcgtggatgcagaaatgctcgaaagctagcttgaaatcaggaatgtatggctttatctttttcactttgaagacttttcgggccacgagagtcgcgaaaaagagaagttgttcggacattggtaggactagtggtccgagagttgtgatgtttgtcttgagagcttctccggctattgccataaggtttttagagagcgagactccgattttaccggtttcttctgcgttgttgtcttctcgttggtaaacgcagccgaatgcgttgtcatcagctcctttgtgggtacggacggtatggatgagctgatattttgaacggctgcgatcagaggagcggttcgagagaagtaccgcggctccgcccatacggaagatacagttagatagaagcattgatcggtcgttgcctaagtaccagtttagggttatgttttccgtgcttaccacgacagcgtaagaattagggtttgctttgaggagattgttagcgagatcg

SEQ ID NO: 153817 - DNA, 204 bp, Arabidopsis thaliana landsberg
gaaaactgtgaagataaaatcaatacacgagagcttttctaagaaaggcacaatcgttgcctcgtttcaagagcttctctctctctcttgaagaaaattttctagatctagatttagttttctgggtagtgttcttcatcgcaggccaaagtctttatacgatggttcaggagtgagctcgttactcttcgccgtcaacggtgg

SEQ ID NO: 153818 - DNA, 231 bp, Arabidopsis thaliana landsberg
atgttatatgattttatactagacatatgaacatatatattctaggtaacacagaaaaaaaaacacaaaaaaaaatcattatattgaaatgtttttaaactaactcaactcactaaaagtattgttgttagtaaatgaacgatgaggattaatctaatcaaaaaaacaaaagaatcatcaacggctacaatctctactttccttggcgatttcaataaaacggagacgaga

SEQ ID NO: 153819 - DNA, 226 bp, Arabidopsis thaliana landsberg
caataacaacaacattaacaaacttgtaaaaattatacaaacattaaaaaagccatcaaattttggcaaaacaaataatatcaagcttcaacttggtttataaagagagccaagcatcgtaccatctccatagcttcatcacaatctggctcgaaaatatgaaaaacatgatctttctctttcgtctgcataatctcaacctttcctttccactcactcttcacca

SEQ ID NO: 153820 - DNA, 69 bp, Arabidopsis thaliana landsberg
tagagagaaagatgcaagcttgttgtggtggtaattcgatggcttctcttcagcaacctggacgggttc

SEQ ID NO: 153821 - DNA, 564 bp, Arabidopsis thaliana landsberg
  unsure (1)..(564): unsure at all n locations
cttctcctattcagaaagagagtattccaattgccttacctggtaaagatatccttgccagagcaaagaacgggactggaaagaccgccgccttttgtattcctgtcttggaaaaaattgaccaagataacaacgttattcngggtaactgtgtactggaccatgttgttagttgattctttcacgtggtgcaatgctattaaagaatctgaagttttgacatcgtctagctagtgatttttcatagctaataagaacagaataccaaagctggcgtcgtaaatagattattgatccacaataaacactagttactgtataaaacttagtgaatgtaaatcgtaatgaatcctttgagcctctaaacccattgcttctatcagtagcctaatatgtttcttaaaggtttactgcttcctttctaacttagtttaccgtcaatacctttcttgtacgcagctgttataattgttccgactcgagagttaccccttcccacatcacaggtctgtaaagagctaagtagcaatttgaagattcaagtcatggtgaccactggtggca

SEQ ID NO: 153822 - DNA, 119 bp, Arabidopsis thaliana landsberg
ggaataattttggaaaaataaactcatcaatctactatataatttattatgtttaaatgtactttaattctaaatttttgtataaataaattttaattaatttcgttaatttggtaaac

SEQ ID NO: 153823 - DNA, 192 bp, Arabidopsis thaliana landsberg
tctcctcgattcttccagttttcaaagcagtcaattagggtttgtagactaattcggatttggagacggtagcggttatggacgcttgtggaatcgggagtagtttaaatcaagctcccgtaactcaggatcttaagaaatttggagataattctacaggtttgttcttcttttttctcggatttattttgt

SEQ ID NO: 153824 - DNA, 271 bp, Arabidopsis thaliana landsberg
gtggaattgttcttttccttcagattctcatatatacatagacgtgcttaaactctgatgggtagtactgtgagggagaagcatgttagaccagaccggaagaccacatccgtgaaacccgaattcgatccgtgttgtttgctcgacaggacggctctagcgaaatcgattgttgaatcgagtcttaagcatcttgtttatcatccgggtcttctcgattcgtgtccagagtcaaaccctagtggcagttttgaggataataatggttggg

SEQ ID NO: 153825 - DNA, 202 bp, Arabidopsis thaliana landsberg
tgtcccaaaaatgattcatttgtattgaaattccaattcttttattcttcaaacgttaatgtcaacaaacttcatggtatatgtgtggggtccctactccctatatagtatattcatatgtgcgttcttggttatcatgtacgctagaaaaagattttaaactaaattatttagtttccattcctggaacaagtacaacata

SEQ ID NO: 153826 - DNA, 330 bp, Arabidopsis thaliana landsberg
caaggcgaatgaagttgaaaggaggaagatgaatagcacggccaatgacgatgaaaggatgaataggatcatcagagatggccgtcgtcgttacgtcacctggagccgcagccgcaacccttcggcagctcatatcttttggtcaaaaccctaatattttctagggttgggctattagtttttgttttgggcttttttgaattgtattttgggctttttattaatttgtagtgggtaatatatttggaaaaggatttttggtagtgtaattttttttttaaatatctgagccgaattaaaaaccgtagaaaccgaataaatttttgtttg

SEQ ID NO: 153827 - DNA, 803 bp, Arabidopsis thaliana landsberg
catgtatatatgctggtccattcagttttatccccttcttgaagaatcttcgtcaggtgtgtttataagttactactaagccttaaaactttcattcatgtcttgcattttcttctcttttgctccctgaggtggtctatggctgattatgcattctggtcattcataatatggtacgaaataatgagatattcaggttctcacattttcctaaatgaacgtgagcttgaagatatctgcaaagcctgtggtctcgttaacttcactcgtgttagaaacgggccatttataatgctatctgcaacaaaacccagctaagctcaccctctttaaagtatatatacttttctgtaaaaaattggtataaagttataaacattataacaacttgagttccatacagtatacctaatttgtaaagctttttgcaaatgttcctattatctagcttgtaaattggggttaacatggtttgcaaaggggtcttcttcttgtgaaatcgcaatgtgtcaattgtaagtttctggagaatgttctcgcatcgcagaatgtataagagcttccatcggagcacgatgtctgtctagaggataggaacggtaaagcaagatgtatatgaagcagctatcggcctttgggtgtcctatagatgtatatagagcttttgccagagatgttgcattctctctatctgtggctatctttgttgacgtcgatgacccttcagggattggtttgtattcataggcatgttgtgccaggattccaactatagtaggtgcatctgatggcaagatagactc

SEQ ID NO: 153828 - DNA, 159 bp, Arabidopsis thaliana landsberg
gaaagattttattgatgggtatatagaaactataggttattaataccataatgatgaataaatctataacgggggaattcacatgaagctcaccaattttacctatatacttaactctcaagatagaatactaaaaaagaccccaaatttagcaaaaaa

SEQ ID NO: 153829 - DNA, 502 bp, Arabidopsis thaliana landsberg
ggagacttcatctcattcgatgcctaaacgttgcaagtgtagagtggttggagtatttcggaaagcttgagactttagaagaactctgtatcaagaactgcagagccattggggaaggtgatttgatcaagctgaggaatagctggcgaaagctgacaagtctgcagtttgaggtagatgccaattacaggtacatgaaggtttacgaccagttagatgtggaacggtggcccaaacagttggttccctgtgacagtctggtggagctcagcctcggtaactgcatcatagctcctggtagagggctcgcttgtgtgctgagaaattgcaagaacctggagaagcttcatctggacatgtgtaccggtgtcagcgactcagacatcatagcattggttcagaaagctagtcacctaagaagcatctcgctccgtgtcccgtccgattttactctgcctctcttaaacaacatcacgttaagattaagcgatgaaagcctcag

SEQ ID NO: 153830 - DNA, 436 bp, Arabidopsis thaliana landsberg
gagacctactatgggataatcacggcgacaacaacaatggctttctctcctaatcctctctctctaagcgtccccgatcctgctttcgaatcttggcttcgagattccggttacctcgagctcctcgatcaccgcacctccgccgctgcagctgccgcttcctcctccgcctccgtttcatcctcagctgccgcaacttctgcggcatctgacgatgtcgtttcatccattaccggtggtttcttcgcttctctcttatctcgactcgtcactgtctcttctcttcttactattaaccctttctctaagctctccgccgatgatttttccggagatacgacaccgtggaccaccggtttcattggcaattgtgactcttattcgttcccgtcgtcttctcagcaagcgagaatgagagttcatgagaatatcaaac

SEQ ID NO: 153831 - DNA, 344 bp, Arabidopsis thaliana landsberg
ctggatcatgggtacttcaaaaactagccactgctggattgaaagctctcgtgcaggcaaataaagtatgcctttggcgatataacagggaaaccatggaagaggtgttgtggaaacttcatctacaattgacattggggacaggtttgcatcactcttatcattgctcgttttgatttgtggggagttttaagtgaaaattgtgcttaaaacagcttttcttacaagttggttgtattcggtttatcttctcaacacagggatcatgtatcagagcgtgaatctggtgatgcatctggttttgtgaggggaggtgaaagacgaacatcatttgcagctaagcc

SEQ ID NO: 153832 - DNA, 284 bp, Arabidopsis thaliana landsberg
gcgaagagaaagaagatggtcggttgagctatttttgcttctcccgacaaaattctcagatccgaatacttccaccatcatcattcatttataagatctgggttttacacagctctgcgagtacagtaactatgagaaggagaggaggggatagtttccggagagctggacggaggaagatctcgaatgtggtatggtgggttctctctggtattgccctcctgctcttctttctcattctctccaaagctggtcatattgaacctaaaccctctatttctaag

SEQ ID NO: 153833 - DNA, 324 bp, Arabidopsis thaliana landsberg
agagatctaaagcatgatcgttcatagaagcagagaattaatacaaactttctggtacttttagtatatacataactttgtccatatctagtctcttggcttattatctgccgtacaaattttatagattcagtaaccttgatagagcctagcttagaagcctaagcaaatttgatggtttaaacagttttgtagagctgtgatcgtgtgggtgcatgaacttgcagttgggacaaacaggagttgatgtacacaacataaccagcatgtggcatttcatgcaaactgttgttaccatctcttgccccttgtgatcaacatcgt

SEQ ID NO: 153834 - DNA, 305 bp, Arabidopsis thaliana landsberg
gtttagctcaaaggggctcaacttctcagcactcgtgtcctctgctcgtgtattctctagaaacgtagatcgttcttgtaagaacatcgctctgagagttacttgtgaagcgggaagagtggagctgctagagagaaaagcctcagagactttcaagttaaacaaaactgagaaaaaattgacctgtgtaatgaaattcggtggctcatcagtggcatcagcagaaaggatgatacaagttgccaaactcatactcagcttcccagatgagaagcctgttgttgtgctatcagcagatcgttaga

SEQ ID NO: 153835 - DNA, 565 bp, Arabidopsis thaliana landsberg
attaccagaaaaactaaagtgtcctttttttaaagtacacatgcatacaagctagttcaaggccaagatcttctaatcttagaccttatacatttggtaaagaaaattgatacatacatattgtgaacatcatgtctccctcaaggtaatgattgatttcttctaaaatgttttttgatcttcgactttatgttgcattaattgtaaaaccaaattttctataaataaatcttacattcatacaaacaaatggttgaattcttcgatattttaagtaaatgggatgattcatttcttgtaattgtaactttgtacttgtataattttttctcttgttttttagaactctttctttagagcttaaatgggtagattagattgtaatcatctttttgttggtatactaaagcttctaatactaaggtcattaacatgcttaaccttaccattgtgtgtttatgaatttgtaataacattgatatatacgaaaggaaatctttggtggacgctcttagtatgaaaggaggaacaggagaccatagttatgcaacaaattcacgtatcc

SEQ ID NO: 153836 - DNA, 242 bp, Arabidopsis thaliana landsberg
gcaatctcagattctgttgcagtgaatatgcaaaagaacaagaatttgtcttatatttggattttttttgaataagcacgtgtctcatatttggctttgacgctttcctttttgttgttgttgttgttgttgttgttgttgttgtcttctggggatgttttgtctgaacattaagagtttgtatttgtaacactgtctttggatctttttttaataatttcaagcttcgatttggttccaat

SEQ ID NO: 153837 - DNA, 346 bp, Arabidopsis thaliana landsberg
tacattgttgaaaaagtttattttacaaagggagaggttatttgaggtctgtttttaagccaaaggacggggcaagtaatgctctagaagtcatccctaggggtccctggttggaatattaccaattaagcatcaatctgcatctatctagcaatgtggaagcacctaaccaactatggagtaaacagagtgaattcgagatctgagagatcagaagaagaacaagaatcgcggagtgttattccctaatcgtcatgttctgtcccagcagtccactacgtgaatcaactcacaagaacaagcttagtctcgcacaagaatgctcacgagatcagagcactacaca

SEQ ID NO: 153838 - DNA, 464 bp, Arabidopsis thaliana landsberg
ctcatgagttatgcccttttgctggtggtgactgtgtgtactctctatagccccctcaaattccttggttatacccttgcagtattcatcttgagaacttaaaaccgcggtttcagaaactctcaagaaacattgacaggtaaatgatattttagattctaaatcagaactccaagttttctaaaacaatctttaaacattacatccttttcgtgtatcttgcaggttttttcacagattcttgcgtattgggttacacactcgttagatgctacatgattcaacatccttcgagggaaggaggagagattaaaagactttgtcaagattcaaatgaaggacaaagcctgatttattactctctcttaatcctcagggaacatataggaacctgtaaatttgtaatcaatttgtaaaacttgaagctacgacgtttcgttaaactttagacgtgtacctaaagg

SEQ ID NO: 153839 - DNA, 258 bp, Arabidopsis thaliana landsberg
cgtaaaaatcgaagaagaccggagaaaatggcgaaaccgttgggaacaaccggtgaatttttccggcgaagggatgagtggaggaagcatccgatgctatcgaatcaaatgagacacgcactttcaggtctcggaatcggtgttggtgccttctgcgtttacctcgtcggtgaacagatctatagcaaactcatggctccttcttctcaatcatcgcatcagaaacaacccgctccatctcactgagagaatcattag

SEQ ID NO: 153840 - DNA, 261 bp, Arabidopsis thaliana landsberg
aaaaaaatagcaaattgcaaaagagaaaaatcgaaaaggttgtttgtaaaataattacaaaacataattagtggtgagaataaatctaaatataacgtacaagggggtgaagggggtgtgtctatatatgttggatgaatagtttctgccatgtgctatggaaacaacctcttatgctttatgttcttgttagctcctaccttatactataacttaatttattcatcaaaaattcttaattttcccttcgttttttaaaat

SEQ ID NO: 153841 - DNA, 253 bp, Arabidopsis thaliana landsberg
agaattgaaagtttagattttttgaaaaataaatgcggcgtttgtagcttcgatgtggcggttagggttgcgaggtggtggaggtggaggtgaaacgttcccggagcgacccgatgaacccgattgtatctattatttacgaaccggtgtttgcgggtacgggtctcgatgtcggttcaatcacccacgaaaccgtgctccggtaataaaaactctctctctctctctcctctgtttttctgggttctacggt

SEQ ID NO: 153842 - DNA, 209 bp, Arabidopsis thaliana landsberg
acttctagttatagataaagtaattacagtaatgatgaagtcatttaccaaaagaaagcacatgtatacacaatggaccatatatgtaatgtctcgctaacaattctgtacacatctctcaaaagtcctcttttgtcatttggattctgcagctttaaacaactctcgccattgctgtggatcacttcctggaccatccccctgaaacc

SEQ ID NO: 153843 - DNA, 292 bp, Arabidopsis thaliana landsberg
caaactcgtttgctcttttcatcagttactaaatcataagcggctctcaagttctttagggttttgagttttctcaatctcctacctgattaaggtttgtttctcatagcttttagagagatttgttcttttgttatcgttgtagatctgagattatgttgttttttgatcagctgattaatctggcgtttgttggttcgttttcaggttaatttcttatcttggatcaataacaagagaattctaactccggattgtaatcaatattcctctacatgtaagtctctaatca

SEQ ID NO: 153844 - DNA, 2025 bp, Arabidopsis thaliana landsberg
gaaggagaagaagaatatcacaactatccaaatatcgtcttagtagcagccatgaattcaaattcagtcggtgaatttcgtgagggagaaatcgatggaaacccatttctcatatacactttgttatctcaaaccgagaacccttcttcccgtgaagcagctgttgattccgatggagggactggggacgacctctctgttgagcctctgatcctctgtcctactttacgtctcaaagttaaaaatttaaagccatacacgagtgattcagatcgtagctttttcccgttggttgtttcctctcacttccctaccatacaaagcggtcatcaacaacccgagtatatgcttcaatcctacagctgtaagctccctttactccctctcttttggtgcgacaataaaaaccctaatatttacgatttcatttgccgtgcgtgcacaaccatagagcaaggcacaagctattacgtttgtgtcacatgtggcgaccagtttcacaaagaatgtgtggagtctccacttgaaatcaaacacccttcctatccttttcaatctctccaactttatagtcctccctttgcccttgtgaattgcgtatgttgtgatataagtttccaagacatgatttatcattcttctacttacaacttcactctgcatatattgtgtgcattcaacccaataccctttgttatagatcacccaaaaaggcatccccatcctctcacctttttcccaaaacaatcttttttaccttgccatgtttgtagcctcattaaaggacttattcccacctatgtttgtgttcgatgtgtctttgtagttcatccagaatgtatctatttcccgtatgtcataaaaatatcccgtcaccaccactgtatatcttatacctcctctcttccatccggaacatggtcttgcggagtctgtcgtcaaatggttgacaacgactatggagcctactcttgcaacaagtgtgatgactattttgttcattcaagatgcgcgctacggagagacttatgggatgggatagaactcgagggagtatctgaagaacctgagattgttgttgagccatttatcacgatttctgatggtataatactccatttttctcatggccatcatctgaaactcaagatcagtagagtctacgacgaaaaaaaggtttgtcaagcgtgcatccttccgatctatgagggtagctattattcatgtatggatgaatgtgacttcatccttcacgaagcatgtgcaaatgcaccttgcaagaaacatcatgctttgcgtcctcacccacttacactaacggtcatcactagtgaatatgataacgaaggatatgataaccatttacgaggtatgttccgctgtgatgcttgtcagcgtaagagttgtggtttcgtctatgagagtcaagcaaaagatatgtttcaggttttcagactagatctacggtgtgcctcggtttctgaaccatttaaataccaagtccatgaacatcctttattcctagctttaacaccagaagaagaagaagtggcaatatgtcagatctgccatgaacagtggagttatagaaaactaaattgtatcaaatgtgattatatcatatgtttcaagtgtgctaccttgccatacaaggcaaggtataagcatgacaaacattacctcacattccaggaagggaaagatgccaatgatcattcaggctggtgtgaggtatgcgaaagcaagatagaatattcaagcgaaggtgggttctatgcgtgcgatgactgctgcaccactcttcatgtcgattgcttgcttggggaaaacatgtatatgctaaaacctggtcaaaccataatgtttcatgaggacgaggttcaaattcttcgcaacagtaccatgtctcgaccattatgccatgatgatcatgccggacaccgttgtcgatccagagtagtttatgaaaagagaaatatgacattttgttctttacgttgtttgcattgaatcttgtaaatgtca

SEQ ID NO: 153845 - DNA, 215 bp, Arabidopsis thaliana landsberg
atttatcaatcaatttatttaataaaataatcaagtattatataccaatacaattttaatgcaatattgtaaaaccaatcataataaaactattttgtgcaaaatctggattttacatatatcttgacaaaacttttatttaggataatatgaatttgtgcaaaatttgggtaaaataatttcgtgcaaaattagggcaaaaccatgaacagttt

SEQ ID NO: 153846 - DNA, 131 bp, Arabidopsis thaliana landsberg
tccagagtctcttttgaggcaatcatctaccctggttaatgatgtcaggggtgatggtttctatgagggtggtgacaatggagatgcaatcgaggcacacgaatggaaatgtgttcgtacaatcaatggta

SEQ ID NO: 153847 - DNA, 98 bp, Arabidopsis thaliana landsberg
  unsure (1)..(98): unsure at all n locations
gtgaccctcggaaaccacagcttcacatttgaaatagctatagcctccatgctccaaacttattaacttgcagcanaggattgcacagcaatcagcgc

SEQ ID NO: 153848 - DNA, 891 bp, Arabidopsis thaliana landsberg
tgactttgtttcttctttatttcagactattggttatttgttttgaaacttgttgcacttattttcttatgctttgttggaacaatccatgtgtgttttagtgatttaacagtctaactggaggatccatgtgaaaacactaaccaaggctctacaacaatgagtagcatttacaaagcaatgcgaaacgaccagagtgtcgatcgacccatccatggtatcgatcgacaccactctcaggtggcaactcacgtttctctaacttttaacttttgattatttttctttcgattcctctagcttaataactctggggacagtgttatctaagtctgggggagtcagttactaactttatcttttcttttcttatgagtcagttgtgtcattctaacttagatagtcgtttattgagtcaaaacttttgtctgaaattatgatctatctctcgagtttattgccaggattgcttaagtactgcagattcaaatcaatccgactaatggaaaatccagaaaaccaatcaacaaacttaaggacatccattccaaacataatccacaaaggctggagctaatctcattgcttttccttttacctcatcaaaacggttagtgttcataggacattactccttgttcatacctgataagtcgactactgtgataaaaagaaagtgttcctctcccaaataaaaacaaaaattaaaataatgggaaaataaataatgagagattgagaagactttcagatagtgtataggggtaagaatgtttcctatgacctcattattatacattatttgaaacgatcaattacaaaggttggaaaaatgccaagggtgtcgatccactatgcgagttcccttttgttcactctctaaaaagaata

SEQ ID NO: 153849 - DNA, 465 bp, Arabidopsis thaliana landsberg
aacctaacggaaataattattttactaatcggataatgtctgattaaaacattttatgatattacacaaagagagttagagacgtatggatcacaaatcatgaagctttcttagatggtatcctaaaactaaagttaggtacaagtttggaatttaggtcaaatgcttaagttgcattaatttgaacaaatctatgcatcgaataaataaataaaatggattattttattaagtatagtccttgtaatcctaggacttgttgtctaatcttgtcttatgcgtgcaaatctttttgatgtcaatatataatccttgtttattagagtcgagctccttcattagtcaactactcaaatatactccaaagtttggaatatagtcttttgacaaataagaatcttacaactgataaacgttacaatttggttatcattttaaaaaacagatttggtcataatatacgat

SEQ ID NO: 153850 - DNA, 191 bp, Arabidopsis thaliana landsberg; identical to SEQ ID NO: 63216

SEQ ID NO: 153851 - DNA, 3250 bp, Arabidopsis thaliana landsberg
actaacctattgacatttgagctttgagttctaaatccctacaggagaatcatgagcaattacagtggcagttcttctgttgatcctgactacaacatggatgagacagaatcgtcatcttcaaggccagagagagaacagagagaatacgaaagtttcagaaggaaagctgagatagcccgaggaaagagagcgatgacagagaggtatgagcttatagacgaagatctggaggacgagtacatgcctgaacagactcgcagagctaccaaacttctgcacaagcccgacatattgcctgctgaggaatatgttaggctttttaagctgaatgagttctgtagcacgaggtatccttggtcgacctcacttgcacaactcggattgttggaagatgttcagcacctgtaccaaagttgtcatttggacactttgatggcttatccgtatgtagcatatgaagatgagacaatacaattcctctccacactacaagtagagctctaccaaggtatgacctctgatgagttggattgtgaaggattgggattcttgcgattttctgtgtatggtcatgagtacaggttatcaatcaagcgattggatggattgtttgattttcccagtggaacgggatctaagccaaagtatgaaagagaagagttgaaagacttgtggatcaccatcggcagctctgtaccgttgaatgcttccaggtcaaagagcaatcagatacgcagccctgtcatcaggtacttccagcgttctgtagccaacgtactctactcctgagagattacagggactgtcactaactctgatatggagatgatcgcaatggccctcaaaggaactctacgccaaactaaaaatggcatgtccctccagggtgaagtcaatgacacacctctctctatacttcttctgatccatctgtgtggatacaaaaactgggcggtcagcaataaccgcaagagagcacgaggcgctctgtgcataggtggcgtggtgacacctattctgatagcttgtggagtcccactcatttctgctggactcgagccacgagcaatggatatcgagcacctacgtcactgcgaattcctggagtttgcaatggttgacgatttccacaggttcaggtttgagcactctacagacaggagagctaacatccttctccctagccctgaggtcacacggataatcgagggagataacattgattttaggcctgagattggacgcctctactatgagaacgctccaccattagatgaggacgatcttcttgaagaagctgcttcggatgggatggatgaagatggagcagtaaagttcgacactagcatgtatcactttgctgaacatgtacctccagcgaggcagagcaagagcttgactgaagctcataagaataacagtaaattgcagaagtggtgcaagaagcaggacaggatgatcgccaagtgtttcaagcttctgacagacaagctgagttgctcttcctccaccactgctattccacaggtacaacctcctatggaaatgccatcgaggagaattaatgcacctgcgcacaggcctgagcttagcgagcagagagtcccacatgtccaggctaggcattcgtcattcgaatcccgggaacacaagagaagaaggaaggctacactcactcgatctagcagcagatcacgcctcattcactcgaggagatcactcgaccgcggtgctggccgcagcagaaggagagaggtcgagtttcctcagagtggtgctggccgccacagagctgatgaggtcgagtacccacccgctggagctgatacggaacaaggcggttcgtctatggcctgggagcaatcgtaggcagccattgacgagcaactacgttcattcttcgactgaggtaagcgcctcacttcaccattgtattatatcatctgtcttgatttgtttcttcattttgtttctgtgattggatttgtcctaagtactctcttccaaatttattcacacagtggattgtgtgatataaatttgggggaggctcaggaagtgtgtgttgcattgtatatatttttgattctgcattcatctaaggcatagaaaaaccaaaaaaaaatgaaaaatttcacataatgatttcacaaaaaaaggagtgttcatgtagttgcattacatttaggatcgagtctagagtgtttcatttaggattgttgcatatgcataggggatgatgatgagatagccttgtaagcattttgattcaccggataaactcagttcttaacccgtcccaatacttcgtcgttttgagtattagggttttcgggatatttggctataagtagcatgtacttctcattttcgcagacaagaagtttttatctagttttattccgcagaccttgtgttctagaccgtttgtaatccggatttctctttatctattcagtattcagtatacagctttagttcttgatttcgtttactgttgttcattctgttatcatcttgctgttatactgttgttatcatgttttcaacttgttcaacgtttatgctttctgttatgatgtctgagtagtgaataggtttctgaggatgggttagagtagtgtagaattctcagtatgctaggtgattgagtattggttgatagatcccttctagattagttgttcttaatgcctattgctttctgatcaactggaatttgagcccagacatttccgcgcccaaaaggtgttcgatgaaatgtctgaaccactaattccagagattcgtgaccctgtaccaaggtattggttgcagggagcgttttggctttaacttattgattcgtaatgcctgttagattagctctcgtcattggtgattgagtctgggactaggttaacttgagagtctctgttgcggtggcacttagatttggttaatgaacttgttgtctagggttaatttattgagcatgtcaatcacctgtaaactgaggaaacgaaactactcaattaccccatccttgggaattctttatctgattgaattctttgtttactctactgttgtttactgcatcctgttatctgttgcttaatttctgcaattctttcttgttactcgacctgatactcgaccacccagttgtctggcaacagactgtgcagtcgagtatccctgtttttttttctgtctgttactcgacctgtcactcgacctcacccagtgctttgcaaagagctgt

SEQ ID NO: 153852 - DNA, 408 bp, Arabidopsis thaliana landsberg
aatggagttactgtggctgcgtaagatatggcaagaaagtaatttttatcttccttaaatataaaaagcattcgttcataatctttatttttctctaggaataatttctgactgtggaaagtagaaacatattttatgaaacaaaccacttgcaccaaggaatatgaaaagtagaactgggttatgtagtgcattcacgtttgcgtgtgatcatcggtgatggagttttagttcttgtggactccgagccttagcctgaagtcttcttccataaggggcaggccttcacgaagcttcacctttggttcccatcccaaaacttctttagcctttgtgatgtctggcttcctctgtcttggatcatccggtgtgttctcaaccatctttatctctatgctcggggtaatc

SEQ ID NO: 153853 - DNA, 423 bp, Arabidopsis thaliana landsberg
agcaacgaaactgattatttgattagacagtgaaaggtatcaataatgaacataagataatttttcctattaataatgaaattacaacaacagaagactacactaaaaggtacaaatacaatgatccgagaaaattacaagtgcaaaagtgatgaacgctctttaatgtgcttcacaatgctctttcaacatagtttgctaaaaacttcactttagacatatatcctcaaacatcaatgatgtcttttgtaatttcttcatcacacaaccatatacctagttttctttttgcatatccatgaatatgtctagtattacaaaagatataaaatgaatcttatatgttcactaaaacaaagattatcaagatccatcttactcttttgcatatactcgaatacctatatgggattaaagatctat

SEQ ID NO: 153854 - DNA, 145 bp, Arabidopsis thaliana landsberg
aaaatcttatttttttggagtatctgacaaaacaaatattgagtgatttggatatcttatccatcaaaagaaaataagttagaaacgtgggttttgaaaactaaaattttgtgaaaaaaaacaaaaaaatgtttaaagactattt

SEQ ID NO: 153855 - DNA, 158 bp, Arabidopsis thaliana landsberg
ttgctcgctgttgcaaggaccaccgggagtaggacagacgtatataagccttgaccttaaagaattagcgaaccaagctttctctctttgctacatataaatcaaagcaattagaatatacaaagtgtttcttcctttccaaaatagtaatattaaat

SEQ ID NO: 153856 - DNA, 291 bp, Arabidopsis thaliana landsberg
gatgatacttaaactattcacttgattatagtttgaacttgtgtattttgaaacacgatgttcaatagatttagatggtagttcaagtattccagatggtagaaatgggatatacatatatgtttcagtcttatccctataaaaaaagttgtaactcttgttgatcggatggtagaaacatagatctttaatcccatataggtattcgagtatatgcaaaagagtaagatggatcttgataatctttgttttagtgaacatataagattcattttatatcttttgtaatac

SEQ ID NO: 153857 - DNA, 392 bp, Arabidopsis thaliana landsberg
atcctcacagtaaatgcttttgcttgagagagagtctgttagaggttttttgtttgtttctgtttccttctgtcacccagaaaactaaaaagcaaacaaattcaagaagagagagagagagagatagcctcaaaaccaagtcctaaccattgttgatagaagagaaagcttttcttttcttgttgcttatggtgaaagaatgaaagagagagaggaggagaagtaagaagcagagaaagtgtttagagctttgcatgttcctttctctccaagtttatatcttcatcgtaaagtctctcaacctttgattctgttttttcctcttatccatttatcctctttctttttctctctctcctcataattctagccacaatctttttagggtttca

SEQ ID NO: 153858 - DNA, 149 bp, Arabidopsis thaliana landsberg
ttgccatgtcttagacagctcatcggtcagcttcaagagctcttgcacaacggctctcctcctcctccttctttttcttcatctctgtcgtcttcttctccgtcatttttggttctccaccatcctcagtatcagaacgggtgtttatc

SEQ ID NO: 153859 - DNA, 434 bp, Arabidopsis thaliana landsberg
cttcttaaatccattcccagattcacacttttgatttcgtgatacactgttacattttttttttttttgttgggtttggtgagacttttatggggtttgagatgaaaccagagaaagaggttttggaattgatttctagtaagaatcaatgcaagtctaatcccaattctgtgaagaagaagaacaaaaacaagaataagaagatgatgatgacgtggcgacggaagaagattgattccccggcggatgggatcactgcggtgcggcggttgtttaatacttgcaaggaagtgttctctaatggtggtcctggtgttattccttctgaagataaaatccaacagctacgagagattcttggtatacaatttttatcagttttctgaattccttgttctgggtttccataaagttttgatttttgattggatttt

SEQ ID NO: 153860 - DNA, 127 bp, Arabidopsis thaliana landsberg
ggatttgactttcaggctctagcgagctgcaaagattttaggagttttcttcaatgggttctagaggatgcgagaggtgggttagctggagaacaagaggaacagcttcctcttacttttgctttgt

SEQ ID NO: 153861 - DNA, 661 bp, Arabidopsis thaliana landsberg
ccagcaagtaaaaggctcgatgttcgggttttctgtgtttgcagagtactttggaaaagcaatgatcttcggaactagggatgcaacatcttaaatctcttcacgcctgaaggtaaccactgaactcattgcaaataactcaaaaaagttctcttctctactttgatgtaatcaagtcaactgagaacatatttttacaaaataacgataatctgggagataaattttctcatttagtgaccttgtctgttcagggaaggcggctgaaacatctccaactcaagtgaggccggcataaactttgtggcatctgtgtattctgtgaatgtgaggtatcctttgaatctactttatcggcttagatattgtgtaagagtgagttgtgctagtgaagttgggactggctctatgcttcttcttgtatacatttctgagaatctgtgccatcactcaggaaaagatgcatagatgtcgacaagttattatgtttttttttttggtgtatgttatggtttttttttttggaacacttagaggagaacgtttgcagtaaatatgttgtggttttgatttgcattcattctggtaaaaatcttgctcatttggaacaatttctaaataattgctcaagttctgtcccgtgatctatcaagatgagacc

SEQ ID NO: 153862 - DNA, 130 bp, Arabidopsis thaliana landsberg
tcactattgtctcattttacagctgaggaacttggtatgggcaacatcaaagcacgatgtgtatttcatgaacaactactctctcatgcattggtcatctttgctgcaaaggggcaaagaagtacttaat

SEQ ID NO: 153863 - DNA, 312 bp, Arabidopsis thaliana landsberg
aaaaaaaaacagaaaggaatcattagcacaaaacttgatggtctactcaattcaatacacagtcaaaatgatcgctttaaccaaaattctctgatggtaaaacttctgaaagccattgttactaaaagagatggaattggagacaacatttcatcaatcagacatagcaacatccatattcctccaacggtcaggtacgttctgaccacaattctccaggacattcaccaatggtccagcttgataagaagcagcatccttttctgttatataactgataagatttcccatagcacacgctcgatccgtatc

SEQ ID NO: 153864 - DNA, 50 bp, Arabidopsis thaliana landsberg
tgttattttctcttttctctaaaatattgcagtttattgagatcgactaa

SEQ ID NO: 153865 - DNA, 271 bp, Arabidopsis thaliana landsberg
ctttgtgattggattctccactcactgctccagatttgaataaacacaacctaaacaaatcgagagagtcagatatggcggcaacgaagtggcgtgacatcgatgatcttcccaagattccggccaactacacggcgttgactccgctttggttccttgatagggctgccgtggttcatccgaccagaaaatctgtgattcacggatcgcgagagtacacgtggcgccagacttatgaccggtgtcgccgactcgcctccgctctcgccga

SEQ ID NO: 153866 - DNA, 869 bp, Arabidopsis thaliana landsberg
aaatcgacaaaaacaaaccgtcttctcatctctgcctctggatttaactctcccttcacagttgcatagaatcttcttctctgctcatattttgaagaaatctccaggtggttttgcattttcctggaaacgtatctctgtaattcctagacttgagtagtgttcttcttcttcttcaagcattttccatttttttttttggtaattttgttatagtatatagaaatccgtgaagagaaaaagtatatcggttgtcttcttcattgccatcatgtgagcattccaatattgtttcctctctctctctccatttttttaatttacttaaaagttttctgtgattttcaatgtcttttttcttccacttgacttgactctcggcggaggagtttgtcgccggcgaattgttcaaatcgtcggaggttgaaactgttcatatttgtgctacttttactttctggtctttgaattttactctttcgctttcgtcagcttcaagtctttcaaagacaaatcatctttagggattttttttaaaaaattttgtttgctttattggtgttgaagatctttgacgtagaaagcctatagacctggagaatctctttgattggtatcttatggactctctttttctctttgttgcttttgttgtcgcagtcgaagaaactgctccctcttttagtcaattctcgcttcactccctcaatataatgcgatttctcaaccggaatatctgaatctctcggtggttacctctgatatatcgccaggaactgaactcctactcgatctctatcaacaatgccgtccttgtagaactttggatccaactctctgattccggcatttccattaatatcagctca

SEQ ID NO: 153867 - DNA, 191 bp, Arabidopsis thaliana landsberg
gttttttctttctttctatatggtactgctgaatgtattaccagcattagctgatgaagcccctgatgagtaagcatttgagtgatctctagatgagccattagacgaagaagaagggtttgtgtagttttgtctgttcacttgctctgtcttcgtcgccacaggtcctctcacttcaaacccagacttag

SEQ ID NO: 153868 - DNA, 142 bp, Arabidopsis thaliana landsberg
cccttaccgtcgcgtctcgcatttcatcaacgcttcttcgcgtttccggtgtctcgtctcgtccgtgtggttactggttctcgacgaacgcggcgatgacgaatgttggagaggaaagattagcatcgattccttcaatcga

SEQ ID NO: 153869 - DNA, 230 bp, Arabidopsis thaliana landsberg
cttttttcttaatttccaagaatcgtctcttttctctcaatcctccaattcccaaatttcaacaacaagacgaagcaaacgatgtggattgaaatcatctgcggtctcgtcatctacaaactcgtccgcccgttcttctacgacgacgaattctccgacgtcgaaacttccgattccactgctctcttctccgttgctcacaggttcccgattttccccatactccattt

SEQ ID NO: 153870 - DNA, 276 bp, Arabidopsis thaliana landsberg
gatgcagtttggcgaagcattttcttcatctcacataaacaacttcagatatctgtcagatcccaaccatttcagaggaactcaggtaaagtaattaagaattgaatagtaccaaaggctccaccatttttacctgtttgcttatttaactaaacaatgtgagagggtgaaattgatatttgcagcaagacgatggatgaatatgtttgtcaactgcacaagtttgcagagagactctccaagctcatgtgtgagaatcttggtcttgatcaggaa

SEQ ID NO: 153871 - DNA, 258 bp, Arabidopsis thaliana landsberg
atttggacaagctgttcaaccatatatcatggttcctcattctcaaaatatgattggagccatgccatttaatagttgaggcttcatgcaccagccgagctcacaaactccttactctaccccaagtggaccagctggtcagttcatggcacaccaaggtcatgggatgccgccatcccatggtccacaacgaactcaatctaggcctgttactctacaagggaacaacaatgtcatgggagacatgttcttaatagc

SEQ ID NO: 153872 - DNA, 576 bp, Arabidopsis thaliana landsberg
taatcagatgctaatttggatatttaagaagaaatacttgtttattttacagtagtatttttttaaagatatcaaagatgaaatgagtataaattctacaacttcttcacaaatgtctagtaacatcgagaagctaattcttcaagcttcacttaaatatgtagctaatgcgcacaaatgtatttgtgggcgctagtaagtagtaacctcacgtcctcttattcctgctcccaaacagcaaggcgaagtaaaataagatcctaaagaagagacctgaagcaaacgtaatccacaagcaatcccacttgctcaattgcgtaataccctgttgtgcaagtaagtcagaccccgtcctcaagcatgtggactccgttatcttcgttctcagagatttactgagagtttcaaggagcttaaccttcccggagtcagacactcccccgagaagagtactgtcgaaaacctggacacccctaacaaaacaacgagacgggtcatcaaactcgttgattaagacagcctcatacggatacttgagaattgaaatgtaatgaaaccacgtccaataaaacggta

SEQ ID NO: 153873 - DNA, 511 bp, Arabidopsis thaliana landsberg
tgataagaacagaatgatatatttaaagctaatagcaacaaaagaagtagtgtatatatataataaatatatagttacaaatacatgaaagtctacgcaaatttgaaaagaattaaaacattttctcttagaggaagccacaaagaatagagggtaaacacttacattgttatacatgaagtagtaaacactttctcttctcaggccactactgctctctttcctttactgcttttggtgttatctttcttctttcttgaaacgcctgtgattggatgacccagaggacctgaccacgtctggacttgtgttggtggttcgtctttggaaaaattgaaagaagaggatgtgaaggatgggaccatatctcgtgggataaatgtcgggtctatatgctgtgaggcacccaatggtacacccattgctccaccatcttggtgtggtggcggaaacttctcgctcttgctctttgcatttgcgtgtgtgattaatctccttctctgctttttaa

SEQ ID NO: 153874 - DNA, 271 bp, Arabidopsis thaliana landsberg
  unsure (1)..(271): unsure at all n locations
atagtgggatatacaggcagaagaaaatcgagataaatcaactaaatgatttggataatcatcttgaagatttgaaggaaaatccaagagcttcaaaaactccaaagattgataggcattcatcatcatcatgtatcatccaaacatgttcgagtctcatcatcatatgttcgatatgacgccgaataactccgatgacgatttgggtatcaccgggagccacgaataggatntcgagactaatccggcgcagaagtcaccatggagaatc

SEQ ID NO: 153875 - DNA, 449 bp, Arabidopsis thaliana landsberg
gttttttcttctgaagagtgatttatattctacctttctctggttaaagaaactgcctgaatccaccggttatgtcttgaccggctttaagcctataaactgatgccctaagacacctttttaggtttctcaataattctccgcatctatcttttcttctccacaagtaagggaaccagaaaaccagggaagaatccgagcaagctagggtttcattgtgtgcacaaaagtaagatctctctctctaaccaatacttgtgtaatttgtctttgtttctttgagcaaatattgcatgtttgttcatattagccggatccgttttatattttttcatgatctacattttatctttattttgtttgtaaattaatgagtgtttttcttttttctttttctgtttttgtcacgatctaaaaaacaagcgttacaaagaagaagaaaaaccttt

SEQ ID NO: 153876 - DNA, 117 bp, Arabidopsis thaliana landsberg
aaattattgtttagcatacaagtgatgtcatagaatacacaataagcactagtgttttcggaatattattttgaagtgaaaaagcattcaaaccaaagtacaaacttgtggtgactt

SEQ ID NO: 153877 - DNA, 153 bp, Arabidopsis thaliana landsberg
aacacgttccacaatcaagtaccctctctctctccctccctccctctccaccatggacaccggaaccaccacatgctctgccgtagatctatctgccctactatcctcttcttctaactcaacatctttcctcgccgcggcaacctttttatg

SEQ ID NO: 153878 - DNA, 157 bp, Arabidopsis thaliana landsberg
catgttgtgtctcgagtatgttgtcgtaccaatattagtagtattcaacatcccagtgagattctagatggatgcatattatcccattgtaaataatttttaacttgttccaccaaattcctttcattaaaaaatttatcagaattttattatttgc

SEQ ID NO: 153879 - DNA, 398 bp, Arabidopsis thaliana landsberg
ctcaaataatcctaattaaaattattgctgcgccgaacccaatgcatagctcactgaaaacaatggctccagcaaagttggaacgactatgtgttctctcattctttcttttttgtgcaacaggtattctcttattccttcttgtcttttaattagtttctcttgacatgatttactgctcagaaagctttagtaattattatttttgtggtttcttcattaataatgtgtgttgattttctggtagtttcttttttggccgacaaaacattttgaatggaaacgaaaagtgttggaactacagttttttgacaagttgttccgaccaaaaaatgatggctcgtagaattatatgttcataggttctatgattgggtgttatgatcatattctcgttg

SEQ ID NO: 153880 - DNA, 149 bp, Arabidopsis thaliana landsberg
  unsure (1)..(149): unsure at all n locations
tagngctttgtcggatgtcgactggcaaattccttgaaccgctttcatttggggagacagattagcatcgccatttttgtttatgaaggcaacgactcctatggcaactccgactattaagaggatggaggccaccgagaccacaactt

SEQ ID NO: 153881 - DNA, 475 bp, Arabidopsis thaliana landsberg
aatacgaaaaaaaaagttctctattcatgtgtacatttaggaaggaacacattgcataaattacataaacaaaaaggaactaatatacacgttaaaaataaaccttaaaaaaatgaaaatcaagaagatcgaaacatttggtcgaggatgatggtaagtgccatggccacacgaggttccatctccgattcaacgataagcttatagacatctttgccaaaggcaactcctccgatcaccgtttctttcctcttgatctccgccgttttcttcttgttcctcctctcatccaatattttgcagcttctttgaccgtaagatccttctatctcgtacaacaccgtcttctttgcgctaacccacgccaagcttttccggttagatattatgctaacgttctttctcgccgtgaatattggatctctctctgtttctccatcgtataccatccagcaatctccaagactcaacttct

SEQ ID NO: 153882 - DNA, 246 bp, Arabidopsis thaliana landsberg
taaacccccaaatccatgagtacaacacttcttcttcttctctctaagtccagttaaaaatcatctctttgcaatgttgactctttaatcttcgatttataagctctcgaaggaatctattaccttcaatctctctcgttgttagctctttgaattgtagaagagaatgggttgcttacttggttgcttcggtcgtcggaagaatcgtccccgtcagagacgcagagaatcttttcaacacaaaat

SEQ ID NO: 153883 - DNA, 645 bp, Arabidopsis thaliana landsberg
ctagggtttctgaaatcgaggagagatccaatcggcaatggcgaatcaagtgatcaccggaatcaaagaaacagctcagtcaattactggagcggctcgtccatggggcgatttcctcgatctttccgccttcagcttcccttcctccatcgccgatgcaacaactcgcgtaactcagaacctgactcacttccgcatcaactacagtatcattctctctatcctcctaggtctaaccctaatcacacgtccaatcgccatcctcgcgtttatagccgttggcttagcttggttcttcctctacttcgctcgcgaggagccactcacgatcttcggattcactattgatgacggcatcgtcgctgtgcttctcattggtctttcgattgggtcgctagttaccaccggagtttggctcagagctctcaccaccgttggatttggtgttctggttttgatcttacacgctgcgttaagaggaacggatgatcttgtgagtgacgatctggaatcaccttatggaccgatgctctctaccgctggcggtggtaacgacggtgctcgtggtgattacagtggaatctgatcaatacgatttgataatgagtttggggatctagggttttgttgttttgtaattgtcat

SEQ ID NO: 153884 - DNA, 459 bp, Arabidopsis thaliana landsberg
aatgtaaattggtaaagcaaagtgaaaactttcttgaaggagagttttgcaacagtaagtttgtttctaacaaggatactacaacaatcacaagaggatgggaacctaaagatagcagcttctaaacattctgtgttaataaaaacaatcaaccaaaatctgaaatccatcaaacctaacaaatccgtgaaaagaaaccgtatgatcatcatcagctcggaatctcgttgtcagattggctatcgcctccgaattcttcgtcttcaccttctaattcgtcgtcatcttcttcaccctcttcttctcctacctctccacctcctcctcctcctactgggatagacgagaagggatccttgacatggttaaccgagtttgtatagtaactgtgaaccgcatttgttgtgtttacatgcgtgtatgaagtggttggtgcaggaatagcaacagacttgttaa

SEQ ID NO: 153885 - DNA, 131 bp, Arabidopsis thaliana landsberg
gagattcccgaataggttacccttttgaactgctgctgaatcccagggcgggcaagagacaccctggcgaactgaaacatcttagtagccagagcaaaagaaagcaaaagcgattcccgtagagcggcgag

SEQ ID NO: 153886 - DNA, 791 bp, Arabidopsis thaliana landsberg
  unsure (1)..(791): unsure at all n locations
ctccgaaaactgtggtaggctttccatgtctcgagtatgtcaaatacattgttctaccacgattcaatgagttcaaggttgaaagtgaaaagaatggcggcaataagtgagtagttcgaatgaagtcttgcaacttttggatttctgcatcacatttggtatctgcataaccacttctgagactgatctttgaaattctttttaactgtcaggaccttcaacagctttgaagatattgttgccgactacgagaccggcgagctacatcccgaggatcnnnnnnnnnnnnnnnnnnnnnnnnnnnnnnnnnnnnnnnnagtaagtacatttccatctataaatgacgatactctgcaacaaacaatgagcaagcaatccttattaaaaagcgtcttcttctctaagtttctggcatcagtacaatcatcatggaacatgaaactcgtctcttttcaatctttacttgatgtccgagtcattagttttatgtatatgaatgatatgcttcttattgttactgttatgtctcagcctgttcgcgatcactttaaaaccaacgagcgtgccaaaaatctactggaacaggtcaaggtaataagaaactattccccgttggtttgatcaaagcccattgcttatatattcctctaactattttggctcatcgttttttttttcttttttcaaggcttttagagtcaccaggtgaagttgcagaagcaaaaagagtatttgtggacatcagttaaagagctttcctaaggattttggtggttactaagaaagctaac

SEQ ID NO: 153887 - DNA, 266 bp, Arabidopsis thaliana landsberg
tcaggtgtctaacacattattgactgatcatcacaagtatcttttacattctactattcctttctaagcaaaaaaaaaacacatgtacacaaagaaataacaatacctatgtacaacccaaaacaaggaaaataataaaaaggacaaaaagcgaaactaattcaaatatcaaaagtcttaaaaagaagaaaaaacgcaccaaaagctatataataaaacggtgaaagtggttgagacgtaagaaatcaatccaaaagcgtccgcgt

SEQ ID NO: 153888 - DNA, 126 bp, Arabidopsis thaliana landsberg
ttcctgacggcattctccgagttcttggtgaagccagtgatgactgacttcaccttcgccgcggtttgctccggcctaaaggaaaggtgttctctcgccgtctatctcaccggagtagaacaagtg

SEQ ID NO: 153889 - DNA, 268 bp, Arabidopsis thaliana landsberg
aagagataaattgtagtgacaaatcctcattaacaaaatattgtaagagataaatacaaaaaaaaatcaaatcaaaataattaacaaatatgttccatagttttcagatctatacaacatgttttagacattgacttacaacattcagaagaacaacaacatattttgaaacagaaacaaacatttgacatgagagcttaaccgcaatattgtctctgtttggtaatctcaccatctcttcttgttctcttatcagagtgtagagtag

SEQ ID NO: 153890 - DNA, 518 bp, Arabidopsis thaliana landsberg
atcctgctaatgtttcgttattgaattaggggaacaaagggtatcaaaaaaaactggaatcgttttttttggtctattgtttttgcttctcctgtgtaaacagagattgtttgtgtttgcaggtgatattgaatccgcgccttttatcgaggcgcttggtcaattctcttaccgtgtaggtaagattctttttcctcataccattgaatccaaaagaaaagaaaagtggattttgtggatatgatgaaattaactactgcatcttttggttggtggttgagttcaggcccagggaatttctgtctggtccatgtcagcctcgtgcctgtgcttaatgttgttggtgaacaggtataaatcttttcctgaaatgaagcagccatgatgtgacagcatatgatactatgtttacattatcttggtctgtttctgtgtgttctttcagaaatctaagaaaacacaacatagtgtcaaggggctacgaggattgggcttgacgcgggatatcttagcaagta

SEQ ID NO: 153891 - DNA, 58 bp, Arabidopsis thaliana landsberg
ggcacagatggtctctgtaaaaaaattagtcgaaataaattaacttttaattctcctc

SEQ ID NO: 153892 - DNA, 86 bp, Arabidopsis thaliana landsberg
tgccaaagaaatgctttgtttgaatcactatatatgttacaaacctagccacaaccaaaggagaaactaaagagcaggacaaggta

SEQ ID NO: 153893 - DNA, 230 bp, Arabidopsis thaliana landsberg
gatcaagcagctcttgttacagtaccgaggcggacgaaccaatttctccgatttcgactccattttcactcgtattcttaacgatcttcccgaaccaccacctctcgagctcgtctggttctactccgccatcagattctactcttccaagttagctttccgggatgattccgttaggttaacttcgtgtttcttccagctgatagtttcgttttccgattcgttttccg

SEQ ID NO: 153894 - DNA, 567 bp, Arabidopsis thaliana landsberg
acagagttgccaaaacgtattataaggttttatatatgttacaagcagaataatccagaaacagcagcaacattttgtaatctctctatctatacaaaagttaaagttgccactccagcaaaaggagtaaaagaaggcacaaattctgcaaagaagccaatcttgtcataacttgctagggatcacatcacgggaaagcttggtcggctttacaaacatgtcttgggtctctgcaatgaacttggcaaactgagatcctttcgtttgtttgttattaccatctttgagtaacttaggcagattgggtagagactgctcagtctttggtgatagtgatggcatcaaagcccaaatggatgagagttcttcgctaggttgatcaagtgtttgaaggatcgttgtgttctgcatatctgttttaagacgggaacaataataagcaaacactttttgacacatctactctctattctgcttccataagtgaaacaaaccaacaagattagacaaaccttctgcaaacttgaagattggtgccaagactgcacatgggatgctgaagttgag

SEQ ID NO: 153895 - DNA, 117 bp, Arabidopsis thaliana landsberg
ggggttggcttatataagaattaggtctttctgctctcatggtgatgatatgttttctgtaatctaaaatctaatgttaagttttggttgttttcttcaatctcttaactttttatt

SEQ ID NO: 153896 - DNA, 271 bp, Arabidopsis thaliana landsberg
tctttcagggtgacagtcagtcttctcggaaaaataaaaatgtagatcaaagctgctcaacctctaaacagcaatccaaagattttcctgccgcaggcagcaatatcaggtcttatttttcttgcaattaagctacacatctggaaaatcatctaaaatatatctcacattgggagttcctcttggcataatagtgagagccagctagatgagcgaagaagaaagaataacgaagaggtttcacacaataacagagtaatgacaagtccat

SEQ ID NO: 153897 - DNA, 748 bp, Arabidopsis thaliana landsberg
  unsure (1)..(748): unsure at all n locations
gttctgacaagtttctgttacgaaattcaattttttttatacatatgttcatttctcagaacaggagatgtcaattttggcgatggttttcgtaacataaacatgagatttgattgttctgtgcagatctcatagttaatctggtttgagtctagaaatgtcgagtgatgcagctcgtacgccattgttacccactgagaagatagataccatggctcaagatttcaacctgaactcaagaacttcttcttcaagaaaacgaagattgcgtcgctctagaagtgctcctcgtggtgattgtatgtacaatgatgatgtcaaaatcgacgaaccacctcctcatccgagtaaaatcccaatgttcagtgatctaaacccgaatctcaggcgagtgatcatgttcttggctttatatcttaccattggtacgctctgtttctacctcgtgagagaccagatctccggtcataaaaccagtggtgtggtagatgctctctatttctgtatagtaacgatgacaactgttggatacggtgaccttgtccctaatagttccgcctcaaggctacttgcttgtgccttcgtcttctcgggaatggtcctcgttggtcacctcttaagtcgagcggcggattatctagtggaaactcaacaggccctgctcgttagggctttccatataagtcagagctttggaccnacaaacattatcaaggagttgcatactaacgagttagcatacaaatct

SEQ ID NO: 153898 - DNA, 103 bp, Arabidopsis thaliana landsberg
catcatttgttcagtagaaaggaaagttgaaattttattgggctatttcctgaacaagtttggttccctccgttaggatctccttcacaagctcccccctaaa

SEQ ID NO: 153899 - DNA, 201 bp, Arabidopsis thaliana landsberg
acgaactcaccctctcttggtgaaatccatgtagcttgggagcgatttctgcccgtttgtactcatctgttggttctttgtggttcccaaactgattcattgccgattgctgagatgagaattgagcacggttgtaagaatttccattcccctgaggaatttctccagctaccaccttaagtcggttcagttcatcccgca

SEQ ID NO: 153900 - DNA, 389 bp, Arabidopsis thaliana landsberg
ctggaattaatgatgattttgccaaacaactccctgctaaatgtggtgttaatataggagtccctttctctaagactgtggactgtaacaggtagctactgcagtttctttttaatattgccgaaacatgtgtagttgtgagagcttctaactacataatcctctaattgacctatttaatttgttttgtgaacactgaacagcataaactgaaaagaagattgactaccaacggccatgcagctacaataaagtggatatcctaaaagatcaaaaccatcatgaacaaattatatggatacttagtatttatcttctgatcatatatgttatagatgtaatcatatagttcttggcagataaaatgtgattatttcccacatttacat

SEQ ID NO: 153901 - DNA, 282 bp, Arabidopsis thaliana landsberg
gtagtaaaactttgacttccaactcttattacaattcgtatcagatgtgatgccagtcttgtaatatattgacatttgattagcactaaagaaagatgtggtacccattgtactttcttatacatctaaagctttctcaaggtttccacgatttgctccaccaagtaaaatacttgaagcttcaagcagacgagcaaatgagatctgaaatctttcaagcatttttagctgttaaggtgctcagtagtagaacgatttggctttattatctgcagggtcctt

SEQ ID NO: 153902 - DNA, 73 bp, Arabidopsis thaliana landsberg
agacagagcgagagatgggagggaaaggaaaaaagaggagagagaaaaattacctagctgtcacggcggaccg

SEQ ID NO: 153903 - DNA, 416 bp, Arabidopsis thaliana landsberg
aaaaacgaagaaagaatgatcaagaacatcttccaaagtcggaaactctcaggtctctgtgttctctcaatcttgctcggatcagtcacaatcctcctcttgaccaatgataccatcgatctcttcccttacttgtctctcccttatctccgtcgatcttctctctccgtcatccctacctccacgccaatatcgagtcccaccaacgactcatcacctcctctggaatcaccgggttaatcaaacccgagtcgatgatcatcctgatgatcaaggtttggaattggattggcttaaagatgacaaacaatggaaagtgagtttgaagatagattggaagagatgtgagagtccagattacataccgtgtttggataacacaaaagctatcaagaaacttaagtcgaaaagaaaca

SEQ ID NO: 153904 - DNA, 394 bp, Arabidopsis thaliana landsberg
ttgtaatcctccctttaatttgaacatttatttgttttgtattacatgctgacatttttcagataaatagaacaaacaattgaatatgacctacttatacagccaatttaaaagggtttactcctatacaaactaaaacccctctaataaagaatcgaactaacaaatactattatactacaaaaagaatggatatcaaattataagaaagcttcttacttaatcttcttcaaacctaactaactccttcctggttttgattaaaccccttgtgcttgttcacatttgttcttctttgactgaaacaacgacgtcatagcttttgcagacacaacccttgtcaccagaagcttccacttggtgtcttcacccattttcttgtgttgttgtcccc

SEQ ID NO: 153905 - DNA, 200 bp, Arabidopsis thaliana landsberg
gaagtataaactctaaatgtcttcaaacattagaattaacaatgatacataactgaaaagtacgaaactaatggaaatacaaagtacaaaccataaaaattgcatatatgtcacaagaaaataaaataaaaaatcctactcaagatccatcatccatgtttatacacctgcaacagacaacacaaataatgcacagtcag

SEQ ID NO: 153906 - DNA, 117 bp, Arabidopsis thaliana landsberg
gaagataacaagattattatagcatcaggatcgagattgttcgtcgtccattgaagcagcattttccttcttcaaagatcgcttttggttcttctcgctgttttcgttttctaatcg

SEQ ID NO: 153907 - DNA, 536 bp, Arabidopsis thaliana landsberg
acagcgaaaattgagaactcgaatgagttaaagggtagtaccatcttcagcttcaggtgatcacttgagcgaagcagcataagcaacagaagcagccatgaggagagaagtaacagatgaaacaagggtccaaaagctcttcttcttgtgtgcatcttccacagaatgcttcattttcgccagttccttcttcatttcctcgaccatgctttctttgtttttgaacgctttcttgatcgcttctagctgcacagagtaggaatccattccttttccacgcttcttctcgtcttttttgttttctattccacatactagagaggacacactcttcagcattgttagactttgttttgcattggttcccgcagattctagctctgttttcaaaacacccgtagctcttttcagctctacgatatccttttgaaggatagccttttcgtttctcaatgactcagattgattctccagttctttcttctctttaatcaatctccctcgctcacccttaatcttctcaagctctttaccag

SEQ ID NO: 153908 - DNA, 119 bp, Arabidopsis thaliana landsberg
ttaatactatattgcccttaatgattttaaatagcaaagaccaaaatccaaaattgaaatcaaaattgttaccaaattagaaaaaaattcaatttgtacttcccttttaataataaagg

SEQ ID NO: 153909 - DNA, 317 bp, Arabidopsis thaliana landsberg
gtataaagaaaggtctcttctgtatctaaaagacatatcaaacgaaagaaatcaataaacacaatattctttcttccaaattttctcatttctcatgggcatatctcaagtacactattgcaatggtaagcaaaaggtacctgatgacgttagatcatttgatcctctttcgatgaaatataataaccacgagtgttaatttttcaggtgaccagaacttagaagcaaaccttctagatcatgaggaaactgaatcattttcagtacctcacacgaagaactgtaagaggtggctccgtgtcttcatatacgcaatc

SEQ ID NO: 153910 - DNA, 389 bp, Arabidopsis thaliana landsberg
aattagtccaaatacagcaagtcagcaccatgcttactttagtttagaaaagaaaaaagacaatctgaatccgactgaacatgcataaagaaacaggaaccatggaggaaatacagaagaagtgccccaataaaactatcttctcagtatccgtactaaaagaataatatctaattcatgctcaaaagagacaagtggtaccttgtaatatcttgcagccatgttgagccttcctatctcacaaaatatattcaccgctcgctctaggcaagacgcagcctctgcatataatattaggacgcatgaaaacacataagaattgataatcactcttgcattacagagatgacaattacaaaagtagctttatacataccattagtgtcaac

SEQ ID NO: 153911 - DNA, 139 bp, Arabidopsis thaliana landsberg
acaaaaggaaataattagattcctctttctgcttgctataccttgatagaactatataacaatggtgaaggttctcgctgtattcgaaattatttggaggaagaaaatggagtgtgttgggctaggaatttccagcaat

SEQ ID NO: 153912 - DNA, 204 bp, Arabidopsis thaliana landsberg
ggaagagttcctcctgactctgtgaactattattctctatgttttcatcgccggcagatttggaagatctaatttttgaatggaccctcgaaggtaaattttcacatacgtgacgagaaatcttgtgacccatgggaccgtgaccgtcaaatacaccgcaaaagatcgtatcttcttccccaccaaagttctgcagcaaaggtt

SEQ ID NO: 153913 - DNA, 123 bp, Arabidopsis thaliana landsberg
ttgaaatatggatacatttctaattatgatgttgtgttattcaaaatgtaatataaaagtaatcaaaagtaaagttttaatattgtaaagagttattaaatgttataaaccaaaaatctaaaa

SEQ ID NO: 153914 - DNA, 141 bp, Arabidopsis thaliana landsberg
ttgtcgttgtcaccgcggcggcggctctggcttgttgttgaggagtcgtctcaggttcttccggtagcaatctgattcccgccatcgcagattcaacgccacagagaatagacagtacggttcctttttttttttgacgca

SEQ ID NO: 153915 - DNA, 111 bp, Arabidopsis thaliana landsberg
cagcacattcataaataacacacgatataattgaggtaacagagttgcaagtataacaaaaaggcaggctcaagaagatgacttcaagtgttttgcaatatggccattata

SEQ ID NO: 153916 - DNA, 186 bp, Arabidopsis thaliana landsberg
gaatgcgtgttcaagtatatatgaaaaagaacataacaaagaattactttctttatttgaatattcggatttgtattggagttacaagtcctctttccatgtctaaaagctctatttgtaacgttcttgatttcactctaaaacctcttaaagtgtttcaaatgtgatctcattatcgacatccaa

SEQ ID NO: 153917 - DNA, 204 bp, Arabidopsis thaliana landsberg
gattgtgttaaaagccaaaacgacatcaaatcaataaattctcaataggtaaaactcattagctcacatgatcatgtagacgaatattgagctttagaaagtctttagttttcttgtcgatttcgtatttttggaccacaaaagtgccaatgttattttggaattcgattaacaaatatcaattgtggagcttcaataaccaaa

SEQ ID NO: 153918 - DNA, 98 bp, Arabidopsis thaliana landsberg
gagggaagagaaaagtgtatatttctcatatttctaaaaaaactaactattttgcaaattatttgtagaaaaagtgtctactttccaacttatctcta

SEQ ID NO: 153919 - DNA, 443 bp, Arabidopsis thaliana landsberg
atgttctgtagtagttaaaaacattatattccttatcatcgagttaataacaacgattaagaagtaaacctacaaccacactatatatttgtctcacttaacacaacgacaagagagaaacatagatttttgacccaagttcaaggattcaagagagggcttccttctttgataagcacaaagacacttccaccgtctcctctagagattcgaatgtctttgtctagataagtcgtgagtagccaagactgcgcattgtccgccggcaaagagaatttcaacggtggttggcttgatatggttctagccacagacgaggctgtgtcttgcaccgaggtaagtaaccctctgatcgggttaagatcaattttttgacccagaacctctacatattgcggtatctcaataaaatccgataaatgaggcgtcccgattacgccttg

SEQ ID NO: 153920 - DNA, 357 bp, Arabidopsis thaliana landsberg
gctacaaaagcaataattgcttacaagcctacaaggaattggatttttttagcccgaccattctagtatacatccccacccaaatagaaaaaagagaaccccattgcttattgttaccaaaagaatgtctccttcgagtggctattactgtatcaatcagctattaactcttttttttcctcctccttcccatcttctactttgacagcttgaaggcgctgtgataattgctccacggaggtctcttcttccccagcttttttccttgttccatcttctcccaccttttgcccctctaactcatcatagtagccgaaatcatcaaggattgatgtgtgtgcctcgtattctttgaaa

SEQ ID NO: 153921 - DNA, 225 bp, Arabidopsis thaliana landsberg
gagagagagagaaagagagagagagagagagagagagcccccacctcagaaaataatgtctgaatccttctcagcaccaccaacaaggaagttacgagcagcgtttatcgaaatccctctctgcatagagatgtcttcaagaaccatttcctcagcaaactccttagcattagctgcctgtcgttcgacttccctcctcttgtatccctgaatcttcttcaacct

SEQ ID NO: 153922 - DNA, 300 bp, Arabidopsis thaliana landsberg
agataaactcgtgtttagatccgtaaaaactttgttctaaaatgttttaatgagacacccgaaaaaaggtttcagaatcaaacaacaaacagtaaagtaaagaaagtctttccatgagagattcctacttccacagcttacgcagagacatgttcttctccgtgtctttcttcattaccttggccaccgccatctcaaagtcttcttgtgtcacgtgtactctcctctcacgcagagcaaacattcccgcctccgtgcacacagcctgaccgtattaaccaaaaacataagagagaggca

SEQ ID NO: 153923 - DNA, 211 bp, Arabidopsis thaliana landsberg
ctttgccggagtaaatattccggtagccatgctccggtcattaacttgttcatcgaccattacttcgacctctctattcttccgctctttccgccagcatcctcgctcttacttgtccccctcatcgtcaacgaccgtcatcagcgcttccggccgcaacattcgccggctttctactctagaagctgctgggagacagatatttctacga

SEQ ID NO: 153924 - DNA, 241 bp, Arabidopsis thaliana landsberg
acgagacaagacaattccgtcccctctctctctctctttccgcagctcgccggatctcctttgtcttcttcccctgggttccgtttagctcaatccctttttaggaaagactccgtggctcgatcctagtcttggcgatcgcctctaccctttttgactctattcttcttcttcttaaatcattaaccctcttattcattgcctttagggtttcttcacgatatagctaatacgattttat

SEQ ID NO: 153925 - DNA, 336 bp, Arabidopsis thaliana landsberg
acattatctcccttgaactatcagatagagaacttagatcctcttgagcaacgtgcaatagctactgcctcaagagttccggatctacggtatcagtcaggcatcctgtttatcacttcatatgcattagcgacgtgattttaactaaagatatgttcatttttggaccacttttaagggataatcatgtcttactatctcttgatttctgatttccctagatctgtatgaaaagataccaagccatattgagccaaagctccttgcttttcagcgagaaggcatagagtatgccagccatatgtagcacctgtggcttttcttattaccaaatga

SEQ ID NO: 153926 - DNA, 436 bp, Arabidopsis thaliana landsberg
gctaaccatagaatacatggacttggcggaacaggttggctatcataccaattcttgaatcctcgatgctccagctgcttttttaaaaattcttcagggatcacacttgaaatttgattcgcatttatgtatgtgtcataaaacagtctctgcaagctctcaaaaagatatctcaggagcacccaactgcctgttcgcgagctggtgctcttatggctgagctctcgtatctggatttcttctacactggtgttcaggtgggtgaatgatctaactcctgttttatgctacacttactcgtgtgtctaatgcacatgttacttggctacttgtagcgcgctgcactatctactgctgacaacatgtgcaagatactacgtattgatgcatctgattatgtcatggaagctgcacctttgatgacaaacctacttca

SEQ ID NO: 153927 - DNA, 171 bp, Arabidopsis thaliana landsberg
tgttattcggaatccaaagaaagccagagatattgagatttacagtgaaaatctacagaggaagagatagcgaaggacaccccttaccctattttcctattttagttttcattacaaccttaatcttcgtgttgtgtgttctgtaacttcccagattttttttttctgttt

SEQ ID NO: 153928 - DNA, 257 bp, Arabidopsis thaliana landsberg
  unsure (1)..(257): unsure at all n locations
acctgcttcactcaaatcatgaccctgaatcttangattcattgaactagaagcaacaacagggggctaggacctgcttcacgactatcaagatcaagagactttaacttattaacaacatctgaagaagaacgctcatgctccttacgaactttccaagcatcagaagaaatcgcaaaatcttcaggaccagaaacaccagtataccgataaatccgatctatttctccatcatcaactccatcgactcgaaaact

SEQ ID NO: 153929 - DNA, 504 bp, Arabidopsis thaliana landsberg
gtactaagaagcaacatatcgaattttaggtgaaacatagtactactacaagcatagctagaataacatttttccgaaatacagaagaaccattatctgattttcttctaatttattcttatttgattgacctcgttacatcataggtggaatgctctgctcgtgtctaaagaagttctctggatcaacctttgctttaatcatcatcaatctgttgaaattgtttttgaagtagttagctccccagacttgagcttgtttgatgcatgttttcacgtctttcgtgttccttcccaggtctaaatcacggtagttcacgtaagcttctcgtgggttacttgagacataaggcgtcatgtaactatagagatctctgatccagttgatgtgtctgctcggtctcttgtcactgtctagccaacttgttacgtactgaaccttgaagaggactccttttcgatgcggaaaagggatttgggattcggggattttcccatcattcct

SEQ ID NO: 153930 - DNA, 95 bp, Arabidopsis thaliana landsberg
tatttttgatgttttttttaatgtttattattttttttttttttattattttttttttttttttttttttttttttttgtccagaatgtacctgt

SEQ ID NO: 153931 - DNA, 452 bp, Arabidopsis thaliana landsberg
gggaagaaactgaaaggtggtgaaaatggtgttgtaaatcgaaaggcgttaaatcgagagaagataattactctgcaagaagatgtaacggctttttcgagttcatgtctttaggtttgctcaatatacagcttgaagaaatttataagactggatggtattttgttttaaggttgaaaagttgaggaagaagctgagacttgaagaaaacattcaccgagcaatggaaagggcatttagtagacctcttggagcacttccccgtcttcctccgtttctacctccatcggtttgtaactttaaaacatagctcagtgaatttattttccctctaaatcttgtctaaaattgggatttttttttggtaattcatgtcggttttggagttacttgcggaagtggctgttaaaaagaggaaatggttcgcttagaagaacatattgtgcattgta

SEQ ID NO: 153932 - DNA, 327 bp, Arabidopsis thaliana landsberg
cttcgttggtttactcttcacaagattcctcaagttgattctgtaagccgtcatcaatatcgtattgctctacattattcccattgagatattctttttatgaatgctgtattcacatactcgagatatgtagaaagcaaattttaaatctttgggtcactatttgagttttcctatctgtatctgaagctctcagtgcatatgaggattaaagtttttgcatgaattgcagataattttgactcatgaacatgctgatgcagtacttggcctggatgatatacgttcagggcaacccattaaccctactaatgaatattgtcctac

SEQ ID NO: 153933 - DNA, 448 bp, Arabidopsis thaliana landsberg
aaactctgagacagagcaagaaaaagataaagtgagtgaaaaaatggcaacggtcacgattctctcacccaaatcgattccaaaggtcactgattccaaattcggagctagggtttctgatcagatcgtcaatgtcgtaaaatgcggcaaatccggccggagattgaagttagcgaagctggtctcagcggctggattgtcacagatcgaaccagacatcaacgaggaccctattggtcaattcgagactaatagcattgaaatggtttgatagatataatttcaattcataattctgctgaaagttgtttctgattggttagtgattgattgttaataggaagatttcaagtatggatattacgatggagctcatacttactctgaagcagaagttcaaaagggtaaaattttgaattctaaaattgattcttgtcgttgtttcgat

SEQ ID NO: 153934 - DNA, 495 bp, Arabidopsis thaliana landsberg
gtagatattgtttcccattcccaggtttgtgttgtggaatgggaaactgaggccgcttctgtcaaagccaaagggcccaaacagttggttctttcaggaaaggaatcacaatgttgccagaggcaatctctgcaaggtattgtattatatgctaatgaatctgttttctttcacccttttcaatgagaacagtgcaaaaatcattatctttttttttatttgggcaggttgagttgcaacttgcaaagttaaggaagctctcaagtattactaagatggatagcagaggatacaactcgacttatgaaactctgaggggatattctctgtacagagcaaaagtgtagcgatgactgctccatctcatgttgctaacagtctttttcccccaattttctgttaagtttttggatttgtgaacccagttgcgtgcaaattcaagtagatacgtaaaggatataatgttttgtcgccaaaattcccatatacaagctt

SEQ ID NO: 153935 - DNA, 560 bp, Arabidopsis thaliana landsberg
ttgttggagcagttttatattcacctttgaaaacatccattaaaagaacggacacaataaaaaggaaaagccatattttaaacttacaaaattattttaatatgttaattatcataaagtacagaaaaaaaaacaagaaccaaaaaaaaaaaaaaaagagcattattctatttttcgccatgcttaacgatcaagaattttagctctctctactttcattttccccctcatcaaaatttctcgatgttgtttcgtttccaccataatatggacatacatgtcttagtatatatatatatatatgctaatttatttctctgccccgattatttatgcctaattattttatttacccccgatcccccatatatatatataaactcatcagtagaagaactccggctaagtcactagaactccggtggagaaaatttggccggcggtgtaaggagaggttgagaattttgatctacatctctctttcctttcatcatttgctatatgactcgatcgacactctgtgctgcaaaatgctttttctcctctgcatataaaaagca

SEQ ID NO: 153936 - DNA, 434 bp, Arabidopsis thaliana landsberg
atccatccatccacagcctcttacaaaatctctctctttcaccattaacaccaaattcagaaaactcagaagaagcaaaataaagagcttttactgatccaccaaacacagaatttcataaactcccaaaaaagttaaattccaaacaagccccacaacaacaacaacaacaaaaaagattttaatctttctcatttacccatatcctcaaaattcccacaaaaatctttcctccaataacataacaaaacaactcttcttctacaacaaactatgttttgattttttagtttcttcttccacacaatacaaaagaaatggggttttattcactgaagcagctcttgttactttacatcatcatcatggctctgttctcagatctcaagctagcaaaatcttcttcaccagagtacacgaacctaatcaacaaa

SEQ ID NO: 153937 - DNA, 208 bp, Arabidopsis thaliana landsberg
taatgattgctgtaataattaataatgaacatcttctttcccaacaagatttctgttaattatatttatatcaccaattagtaagataaaaagattttgattgtgactctttcactgccacaattagttaaacctttatggtttcttcttattcttgtcttcgtactttgcattaacatttcagccatcgtaaaaatatgtagaatgt

SEQ ID NO: 153938 - DNA, 259 bp, Arabidopsis thaliana landsberg
tcgacgatttcaccgactaatcggagtttggatcggagattagatccgggaaatcactgacgaatcctttctggattttggatcggtctatgcttctctactctacttgatcttgatcttctagaaatttaacttcgttttgcaattgatcgtctcgctttaaaaaacttgcagatccgctgatctctttctgtgatactgcggggcctagggttaaggttttaatctccatctcgggtgtcaattttgatggcctttc

SEQ ID NO: 153939 - DNA, 176 bp, Arabidopsis thaliana landsberg
agtttcaacttttgtagctcttacacaatccaatcggttttgtctttaaatcaatcatttataatgctattgttaccaatttcgtcacttacaaacaagtttattgttactttacgagagattgaacttccatacacttatgcatttaccattgtgagccgttaccatcttcttca

SEQ ID NO: 153940 - DNA, 232 bp, Arabidopsis thaliana landsberg
tccacattctcctctccaaagaaggctggttcatctaagcctactaagaagattaggttcattacgaagaagggaaagctggaaactggttatatcagataatgcttaggattgttttttttttttgtcatttgcttttcctctgcagcaatggaagctgtgtggttgtactagttgttaaggttacctttgtttcactttatgtgaatatatgaagaaatttgttcttatt

SEQ ID NO: 153941 - DNA, 158 bp, Arabidopsis thaliana landsberg
atgaccgcagccaagtgatgtaccatcctgagctgactcataagcttatgaataccccttcgttgaacaatttagcttcgacgcctcagcccgagtatgttgggggaagttatggtaactaaagtaactatgagcaagaagtatcctcttcttatcaa

SEQ ID NO: 153942 - DNA, 210 bp, Arabidopsis thaliana landsberg
gtgagttatcttagcaccacattttatcacttataactttttttattatttttaccaatagaaagtttatagccatgtttttagaccaattgaatttattatatttttcgaataattgtaataccagaagatattcttagagtaatgtgctttgcaaattataaaagttgaaaatagcgatatatgggctccatttctaatgatctcaat

SEQ ID NO: 153943 - DNA, 201 bp, Arabidopsis thaliana landsberg
  unsure (1)..(201): unsure at all n locations
tagaattatctcaaaattcttctatcctttgcatcattcaattattttaataaaacatacaaaatatgaaattgtcagtaataattttttctggtttgcttagttactcttccatgaagacgtacattggcaaaaaagcaaagttaggttcactgaactaattagtcacgtagttgcatttcatttgcacggngagttttt

SEQ ID NO: 153944 - DNA, 96 bp, Arabidopsis thaliana landsberg
aggacctttttagtttctttggcattattgtgatgtgtatcaattagcatacgcacctttgttttggattacagaatcaaaaacgaattttggtca

SEQ ID NO: 153945 - DNA, 86 bp, Arabidopsis thaliana landsberg
gtatgcgataatggtataccggagactatttggagagtcttcgagcaacatggcaccttaccgcgatatgaatgtccggtctaggc

SEQ ID NO: 153946 - DNA, 210 bp, Arabidopsis thaliana landsberg
  unsure (1)..(210): unsure at all n locations
ctcatctttgaaacagtttgaagaaaatacataacacttttaaattccaaaacacaaaaaaggaatatgaagatgcattttttcatcctccttgtaataacctcatggttgtcggagaaaattacttcacttcctcctgattctcgagtattcgatcgtcatggttttcccgataattttgtttttggaacagctgcatcagctnttcan

SEQ ID NO: 153947 - DNA, 115 bp, Arabidopsis thaliana landsberg
caaacatataaaccataagggaaaacagagaaagagagagagatgggaggacgacaatattaacaacaacaacacaaccgtgatcgcacctttcatcgtgaaaacatatcagatg

SEQ ID NO: 153948 - DNA, 631 bp, Arabidopsis thaliana landsberg
tttttgttgggtgaaacaagtgttgcggacccttattccctttcagtgagcaactttgcacttaacatatggaatttgtttttaaaattaatcgttctatattcttcaattttatatccttccctacgttttatgaccagatgaagcattctttcccagatctctggaatgtagagaaaaggtactttctcatgtaactacactatattcaatgagttccgctcgaagaatacttccaagattcttttctgtgttgatacggttatgcagtcatgttttaaattggtcattcctttactcgtgtcgttgtatgcttggtaatatcaaataatgttttggtcccttgatgtgtaatatgatagacagaaaagttttactgccaaagacagcattgcaaataacgttagcttccttattttggggttggcctgagttttacgtagttcagtacttccctatgctaattttatggcgatgagctgtttaactgttctccggttagatgttaaagaaattatttcctttttcagttttggctctattatagtcggtgcaatcagaacaaagtttgctgctaaaggtggtaaaagtagagactcaaagagttctcctggcacaaaaaagggttcgc

SEQ ID NO: 153949 - DNA, 463 bp, Arabidopsis thaliana landsberg
aaaagctttagttacatacatacaccaataaaccaaagacttaaccattggccaaacacatttatttatctcatgaaacaacaaaccccaacctaatcatatactacactaagaatcctctctaacaagcattcaatagcaacaagtgggtactacaaaattacccttacacaatagagtttacaactacattcactagagaaacttgtttgaaaggtttaacactttttaccgcggcttatactatgatcgttgttttcgacttttcgcagtatttctccagtttattagccctaaagatgctgacttcgattcatggacattctccaactttctccgttagagcaaccttgagctgatcttgcgtgaaaaactgattccccattttcacagtcgcttgttggatcataagatcattcactaccgataaactcgcatgattcacttccaaatccaactccgt

SEQ ID NO: 153950 - DNA, 216 bp, Arabidopsis thaliana landsberg
aacgagtgtgaaaatttgaaaacctctctctttctcattttccctttttttctctttatctcaagctcattcttcttgttaataactagatctctctttctttcttcttatttttcttttctcttctttagtttcgcttatctcgcggctctgaccagctctcaagttgttcgtttctggttaatggatattgaaccctcttgggatcttgggggg

SEQ ID NO: 153951 - DNA, 455 bp, Arabidopsis thaliana landsberg
  unsure (1)..(455): unsure at all n locations
tgatattaaatttattatttgggtttccttttttaaaaaaatgaatccaccattgatacacctttacagtggaaaataaaaaaattgtgtttttttcttttggttttggctacacacacaaactcatctagaactatcacagaaaggaatggcgccaaaatcacatcttcgatgttgctcctccgtcgcaacagtcccacggcggaacacggaggcgcaatcaggtaaatcaccgagatcaccgaacaaagactcatcttcctcttggcctactgaaaaacctctctctagagttacgtcgagtgananaantttnttttccccgggggaaaanaaaaaaaggggggggaaaaaaaaaaaaaaccccccccccaaaaagggggaaattttgggggaaattttgggggaaaattttggggaaaagggggaaatttttccccgggggaaaacccccc

SEQ ID NO: 153952 - DNA, 286 bp, Arabidopsis thaliana landsberg
tttaaaacttagatgtgtatgccctgaagtattgtgcttgtgacaaattaagaagacagatcttgagtaagtcgtatctactaaagctggagactttgagaatttcaagaaggctaaggaaaagtttatgttcaacaagaaagtaggagttcctgaaagttttaacggtctctctcatgaacttgttttgatgttatctagtaacttagtataagacttggtatgtatgttttgtacaatttaactaatataattttttttaataaattcaactaaatatttatgt

SEQ ID NO: 153953 - DNA, 631 bp, Arabidopsis thaliana landsberg
ttgcggaatcggatggttctcgtgagtagagagtattaagttttttttgagttgaagtcaacgcagcttctctatattcagtttagatttacaagctatcttcttgttttgcagctttctcttgggttttgtgttccctttcttatggtactatgcaacatttttatatttcgggaactactaccgcaaggatcctagagaaagagccggccttgctgcttccgcaatcactgtaataactctttttctctatctcatattactgtatacgtttttggagagaatgatgaaaaattgaaaatctggtgatgttgcaggcgatgggattctccctcttgctactagtgattgttgttttctggtggctctaatgggttctctgacttatacgccataatcttgagatatatatgatggaaagtctcatccttgtcaaaggaaaaaggaggggacttagatatatatataaaccctatatacacagattatagttatacctctctcaagctctgtatcattttcttctcaaaaatctgcagtgtgtacaaagaacagaaaatacaataataaatgagtaaatggttgtttctttcttgagctcgaatgaaatgtttttacattttttctgctt

SEQ ID NO: 153954 - DNA, 417 bp, Arabidopsis thaliana landsberg
cagtagaaaagatggaaccttatgtcttgacacgcaagaaaagaggaagaagttggtctaatttctctatacctgtgtcctcagctaccaactcaatctgatttcttaaacatgtcaaccgatcgatggttgtcttgggagaaacacctttgagttggcgctgaagatcagactgaacaggaacacggaactgtagaacaaacactacagattcttgaatgatcctcttcttgttcttccttcccacaacagcaatagtagattgagcacaccccatgctctctttctctctctctctctctgctatgatcttttgctcacaaaatcatcctacacaacattgacatatctatatgtcaaaataaggatgttttggaacaacctgaagcagatagatccggattaattttgaagctc

SEQ ID NO: 153955 - DNA, 68 bp, Arabidopsis thaliana landsberg
aactcgatccttctcacttaagcgatcgtaccgatcttaatatctttagccagcgagagagagagaga

SEQ ID NO: 153956 - DNA, 179 bp, Arabidopsis thaliana landsberg
agttcgggtcgcagtctacgagggaatacagtagaggagcatcaccagagtggttgcatatgcagataggatctggtggtttcgaaagaacgtcttaataaagaaacaacacttgatcatcatcttactacaaataagatctaaaagccctaattgcccgagaagaaaaagcatagatt

SEQ ID NO: 153957 - DNA, 708 bp, Arabidopsis thaliana landsberg
aaaagtaatttgccgcctgctattatgacactctctgacgactacacattttccttggtattgtcagaattaaaaattattcatatctctggacgacacatccagaataccatttaaaatctagcgttttcgaagccgtgcaagtcgctcttcttcatcatagctaacttagccagtttctcagccgctctccacgctgatgctggagtcaacggctcaccgttttcatccatcaacgtcatcgtcgtcgtggtctctctctcgcttcctctccgccgttgattatgttgctgctggtgctgactttgatactccattagttgttgtcctctccattgaacttccaccagctctgcctccacgacctttatgtactcagccgcttccaccgttcccgactggccaagcaacgcacgcgctgatgttagcaagtggtatgcgcttgtgcattctccgtattccactagcctccgcgactcggcaacagcccgagtcgctataaagaggcttctaagccgttcgattctaggagaagaagatgatcgaacggcttgaggaacgcggagagattggtctcgtccatatacaacttcttgtgtcgatgggtccttaaagagacctctaactgacaaaatctggtaggccctagtggcggttgacgggaccctaagctcaactagaagctctctttcctctcctgcgtagagg

SEQ ID NO: 153958 - DNA, 211 bp, Arabidopsis thaliana landsberg
ccaataactgttctgggcatgcgctgcatccttctgccatgaaacatgcagcagatgcattctctataataatgtctgattcggaagtgtgtctgaacagaaaattccatgcagttatacgaccactctataaacagcggtgtttctctacgatagttcccattttggagtctttgattatgaattcccagacttcactatcgaggtaaat

SEQ ID NO: 153959 - DNA, 182 bp, Arabidopsis thaliana landsberg
agagaggaatattaaacagcttctatatataaacttttagagatacataacttcacaagatctaacatatataagcatcatgacttgagtgactgactactacaaccccccttttcttcctaatccttactccttaataaaattattcagacaaacccccttatatacaaaacgagaggtgg

SEQ ID NO: 153960 - DNA, 138 bp, Arabidopsis thaliana landsberg
gtggtttcaaatttctttttctcgtcagtggttacaaacttacaatttaaaaatcttatcttaagctctcctctcttctctctccaaaatctttcaaagaggagagcttgctaatcgtctcgtctccggcttgatccc

SEQ ID NO: 153961 - DNA, 78 bp, Arabidopsis thaliana landsberg
ttttttttttttttttttttttttttttttttttttttttttttttttttttttttttttgttttttttttttttttt

SEQ ID NO: 153962 - DNA, 770 bp, Arabidopsis thaliana landsberg
agtggccaaatttctaagatctgtaaaagatgagcgccgaaaacgcccctgctaaacgcagtaccgcggcggtgactgattaccggaaaaagctccttcatcacaaggagctcgaatcccgtgtccgaacaggttcgatttcaaaatcttcctcattctcctctttcgttttctgggtttagtttgtgggtcaaaatcgaatctagggtttgttcctactcttcgttcccattagactctcgagactttacttcaattagtgaccgtattttaggggttttggagtttcgaattgaattggttccaccgtttgtttcacttgattagtcaattttgaagtcgatctcaagcttaatttcacttgttatagttcttataaactgggtcttgtggttatatgcagctagggagaatttaagagcagctaagaaggaattcaacaaaactgaggatgatttgaagtctcttcaaagcgttggccagattattgtagaagtactacgtcctcttgataacgagcgatgtaattttctatcttgctaccttatgtttttgattgaatactacgctttgtgttttctatcatctaaaggtggaattttttcttcttctttttagtgattgttaaggcaagtagtggccctcgttatgtggtgggttgtcgtagcaaggtggacaaggaacagcttacttctggaactcgagttgtcctggatatgactacgcccccaattatgcgagcccttcctcgtccagtatgcttgatttca

SEQ ID NO: 153963 - DNA, 277 bp, Arabidopsis thaliana landsberg
tagtctcgctcgcgtctttcctcaaacctctctgtctcttcttcttcctcgcctcgtctacgcaatactactactcttatatcacaaaatctccacgaaaggtttgtacagagatgctataacatagcacacatctcctttcaataattcgctttttcctctctctcttctttttcatgttttcttgttcctgatctctctccattacttttttgcccatctctttgtcttcctcagcgctactcgaagatctgtcttttcaggtatgatgggtttg

SEQ ID NO: 153964 - DNA, 140 bp, Arabidopsis thaliana landsberg
tctttagtcttcacgaacgtaaattgattcaaagagccattttgttaattgaaattttcattcttttgttttgctttactgtattatcatattgaaacctgctccgattgtattaatccgaggaaaatgtatgtttctca

SEQ ID NO: 153965 - DNA, 264 bp, Arabidopsis thaliana landsberg
atgatttggaacctttgcttgcaacagctgcacattcattaacccaccaaccttgcttcctataaggctataattacttcttctatctatgtcaacaaccaagactttagtttagaatttgacaacctctggtcaaatgggtacgtcacatatgggagaaaatgaaataaattgtaaagtttattagtcaatttatgacatgtgaattggtaatatgtcaaataatcctaaatcaagagttgttctgctttggaatctcaacag

SEQ ID NO: 153966 - DNA, 602 bp, Arabidopsis thaliana landsberg
  unsure (1)..(602): unsure at all n locations
ttatgtattctgtttatctctagttggttaaatgatctcacatttccttggaacacagatgaaattcaatttacgcagaagttttccacttctgacaacaaaggtatgctcactttttccttaacttcccacgtttactcgcaaaaggagaatgctttgtcttctgttgtatttagtggcagttgcatatcaacactagctcataatcaaactcacgcaatctgtttgcttttttttttgtagagagttttctgaagaggtgttgttgaggaacttctatggttcataagcggttcaaccaatgcaaaagtaaattaagccagagtgtctctgctatgctctaaaactatgcaaatgaattggttatatctatgatagactttatacatgggcaggtccttcaggaaaaaggtatccatatatgggatgggaatgcgtcaagagagtatctcgatgggtaatatttgtaacctgcattatctttttggttaaagaaatattgatcttggnnnnnnnnnnnnnnnnnnnnccaccctattttcagtatcggcctgacaagagagaaaaaggcgaccttggacctgtatcggatttcaatgggg

SEQ ID NO: 153967 - DNA, 253 bp, Arabidopsis thaliana landsberg
gaaagtaatatcatccagctccatatatatagcaaagaccatttgattcaagagcataatcattatataaaacccatggtcataacatgataagtattaagacatgtacataagaattttgacagtgtataaaaagggtgtaagcccgactttcacatatataacttaaacccctgacttatatgttacctggccactatcatctttcaaacagacaagattgtccttcaagcaagagagtcctcgtcaatcg

SEQ ID NO: 153968 - DNA, 614 bp, Arabidopsis thaliana landsberg
atgaatccgagtaacgtaccatacactcttcatagaatatgaaagcttctttttggtaagtgcagtttcttgagatttctagggttgcggtttgaacacagtctgaacaagatgtttctgagatgtctcctctacagaggaacatgccacggactgtgtcggggctaatacccgccgtggcattggaataggatccgagagaggaacggaggcggagagaggagagtacggtttcgcggtttgtctcgtatgtgctggtttgtgtaaagttgtcggagaattggttgcagaaggtgctcatgtggatatggtcagattcggatatggttaggttagtagagaagagaagagataaaagagaaagaaagcaaaagagagaagagagactttggatcattgttgccattatttgttcttcttgtttatgaattatgagtgaaagatgatatttatagtagacagatttgtaaaaagatgcattatatatactctttaaataggaaaaatattttattactattaggtgattgttgaggccatgttgttttataaaatattaactttgtgattctgcaatattgaaaaccagatgaaatacttgtttaggaataata

SEQ ID NO: 153969 - DNA, 308 bp, Arabidopsis thaliana landsberg
aaaggaaaataatgaaccatgtcgtgaaaggttacagagagcctcatgtaaaataaaatagaatcaccataaagacaaattcacaagaatatggcttctaaaacaaattaaaggaaaatttgatcagctaaaatgtttcaaaacgttttcttttccctctacttttgtcctgtttcgttttgcttctttgattcaggcaattccttgagggatgtgggaatcacaattgacatagacgatgaaactaaatgtgccttacacgagtcttagttcgtactcaccagccatggttatgtatctcacccatg

SEQ ID NO: 153970 - DNA, 108 bp, Arabidopsis thaliana landsberg
ccacccttgaaagagtgagtactagctctctgaaaaagcggctcttgcgccgaagatgaacggggctaagcgatctgccgaaggctgtgggatgtcaaaatgcatcgg

SEQ ID NO: 153971 - DNA, 482 bp, Arabidopsis thaliana landsberg
gttgtcaatgtcggagacatcttagaggtaagttataaggacgagagagcctattcctggtatcatttgtgaatggctctgatgattggtaattaatgtagatcataacgaatagcacataccgaagtatagagcatcgtggagttgtgaactcagagaaagagagactttcggtggcggcattccacaatattggattgggtaaagaaattggtccgatgagaagtctcgtggaaaggcacaaggctgcatttttcaaaagcgtgactactgaagagtatttccatggcttgttttcccgtgagctcgatggaaaagcttaccttgatgttatgagactctaaaggaaacaattcataaaattattggcttgtgccccaagaaaacaatcacattttctgacccttcctattgtagtgtatatactctgtttctcctctgtttcatgcttttgcaaataggcaacatctctctctctctct

SEQ ID NO: 153972 - DNA, 432 bp, Arabidopsis thaliana landsberg
actatatgttgcgttgcttctgacataatacaataacaaaaaaggttccagtactataaacttcataaaacgttatacattacaaattataacatcggctcatgctatctatacttattcacataacggtgcaggcgttagggttctcgtcgctaaagagggacatgagcttatcgtcagtacttcccggctgcgcctgagcctgctccgacttcctcacaaaacccggcggggctctcttgtcgtaagctccggcggcatatggataagccaccattgtgtatggaacatacggccacagctcagctttctttttcccagtgctctgcactgtcttcagcactttcttgggatcaacgtagccactcaccgttactttgtgcatctttctgttcacttccactgattttgctcctaagaaaaaaaaaacga

SEQ ID NO: 153973 - DNA, 119 bp, Arabidopsis thaliana landsberg
gtcttgaaaccgtgaaggaatctgtatcttttgtatgttacccattttattgtcgttaagaatcaatttagaggcaaaacgccgagagatttgcccgggagagtgtttttacatcgatc

SEQ ID NO: 153974 - DNA, 135 bp, Arabidopsis thaliana landsberg
tttcatctacataggagaattcaacattcgacattttcctctcggacaaggcagcggaactacagtcttttgggagtggagtttttcctttgtaagctttgcagacttgacccaccaaatcatctagtttctata

SEQ ID NO: 153975 - DNA, 341 bp, Arabidopsis thaliana landsberg
caaccccaagttcttttccgacagcgttttcttctgtcttttgctctttgtggtttactccttcttccggtttggatttcccgagctagtaaagaagggatccagtagcagaagctgaagctaaacccaatcatagagaaagctctctgaacaaaaggttcagtttttctctctttcttcaaaactgaaatcttgtttgtgtgattcattcactaataagtcgtcattctttcttctccttctgatttctgtgtactttttctctgtcagacattttctgggtttgttttaattaaaaagaaatggccgattcgaccaaagtaaggctagttcgttgccca

SEQ ID NO: 153976 - DNA, 220 bp, Arabidopsis thaliana landsberg
taaactgacaaaattgaaaaggacaagagttcattttccatattgcaaatttattcttaaacttttatgttatttggtttgaaaagtcaaagaactgcagaaggagagagttcaagttacaattcaccccccttataataaacaaagtgactaaaccggccccattatttcttcaatcatcaattccaacctttttaaaaactaaatccaaccggcattg

SEQ ID NO: 153977 - DNA, 138 bp, Arabidopsis thaliana landsberg
tgtgatgcaaacaaatgagatgtgatcagaagtcactaagtcaagccaaacaataacagtataggggtttctaacagtcctaagtgaacatgcagaaaacagaaataataacagaattattaaaatcactcgaccaca

SEQ ID NO: 153978 - DNA, 68 bp, Arabidopsis thaliana landsberg
attgttttgatgattttccggggaaataagtgggtaggtcatgtttttagtgacgtatagttttcttt

SEQ ID NO: 153979 - DNA, 517 bp, Arabidopsis thaliana landsberg
aagataattccaatatagaacttaaaaaaatatccaaaacatatttatttatcagaaaagagagagagacataagcaaactacgataagaacaacgagatagcaaatcctatgtatatctaacgagatgtaacaggacgttacatgtaatacgcaaaaagaacagagcgcgccgtgtcggctatacttaacactttgcgcatttattaccaaagatccagcgtttaaagcggctgagacgcagccatatgctgttgctgtttgccgccgtcaagagccatttgcttggacatatcggctagagctgctgcggctgctgctggtgtcatgctttggtatggagacgctaatggaatggcagtgtttgcagcaggagcttgtgtgtggtaatacactgtctcgtttggagagtttgtgtattcaaagggtccaccgtagttggcgtttgcgtttgtgctatgttgaggagctccagtaccgtaattggcgtttgcgtttgtgctatgttgaggagctcc

SEQ ID NO: 153980 - DNA, 175 bp, Arabidopsis thaliana landsberg
ggctagcttccttaaacaaatgtgaatggatgtgataaataatgaaatgctatatttttccttttgcactggataccatcttcttctcactgccttttatttcatatacactttacttcaaaatacaaatggtattcattgtcttgaaccacattgaatattaagcacgatttga

SEQ ID NO: 153981 - DNA, 451 bp, Arabidopsis thaliana landsberg
aatagtcacaataatcattcccttttttgtatatgtattcaaatgagtttttatatttgttcatgaatatatagtccacgctcaggattagtctcggtcaaaattgcatgtggtgttcccctatacgataagtaaccctaccaagtattgaaaatgacaagtacggtttcctgcaaaccgattgaaagttacaaatccatggattttacaatactatataatagctattattatttaactaaaagtacatacatctagctcaactgataataaatcgagtcacacagtatcaattattggtttaaaatttgatgaactctttccgtggatttggaatctagcacaaatattatctatagatttcatttttgatagatcacatatattatttctgtatatctcttgtgggaattaaagtatgttttaaagacatcaatatctaatcatattc

SEQ ID NO: 153982 - DNA, 320 bp, Arabidopsis thaliana landsberg
cgatgtcctcaacgaatttctcatcaagagtttggtaagaagtaccattgttgttagatgaaccatgatcaacacttatttcttttatttcttcggtaaagcgagggctttgagttacaggaagcgttgtagcattagatcttttggactttttacggaagctgagccaaactgaaaggacaaggattactatgaaggctgcaaagagagcaatcactatgatctcccacagttcaagaacaccgtatctcttggttaaagttcgttttagctgagatgtcatatttcacagagacttgtatgtgtatatatgtacctgc

SEQ ID NO: 153983 - DNA, 191 bp, Arabidopsis thaliana landsberg
aacattatacagtaataagcattgatgcaaatatgttttctgtttcgagggactttgtgtgtacggggggggtacagagagacaagaccaaaagtgtggtctatagaaaagaagaaccatccacgggttcagccaactaaataggatcgaaccggagagacagtgtattgatcttcaagttccaattccat

SEQ ID NO: 153984 - DNA, 81 bp, Arabidopsis thaliana landsberg
aatcctaaaagtttttcttttggccattgacattttcatttcttacaaaacacgaatatgtttacacatggtgttacaata

SEQ ID NO: 153985 - DNA, 78 bp, Arabidopsis thaliana landsberg
tttttttttttttttttttttttttttattttttttttttgtttttgttttttttttttttttgtttttttttttttt

SEQ ID NO: 153986 - DNA, 247 bp, Arabidopsis thaliana landsberg
caacttggattatgtcgggaattttgtttcaattcttttatggattaatggaaggttggcctgcttatctcattagtgttctttgcgttgaatatcgacttcgtaaagaacgagaaaaattctattttccgtaaccacgttattcaggttttattccacctctaattcttgtgactcgttataattttttatttttttggtggtattattgaattttaactttttgttttttttgtttgtgtaaaaa

SEQ ID NO: 153987 - DNA, 407 bp, Arabidopsis thaliana landsberg
aggaaaatatacaacttctaatgcataaaaagttagtttgcttttctttgttttcttttgattccggtattttgccggtttaaatttccgacttgttcggaatttcttccggttttattgccggttttttgataagaccttttgcaagttgcaaatcaccacttccaatcttggaagatgtttaattccgggagagttttagatggatctttgttcattggatgcttgatttttcttccatgtgaaggtaaattcctcgctttgctaataagagcgtaagggcgtcggttcttcatgggtgatagatcaagatgtttgcggttgattggagaggagtatgaagagttggggttcacgtcgtgttttgatggtcctccaaggattattccaatcctcatcagctgaag

SEQ ID NO: 153988 - DNA, 467 bp, Arabidopsis thaliana landsberg
tcttcatttctgctttccagacagatatacacaccagtagctaaaacgaaaagacagaatcttttatttaattcattttttatttgaaagtacataattaaaaaaaataattaattaatcgtgatgagggcgttgaattcgcggctagttctgatcgacatcaacagctcctggcaagcttcgcgccggttaatctcagccaccgcaaccgctttttcatctgattcctcttcctcattccgtcggacacgtggtgcgcgtcagagaatcgcttcatcgaaatccccggcgtcgtcaccgtcttctgttcggagaccatctgatggattcagtttcgaagttcggtcaccgtcatctgattcatcgatctcatcacggaagtcaccgacgacggctccgcctacggtggagctcgacgctttcctagagattcttccttcggcgacgaggaaggagcttgttagcac

SEQ ID NO: 153989 - DNA, 783 bp, Arabidopsis thaliana landsberg
  unsure (1)..(783): unsure at all n locations
aaatatagttcgaaactgatacataactcgagaatgcagaataagaaattagaaaccaaatttgttttgaacaaggagagcaaacgatatatatccatattcagatctaaatctcaaccatgtatgaatgaaaagagatccgattgaagttagactgatgatgattgatcacatttaagaagaaaagagtacctaatttccatagttattcttattcccgaaatccagatctgaaatctggaaaactccctaggtcgaaggaggagcggcggatccattgctgttgaggagagaagacgacgacatcatcttctgaaactcctcgaaattaacatttccatcgccatcagtatcaacatgaccaatcattctcacacaatcttcaacagagcaagtcataccaagacgattcagaactttatggatctcagaggacgaaatcagtccgtttttattctgatcgtagagatcgaaagcgtcacggatctctacagcggaggaagacgagcgacagagagttgagaattcgtcgaggttgatgtaaccgtcgcgatctgtatcgacttcttcgagcacgcggttgagttccgtctctgtgtaggaagtccccatagccttaaacacaccgccgagttcgaggactgagatcttgccgtcgccgttggnnnnnnnnnnnnnnnnnnnnnnnnnnagctcctctggattagccatgtccaccgttgcaggcgtgggtttggcggtttctggattcgcgcttgccattttttttttgttaaaggtaaa

SEQ ID NO: 153990 - DNA, 105 bp, Arabidopsis thaliana landsberg
ggtaggagggaggttgcagataaattgcagaaagaaagagaaaggaagagatcagagtcattatccttacaaagtcattgaaatcactcctcctcctaaatctct

SEQ ID NO: 153991 - DNA, 243 bp, Arabidopsis thaliana landsberg
  unsure (1)..(243): unsure at all n locations
catagtcgtccgccgnaaagatatgttctgaatgggagtcgaaaagcgacgctttatcctgggctaagtacgccgagaatcagctccgatggggatttattcgtaaggtctatgggattctctcagctcagcttcttcttacgacgcttatctccgccgtcgttgttcttaatcctcctgttaacgatctcttgaccggatctcctgggattcttctcttcctctgcatcgttcccttcatct

SEQ ID NO: 153992 - DNA, 118 bp, Arabidopsis thaliana landsberg
tgcgggttttacaaaaccatgtcgacagcattagcagccactcgttgtggcggtaaagtctgtcttgctgaatgggtcacggtataatgactgtccctgtcactcctgcagctgcaag

SEQ ID NO: 153993 - DNA, 172 bp, Arabidopsis thaliana landsberg
ctgaaaaaaaacaatggcgatgatgcttctgcaaatccctccttcgtcttccttgttgaacaccagaaaccttcaaatccgattcttccactcttcaatttaagcttcctcgaagaaattcagatgcagagccgtccgtgagaaggcggaggagattgataagaacacttcg

SEQ ID NO: 153994 - DNA, 288 bp, Arabidopsis thaliana landsberg
gttagcgaaagatgatatcgaagggattcagcatttgtacggtggtaatccgaatggagacggtggtggttcgaaacctagccgtgagagtcaatctaccggtggtgatagcgttcgtcggtggagagggtggataattagcttatcatccattgccacgtgtatattcttgatttctgtttagtgtaggttttattatacttttattccctcgtattttggggtcaatttatcgttttgtttttgtttttcttctaaaagtaacgattctatgtgatcgatcgctgt

SEQ ID NO: 153995 - DNA, 473 bp, Arabidopsis thaliana landsberg
agacagtgaagccatggaggaagaagcggcagcagcaaaggagataacagaggaagagactgtcattactggcgggggcgattcctccacaggacagaaccagagtccggtatcagcatcttcaatggatttgatagagaaccagcggttttacccgccgggtaagataatgcacatagtgtcagtaactgagacagagtctgaaacagagcgtgacgaagtggtggtagtgggaacgacgacggtggagcgtgtaaggatatatgagacgccaagagaactgtacagaaagattaggctatcgagaacaatgataaacgatcattatatgccaatgtataaaaagatgatggaactcttaattactgagctcgagtgtgattcacactcgtcatgagctccctcagcttcatcataaacatcaactgtacaatataaatatttattatacacagagtttacttggtttttct

SEQ ID NO: 153996 - DNA, 462 bp, Arabidopsis thaliana landsberg
tgtaagttttttttccccgagctttctgatgttaagaatgatacagtccagaactcagtgtccagcactcctagatcagctaccgctgaccatacactccctcgttcctcccgccattccaaacaccgtaaaagcttctctttcttcggataatcttcattcaaaaacatttatcttcctctcttctcttaaagcccaacacagagaaagttctttcctgagacatttatcttccgtcgaagaagtttctctcttttcccgggaaaaccaacaacagaaacatgttgctttgtatgaacaggaaaaggggccaagaatagaagctggccatttgaagaagaagatgatctcctgcttcggtttcgagtatttgcggcggtttttctcccaaggtacataccatcaaagttgatagaatttcggaaaagactggccttatcgtggtggttttttggggtattt

SEQ ID NO: 153997 - DNA, 250 bp, Arabidopsis thaliana landsberg
aaaattgaaaccaaaactaaggttagtgatcacttattccttttgatcctttgagaattttcgttagtatgtggtgagattcatgtaaattaggttttttcttgttgttgttgctgtgttgtaggataatgtgtttgtgcagctggtttgtttgattcaatatcgtgtagtgaaatctagagttgatgatgcgttttatgagcttcaaatccctaaagagcagatccaagcttatagtgattctactttt

SEQ ID NO: 153998 - DNA, 148 bp, Arabidopsis thaliana landsberg
tctctctgccccattcaatacatgaagaagaacacagctgatgaagctacttccactaccctttgattccaattcgaattttcccccattgtaatcatccgatgcagcagaaaaatacctacaaatttcgattctttttgtaatccat

SEQ ID NO: 153999 - DNA, 1070 bp, Arabidopsis thaliana landsberg
aaaatgagttttttaatttcgctctcttcttagatcccgtttgttctctttctcactttggctgtttaagcaaaaaccatggcttctcgctgtgagctacttctgatctgcgtcttctctctcttaattgcttttgctcactccaagacattgaagcgagatggtaagtttttactttaatcaccctctggttttgtgtttatgatcgatcctccattgattgaatttgtatagctctttaacagatttggtagatacccattatccagattcgttctatctcttatcaatttccatgatttagcacgcaagttcgatcctttttctttcatctatttctaatctgagctgagctgagctcaaattgagaaatattaattatgtgtgaacaatgattggatctgatactattggtctcaagaagtttgttatatctctgcatcatggtagttggttactactgtatcttttataatcagctttcctcaaagttaatctcttgtggacagtgaaagctttgaatgaaatcaaagcctctttgggatggagagtggtgtattcatgggttggtgacgatccttgtggagatggagaccttccaccttggtctggtgtcacgtgttctacacaaggagactatagagttgtcacagaattgtaagttctggtttcttctcactttagtgttttcttttgtagcaacctgatttgcttcactgaatttgatttgcagagaagtttatgcggtttcgattgttggacctttccccattgcagtaacaaaccttctggatttgactagactgtaagttactttctaaacctttttatttgtgacattaggtagattgatgcaagaactctttgaacagatatttccaacctagtttgtgaaacgagatccccaataattctttagagttatgctgttttgagatggttaaattgaaactggtattggtttctttgatatttcagggatctacataacaacaagttgactggtccaatccctccacaaattggacgactgaaacggctgaaagtactgtatgttccttgtgctctca

SEQ ID NO: 154000 - DNA, 384 bp, Arabidopsis thaliana landsberg
caatattctacctactcgtaataagaattgggttattgatcaaatttttgtcgaccgaattgattaaaaataaataaataaataaatatatatatataaaccggagatcaaattaatagttcggatatacttccatggatgcaaaaataaagtatcaaacttcatttatcatgtagaacatatattaaaggatatgtaagatacaatcatttataatttgtttcggtttcacacttaatatagttgagccgcgttaatcattgttctcacttctcactgtttttttgtttcccccaaagaaaacttctcactgatttacacgtacgctatgtataaatccacgaatttgttttttttttatttaactataccaattattgacac

SEQ ID NO: 154001 - DNA, 488 bp, Arabidopsis thaliana landsberg
tgatatgttaggattaaaacctttgagtaattttggtcaagagcaatagcaaggctgcagtctgcaatagcgtcagaaaattgaccaagagccttatatgcagctgcacgattacagaaacacacagctgtaaaaggacgtgattccacattgcaagccagggctgctgtgtaatgttcaactgcttcagtgtgtcgtccagactgaaaggcttcattccctgccgcctgtgatttggtaggaacataataaacggcacgaaaaatgagtagacagcacaactaatgtgtactctttttttcgtactattttataatcactttagtagtacatgtaattcacaggcagttggattctgaaaaggaggtgtaggttcagagcaatagacatcgaagaagaagcccataccctaaggcgcaacaactcgcgtatagaagcagacaacggaatggagaaattcaagagttttgtttccttctgtgtttgcg

SEQ ID NO: 154002 - DNA, 331 bp, Arabidopsis thaliana landsberg; identical to SEQ ID NO: 56662
  unsure (1)..(331): unsure at all n locations

SEQ ID NO: 154003 - DNA, 439 bp, Arabidopsis thaliana landsberg
gtcaccagctgcaaacatgaatatcaccttcagtgcatcattgaatggtacttggaaacatgaatctgtgatcttttttatctttctttggacttgaatcttctcttcatatctctatcactgattgatttgtcattggggtttattattacacaggtcacagagaagcaaagagtgtcctatttgctggcaattgtttgttttgagagaccctgctaggtactctcatccatctttaaggagaaagaaagattttgttctcatgatactttgctcatagttaggtcttgatagtattattggttcctttgttttgtagccaagagcttttagctgctgtggaaaaggaaagacttttgaaaaccaggaatatatcttcatcctctccaatctctattcatcactctcatgacgattttcactctgaggaggttcgaca

SEQ ID NO: 154004 - DNA, 134 bp, Arabidopsis thaliana landsberg
aactccctgaatcaaaatcacagccacacaaggagcttaacgcaagtgttgtttgagctcaaccttgagatacgtttaaggaactttctccaaacgttttttggaacaatgaagctgactctttaggacagggc

SEQ ID NO: 154005 - DNA, 654 bp, Arabidopsis thaliana landsberg
gctttccttgcttgctcttcacattcttcaaggaaattttgcgtttctgcattacccgcaacatcagctggactcttcccagccttagtcgtagctctgacgcttactcctttcttaaccaagtacttgacgatttcaaagtgagaaccttgagcagcgtagtgaagaggagtgagtcccttgcgagtgatagacttcacagaaccaccggcagataataaagttctcacaacttccaaatgccccttttgagaagcaaagtgaatcgcacccatgtcatctcctgctgcagcaccaacatcagctttgttcttgcataagtagctcactacctcgttgtgccctgcccatgctgctaaatgtagtctatttccccaagagatcatgatgttaaggacaaaaaattgaacaacaaaagactgcaatgaacacgtaaagtacatcacatctatcattgctctagctgtaatctacaaaccatcattctcctagcaaccaaatcaagtgtgacgaatcaaaatgtaaaacctagaaataatgtttagcattgaataaagttgtataagctgatactaacgttttaagaaccctaattaaggccgtagcaaattacattcagcaaacatcggaaaatttgcagtcaaacagagaaaa

SEQ ID NO: 154006 - DNA, 192 bp, Arabidopsis thaliana landsberg
caaaatcaattttggagaaccaagctaaaaagatttgcatctatttagaagtcataattaagatttcttctctttactaatgataattcaagatacaagcaatacatcaataggccttctaatacagctctgaagttaaacctaatctcaccaggtctcccagattgcaagtcacccaacttcaccatgcct

SEQ ID NO: 154007 - DNA, 249 bp, Arabidopsis thaliana landsberg
ctcaattggaaggtgtctttctttactgcagtttttggatgtatcatattgtagaaagctctcagataaaggattatcagctgttgcagaaggctgccatgatctaagggcattgcatttagcggggttgtggtttaatcaccgatgaatcgttgaaatcgctctctgagagatgccccgacgtcgaagctctggggctacaaggcagaaaagatatcactgattcaggtcttgctgatcttgtgcagg

SEQ ID NO: 154008 - DNA, 259 bp, Arabidopsis thaliana landsberg
ggttagttatcgggtactataatactgtttattccctgcaaggtcaaaattaataatgtcccttaatacttgtagtcgctaggcatcaggcatgtatctctgtaccaatctgtatctgtaagagcttcaaactatctgaaaactcaagacgaatattgttgagtcgagctgcatgttacagattacaacatatctaatctagctctctctagcatagatttaaatagtaaagtcaagtcctactaattatctaaatatg

SEQ ID NO: 154009 - DNA, 236 bp, Arabidopsis thaliana landsberg
caaacacattagattcctccttttccatctcctgactcacacactttagaaagtttacttttcaagcattttattcttttcatactagtaacatagtataactacgtataaaacacaatattgcatgatagcaatattcttcattcagtcgtcgccaccaccatatcctccaccatatccaccgccttcaccttatccttctccgttaccggatccacctcctccacctctacccc

SEQ ID NO: 154010 - DNA, 255 bp, Arabidopsis thaliana landsberg
gattatttggtcgctggtttcttggttttgacggccggaatacttctccgtccatggctctggttacgtctacgaaactcgaaaacgaaagatggagatgaagaagaagataatgaggagaagaagaagggaatgattccaaacggaagcttaggctggccggtgatcggagaaaccctaaacttcatcgcttgtggttattcttctcggcctgttaccttcatggacaaacgaaagtctttgtaagtcattttc

SEQ ID NO: 154011 - DNA, 254 bp, Arabidopsis thaliana landsberg
tcaaaagcatctagttcaaatctctcaggtaaagcaatggaaaaacactcgatagatgcaggcaatgatacacctgtcttttctctgttcctctccttagccacaaactcctttacaccgatcaacgctttattgcagtcatcgaacaaaaagtcgaccttcttggaatatatccttacaacaccaagaagaagatacgccaaaactctgtatgtcaacgcatctaactctttttgcaagatctgatctgtgca

SEQ ID NO: 154012 - DNA, 341 bp, Arabidopsis thaliana landsberg
cgagacttgtatttatcagcttctccgtgctcctttagcttctgctcggttatgtttttttagtctgacgatgagtaacaactgatatcccgttcgattaaggcttcaaaatcgtactctcgtgtttcttctggtgattttgagcttcggttcttgctattcgttgaaatctcaaggtatttaccgtttttgtttctattttttggtgtgccgatacatagaaggatagttcctcataattgttagtttcgattttggctttcaggtgatggttttctggaatccgtgacgaaagatctatggtcagatatagatgctgaggatttgtaagtatcagcttt

SEQ ID NO: 154013 - DNA, 307 bp, Arabidopsis thaliana landsberg
ctttcatatacatcatttacatttcatcttgtgaaaaacattcactttttgaccaagtaaaaaatacattcaaatgagttctttgatttctctataaaaaaaagaaaaaacagagcttgttcaaagaccggaaacatgaatcttgacgagtttctacaaaactatcagcaatgtcgatattctgaattggtatagtcgactagctggcgtggtaccggactgagaagaaggtttgagaatacccatcaatgtttaagcttctgccaaaagcacttcaagatacattgtcgggctgtctgaaattaca

SEQ ID NO: 154014 - DNA, 113 bp, Arabidopsis thaliana landsberg
actgataagagagatgggaatggaaccccaagagtgataaattggtgcggatgcgttattcaggatcctcatcctgcggttcgtgctcttggatttcttcctgaggaaggtca

SEQ ID NO: 154015 - DNA, 222 bp, Arabidopsis thaliana landsberg
tctaagggacaccattttgtaactgagaaacgccgccggtttgccattgtggaacatcaccgttttgcaactgaagaacgccgacgttttgccattgtggaacatcgctgttttgcaactgagaaacgctgccgttttgccaccaatgaggaacgccgccgttttgcaactgaggaacgtcatcgttttgccactgaggaacggcgccgtgttcccaatagt

SEQ ID NO: 154016 - DNA, 373 bp, Arabidopsis thaliana landsberg
attctttctctttaatgaagacatcattcccaggaaaccaaattatgagctcttggattttgactccggtaagtctcctcataggcgggtcctcaacaaacccagttatctcggtgtcatataaaactctgcgacctatctcacggaatgtatgctcaatcttgcttctcatcctcatccacacaaacccttttgttttgttgtacccaacttccgtcatatccttcaatggcaacaatcccgtgggtagtttgatgagagcaagaagctccttaactttatcaagacaaagagattgatcactgtagctctctatgtcatcactctcatctattatcatctctcataacgccataataaatcactttgtttt

SEQ ID NO: 154017 - DNA, 94 bp, Arabidopsis thaliana landsberg
caatgatatttttcagaacaatttcagtcctaaaatctcagaaatcagagcatctctgtctcagatcatattagcaggaggaccaacacactcg

SEQ ID NO: 154018 - DNA, 101 bp, Arabidopsis thaliana landsberg
cccttaggaagagaagaaacgttgcagaagcttgaagttttggcaatggacggaaataacagaagattgatgtgtgaatgtggcgtacataagtctttgat

SEQ ID NO: 154019 - DNA, 456 bp, Arabidopsis thaliana landsberg
cacccaaaaaaaaatggacccgttggtatcttgaaacctgtgaaatccccacgtggagagaaaacgaaagagtgtcttgtggtccccaccgtcctttataactttcttttcaaaatagaaaatacaggtttcatataagcccattaacttatattcacagcccaagagagcccacgttatcagcacagcctgtcgttattagttggtaagacgacactcattttagactgtttgggcttcaaagtaccccgcctttttcattgtttcagacggtgtctaatgttggtgaaaaggaagaacacgaaagataatgttgcgtctgaaccactcgatgcaaagctattatctgaacgtctaatgagcctgaatccaaaggatcgcatcaactagctccttccccgataacatagcttatcatatctgcaatttgtggagtcctcaccacttttttgtaat

SEQ ID NO: 154020 - DNA, 150 bp, Arabidopsis thaliana landsberg
ttgtttaatactaaattttgataattttaaagtttagagttgttgaagagtccttacagtttttattgtctaattctctttaagtgagttttttaaaaataaaataaatttatttttaaaataatttattttataaaacttaataattat

SEQ ID NO: 154021 - DNA, 458 bp, Arabidopsis thaliana landsberg
ggacatactggaactaaaacagataccaagattaggctcttaaggtacaaaatactgtttgattgtgagacagaggagttcttagaggttctaatgattataaaaaccttgaggttgcgtactcttatgggaatgcgtggtttacaacatagacgaccactgaggattgaagatctcgaactaccttgaaatgcgcgtggaaaaacctccttacctgttgcattgccaacaaaacaaagaatttctcccatgaatgcataaaacaaatgaagtcagagatgaatgaaaaaaaaaaaaaacaagggagtgtgttcttgtttctaacttgcctctttaaaggaatgtcggatcatgaaatctctgagttttggttcttctgatgcaaacaatacaatatgactaggcggatctgaccagtttctagctaactctgatgcaaaacctaaagggtttactaa

SEQ ID NO: 154022 - DNA, 176 bp, Arabidopsis thaliana landsberg
taaaacaaataaaccagaccatgtattgcctattgccagggtagactggccggtcaggatttcgaaaactggtatagtaaacaattctggacgagaggcgaacattaacaaagaactaaaaagacttgtccttgacactcgattagaaaagaaaaaaacagtctatgcgacacgtc

SEQ ID NO: 154023 - DNA, 309 bp, Arabidopsis thaliana landsberg
tgaaatggggtcaaataaataaatgaatgaattggtgagagagaaatcacagaggttttgcaagaaagaaacaaccccacaagaagtaaaaatttacacttttgtaatcttctttccttttggttcaagaaggcacccctcccccactcagactaaaaagaaacagaggaagagcttttttagaatccgagcttctcactagtgcaagaatacgaattctgggttttccagtagctctttggccggtttgacactcgcaaagtctttttcgtgcatcgaattcgaaatctcgtctattgagaagggaat

SEQ ID NO: 154024 - DNA, 313 bp, Arabidopsis thaliana landsberg
gtctttgactttgaattgtttttttttaggtcttggaattgagagaagagaccaattttggatctttgaatgaagctggatttggatttagttcaggtgtaaatttgttggaagatggggtcagatcaatgtttttcgagattgaatacacttgagattaaagccctaatttatcagaaaattgggcatcagagagctgacacttacttcgaccagctcggaaaattccttacctcgaggataagcaagtccgagttcgataagctatgtagcaagacggttggtagagagaacatttctctacacaaccgtc

SEQ ID NO: 154025 - DNA, 163 bp, Arabidopsis thaliana landsberg
  unsure (1)..(163): unsure at all n locations
cagataaaatacatctgcatccgagtggtagctgtaaagagaagagaatgnagaagtaaagagcacgtgtatttatacaaaactatgcgtttagcatgtttttcctctctttttttttttctaactttttgtagcacaatttgtttttagctactaaaaaaaa

SEQ ID NO: 154026 - DNA, 334 bp, Arabidopsis thaliana landsberg
agaacaacaaaaaaaatctcaaccgtagaaaattccgacaagagttcagttcatacaatgaactaagtatgggtttctttggaagactgttcggaagtaagaagcaagaaaaggcaacaccgaacagacgaagatggagcttcgctactagatcctcacatcccgagaatgattcgtcttctcattcaagcaagagacgtggggatgaagatgtcttaaacgccgacaagcatgcgatagccgtcgcggctgctacagctgcagtggctgaagccgcactcgctgctgctcgtgcggcggcggaagtcgtgagactcaccaatggtggtagaaa

SEQ ID NO: 154027 - DNA, 195 bp, Arabidopsis thaliana landsberg
caagatcgttttccggcctcaagctcgtctttcatctacaatcggctcgttcttactccatttatgcttgttgatgaaatcatcctttgtaatccgtccaattcgcctaagtcgcgggctcgtcattaatagaaagattcttcttccttccctagagatcccattttcgtacttgtgtgattcgtgcatcaacag

SEQ ID NO: 154028 - DNA, 670 bp, Arabidopsis thaliana landsberg
tagttttcagcaaatccttcacttcgatctatgatacttctatgtacggacgcttgcagctcaacaatggccttgctcgaactccacaaatggggtaggttcaaggaattagctctttggattttgattttcgtggcttgtttctccttacatgtaaaggaacaatttttatggggttttgtctctgttctgttgtaaagtttgaaactttgaatctgtcttacaagttaagagttttgaatcactctgattggacttgtgctttgttaatcgacagatggaatagctggaatttctttgcttgcaatatcaatgaaactgtcataaaggaaactggtaaaactttctttcttttgatagcttctaataacaaaaagctactcacatgtttcatctgattttattttgctatatgttcattagagttgctgatattttatttataatttaacagctgatgctttggtttcatctggcctggctgatttaggatacatacatgtcaatattggtatttgtccctttgacttgtctcttcatatattttctatctgagagtcttgaaaccttactgctttaacgtttcacaagtttcggtttcttgcagatgattgctggtccaatttgttacgcgattcagaggtaagatcgctcgtattacttcagcatt

SEQ ID NO: 154029 - DNA, 94 bp, Arabidopsis thaliana landsberg
tattcttaacaaaattttatttaattcaaaaagttgttgtttacagttcacctcataaatttacagtcttgggcattttacctaaaccagaatt

SEQ ID NO: 154030 - DNA, 99 bp, Arabidopsis thaliana landsberg
actgagtcgaagactaccgagaaacccaacattataaacaacataagaaaatgatgcaatccaatgatatgtgctctcaagattccacaagtgtcccgg

SEQ ID NO: 154031 - DNA, 188 bp, Arabidopsis thaliana landsberg
ctgtttatctttggtttatttcgaaacaaatgttaatttcttttgttgtctgatgtgtgttagggttttgttgtatgtattgagggtctttggaaatctttttgcattgtgcttgtaatgttgtatttgtgataatagcattttgtttgtgagtttataattgaatttttgaatgttatttttgccat

SEQ ID NO: 154032 - DNA, 413 bp, Arabidopsis thaliana landsberg
tcattaatgtcttcaaaggtctcaacatcttgaaaccacaagacacgtacaagacggcttacattgcagtgattgccgttcttggaggcattgctttgctcttagaagccatcacttgggtcgttgtactcaagagaaaatcaaacaactcaatgaagcctcttaggacctaagccaacaaagatctggtcaacttattaaaggttcatctgcagttgttgttattaatttattatgagctcttgtattattaatgtttatagaacaagggtgtcacatgtattattgttctcttgttttgtagctttttggttttgtttgttgagtatttcttgggttatgaattcttgtaggggatgaatttttttgaaatagttcttattttactttgaatcaatgagttttttcagttt

SEQ ID NO: 154033 - DNA, 447 bp, Arabidopsis thaliana landsberg; identical to SEQ ID NO: 5436

SEQ ID NO: 154034 - DNA, 226 bp, Arabidopsis thaliana landsberg
tggtcatcagacacaaaagcttctcaaaccctaactattctcgctttttcgctctctcgaacattcttcgatctctgtcttttctcgatcacttgctaaaatcaaaattttaggcgggaattcgatacccaagcccaagacccaaacacttcccccctcacgtttcgctgctttcgttagctagctttctcaaacgagatctgggcttgtcgaaagaaacgtgtat

SEQ ID NO: 154035 - DNA, 192 bp, Arabidopsis thaliana landsberg
ctgttgatgcacgaatcacacaagtacgaaaatgggatctctagggaaggaagaatctttctattaaagacgagcctgcgacttaggcgaattggacggattacaaaggatgatttcttcaacgagcatagatggagtaagaacgagctgattgtagatgaaaggcgagcttgaggccggaagacgaacttg

SEQ ID NO: 154036 - DNA, 471 bp, Arabidopsis thaliana landsberg
ggtaatacagggaatggagagtttgacgttgaagttgatgtcgatgttgatgttgatgttgatgttgatgttgatgttgatgttgatgttgatgttgatgttgatgttgatgtcgatgtcgatgttgaatatgaaggtgatgtgtatgttgaagaggctaatgacgagggagaagacgttgatggtaacgacgaggaagaagatgttgatggtaacgggcttgaaattgtggtttgtgtcgataatttaagtgttgcttatagtgagagtgattttggaagcagcagtgatgctcgtagccaatgtaatgatttgtctgatgctgatctctatccaccgtctctggataacacacaaggaccaagaccggttcgtatgaaccaaggctcgaggggcggaaggaagaaaaacacgaaccagaatggtcaggctgctcgatcgaagaaaatagttggtaatgtcccacgtggt

SEQ ID NO: 154037 - DNA, 76 bp, Arabidopsis thaliana landsberg
gctatgtatttgtgaagtaagtgtgtatttctggttgaattatagtctgcgtaataaagaaaagtatgtgtagtaa

SEQ ID NO: 154038 - DNA, 527 bp, Arabidopsis thaliana landsberg
catatactagcactccctgcaccagatggaaccgttcagaaagtgaaccaagacccgttcgctgcttccctgaccattccgcctccttcctatgtgcaaatggctgagatggacaaaaagcaatatctattgactcaagagcagcaattatggcagcaatatcagcaagaaggaatgagaggtcaagctagtttggctaagatgaatacagcccaaaccgcaatgccttatggtatgccgccggttaacgggatgggaccgtcgccgatgggttattactacaacaacccttactgattttattcattttgtttgcttttttcttacatatattttccgaccaatgtagatgtgttataatgcggtttttcttgtatttgttcctgatcttgcgtcctattattgaacctgtgagacttttgcctcttttgagtattgaatatacatccggtgttttcttggtattccttgctacacaactaggtttgggttgggtttgggttgggagttaggtggaaagctttaag

SEQ ID NO: 154039 - DNA, 524 bp, Arabidopsis thaliana landsberg
aattaaataacccaatttcatgatatctagctcagaatatatgttttgagacaaaacactatagtagatctgcatctagggttaaagattcaagggtcttttgacatgtttttggtaaagaaattaaaaccttattacatgattttggccatggaatatttttgagacaaagaaactttagattaaaaagagagcaaaattacctcatgcttagcatcccatagtttcttgccagataacttctggtattggtccaacatagcaccaagatccatggaaggacaacagtaatcaatcatcttaccattacttgcaaagattatgagggcaacttttgcatcacaaagaactgtgatctctttagccttcttcaccaatccattcctcctctttgagaacgtcaccactctgttgtttgcgttctctatcctctttatctcgatctttcctctacccatctttctctctctatctctttctcaattttagggtttgctatgaaattgttaagatatggaggagag

SEQ ID NO: 154040 - DNA, 86 bp, Arabidopsis thaliana landsberg
agggtcatttttttttcttgaattttttcaccaagtgttcgttcacggcattgcttgtcactccagtatgagaatctacggcgctg

SEQ ID NO: 154041 - DNA, 149 bp, Arabidopsis thaliana landsberg
tctctctttatttctctctctaatgaagggaactctaagatttttatcaggaatcgctgggccaaatgggtttgggggaggatccacagctgaacaagttacacaacatagattttttccttgttcacatctcactgccataatcactg

SEQ ID NO: 154042 - DNA, 269 bp, Arabidopsis thaliana landsberg
ttgagctttgctcttctctcttattataatatcctctcaaaaaccctctcctatatcctcctaaagccccccttccttgtttctctaccgcaacaaagaaaaaacaaaagtttgagaaaaatggtgtgttcgttgtgtaaccaatgattgggttttagcttactacttcgagagattataagaaagagagagtgaagatacattatagaaagaagagaagcagaaaccaaaaaaagaaaccatgaagtctttttgtgataatgatgata

SEQ ID NO: 154043 - DNA, 579 bp, Arabidopsis thaliana landsberg
attttgcttctagatacttcttatatttgttcttaaaaagattgttctttttctagaagcaccataatcagttgaccaaaaataaagcagaaaaacaattcttatatcttcgatatgtatctatttttccctcatataaaccatatttatataaaaatggaaaaattcaaattcaaactcattatgtttcaaaaatattaatatatcatattaataacctatttgactttccataacagcgacccaaaaagaaaaaaaaaaagggggaaaatctcattcgaccggaaaacaataaaaaagagagcagcttcaatggattcatttataactccaaagattatctccttcatgattctccggcgaatcatcttccatcgtcggatgtatcatcattctcggtggactcatcaacatcccttcagccatctccgtcaacaaagtcggcatattcaacatcgcttcctcatccataaactccaacgaacacgagttacacgacacttcttctaattcttcctctttgccgggttgaaccggttccaataccttctcatccccaccctgatccggttgcttcat

SEQ ID NO: 154044 - DNA, 253 bp, Arabidopsis thaliana landsberg
caaaggaaacccgtcttatcatatgtactgataaaagcttcacaataatgtcgcggataagaatgaaatattcaaatatttcaaagagacagcagaaataaaactaaatccattgtcctaaaaccccaaacttcaaaccctgcaaattttgattgcaccttctagttacacaacaaaccactcatcactgctgtatccagcgtctttggctttagactcatcatcatcgactgcatcttttgagagttccatc

SEQ ID NO: 154045 - DNA, 472 bp, Arabidopsis thaliana landsberg
ggcaattcttgggaacatggtaaggagagggaagacgataccaccataaaacccgacctcgaagattacaaagagtttggatcttccttgagacaagaaatagtcaccaatgatcaagagacagccaaaggaaaaaacttggaagacataacctccaatattgtctgcacatggaaggaacccgtagacatggatgcaagctgctttggaaacgttctttggagggtcgagagtgagatacttgtaatccgaggcgccatggacaccatcagagatcaagctcgagttatctagagggacaggacttagtacacgagaactcacaccagagatgaacagagttaaagagagaaagaagaagaagagagttgatgggaaatgtgaatggttgggtctcctcttaaacgagaatgtatgcataagagctgctttattgtgaaaaccaacgatgactaaaaactagtggaagttt

SEQ ID NO: 154046 - DNA, 301 bp, Arabidopsis thaliana landsberg
gggaagaagacgatcttcgatccagacttgtgcttctcttccgtcatcgtcttcttcttcctcgatctcggttaattacgcatttctcttctctgatttgtgagatctctcgtcggatcaccggtttccacgtcatcgccgacaacatttaggagtaattggatccagcagaaatgtcgataaacatgaaaacgtttactcaagctctagctagaacggctgctgtgattgagaagacggtccataccacagtacaggaagttacgggaccaaaggctcttcaggattacgagctacttga

SEQ ID NO: 154047 - DNA, 564 bp, Arabidopsis thaliana landsberg; identical to SEQ ID NO: 73986

SEQ ID NO: 154048 - DNA, 385 bp, Arabidopsis thaliana landsberg
tcaaaattataatgtcaacaagagtctacaactactgtaacaattctcttctcttacattggaaactaattttaaatagcagaagcaaaaattcaaaacgtaaatatggccagaaattcgcactacattttaactgacaacggtttctattgagacgaaccagtagtaacagcagcgtcagcagattgctgagaggatcctgaaggtgctgcagacactgagtcaggtggtggagcagagactgaacttggaggaggtggattaggtcttgaaccaggacctggtgggtaatcatgagtagcttgttgtgaatggccatggtggtaaggaggatactgctggtaaggtggttgcatatatcctccatatgatggtggcgggtatg

SEQ ID NO: 154049 - DNA, 507 bp, Arabidopsis thaliana landsberg
gagaagaaagtattacgtaaataagctaaagtgagactacaacaaggtattagaggaacccatagttacatttgtccatgtttaactgtctcaaaggcgaaaatgcctatagaactacacgatgccttccaccatttacagtaagatgaagaacttttgaaatgttgccgattcgaatctctctacacaagtctagagacgagcttgatgaagctatggcgatcgaacggagatccttatgttcttcattatttgtagcaagggaaactgcgtgagctgctgtatgtactgtaccaactctgtgtttgtgagggttagaggtcaagtgaaaaaaagccaattgatgcggaacaagatgggcttcttctgctaccggttaactaaccaaccgggttttatcagaacatctcgtttgacgtcgcggcctgttactgactttgatacacccagacgtcggtaacactgagaagaaggaagaggaacaacaaaggagaccctcggagaaaa

SEQ ID NO: 154050 - DNA, 314 bp, Arabidopsis thaliana landsberg
cctaaatactatctcctcattttgtacattcgaaattagtgattgaagtcgccaatttagggtatcaattagcgtattctaagtctactctacacttttgcttgctttgtcatcatacaaacgtatgacatttccatagcttagatttggacaactgattttctataatcaaattagaagaaaattgtattagcaaactaaaagaaagtcacaattattatacgaataagagatctaaataatacgatcaaacaaaaaccttaggattttataagaaaaagtgtgaatgcgtcagtaatctgaatattgtccac

SEQ ID NO: 154051 - DNA, 449 bp, Arabidopsis thaliana landsberg
ttcgattctttaagaatctccttctagcttatcttgtattaattttgagttttgtagggtttaggttgtttgattaagttagcaagttagggattagttacgtgacgagatttctctccaaggaatctattactaaaaagatggagcaatctgaaattgtgattgcataatccactagtaaacgtcacaaagcaattgggcatgcctatggacgttgatggagctctagggcttctccgttttgggtatcttgctattggctctcatattccattgccttgcggagcggcgtcgctgcttttaccgtttgggaccggccatgagatctatattcccctgtattttggttttcagttttatctagttaggattgtatttagccaatgaggacatcagattataaaagaacaccatctttcgggactgattaacattgatgatacttctgc

SEQ ID NO: 154052 - DNA, 574 bp, Arabidopsis thaliana landsberg
tgaggaaggaagagaattaggaaatggcgcatagaatactgagagatcacgaggctgatggatgggaacgttctgatttcccaatcatctgtgagtcttgtctcggtgacaatccttacgtgagaatggtatattcttcgcttcctatgtttctcctcaaacaaattcgatttcttttgcctttagctagatttgtttttaacattcatgtatctttattaagatctcctttcatttgtccatttccgagcttgtttaatgcttttatgtttcttagtgttgaagctgaaattttagtgatttgggattttagggtttaagcgatttaatatacaattcataacctttggtaaatctcagaattcatggagttatagttcaaaatgatatctttggtttgttctgattaaatttgcttagagggaatgtaattcattgattactgtctcatgttatgtctggtagtgatgtgcagcttcatgtttgattgattgatttattgttgttgtttggtatgtagacaaaggcgaataagataagagtgtaagatctgcaccagacctttcaccgtttt

SEQ ID NO: 154053 - DNA, 276 bp, Arabidopsis thaliana landsberg
aaagaaacaaataatatgtctaacgataattagtgacgtaaggaaatatcttacctacatacaaataaaagcagtgcgcaagtgggtgatgttgttttgcggctgaacttgaaatgttaggtgtatgattactttttttttttttcactaagtgttgtctttcttgtattaagaacatacataaaaaagtacactagttgaccttccacttacaggatgaagacaaacactataacaagaaaaaacatgatctaacaaaacacaatgttgatcatg

SEQ ID NO: 154054 - DNA, 403 bp, Arabidopsis thaliana landsberg
attatcatttgaaaaattgaaaacaacaaaatgttgcaaattcgagaaatatacaaaaggaattattgtagaatttgaaatggaggttagattctcttctcttcttataacctcactctttcttggataacaagttcaaaaaatgtgttttaaattttaacactttacagccctagggcttgggattcccatgtatgccaagcgtggagacaccctcactttaggactaggccttggagatggaattggtccgtaagaattagctggtgaaaccctaggagacagactgacttgctccagtgcttgtgcttgtagctccattggataatctctaacacacccaattcttggaccatatccacttgtccatttacaagacagtctctttacaggatcaaacact

SEQ ID NO: 154055 - DNA, 1081 bp, Arabidopsis thaliana landsberg
cgccggagtgggagactgatctagatccgccggcgaaaaagcagagccgtcacattcatcgtcggaaatcaagaaaggtattaactgttccttataatcgatctctcactcactatcttcttcttcttccctttccgctattttgatgaatcacttagaaatagtatcgaacatttttgttttctttctcattttggcgatgttcatagtccagaagtcaccatgttcttgtaaatgaggttatctggagtttttatttccgtttatattgttcttgaaatagtgcacggaaagtgttcgacgtatttactgtgttagctcatcgctcgtttctacgtctctgagatacaaagtaatgaaaaaaatggcaatttttcgtagcatggttggtcaattttcatatttacttgtgtgatttgagtggctagagagacaaaatctactgccttcagattttgattgagcatcgttttatgataatggtgaactctattggtttccaagttcttaatttgaagaagctgagaaattttcctctttggcagggtaattctctgtaggatagagagacatggaagccaagtttttccggttcttgaagattgttggagttggatacaaagctagagctgaggaagcagggcgtttcttatacctcaaattgggttacagtcacgaagtcgaacttgcggttcctccagcggttcgagtcttttgtttcaagaacaatgtggtttgctgcactggaatcgacaagcaaagagtgcatcagtttgctgcaacggtaaggagttgcaaaccccctgaaccttataagggcaaaggcataatgtacactgatgaagtcgtcaagaagaaacaaggaaagaagtccaaatgatctctctttgtattctttttcttccttcttactctgcagagacaactttcatctatttgtggtagattatggttggatttttatcaataagttttatttggttgtatgagacatcattttgttgttaagtctctttcaatgaaacaaaatgagaagagttcgtcttggaaatatttatgttttgtctaatcatcgttacaa

SEQ ID NO: 154056 - DNA, 1400 bp, Arabidopsis thaliana landsberg
caccggagtagtagtagacggtgtaggaactggaaggtggccgagacaagaaaccctaactctgttgaaaattagatctcgtcttgatcataaattcaaagaagctaatcaaaaaggacctctttgggatgaagtttctaggtttgcttcacttctcctctctcgattttaccctaatttctctctctcatcatttttcttgtttttttaaaagcaattatataaaaaaagacactatatgcatatttctcaaatcaattcataccacaagagtttgattcattcatatataatgtctctagctagttttccttctcttttttcaagataatgtctcctagtttaaacgttgatcaataatttgaaaaaaattaatgatatttgtaactaaaacactaagtcgtagcttccatcttcttaacaatttttttttcaaacgtttgagtatttttttgttgttgttttggattttctttcagatttgaaaagatttgacctttcatacgctttcttgttaaaattagacctttcaagtgaaaatcccgaagacaattttaatctttttttattcttgtattaataacaagaaagaatgtgacctcaacactcttcttgggttcctcaatttaaacttactttttcagctgatctatacagacgtatatatataaatgtgttaacattctcacgtatatacgcagacacacatattgatgtataaactatagagtggtcagtttcaaacaatttctttaggagttgttttgttttggtcaagagaatgaccagaccttggcagtttcagttaagacactatcaggtgctttaaaaacccaaaagggtaaaacataaacaagagtaaaacaaaaagatttattatcttctttgactttgatttttagttttctacttttctttttactgataacttctgattcatctttcttagcttctgaagatatgtaccctcttcttttgtgtaactgagcattgaaacatgttcttgtgataaactattagtccactagtaactaagtctcaaaaacagtcttggtccgaaagttaacaactgtatgttataagaagacaaactttatgtgtgtcactatcgaatctaatatttgcatgaaaatgaatatgaatatcttatcaattgttaatgattcaagctagtttcaagattagggcactgctccgaattcaatcaaacatgagctgatttagctactttctattcttatttcttttattattatattcttaaataggaattatgtccgaggaacatggataccaaaggagtgggaaagaaatgcagagaggagtttgagaatctgtacaaatactataggaagactaaagaaagcaaagccggaagacaagacggaaaacattacaga

SEQ ID NO: 154057 - DNA, 233 bp, Arabidopsis thaliana landsberg
ttctcgtcagcggaggttccagccaaatcctccgaggccttctcgccgtctgccgatcgctccaacctcagacacgtaatgcgttcttcctcgatcatttcttgtttaggcttgtagaaatcttgaactgcttatacatgtaaaagctttacattttctctaaacccagcgaagctgaggaggatgaagagaatataacagcatctcgcccatttgacagacgtatcgtcggc

SEQ ID NO: 154058 - DNA, 199 bp, Arabidopsis thaliana landsberg; identical to SEQ ID NO: 49522

SEQ ID NO: 154059 - DNA, 414 bp, Arabidopsis thaliana landsberg
ttcattacgttagagattaattaggattacgataactatgaatattccacatgagtcttttatgttttaggattcataacacaatactaaaaaagatttgcattttgatgagatgaacttaaaggattctcggagatcgttatgcgtatcggcttggagaatcgaagtaatggtgctcgaatgatataagatttatcgatcaaagagaagtcatacgttgtgactagatgatgaagaaatatagccatctgaagcctagcaaactctgctcctgcacatagtcttgcaccaccaccaaacgccatgaacgttttagagccagaaagcaattctttcccctcccatctccatggattaaactcacatggttgttcatagatttgagggtcataatgaataacagatggaacaacc

SEQ ID NO: 154060 - DNA, 484 bp, Arabidopsis thaliana landsberg
aaattttttgactcaaatgagttgatgagtcaaatgagttgatgagtcaattggtttgattagtaaaatgagttggattgtaatggttaatggtttcaatggtttacccaattaacccatcaaattttgtaaaattgaattaaaccaactaaaatctctaaaccaatgccaatttaagtttaaccaacacatctaaaccaatttaataaaattaatatttttccaaatttcttaaatatacaagcgatgaaattgagaaaaagtaacccgtaattttcttgtcaaaaacgtaaacttgcaattttccgttaaaacataaacccgtgattttcccgccaaaaaaacgtaaactcgtaattttctcgccaaaaatgtaaacccgagattttcccgccaaaaaacgtaaacccgtaattttcccgcaaaaaagtaaacccgtgattttcccgccaaaaacgtaaacccctaattttctcgcaaaaaa

SEQ ID NO: 154061 - DNA, 512 bp, Arabidopsis thaliana landsberg
  unsure (1)..(512): unsure at all n locations
ctaaaatgacaagtttgtttcattactgaaaattatccccacaggttacaatgaaacacacaaaatatccaaaaagaaagttaaaacacagctctaaaggctatagctgaacctgaatatctgttttatacaaagctttcctaaataacccgcatgcctctgatccagatggaggggtttcatcatagcggagatgnnnnnnnnnnnnnnnnnnnnnnntgtattattggttatttacaggaatgtttcatttctctagcaaatcaggattgaatattcagtgtatggatctttacctctatgcttgaagaagaccggttatttcgatgtctagaccagaatcccttcttcaatgcagagtctttggacgagggtttattccacttggagctgatagaagcaaagtgccatttcaagaatgacttattagacgagctcttggtactgcaactaggatccatcttcagaccttttccttctcgtttccctagattctggaacataagatcctc

SEQ ID NO: 154062 - DNA, 433 bp, Arabidopsis thaliana landsberg
tggagtttaaagattccaaagttataagctaattatactacctgtattattcttttcttactcaagactcagaactaccttcttattattactgcatatttcaacaataatagcaataataatgtttcaaaatctcatacgttttgtttatcgcctttgtcccatagcaaccacagggagagtcactttatgccctcggcttcctttcaatgtaacctgtccgaagctataagctccagtcactgatctcactgttagaatcaccgaaaaggttctagaagcgcccgctcttactgtcattgcaggaggactcacttcgatggctattgctggctccatcctcgatgtgattgtgtatgtttcttcctcttctgcaacattcgtcactcttctggttacggtttgtgttctgacaagatgagagatggctatg

SEQ ID NO: 154063 - DNA, 183 bp, Arabidopsis thaliana landsberg
taggtttgtcatggataagatcttggattacattcaggtgaccttgcaaaggagatgatgaggatagaggacttgataatgtgttacacaatgaagaagatatggatatgggcaaaattgaggatgtttctgttgaggttaatactgatgacagtgtaggcatgggtgttccaactggggagt

SEQ ID NO: 154064 - DNA, 182 bp, Arabidopsis thaliana landsberg
acaaatcaatgttagtcgtccgagagtcatagatcgtaggatcccgagtgcattgcggaagattcgacggtggagatggcaagctcgtttccggagttggcccgttttgaactatgaaagcactcataatcccgtatggtaaatgtgcatccatgtgacaatggaacagccatacacctgca

SEQ ID NO: 154065 - DNA, 1016 bp, Arabidopsis thaliana landsberg
ccttgaatttctctctcctaaaaaacgctatcaaaaagaaaaacaaaagctatttgttctgttttgtaagaaaaaaagtagacagaggagaaaaaaaactcagtgccgagtcttgtgatactctgaggtgagattccgaagtcttctgctttagaaccctgtggatactctgcttaaatctttgtgagcttttatgttttgagctttgtttgaattcgcatgttcttttggttcttctttgtgtttgtttaaagttgcgatgagaagttagggtttctcatgcgcttcttttatttgtgaatttcgatgttttgattatttattgtctttttgatatctgatgctattaagttgttgacaaaatgcatgaatttgacgttgattgacttgatttcgagagattcaagatgggtttgtgttttgtctgaatctgtgtggtgtaagctctggagatttgtctgaatgaaagggtgttttttggtttcatttgtccatctggatctttgttctactgaatgtataagaagcgaggataaatgatgaaccttcgagattttggtttcttagtgacttacgcgaaatttccatttagttcttcttctgcagatctaaagtgggattaagtgataattatggatcaataatgagatctaaattagatttgtcttattgctgactagccaagttttagatgttgttttcctggaattagctttttttcgcatatatgctaagtgtgaattcaatgcgttttacatgttctttatgtcaagttgttcaatttctttatagagagcattaatttctgctatcgtagctatattaatcctctgaactgatttcttattcacagccacaataagcgttttaggtggaaggatctactgaactggtttgtaatatgggggaagatacaaaggcaaccattgagcctaccgcaaacaagactacttctcttgaaaagccatcataagctatggctgttaaggagaatgctgggggtaaggaaacacatg

SEQ ID NO: 154066 - DNA, 391 bp, Arabidopsis thaliana landsberg
  unsure (1)..(391): unsure at all n locations
agaaaactaacacaagtagataaatataaagaaaaatgcttgataagcttattattggggttgccggagggattaccggagggattcttggaacggtcgatgggtttgccaaaggggtcgggatatggcccaataattatcagaacaccggtggcttcgagaacaacaataagacgagtccgggcaactacggcaatggtaatggcggtgcagtgaaggcatccgagaactccggcggccgccgccagaaagacagggagtaaaggactcctgaccacacccagtaatgattatgtaccaaaataatagatgtataagatggacatgtttcagtatcttaccanaaatataggagacttttaatgaaaagtcttcttgtgtaattttatga

SEQ ID NO: 154067 - DNA, 270 bp, Arabidopsis thaliana landsberg
aacattaggatacattttgattattggaattacaaatgagcagttcaaggattattaacctacaattttgtatctaaactcaaacgtgttggtacaaaatcgatccgtgttcatttttatcatatttgtgaagactgtgatagtaaagtaaagaaatgtaacaaaaatgtctaagagaggaagatactgaacttggaaggtccaacggtatgagaaaaacctttaatggacaattcaggaacagtagctttctccaccataagaagctca

SEQ ID NO: 154068 - DNA, 210 bp, Arabidopsis thaliana landsberg
cccatgttttacatataaaccttatttaatcatcgctgcatgagtgtgagtctcaagcaacacattatgtagcaatacaacacacgtggagtttcagtttttaggataaagtattaaaattggaacacatatatggtctagagtctatactatcctcgtacagatgcgtagcctgaagtctcgtatttgcctccccacctgtgaatttcc

SEQ ID NO: 154069 - DNA, 645 bp, Arabidopsis thaliana landsberg
aaagaagtgagaaactggatttctacaattgaacaaatatgtttcatacaattgtggaaatgacagtttcagactcatccgttacattttaacaagaatattgccttgtctttttcattagtactacaataaaagcgataaggatagtagtattgtgttttctctgtgtgatgagtaaacaaaaagaaagaagaaagaaagagaggagtgaaaacggtaagaaccaaaccgcaacaaactttaaaccttgagaaaacgcagccagacgagtgcaagggcttttgtgtagtggaaacacttcatttctggctttgatcgacttcttcatcaaatactctgtgattgagaaagagtttcaatcttgtcgtgaagcgtcacgacaagatgatgggcatcatcaagaagcttccagacattaagctgaccagccatgctattacactcttccacaatctcatccatactactgtatttctgtatgatcagtttcctacgtagtactaacgccgcgattgcatagagcaacaaatcatccgttggcggtgcttgttgccggattctgctccatggcgacttcccaactccagctctaatggcagcttgatcagcccacatcacttcccagagacacagcgtctgttcaaa

SEQ ID NO: 154070 - DNA, 204 bp, Arabidopsis thaliana landsberg
ctatagctaaaaagagaactaaaaagcttccaaggcaaatgtctatgaacccgattgtttcaccgccaaaaaaagatttccctttgcttagagcaataaacgcagcttctagttgcaacaacccttcttccacttcttccatgccttttgcttttgcttcttccgatttagcgaccacagctgccatcaaagtcggtaaccact

SEQ ID NO: 154071 - DNA, 128 bp, Arabidopsis thaliana landsberg
cttcttctcaatccaaaatccagctgataaataaatcatttttctcttgtcgtcatactaaaaaaaaaaaagattatctgtatttcaagtttcatgagcgtttgccaccacaacattgtctgtcgggt

SEQ ID NO: 154072 - DNA, 297 bp, Arabidopsis thaliana landsberg
tattttgtcgcgacccaatcattgacgagaaaaaaaaaaagacaattgtcaagagatactcgatgtgaataccttcttattaatcatcaaaacaaaaccaaaattaatacatacatatagaaaaaagcaagagaaaacacagatcaagtgtttccaaaaggaccaaaaccgaacaaagtttggtttgtgattcactaaactttgggttatccatagtatatacggaattatcctcgccgtacgtcaccgtcgcctcacttcaccattgggtaaaggtcctccgacaatctcaattct

SEQ ID NO: 154073 - DNA, 335 bp, Arabidopsis thaliana landsberg
tttccagataagcattggcatcaactacagagacttgttcttatcatcgggtcttgcgcatccgctctattgatcattataattggttgctgtgttgtgccacggattgtcactagtcctaataaagaagacggagcagcgaatcaattcaaatcttgcataggaaagcccgatttagacactgatcagccacttgaaaatgtatcccctgctccatcggtaacgccttttgctcaagtgtttagactctctgagcttaaagacgcgaccaacgggtttaaagagttcaatgagttaggcagaggaagctatgggtttgtctacaaagccgtgtt

SEQ ID NO: 154074 - DNA, 203 bp, Arabidopsis thaliana landsberg
aagtgacctataaattatcaggagacactttgttgagattggcttagttatttaatacaaggaagcaatataaggactacaaaagaccaatacatcatcaagactaaccttattttcatctccaaatatagattcttttccatctttcctcttagcatatgacaatcccaatcttgatttagccatcctcaaatcaccaatcc

SEQ ID NO: 154075 - DNA, 333 bp, Arabidopsis thaliana landsberg
actgtcaactacattcttatccatttgaatcatcatgtcaggcgtgtctcttgcggttggtccaagaaccgacgtggacaaaacggcgtcatccagtgagaagggacggtggtcggggatgacggcgataggaggtggcagtggaggtttgatggggtcgttaagggttatagagctacagctagtcgcgttcatactagttttctcagcaagcggtctcgtaccaatacttgacatgctttttccagcgtttgcgtctatctatataatcgccctctcgcgtttagctttcccttctcacggcgtttccaccgctatcccccaaagtgttcc

SEQ ID NO: 154076 - DNA, 98 bp, Arabidopsis thaliana landsberg
cagaaaagtaaaaaaggtgacctgcccatttattcatccacgctacatcatgtattaatacatgactatgaaactaataaattatttacattaaaaag

SEQ ID NO: 154077 - DNA, 277 bp, Arabidopsis thaliana landsberg
caaaagtgcagaaatggacgtaagctaaacagtcacaactgaaaaaataaatttaaaagggttttaaggaggatttaagttttaatttctaatgaaatagttgattttttcgttgccttactgcatcgtatgtggaaatatagacattcataataaatattttttgtccttttaattactaagaggttcgggatctaggtcttgttttctcggggttgggaaaacccataccattttaaatattaggttttcccccctttaaaattggtttaatttc

SEQ ID NO: 154078 - DNA, 138 bp, Arabidopsis thaliana landsberg
tgtgatgcaaacagatgagatgtgatcagaagtcattaagtcaagccaagcaataacagttttggggtttttaacagtcctaagcgaacatgtagaaaacagaaataataacagaattactaaagtcactcgaccaca

SEQ ID NO: 154079 - DNA, 78 bp, Arabidopsis thaliana landsberg
tcgcctttcttaaagtttcctcttactaattgtgattgagtaaatacgaaaaatccttttataagccccaaaatcaaa

SEQ ID NO: 154080 - DNA, 210 bp, Arabidopsis thaliana landsberg
tttaaaagcaagtttttctcttttttaaaatacaaatgcaagacaacagatttaaacaatgatttgcttggtcttgaagaagagaaaaatgaaacgtacgagatccacaatagaagataatacaagagcaaaacgaagcatgcaaatagagacataggaagaggaggttagttctacattcggatgctccggcttgtgttgggattgata

SEQ ID NO: 154081 - DNA, 178 bp, Arabidopsis thaliana landsberg
  unsure (1)..(178): unsure at all n locations
atgaaatggaaggttaacgtcatttatactaaaggtttatgactaacgttagtatagagagccaggtttgtcaaatgacgtcttataagctgacttaatatcagaacttatgaaagtaacgtcggtttagaagcaacacanaatttttatagaccattttctactaaattttatataa

SEQ ID NO: 154082 - DNA, 278 bp, Arabidopsis thaliana landsberg
  unsure (1)..(278): unsure at all n locations
agagcttgagaactgcttcaagagagcactagagtcagaagatgtagacgcacgaaacgtacagcaaatacgccatcttcctgtggaaagttcggaatgatctctgggctgctgaggagaactttctagaagctatatctgcagaccctaccaactccttctacgccgtcttttacgccaatttcctttggaataccggtggtgaagagacgtgtttncctttagaagattctactcaggaaatgtgtttgagaaggagccgatttagtgaatggatg

SEQ ID NO: 154083 - DNA, 364 bp, Arabidopsis thaliana landsberg
tacctgatgagggtgaagcaaatgctccagaaaaggattgttgttgatcaaatagaatggcctgatcatcctcgaaccaaatatcgctagtgatttgattgagagttgtactaggatccatgatgttgttcagctggttctcgggagtctggtcctggaactgttgataaaggagttgctgtttttggtctgatgtgtagttagcagaatcactcagagaagacagatttgcagaagttccctgatcaataggttccatatccaaagacatggaaacgtcatggaacaattggtcaaactcattaaaatcgtcgaattcaccatggttcgagaactgtgcggctttctcagttgaagaagctcc

SEQ ID NO: 154084 - DNA, 467 bp, Arabidopsis thaliana landsberg
ggaatagaaattctcactttggtagaggaaacttgtcgtttgaaggaaatgattgagcggctggtagtagataactaacctcagttttcctcgtacttgttcggctcttttgttaacatagaaggcttcgcatgcctatagggaggtggtcttctcaatgaggtcttctctttggagttggtcgactttttcgagagcaagatgataatggtctggattcattcctaaatggcttgcttttgttggatgacatcctcattcttcttgaagggtaatgatatgaaaaagtccggtttctttcataaaggtgatgaaaatttggtgaggaactctgaatgtgatgtagcacaagaagtcttgataatctcgtctttgatagaatttaatattccatggggtagagatgggagacattagtccatggtagcagttggttcttgtgcttaagtctttttggattccaaaat

SEQ ID NO: 154085 - DNA, 228 bp, Arabidopsis thaliana landsberg
agaaggcattagatagatagatagattattttcaccatcaacatcaccatcgccgccactatcacaccataacccaccactcttcttcttcttcttcttcttctctctctttctctgtatcttgaaacagagagtttttgattctctctgtttccaaatctgttccactaagctctcttgctttcgggaagattctgtttcactgctgcattttggatttttccggtg

SEQ ID NO: 154086 - DNA, 208 bp, Arabidopsis thaliana landsberg
ccggaatcgagttgggacctcctcatagtttcaacgacccgtaaagaggttgagactttctgaaacattcaatgtcttcgatttctatggatgttgatgggatcttgtctttgtcatttcgcatttccttcaaatgttggtttccgtaaacgcatatgctcaacgatttcttatttggtgcgtcaacctttatgtattcgtcaaagaa

SEQ ID NO: 154087 - DNA, 203 bp, Arabidopsis thaliana landsberg
gaatactgtgaccttccttgtatgagttggacgtaaaataagaattaagaaggtgaaacaagatgcagaggcaaaggagccagcaaggaagatgaaccatacctatgtatagatatgttgcactcttccacgcccaaagcgactctaaccatgtccaaaactctcctccaagactcaaccctacgaggccttctccaagcaac

SEQ ID NO: 154088 - DNA, 77 bp, Arabidopsis thaliana landsberg
cagaatcgctgcttctgcagcctctcgtttctttcccattctaagactgtgcttcctttcggatcatctaaacgtca

SEQ ID NO: 154089 - DNA, 376 bp, Arabidopsis thaliana landsberg
aacatttagaaaaacaactgtgaagacatcaggaaacttgtcgcagattcctccgtttaatatcccgaggcttcccgacagtttcagaccatcgtcaaaccctggaactggggatttcgaagctacctatgttgatgataccatgcgcataactcgcggggacagaggtgaacttagggtattcgtcattgcttaattctcaaagctttgacatgtaaagataaataaatactttctgcttgatgcagtctcatgagttttgtacaaatcatgtgaacatataaatgcgctttataagtaaatgagtgtcttgttcaatgaatcatatgaaagaatttgtatgactcagaaaattggacaatgatatagaccttcc

SEQ ID NO: 154090 - DNA, 56 bp, Arabidopsis thaliana landsberg
  unsure (1)..(56): unsure at all n locations
tttttttttttnttttttttttttttttttttttttttttttttttattttttttt

SEQ ID NO: 154091 - DNA, 63 bp, Arabidopsis thaliana landsberg
cagacttcaaatagaagtgcaaaggtttcactcgatcagatagatcctacccgctggttgcaa

SEQ ID NO: 154092 - DNA, 89 bp, Arabidopsis thaliana landsberg
agattttttttttttcctttttgttttctttctataatatgttaatcattgttggtgaaatgtaaaagtttacagtttcaccatatcag

SEQ ID NO: 154093 - DNA, 345 bp, Arabidopsis thaliana landsberg
atttcccggttattagcgaccaagatttttttttttttgttaaagaactagcgaccaagagtccaagatcatgaaactatagagaactaaaatgatatagaattctttttatggctggtttacgctaaagatgtgcccatgaatgaaatctataatttatcaacaatccataatgcgttgtgttaaaaaaaatatatatgtgattcaggcttctccaatgtgtattatgctatgcatgttcacgacaccgcaaaaacactctacttgagtgatatggaaataagtatttatctatattatatatgatatttcttaaagagtacttaattatgtgtttttgtatat

SEQ ID NO: 154094 - DNA, 445 bp, Arabidopsis thaliana landsberg
ccattgtccaaattccttaacaaaaaaactctactctcggtggcaccagatcactcctccttctctcttctcctacctttttcacattctctccttcttcttctcgtgagagaaagaaagagagattctttattcattagatcgaagcaaaaatgtccacagcgccgtctccaggcactactccatcaccatctccaccgtctcctcccacaaactcaacaaccaccactcctcctccagcagcctcttctcctcctcccaccacaactccttcttctcctcctccgtcaccgtcaactaattcaacctctcctcctccttcttctcctttacctacttctcttcctcctcgcatctcctcctggatctttaactctcctcttactcaaccttcccctccgctcccatgactgcttctccaccgtttgccaccacaccctcaaac

SEQ ID NO: 154095 - DNA, 66 bp, Arabidopsis thaliana landsberg
gggtcccgaaactctttttgtaaaacctgttgaatttataatgaataaaagatgctttgctgataa

SEQ ID NO: 154096 - DNA, 78 bp, Arabidopsis thaliana landsberg
tttttctttttttttttttttttttttttttttttttttttttatccaggtacgaaatatttttttttaaaacaaaaa

SEQ ID NO: 154097 - DNA, 1065 bp, Arabidopsis thaliana landsberg
cttttctttccccttctctcaaccttttggggaaaaaaccagaaaatggggttgcatccaatttccgacgccaatgaacacaatcccttcggatctctcaccgccgacgaattctacgccaaacattccgttagccactcctccgctttcatcaccaaccctcgcggtctcaaactcttcactcaatggtggtcaccactccctccaactaaaccaatcggtatcatcgctgtcgttcatggcttcaccggcgaatccagttggttccttcagctcacatcaatcctcttcgctaaatccggtttcataacctgcgcaattgatcaccaaggccatggattctccgatggactcatcgctcatatccctgacatcaatcccgtcgtcgatgactgtatctctttcttcgatgacttccgtagccgtcaaacaccgtcagatctgccgtgttttctctactctgaatccctaggcggcgcgattgctctctacatctcgcttcgtcagagaggtgtttgggatggacttatcctcaacggagctatgtgtggaatcagcgataaattcaaaccgccgtggccgttggagcatttgctattcgtcgtcgcgaatcttatccctacttggcgcgttatccccactcgcggatctattcccgatgtttcgttcaaggagccgtggaagaggaagcttgccatggctagcccaaggaggacggtggcgaaaccacgggccgctactgcttatgagctgattcgtgtttgtaaggatctgcaggggaggtttgaggaagtggaggttccgcttctgattgtgcacggcggaggtgatgttgtatgcgacgtagcgtgtgttgaggagcttcatcggagagcgattagtgaggataagacgatcaagatctaccctgagttgtggcatcagatgattggggaatcggaggagaaagtcgatctggtttacggtgatatgctgagctggctcaagagtcgagctgaaaggaaggcacgcgccgccgttgatggaggagcagcttagagtcccttttgagtctttgggtgttgt

SEQ ID NO: 154098 - DNA, 1164 bp, Arabidopsis thaliana landsberg
agcaacactctacctcagcgagtccatcagggtaaggcagtcttagatgacgatgatatctatcagtctgttcagcccgcgatgtcaaaaaactcgaatcagaatcaaaataaggattagactcttgattgagagatcgtctaggaagaagagaagaagaaccctgcaatgtaacagctgtgttgaaaacttaggaacacaaaattccaaacctcatactgaaactactacaaaaacttcatcagttacaaacagtgtgaaaaaaacttactttactccacaaaagattttgatatgatatcacttaagcagagtatatagatcaaagaacaaagcctaattttgctatagatacgaaaagacgataaacctaaatcaaaacgaaaaaaaaaaactgatgctttctaagtgtgctaactactagatagaggcaaatcaaatatctaaagatattataaactaacttaagatattaaaaacccctaaatatttaagctaatttcaatagatatactcaaaatcaaattaacacatacacacgcaacgaattataaaaatggaaactttaacatataaggaatattaaaacagaaaatgtaaatgtacccctcgctgattattattactgttactattggttttatctccatcgattttgcgtctcaccggaatattccttcgcggaggatctgactcgacggtgttattggaggctccaacgacagcatccgtcgaaaacccaactccaggtccacaccaaacatcaggaatcgcagcgcaagcgacgctactactactactactagcctcgctcaagatcttaatcgaaccaccattgtagctactactacccttgttcttgttcttcttcttcgacttcttaattttgaaattactcgcgtcccaatcagcggaggagcgaatcaccgccgggaccgaaacttgctgagatgcggaggttgtgcagcctagcccacgaaacgacgtcgttccgttgggtttcttcttagtggtttctggcaagaggaagaaggaagacatggcggatttagagacgcggctaggtttggggattagaggttcgtcggcggtggaaatgggtgggagatttcgatgattcctaggtcgttggagtctcatgtgttgaccgattgttgttgaaga

SEQ ID NO: 154099 - DNA, 213 bp, Arabidopsis thaliana landsberg; identical to SEQ ID NO: 43745

SEQ ID NO: 154100 - DNA, 337 bp, Arabidopsis thaliana landsberg
accaatctcagttgttttcttcttatcaaagaatccctaaatcatactttgtaattcttgtggcataatttcagtaagtagaaagttagatcgaagtaaaaagaagctaataaataaagcaagcatttagggataagatctttcaaaaaaggggcctattcaactcttatcttctttttgctcaccatcatgggattttcaacctccatgatatcatcatcttcactctcgacgttctctgtttctttcttatgattactggcctcggtctcagagagtcttctcttcttagaagcaggctcggatcctgaggaactctctgtaacatcaactgggt

SEQ ID NO: 154101 - DNA, 227 bp, Arabidopsis thaliana landsberg
gggcatgttgtgtgtgatgtgagccatagatcaatacattccatgtgaaaagtgtgcccacatgatggcatttgttggagtttctcttctgcttggtagtccccaagacacactgaacatctgttttcaagtactcaaagtcaaaatcaggtgattcataatcatactttcttatgttttggctttgatatctaaagaaagataaaaacaaacgtaaacaaaagtag

SEQ ID NO: 154102 - DNA, 150 bp, Arabidopsis thaliana landsberg
  unsure (1)..(150): unsure at all n locations
tcgacgaaagtctgaaaactcttttctctcgacctctttctctcttaccccaaacacaaaatctnctctttaatggatatatcgcctctccgatctcattcttcctcgtttttatctgccaaactcttattgctcttcttcttttgtagt

SEQ ID NO: 154103 - DNA, 594 bp, Arabidopsis thaliana landsberg
cagatggttatggcagtatttgcctacatatatcttcaatcatttattgtctcccaaagcgtttcggttgacaaaatcctagaccaggtaaatgaacttctcgactttgtatcaaaactggaaaatattcacttttgtgatgaatcattaaatcaatcatgtgatggtttcattgtagatattgacgaaccttaccttcgaggaacaacaagcgctcttcgtgaaattaggacaaatgctgaaggacaagctctcataggttctactgccaaaagtttcttttactcagatttgattctccaagaacaggttcctctggaatatccttttatatttgtccttactagagacaataaatttaaaattggattaagatttgttgttttctgccattgtaaatcctctcgaaatttgtcgaaaaaattagaagttttttttttgaagtcttctcatttgatacaataggtttgaagtaagttgcatctacctactatctacttatttagtacctttggatggaggttcacctgtattttgcatatcgattaaaataaaacaacatttggtttgtcagtctcatgattcgatttggtc

SEQ ID NO: 154104 - DNA, 369 bp, Arabidopsis thaliana landsberg
agagacgaataattgctcacgcaaagaaggagcatccgtcaagaaagaagaagaagaagaagacgattattgtaaaactccgactcgttcagaccagattctctcggcgatgccaagaatttgtccaccggcgcctaggaaacctaaaagagtcccgtcgagaagccttaaggttagaaattcatatagaagcaagagaatgatcattctaaatgtttctagagagattgattgtttgtttaatccaacatcactatgtagcaaaattaagaaagccagatacatctaatgttttgtacgtactgtatttgtataacgtagcaacctaataaccaaattgtaatacactacgactttacataatgtagt

SEQ ID NO: 154105 - DNA, 119 bp, Arabidopsis thaliana landsberg
cagtctttttctcatgatacagtatatggatataacaaatagatagttcatcatatttggaaatgttttcacaactcctaaagatttaatttcataccataatttgaatctcttctttg

SEQ ID NO: 154106 - DNA, 75 bp, Arabidopsis thaliana landsberg
gaagctgaagatatttgaaattaatggcaagtggtggggcatatcctaaagatttttaatacaaatagtgaatca

SEQ ID NO: 154107 - DNA, 130 bp, Arabidopsis thaliana landsberg
acagccgccgcgtacttggctgtttgtgttttctctttgtcaagaaggaaatagactctagtatcgactttagatgtctcgtgccacgacttcacagctgtttccatagtctcaacaataaaagaaaaca

SEQ ID NO: 154108 - DNA, 241 bp, Arabidopsis thaliana landsberg
ggagcattgaactgaatctcacacacattcaacataagcagacctgaaaaacctgcttatcaatttggcgtcgttgccaattcattgttgcattgttacatgaagatatcaaaaacttttaagatcaagttcttttacatttatcaagttactaactcatattttcgtctgcttgtttttgtggtataggtactaatctttgtgcatgcaaactcgatccgaaggttttgcacacctatta

SEQ ID NO: 154109 - DNA, 175 bp, Arabidopsis thaliana landsberg
ccaaacctgtccacaaacatcttcgcagatagtatccgtcttcttagaactacgataaccatcggacatgatgatgatgattagttctcaggaaagtcaaattttggacgaaaaaaacaagtttatgaataaacagaaaatctacagaaaaagaaaaacaagagagagtggtcta

SEQ ID NO: 154110 - DNA, 859 bp, Arabidopsis thaliana landsberg
  unsure (1)..(859): unsure at all n locations
tatcttcttctggttcgntcattttaattccattaaatgcttaaaccccacattccattaatgctctctccttccacttcaatatttctttttatcatcaccaccggccaaatttcatcttacatctctgccctacacgtgtctcttcttctccatctctccggcgataacagtgcctctggatctccgcatcttaaccggctcgatgagtgcggtgctgttctgaagaacatcggactcgtcatcgatttcgttcgccgcgatgagcttcccgtcgctggaatccgttctgatatcgggtaaaacactcccgccgatgatctccgtcggaagaacggtgatttcgtgcttctgtagtaacggaacgagaacactcttgatttcgatattaggtttccgaacggtgattgacgtttgttccatgtagatctccggtatctccatggagacaccgtcgctggctccatcgttactctctctgattcagattctctctcgcattcgaacgagtacgatctcttcagctcccggaaccgagaaatcgccggtgatgattgctcttccaccgacgctctgatctcctgatcgttcgtcgtatcggcagcgattgtgttccaattgctccgcgacggtgtgatttcgccgcggatgatgatcgcgttattctcttcatcatcgagactcggacgaattcgaggagccattaacggaacgaacggcgacataggcgttaaaactccggcggatccgagaatcgccgtacggcataacggacagttagggtgagatcggagccattcatcgatgcattcaaggtgaaaagcatggaagcataacggaagtgttcgtacataatcac

SEQ ID NO: 154111 - DNA, 264 bp, Arabidopsis thaliana landsberg
gtacttttagtagtgcaaaacatttcatatactgcagccggatacaaaatttaacaaagccaaaattagcattacaataacactctaccaatatgcaacgatcgatccggtgtttagaaatcggacactcattgttttctcttattatattttaataatcgccgctagtcttttctttattttagactgattcattggtgttaggcctcgagatcacaacacttgcatcatttgtgtccattttgcatctgcttttgatgggag

SEQ ID NO: 154112 - DNA, 172 bp, Arabidopsis thaliana landsberg
cagagcgggcagaagatagacatgaaaacaaaactacttagaaaaaactctttaaaataattttaaattgtccttctcttttagaaaactaattaataaaattatatagaaatataacataagtaagagcgtgacctcgacgatagacagtataatacctcatatctgtaaa

SEQ ID NO: 154113 - DNA, 59 bp, Arabidopsis thaliana landsberg
cggtaaatatttaagttaaatacatatttctaatgtcgtatttcaaaaaagatcggttt

SEQ ID NO: 154114 - DNA, 599 bp, Arabidopsis thaliana landsberg
ttgggttacgctttaatatttaaaaaaaaaaaaaaaacttttatagtacaaacaattttttatggcgaattcacataaaaaatgggaggacgaaacttaaatgcttcgtttacaaaataagcttatgtacaataaaatgaaagattaaatcaaatccacaataatagtctatctgaactttctatgattaattccacactcgtatctaatggaggcaactaggcaaggaccaaactctcaatcttgagcctaatacttcaactactagtctacttatataatacattcgaaataaaggggaaccacacagcttgccgttaagtacttgagggtactagaatgacatgcattgttccactattaggtggaagttgcaaacgaagaggaaacagcttgccgtttgaaggatggcgtgtacagaccacaacatcatccatactagtctcttcttgcaacgcctgcgtcaactgttccacgctatttcctttgaaagtcaacgcatatccaacggctgattcttcctccacgtgtccttcttcgtccgcgatgtggtagtaaataggcctcccttcagatttcggtggcggcacggtcaacta

SEQ ID NO: 154115 - DNA, 656 bp, Arabidopsis thaliana landsberg; identical to SEQ ID NO: 67742
  unsure (1)..(656): unsure at all n locations

SEQ ID NO: 154116 - DNA, 146 bp, Arabidopsis thaliana landsberg
ttttctgatgtcacagattgctgaagaaatgaaaccaagccctttggtaatttcgatattggccaaacttagtggagtgataccttcgtggaaaatcatccctggccaagatatcattgagactgcttttaagcagccagaaatca

SEQ ID NO: 154117 - DNA, 67 bp, Arabidopsis thaliana landsberg
ggaacattttgcaacaatgacgacggggctagtaaagccgggagatgtaatcgggaaagcgacagag

SEQ ID NO: 154118 - DNA, 177 bp, Arabidopsis thaliana landsberg
cataagggccctgtgagaatggtttcgatgagcctggatactgagatggttcctcgggcgaggtaaagatggatatctgtatcttcatagaactatcagtgtattatcatcccatcatgcccgttactatcagtatcatccaaaatcagccatgaatcatgttaaatgcacttgaaa

SEQ ID NO: 154119 - DNA, 130 bp, Arabidopsis thaliana landsberg
gaaacgttttgtattcttctgcactttgtgtcttgctccatgctacagcgacacaatcttgcttgggcacttgaatggaaaccttcacaaggagagattggcatgtgctaggaggacacatccgagaacg

SEQ ID NO: 154120 - DNA, 406 bp, Arabidopsis thaliana landsberg
ccattttacactgcaaaagatctttcaattcctctagaggtaattaaatctccattaacaattctctcttaacattattatcttccaaattttcgttgattagaattttgtttttacatgaatattttcagataaagatccgtcggtgttaccaagatcggtgagtgaaccttcctcttacgagaaatgagataatatcgtaatctttttttttattagtttcaagagaatctcaacggtattgattttctcgcattaacaacttcataataattatgggttttgtaaatattttttaggagcttatttcagaatttgtagcagtaatgttttagatgttatgtttggtctgttatgaagactattgaaactttcgaacataaaaagattattaagaagaaacata

SEQ ID NO: 154121 - DNA, 56 bp, Arabidopsis thaliana landsberg
agcctgcgagtcctttcctagggactcgtgtgcggagatccggatccgagacgctt

SEQ ID NO: 154122 - DNA, 220 bp, Arabidopsis thaliana landsberg
ttgggtttccgggttggttccttcgcttcttgggtggtggagcaacggaggaagtgggttgttgttgaaccatggtcatcgcagcctcttgacggttaaagttgtttggtccgggtccggcagcggcacttgagaggaggaaggtcggagtggaggacaaagcaattgtgttgtacgatgaagacatcttctcagctggtcggtttttgctaaagctaca

SEQ ID NO: 154123 - DNA, 156 bp, Arabidopsis thaliana landsberg
gtaatcatcggagagacgaactctcggagtaaaaagcttccgattgtatcactaccatcccaattttgaaattcgcaagttaattagtggaaagtaggatctagggtttggattcattcgaaataatttctgcaaatttgggctgatcatggaacg

SEQ ID NO: 154124 - DNA, 475 bp, Arabidopsis thaliana landsberg
aaactcaagatcagaaccagagcaggaataaggtaagattttgttttctattaatatctcatagagacatgaaaagaagatcatgattcttatttctcggttgctttctttcgcgcagagaaagacggagaagaagaagcagtttctgtgtctttgtttgaagccaaagactataagagagtaatcataagatagccaaagacgcttcaagaacacagctttgagaaaaggttacagtctgcaaatggcgaacgggagaataaaaagatcgatatcgagtcacaaactcgatggttcgatcaaagctttagtgataaaaacacaacaatttcgatatgtagatggcaccgattatgctcaattcacaccagtttggaaaagagtccgagtgcaataggaattagcttcttttgtttggttctctttgaatctttgttatctgtcttactatgtaatgaaagaacaactccagttt

SEQ ID NO: 154125 - DNA, 336 bp, Arabidopsis thaliana landsberg
gagaaatgttctttcaatattaaataatgtaacaaaagctattgtcactttcacttggtagttgtctagttcttcaacaaagacactgcaggtattactggctgcagtacaataaaatatttcgtatttgcaaatatgcccctatattcagccatgtattgcattctattaatctacataacgttaagttttttcttgagaaggctacattcttgggaagtatgaatgaagcacatagcatccatttccctggagccacaaggcgtacctttcgcatcttcacatccacggctacctcagataaagcaatccgtatccgctgcaagtccaaaacaa

SEQ ID NO: 154126 - DNA, 509 bp, Arabidopsis thaliana landsberg
tttatgtcattgaagaaaaaaagtcatatttcttttaaagcaatagagtaaaagttagagccttaacatacaagaattgatagtgtcacatatatgacttgatacacatagatattctcaagaatacctaacacttatgtgatgaatccttgagagttatttcttacaaatcatgtagttgctgctcttcctttagtgtccttgtgattgttatctttgttgtgtttctactagaacccgaaaacttatccatgtagagtccgaggtacgatataagtgggtcggtcctcgctttgtccaccacaagctttagagaccgcgactcaacaacattcagaaaccgtaaaagccttttgttaccaaccgtcgtgccgctcacaactctctcccactcaccgcttccagtcttccgtgtctcgagatggaaagatgcgatcctttgacccatatggattggttctcgaatctccaacacattgaaactaaccaaatctttaaactctaagtat

SEQ ID NO: 154127 - DNA, 71 bp, Arabidopsis thaliana landsberg
ccttggtgtagtaccgacagccttcaggaccttcagtgacaagtagtagtttcagcttaggatgaaacaac

SEQ ID NO: 154128 - DNA, 317 bp, Arabidopsis thaliana landsberg
gaatatatgtgtatgtataatatatatgtaatatctcgtccaatgtatcattgaagcaacaaactaaatatttcaaatagagaaaaacctgaaaattaacgaggggctataggagaaagagacagaacaatcagcaattttagttgatctcgatgaagagacttgcctgaggatgcaaacctgcgtcttttagtgacattgactctttgtctcttccatacactgtccttgggaagttcgcgattaagctgtactcttctgtaactaagagtccaagtgaatcaacgttatcgtacaatgtctggatcttggtttcg

SEQ ID NO: 154129 - DNA, 78 bp, Arabidopsis thaliana landsberg
ttttttttttttttttttttttttttttttttttttttttttttcttcttttttttgttttttttttttttttttttt

SEQ ID NO: 154130 - DNA, 287 bp, Arabidopsis thaliana landsberg
agatcgaatcgaaaatacacaatgtccaaaaagtcaaaactggtctcgctctttctcgggtctcccctttagacaataataatatcacggacattattaagtagaagaaaagaaaagaaaaaatccaacggtcaggatttcgtttattcctcaaccattgtcgattcaaaaaagaaaaagaagctgctcctagccacagactctgactcaacgtcaagaacagcaatctcactgtgctttttcttctcatttctcgaagtcaaaagtcaaaactggtctctctttct

SEQ ID NO: 154131 - DNA, 342 bp, Arabidopsis thaliana landsberg
atcaacctgttgtgttggtaatagatttttgaaaatccatatgattgaacagtaaataatgcgtcctgaaaactgtagttgacaaggtacatcagtgtaataataataacttaaaagagaagaaggtaatcctagtaaatcaagaacatcaaagccagcattttccaaacaaacaaaatacagagaaagtaactcattttaactggtgcatactagagcaaggttcagctggaatcactaccaagcaactccactaattcggctttcttcatctttgacaacccttttagtccccgtgactttgctatgcctctaagttcgaccagcttcaattcactcaag

SEQ ID NO: 154132 - DNA, 452 bp, Arabidopsis thaliana landsberg
tttacaaacaagaaaatgtactatctatataaaattgtcaaataaaacatctcttattgtttctacagatactacaaatcacatcattttttttttgtttttttttcttctaaaattgagtaaattagaaaatgaaatatatacaaaaaagaaaaagattacaacttttagggagagggcgaaactcttgtgtagatgaacgcctcttcagtcaaagctcttgtttgtattgcagagatcatcctgcatccatccaaaatccacaaaaataatcccacaaaagaaaaataccaccaaggaaattatcctttaaaattcagagtgattgcttcacttggttggtcacttcccccagaagaaagagatacacaaaactttaggtacaagatttaaggatcatttgctctgcggcatcaacacatatctctgcttcttcttcacttcacatcctc

SEQ ID NO: 154133 - DNA, 445 bp, Arabidopsis thaliana landsberg
gtctcctccacgcaattacctcttctcactctcagacattttgtcaaacagatggtgctcgtttctgaaacagcttaagaactaacaaggagacagacactaagcttggtttttttctccgattagccggaggaaaaagtgaaaacgaggggcttagacgagtgatgtgatagagatggaaggagttgagctagaattagaaagaagaagcaagttcttgaacagtttgatacagaagaagagggctaaagaacagcaagatcagaaagatgagttcaatgttcgtgttagggcttcagatatgcctttgcctcatcagaacagagcctttagtttgtcgcgtgagattttgaatgctactccagggaaggctgataacaaaagactcgctcatgccctaaaaaaggttagatcttttgtatctctctcatgatttttctgtatt

SEQ ID NO: 154134 - DNA, 332 bp, Arabidopsis thaliana landsberg
aactactagattttaacccgcggtacaccgcggagacaattcatttttttaaattaatatatataaaatttgtaaattattttatagtttacaattgttactaagtaacgtcctgccaaacccgtcccgccaaacccgtccacaaaaaaaaattatttattttatcaatgttgatcttatttataatatgtttatgaatcattgtcaaaatattttattcgttgtgggacgttgaacccacacattttttgccaattagttaatatatgttcattcttaaaatttcgaatcacaaaatatgataatttttttttgagattttttaaactcta

SEQ ID NO: 154135 - DNA, 347 bp, Arabidopsis thaliana landsberg
ataaaatattatatttttttctgaatatgatgtaattcaaattttttaaaacggacatataatattcaacatatgaagaaataatatgtgtacaatgtcccacatcgcttagaaaaattggataatggttcaaacccatattataaaaggaccaaaatgattatgattacgaatgagcaggaaactcgatttatcaggcgtccaaaattaaaatagttatccgattttactcggattttttattttaaagaattaaaactttaaaatgtttcaagaaattataaaatattataactgtatcaaaagttaaatattataattttaaaaaccttttattaagtttatct

SEQ ID NO: 154136 - DNA, 229 bp, Arabidopsis thaliana landsberg
gaagtcccgtcctccgagatcgatcgttgggatcgtcttgagatgtagcaggtccgagggaagtggtttagggtttgctagttcgacagatgagtgatggaaaatgcgtggaatctttgagatttcagagtcaacgagtcctttcacaccagtcttcgtctcatcgaaagctttaagctcactggcacgatcgaatgaaggagcaatcttcgtgctctccatcgttttg

SEQ ID NO: 154137 - DNA, 62 bp, Arabidopsis thaliana landsberg
  unsure (1)..(62): unsure at all n locations
gtctctcttctccacgatgattgncctgctctcggtttctttttcctgtctcatttctacag

SEQ ID NO: 154138 - DNA, 433 bp, Arabidopsis thaliana landsberg
gattcatatagctacgaaattgcaatgttattaagattggaatcacatcaatggaatatcttcatcctcgtgcccatttctcaattactgagcaataaaaaaaacatctactggataatttgttctccataaaaaaaaagtcaaacatttctaattacaatttatacgtcggtccatttttttctcaaaatgactaaattgaccctactcggcgatcgtgctcaaattagccgtgaatcgcctcttccctttaccgcaacctcttccgccaccaccgtttgtcttaactccggcaatgtttttcttttggtaagttttttccgatttcgttacatcgtcgtcgccggaaacccaaccgactccaccgctcttggtcaacgccgaactagctttaacagccaaagcagccatttcctccgctcttaacggatga

SEQ ID NO: 154139 - DNA, 605 bp, Arabidopsis thaliana landsberg
tcattctcttcctctctaatatacttgaaggattgaacttttttcacgctaaagaattcgcgaaccgaaagcttacgcagctctctccattcatcaccgtataccccaaatccgatgtctttaccgttacgcgaaaaaacccttgaggccatagtgataggtcttgaacaacactcaaggtcatgtgttttaagagcttcttcagctgcttcacttgatgaaattacgaccattgggacaaaccctagacggagatgcatcacaggtccgtgtttcttggagagatcgtgaagacatttatgaagcaacccttggagctggtgtaggtttccgatgatcggaagctttgctgggccaggaggaagattttgttttgactccttgatcttcttggtgaagattaacgagaagaaaatagggacgagtagaagcaagaaaaaagatagaagactcaccattattgtcgttcctctggtttgtgctctgctttttttgatatagagaaacattaagacaaaataacttattgccgtttattgccgtcagtgaggataagctcgagataaagactcagatagtgatgcttaaaatcaaagatatatgca

SEQ ID NO: 154140 - DNA, 293 bp, Arabidopsis thaliana landsberg
ttctccgagaagatggattagtgaatcgagaggttgatatcgttaaatgcggggattttgcaatctagggttcttaagcattgtaatcgatgaaggctcaaaagggaagctcgaagaagaaaggtacgaattctgggttagtcgctgtagcagtggataacaataaaggaagccaacatgctctcaaatgggctgctgatcatctagtctctaaaggacaaaccattatcctcctccatgttatccttaggtcatcctctaaatctggtgaagagcttatgtcagaccctgtt

SEQ ID NO: 154141 - DNA, 456 bp, Arabidopsis thaliana landsberg
cgttaaaagtacgccgataaataaaatgacatcgggtaaaaatattttttcaacatgacattaattttggaatttaatgacaaaaaaacattgttgatattaatacatgcctaaaagcattacaataagtaactaggcttgagcaagtcacacaagatagggtatgacccataggatgtgtttagttactggtcatcacctctacgggacaaccgagcagaaccagctttagccaaacccgaatagtagtctccgacgtttgcaacaaatagaggatctctctctgcaatctttagagagtcgtaacgttttgaaccatgatcgttcccttcatcagattgctccaagtcttctgttaaatcttccattgttttcttgagattagccttactcatctgtgcagcttctcctgttgaaatccctaccattgttatctttggtaagaatggacttcgc

SEQ ID NO: 154142 - DNA, 373 bp, Arabidopsis thaliana landsberg
gcaaaatctcaatggatgaagtatattatggtaaaagagaatagatttggcgcataagaaactctcccgattcaacaagggtagaagccatagtcttcaacatcaagcttttgtatgagcaaaaggacatggcaatagaaagccatgttaacggtaagaacacagcaacgaaaaagctgtgttgacggcaagaacacagcaacgaaaaagctgtgttgacggcaagaacacgacaacggagaagtcgtgttgacggctaactaacagcagaaccggacttcatccgagtataaactccggtaaaaacaaaccggacggggatgatatataaaaacctctctctctaaaaaatattaaagaaagaagagagaga

SEQ ID NO: 154143 - DNA, 1768 bp, Arabidopsis thaliana landsberg
atggagttctcaaactctttgctctctctcttactctttctactgtatgtttctcctctctctgctcttgttttagctcataccaataaccacgaagactttcttaagtgtctttctcaccggattaacgacaacaccatcgtatccaaaatcatacacacttccaaagactcatcctttttttccatcttggattcttccatacaaaacccaagattctcggttcccgaaacacctaaaccggtctcaatcgtcactccggttagagccagtgacgttcaaaccgtgatcagatgcgcactgcttcacggaatccacgtaaggactcgcagcgccggtcacggctgggaaggtcaatcttacattgcgtacaacaaaccatacgtcgtcatcgatctgaggaatcttcggtctatatcattagacgtcgaaaaccggactggttgggttcaaaccggcgcaaccactggagagttatactttgagattgggaaaacaaccaaatctcttgctttcccagccagtatccacccaaccgttggcgtcggaggccagtttagcggcggaggttacggcacgttgcttagaaaatacggtttagcagcggataacataatcgatgcacttgtggttgacgcacgtgggaggattcttgaccgacaagcaatgggtgaggattacttttgggcgattcgtggaggcggtggatcgagctttggtgttgtactatcatggaagattaagttagtcgatgttccgtccacggtcaccgtgtttaaagtccagaaaacatcggagaaagaggccgttaggatcatcaacaagtggcagtatgttgcggataaggtccctgaagatcttttcatcagcgcaacgttggagagatcaaacgaaaactctgtgcaggctttgtttactggactctatcttggtccggtgaataatctcttggccttgatggaagaaaagtttccagaattaggtcttgatatccaagactgcacagagatgagttgggttgaatctgcactctggtttgctgatttctctaaaggagagtctcttggtgttctcgcgaatcggaagcgtacatctctgtctttcaagggtaaagacgactttgtccaagaaccgatacccgaggctgcaattcaagcgctatggaggcgattagaggcgcctgaggctcggcttgcaaaggttatattaactccatatggtgggaaaatgagtgaaatcgcagagcacgaaacgccattcccacatcgaaaagggaatctctatgagattcagtatctggctttttggagagaagaggaagacaagaacaagatggaaacagagaagtatctgaaatgggttgagagcgtttacaatcttatgactccttatgtttcgaaatctccaagaggagcttatgtcaacttcatggatcttgatttgggaatgtatcttggaaaggaagagacaaagtacgaggaagggaagagttggggagtgaagtatttcaagaacaatttcgagagattggtgagagtgaaaacaagcgttgatccaacagatttcttctgtgatgaacagagcattccgctactgaaatccgttgacgacatctaagaatatcctttgaagtttcatgtacgagtccttttcactgtgaaatcatctgcctctagtttgacccgttatgcttcaactgtgaaacttttttctagatgttgtgacatatttgcgtccgttgaataaagatttcatggtttttggattt

SEQ ID NO: 154144 - DNA, 604 bp, Arabidopsis thaliana landsberg; identical to SEQ ID NO: 44429

SEQ ID NO: 154145 - DNA, 160 bp, Arabidopsis thaliana landsberg
tttttttttttttttttttttttttttttattttttgtgttgtttttttttttttgtttgttttagttattttgtttttgttgttttgtttttttttttggttttgtttgttttttatttgattggttgttgtttttttttttttttttttttttttttt

SEQ ID NO: 154146 - DNA, 307 bp, Arabidopsis thaliana landsberg
gtctcctagaagaaattgttgtagggtgaaatcaaagaagaacaatactttggagattagtgttgcagtttgcaaagaaggtgaagtggttgaagtcgtgtaataatattcatggtaaattttgttctgattcaattatacagcagattagtcaaattaccacctatttaaatgatcgaaaattttcaaatattaattaaataaacaattaccatagtgtgattttgttgtcaagtttaatgtttagtactctagctcgggctcccaaattattaaatccagaaaacaaaaatccatcaaaaggata

SEQ ID NO: 154147 - DNA, 229 bp, Arabidopsis thaliana landsberg
tggtattaaagccggagtatttagtctctttaccgtttttggtatcccattggccgtaagtacacttttgttgtgtccttttgttttctttacaattttaggtttgtaaccgattcttttttcttttgtaattattatgacagattacttacagtattccatttgcactagcgtccattttctcaaccaattccggtgccggccaaggtaattttcatttatttaaaat

SEQ ID NO: 154148 - DNA, 297 bp, Arabidopsis thaliana landsberg
gagatctcgaaaaagagactatacatatatcaaatcaaagcagaagaaggattatactctatatctttgtgtgattgacttagagacctttaccttcgtcttcgtttaagattcggttacggaagtcactaaccatgcgaggcagtccctccctcagagatatctttggttcccagttcaactgttcctttgctttgcttatgtctggtttcctcttgtgaggatcgtctgctgtgtttggtttgaactctatggtcgcgcttgggtcgatcacctccttaaccacctgcacacaaa

SEQ ID NO: 154149 - DNA, 413 bp, Arabidopsis thaliana landsberg
gcgtctttctctttctctctgtctgaagttgagaacacgaaccactgaaaaacccgcgaaagactcgagcacgaaccaacaatggcggaacccaaaaccaagtatgatcgtcagctaaggtgcactctttctcctcccaactctctttctcttcttcaacttctctgtctctttcatcattcttattaatttcgctcaaattgtgatgattggggataaattcataggatttggggagaattaggtcaatcagctcttgaaaccgcgagcatatgtttgctcaattgtggtccaactggctctgaggctctaaagaatcttgttattggtggaatcggaagtatcaccattgtcgacggatctaaagtagaaattggcgaccttggaaacaatttcatgggtataattctctc

SEQ ID NO: 154150 - DNA, 225 bp, Arabidopsis thaliana landsberg
tctttcctctcttcttcaattatttacgttacaccttcttgttcttcagattcgcttctctttcttttcctcgaaacgattcagattcttctcccactatgcaactattggtttttgagttactcaaatcgagaaaccctaatttcataattctgagattttgagctcaaatcccaaatttcgaatctcactctgttttttcctctgtaatttctcagatttcta

SEQ ID NO: 154151 - DNA, 110 bp, Arabidopsis thaliana landsberg
caactatgcatccgtaatgcgataatcctggttctagttcgaactctgacttcatcatcacgaaatacgtttttccttcctctacaagacctccatggacgcaagcaact

SEQ ID NO: 154152 - DNA, 206 bp, Arabidopsis thaliana landsberg
atggttttatagctttttcatgaaatatatattaaactcaagacacaataaaacaatgctgcaaaaacaagctgagttgaaatctcaccgtctgaattacatttgtatgactctccgtaagggtaatttttatgtaatgggtttttttcgaaaaatcatttgctctgagactattaagtgactagtgaggttttggaacaaaccca

SEQ ID NO: 154153 - DNA, 132 bp, Arabidopsis thaliana landsberg
accacaacactacacaggaagcagcagtaataatgctgtgcagacaccaagcaacaacgatagtgcttggtgtcatgattcattgccaggagggtttcttgacttccatgaaaccaacccggcgattcaaaa

SEQ ID NO: 154154 - DNA, 393 bp, Arabidopsis thaliana landsberg
acttcattagtcttcatatctcatacttcaacattctagctttctaagctttaacatggagaaaaaaaaaaagacgccataaaattaactatgttttttaagactccttaaattgcggtaaaatggtgaaaaaaagattgcggtagatttagcatttatccagtttatcaatacataattagtagattcttttttttttactttctctaaacaaataattaggattgtttttttttgtcaacaaatattaattttgttataaaagcaaaaaaaaaatgacaatctggcaatcaaattaacgcgtctccttgtcccctaaccccacctgtatatatacttctccgtctcttcctcttctccttagcagatgctttttggaaaaaaaaatatacc

SEQ ID NO: 154155 - DNA, 198 bp, Arabidopsis thaliana landsberg
ataggattccatttgcaaatgcaagtacaagtgctagagcaagcggcagtacaagtgcgagctcaaactcgagttttagtagcagtgtggcggatacagatgatgatcagaccattgcacgtatattagctgaagatgagagcttgagaagagaaggcaagcttgggaagagattatctcatttggattctatcccag

SEQ ID NO: 154156 - DNA, 229 bp, Arabidopsis thaliana landsberg
gaggaaacggagataaaggagaaaactttagagcgtgttcaagttaataacagttctgtcgataatggaaaagctcttcgtaccatcatttcccaaaacttttttgaattatcagactccagctaaagtagagaattcgcctgaacctcatccaaaatccagaaagaaaaaccaataattcaccaagaagaaagaacccaatatcattcccgacgagcaagtcgtttcc

SEQ ID NO: 154157 - DNA, 662 bp, Arabidopsis thaliana landsberg
cgaagctctctcttttttttttggtgtgtctaaatctctcacgcacgacgttgagagagctctttcctttgcgatcttgttgtcttcctctgctccgatcgaattcacaaccagctttaatgtatgattctcgctcttaccttcagtttatgttccgaatcttctcatgaaatttccattgcatccgatttcgaaattaggtttttttttttcaattttcaaaattttggtttgtgatttatgtgattttgaagccaccttcttgggggttcttaagtttgctgtagaattttattgttcttctctccgtctttgtttctttgcttagagttgactatttggattgaaaaagtttacacctttacgcctgaatcataatacccacaatgtgattgacttatctacacaagcttttgaatttgatgagaatttgaccttttcttttttcgcagaagcattgtagttcaacttgaatttattggcggttgttgaagctgtgtagctattaacaattggggctatgcattcaacgattttctgctcgtgaagaaggaatataccttatttataaggtttcagtcttagacatgtcgtgtttcgattgcagtggttatgatgtctcaagttgtcttattcatctcgctgaatggcatcctttggaa

SEQ ID NO: 154158 - DNA, 233 bp, Arabidopsis thaliana landsberg
gactatacagggcatttttagggagtgtaagtgactactgttcccaacatgcaaaatgtccaattctcattgggggacgggctagagaaacctcaactagtaacacgaaggaacacaagagcaagtgaggaaggaaaccatgttataatagcttctgtttcattccgtttgtactccgtagagaagaaaaaaaagtgtgccgccaataaacaagtttacttttgcaaagtaaa

SEQ ID NO: 154159 - DNA, 707 bp, Arabidopsis thaliana landsberg
gtactccgtgcggcggaggttgcccctctcccaagccaaagccaactcctaaaccaaccccaagccctagctctggctcgagcaagtgccctaaagacaccctcaagctcggtgtctgcgctaatgtgctcaacggcctcctggacttgacccttggcaagccaccggtcgagccatgctgcagcctcatccaaggactcgctgatgttgaggcagccgtttgtctctgcaccgctcttaaggctaacattcttggaatcaacttgaacctcccaatatctttaagtctactccttaatgtttgcagcaaacaacttcctcctggcttccaatgctaaaaaccatattgatatataatttaaatacacttatgtgtgtattaatttatcttcttgttttaaagagacagggtgattctctatactcttatattgtgtctttatatatcttgatctgtggtttcttctactctgcttgctctggtgttcattggggtgatccgtaagattcctgaagtttacagtttcattatttcctattatatatactcttaccattgggggtattgttgtattggtttgtattatgattctatgaattaataaagaatttaacttttatgttatggattcattattatacggaatattgtgttttatggtttatatatatagactgtatcttctacagttctacccaaatatttt

SEQ ID NO: 154160 - DNA, 363 bp, Arabidopsis thaliana landsberg
cttatgtcttggactaaccataaacaactgaaccatacagctataaatcagcaactgacaaaaatcaattggacaagacatgggtttatgtttggtttacagagaaagaatcagtcagcttcttgaagtccatcctaaacatcagaaccatccaacaaaacaacccctgtaagcgcaagagcaccggccaaaaccgcctgagcatcctctagagtagttgagtcatccgggatcaactccacggctacaatagcagccgtgagagctggtaatgcagccgaggctaagaccgcaggcgatgttccagctaagttctcaaggagactgagaagaccaaggtcctctgctttggagaagacttta

SEQ ID NO: 154161 - DNA, 270 bp, Arabidopsis thaliana landsberg
ataataatctcatgagaatgatcataggcttcattctcttgctggctctcattagcaacatcatatcggtgttacaaaacttgaacccggcgatgaagtttgatcgcgagagatagacaaagctagcagattgatcaaagcactcgtttttactttgcttttatttatttctattttcttccgaaattttgatgtatatatgtgtgtgtatgtaagaccaagaggtatgtcttgtacctaaagttaaaataaaatttagggtttgaaaaa

SEQ ID NO: 154162 - DNA, 373 bp, Arabidopsis thaliana landsberg
tcccaaggagaatggaaacaaacggagcttgaatccgtcttcactgacaccattgatcttcgttaggttgcagagctatcgaattcatcaaggtgctcgagtggatcctccattggcagaccatggaatttgttcccctgaatcatcgagatgagaccactcttcatctcgaagttgttgttctggatagcaggaggtgcaattcccttcctctgacggtgatcacgtggtgcatctccagcaccaatgttggcagggccattttgttgattctgttcttcagccatttcgagtggttcctgaggtacagggttgactgtggttctcctttttctgagttcgcgagctatgcggttgatgttgtcgtcgaaaa

SEQ ID NO: 154163 - DNA, 299 bp, Arabidopsis thaliana landsberg
ttagtccttattagagtgttatgtcgatttactcattttatttataaaataaataggtccctgtgtatatagcaaaaattacacccagaaacatttgttggagaattttcttattccaatcaggtaattatcaaatagagacccaatatcaaataacttatagtaatatctttcaataaattcataagcaaaatatttattgtcatcttgcgtttgaacttgcagcttctacaatgtcttgggatttcactcatgttcttcaccggaaactttttccattggcgaacattagctctttt

SEQ ID NO: 154164 - DNA, 253 bp, Arabidopsis thaliana landsberg
tctcttatcctttgtcatcaattttcgccgaaaagatctctataaataccatcattcactttctatcacatgaaaactaaaaaacacaaacatcacatgtatacacacatatagttacaaacacacatacacaaaacacagatatataaaaatgtcttgttataataaagcactattgatcggcaacaaagtcgtcgttatacttgtattcctcttatgtttggttcactcgtcagagtcacttcgaccactg

SEQ ID NO: 154165 - DNA, 550 bp, Arabidopsis thaliana landsberg
gcggggagaaaagaagggagaagaacctgaacacccggtgaatcgaaattcatgactcggatcttagcccccacgtctccgcggactgtgagctccactcggtcgtttaaggaagcatctctgacgagatcggcggcgtgggcttgcataagattgactctgtcgacggagatggtggcctcaacgttcttcgtactgtgcgcatcctggtagaatccaggcaccgtcgccctccccagtggcatgcctttgtacatgaccgtgaagctggactcaccgtacctgattccgaccttgtttgggttgacggcggtgaatagcatcctgatggtgagggagagggaggctgtggttggatccagaacagcgcttgggggggagatccccatgtacaccactgtcacttgttgcatatcgaactgcgggttttagggcttcaccgcctgtattacgatgagcgccaccgccagtaccagcatctccagtaactcgaacatcaagaccaagctgtagtaacatcccttcatcgacgccgactacgacgatgagt

SEQ ID NO: 154166 - DNA, 114 bp, Arabidopsis thaliana landsberg
cttacgcgtcttcataatcttcctctttttttctttgtctttgaaattcaaagtttttgtttattttttctttgcttaacccggagagacagcctctccataaaattaggtttg

SEQ ID NO: 154167 - DNA, 403 bp, Arabidopsis thaliana landsberg
aactttggtctgtaacacaaaattgatattaaaagccgtaaatcttgttgtatacacacattaatcgtaattatacattaggttataacacgtacagataccaatcacacagtatagatagataagacttaaatatgattgatctagtcgatatattgagaaacccatttaaatccttcgccgtaacccatctttctgacaatgctgcacatgaacacctcaagaggacgaacatttgttcctgctagattcactttacctttcccagtggtgaaactggtgaggcctagatgataacgcagctcgtcttctgatgcagcgtacggaatgtcgattttgtttccaaggatgaggaaagggacatttgctagggattcatcagagagaagagcgtcaagctctt

SEQ ID NO: 154168 - DNA, 517 bp, Arabidopsis thaliana landsberg
tccttttgtgtggaactttcttgaagggcacaatagggttgttgagaaagatcccaccacgcagcctaaagcggtgcattatactcgtggagggccttggtttgatgcttggaaggattgcgagttaacggataaatggcttaatgagatgaaagagtacaacaaagagatcaagaaggaagctgataacgcaaagtagaaagaaagaagtaagaggtatgttgttcattaccaacacgagtagtgaacttcctttacatagtgttggctttgtagagccagggatcattagtcttgtggagggctatggagttttttttaatttcattgaattcgttaaatcattcgcaaacactattagtacctatattgaggtcatatggtataataaccctattcgtttgtttatttgttgtgttttgtacctttgatggtattttatttgtataattgatatgtgaatttatgtagcatttctttttaattgatctataatgagcagtagctcaacatattt

SEQ ID NO: 154169 - DNA, 219 bp, Arabidopsis thaliana landsberg; identical to SEQ ID NO: 76129

SEQ ID NO: 154170 - DNA, 385 bp, Arabidopsis thaliana landsberg
ttattgtaattaacgcacttttttattcatgaatgctaaagttacaaaacaataaaactggccaagagtccagtttggaacccaactaactttgtgttcaccatgtgatgtctctcgggaacattaagtatactttaataaagacagttttaagtttttttttaaaggatgaggatgatgaatgcaagacttttatagggtcaagctttccgatttgaaggaaccacagacacatggagtattcctttccattctttgccggggttcactgtgattggtttagcgacagccgcgctttccaccgttacaaaatgcttataatcttcaactcccaaatcggatactttcttgtcccatggattccacaccactgcacattaaaatt

SEQ ID NO: 154171 - DNA, 667 bp, Arabidopsis thaliana landsberg; identical to SEQ ID NO: 40562

SEQ ID NO: 154172 - DNA, 109 bp, Arabidopsis thaliana landsberg
gatatgagaatggcatgtgcgtgaatgtggcctactttgttttcttccttctaatttgggaacaaagtttgggtggcctatttattgggtacttgtaagtttcactctt

SEQ ID NO: 154173 - DNA, 213 bp, Arabidopsis thaliana landsberg
tcctctgcttcttaacaactgtgttcttcttcagaataatcattgtaactttattcaatacaattaattgcaaacaataggattactgataggtgtttatgtggaacttcaagcctttgcataagggaggaccaatgaggcaatttgactaagaagctgtcgtggagacttggaggtatcaggtaatggagatgtccattcttgaaagttatg

SEQ ID NO: 154174 - DNA, 220 bp, Arabidopsis thaliana landsberg
aacttttgtttataattgcaggttggaatgggatacttgctcaaggacaaggacaatatgagagtgaagcaccaagttttgctcctacaaatcaatatatgtctaagtaaacatttgattttagttgacttccttatttgttaaaacattatttgtggaccattgtacaatgaaagtgtgctatattaaaatttgcaatgcaagtgtgagattgataata

SEQ ID NO: 154175 - DNA, 110 bp, Arabidopsis thaliana landsberg
tgcactcagatgaggtttacaaaaagtgtatattcttgggttgtactctttttggactatacaaagctctagtgaagagtttgcttctattccgaatctccttctgaagg

SEQ ID NO: 154176 - DNA, 514 bp, Arabidopsis thaliana landsberg
ttcatgtagaatctgatcatggtatatattctcttggccaatttggggctcctgttttgtgtctatatacagagctaatgtcagtaacaaggttttaatagtggagcactaaaaatgtttggaaaatagtcttggcttcctgtagaatctgatttatgtttggattttgtcaaattagaagccaaaaaatgttgaaaatagttttttctgcatatacaagaggtgatacttactgtgtgaggattggaaaataaaagtattgatgctttttgaaattatatatcaccaatggtgtttgtcttatactaagtggattagtgtctctcgatagccattgtgccatatatgtgagtaagaccaatgtcgctttcttgtttgttatttcttcatattttttggttttctgtattctatatttttaggtattttcactgagattatacaacaaatgcaagtgaaaggtgtgcaggttgaggaattgtattccttggacttcaactctatggatgcttta

SEQ ID NO: 154177 - DNA, 914 bp, Arabidopsis thaliana landsberg
  unsure (1)..(914): unsure at all n locations
gaggacctgtagttggattcgtctattgggcacctgaatatcactttgtgatgttcttcaaccgcctgaggcttcaagcctagttgtattctgctctacaatcgaggaagggttttcttctggctgtaaccattgtgtacgtatactcctagatacacagtagatatgaagtcggtactgagaaaggtataactgaaatggtttaattatatgcagattcatgagatcggttgtgcctaagataagattacttcaagttcaggtctttctggaccagtatagagatccacggtctcgctttttcttctggagcttggataaaggtacctaaattgggggaagatttaacacgccagagagtctttgatcagaaaggaaacttagattgtaaagcttgacaagtttatagatatatatatatatatatatgtaaattaatgtatgtttctctgagattgctgctatattgggtagaaacgtggtaagagctgttgttgtatttcctttgtgtattttcagtttatatggcagaaaaagagaagaaatctttcttgttaatagtgactttgttactacatgcaacaacttaaaaatatagctcaagcaatgtgatcatgacaatagagaagcaaaggaatcattgatcttcaagtttatcatttcattacactcaatagtataaagattaaaagcagaaatgggaacttaggaggaggctgnnnnnnnnnnnnnnnnnngcggtggcggtggtgttggtcggagagtgatctcaaccttatcgtgaacgccttgaagcaaaagttcaccttcaaatgcgactattttgcgtttcttggcagctctcagagtcccaaccaatgcttcaaagatgttggcacatcgatcgtcattgaacaacactccaaacgtcacct

SEQ ID NO: 154178 - DNA, 374 bp, Arabidopsis thaliana landsberg
ggaaagaaaagcctttcaatcgtgcaaaggaatcagggattccttggatggtgatggtagccgcaaaaacacctcagtgcaagttttgtgacattaaagaagctcgagaaggcaagtgaagacaaagaagatcccacatgtactagagatcgtttcgtgcaagaattgaagaaactactctgagtcgttgaaaagaaatgaaaggtacacacactcactcctggttcgatgcccagacaaaaggaatcacagtgttttgcattcttttttgctgttttccttggtttgtttgataatggtgttttgcatgactcatgattgtggagacaagaacttagagattttgatgttgatgaagttttccgtatttaact

SEQ ID NO: 154179 - DNA, 691 bp, Arabidopsis thaliana landsberg
atatatagaggtctatgacttgggaagaagaacacaacacaactcaccacaaacacaatctaatccaaaaaatcaaaagatgaatgccacaaagtttcttgtgcttctcgtgattggcgttttgtgtgccattgtcaccgcaaggcaggtcaaagatttgtccacggagaccaaattaggggcctctcttccaaaaactactaccaaaggcattggagctcagctttctgcaactgccacaacttacagcaccagcagtgtcgttagctatgctaatggttttaacaatcccaaaggtccaggggccaattcattcgaaagtgccaacacatttaccagcggacaagtcactgccaagggtcgcaaggcaagagtttcttctgcaagtgcttccgccgctgaaggcgatgctgcagctgcagtgactcgcaaagctgctgctgcacgtgcaaagggtaaggtagcttccgcatcaagggtcaagggttcctctgagaagaagaagggcaaaggaaaaaaggattgagcgtgaggtgatctcatattctcatgcatgcgtattcctcaaacctacaaactcacaatctctttcttgttcataaataaaaccagagattgtcacctctaaatattattatgaaatgctactctttctcatgtaatggctttttaaaaataaaataaatgcaat

SEQ ID NO: 154180 - DNA, 446 bp, Arabidopsis thaliana landsberg
atgatccagaataacttagagcctgaaagagcctgcctttcttcttgaaccattgatcttagcagaggtacgaggatcagagaactcgtaatacatgtctgtgaagaaattgtcaacaatgtcaaggtacacaggacttctgatgcttgaatagcatcgaagcgcttcccttacatccaatgcgtgatccacgtctctcagatccaccatgttgagatctttcatcttttgtgccaacgcgtcacctcttttctttgcatcctcgaatggctcagcgactttcttcggtttctttttatgttggttgttgagactcttctggtgtgttgtatctgccacagccgtgtcacaacagataacggtgtagctttctttggtttgggtttgggaatcttctggacagcggcggctgcaggagtaagggctcaagagaggagtgtcgttag

SEQ ID NO: 154181 - DNA, 159 bp, Arabidopsis thaliana landsberg
  unsure (1)..(159): unsure at all n locations
ctcaacccaaattacctcctcacaacataaatagcacagaaccnctgtcctctgaagcaatcataattccaccacctgaagaagattctgtgatagcagcagcgccatctgaagcaccagggcctagtctagagggaatcactggtacaacaaagtcaa

SEQ ID NO: 154182 - DNA, 615 bp, Arabidopsis thaliana landsberg; identical to SEQ ID NO: 63662

SEQ ID NO: 154183 - DNA, 313 bp, Arabidopsis thaliana landsberg
tcatatattatctagttggtgagaatattaagaagtgaaactctggtctgaatcagtcgccggaaaatacactccaactcgatctcaagctcctcaacagtgatctctgcagcctccaaccttgtacttgcgctccgcatcgctacttcgtcccacgcatcatcaaagcagcaaaactgcatcgtaaagatcgaagaaaatgaccctatgctcggttttctctcgagccaaggaacacaaccaagtgagaacaaagactcaaccatagtcacaacggctcttctcacttctttcaaaacttctgtgacaaaca

SEQ ID NO: 154184 - DNA, 124 bp, Arabidopsis thaliana landsberg
gacgtgggatgtgaaagctccagtggctcatgactttgtctccgttacccatgggccgataatattagtatagataatatatctaggggttaagtagtttggtgccctgggttctgtcttctcc

SEQ ID NO: 154185 - DNA, 256 bp, Arabidopsis thaliana landsberg
ggttggaggaatcaaaagactttgttaagggattgacgaaagatgcacggcagcatcttcaagggtttagttctgaaaaggttgctcctttagtagctcttacgacttttattgctaatagaaataagtgattatatatttgttttgtctgtgtgtgttgggtttatgtatacatgctaaagtagtgtgttcccttatttttaagtgtaacctcattttaagatgtttattaatgaatatttaaaaatgtacataa

SEQ ID NO: 154186 - DNA, 412 bp, Arabidopsis thaliana landsberg
atcctggaaggctctaagctgtgttgtaggcttcttagcattcatttctgtttgctagtatgtgaattagcttatatctgtgtacattatatattagtagctatctgaagtagtaccgatctgtctttgtttgtactttgtagtgaactctatgtaacccaaactactttttttttcctgcagcatttagtttttgctagattgctcctgttcaagttgaaagatttgttgtttgagataacttcaactgaaacttttgaagtaaggagtatttcatggtggcttgtcagagttttactgattcatcaaagagttctacaagagcgatcttcatctttgtttgaaatgttgcaagtttacatggccgaagctatagaccattttggagaactggaaaaagtaaaagctcctg

SEQ ID NO: 154187 - DNA, 132 bp, Arabidopsis thaliana landsberg
caacagtctcagattagagaaactgatgattgaattaagcttacaagatctggtttcggtttactttttgttggtttgtttacgttaccattgtttagggtgatatgcccatttataacagtaataaagatg

SEQ ID NO: 154188 - DNA, 225 bp, Arabidopsis thaliana landsberg
agcaatgacactcgagtgctatcaaacccctaaacactttctcactctcacattcgatttcacggatcttattctccatttccatcatcttcttcatcaaactctttacttcttcgttcttcttcttgcttaaaccaatcaagcttttctcttcaacttgcttcaactccacgattccttcgtctagtttctcctttttttcggatcgtttcaaaaaccctataa

SEQ ID NO: 154189 - DNA, 278 bp, Arabidopsis thaliana landsberg
ttagctgaccttagaccctctcttaggaccaatcggtggtggcttgggtttggtggcagtagctccatccggagcagcggcagctgccggagaatcttttgaagaagaggaagccggagcaggatcttcggctgccctgactacgagcctagaaccggcgtttctcatcggcaagaaagacacggagctcctggacgacgaagcgccggcgaccgaggtgacattggccggtagaacaaataccgtagatgctgtcgtcatcgccatctctggttttc

SEQ ID NO: 154190 - DNA, 117 bp, Arabidopsis thaliana landsberg; identical to SEQ ID NO: 78073

SEQ ID NO: 154191 - DNA, 646 bp, Arabidopsis thaliana landsberg
tatgaaatttctccatatatttgactgaagaaaacacaaaaacatctatggaaaaagaatttgcatctaaaatattcttgcaacaacaacaaacaaaaaaaagagaagcagaagaaacagtaaagtagcaagtacaggcaaacaaatttgctttgcatttgtgagtgtcatataatttacctatacgtgtccacaatctcatgagagctgagcctatcctctccttgtgttcctctagttctgtggtttggtttccactggcgttctgcgaatatcaaacttgtctacaaactccaaaggagtgactgtctcatttctgatcctcttaatcttggggctcaacaatcccctatggctaaaaccatacagcttgagcacttgattgtctgcaaaattaaaggccctctccatactcttcaagcacctctggactgcataatcagcatagctaccacacggtttacacccaacgaaatgggtcacaaatggccatctctcatcacccaatcccgggtgatacttctctatcatctcctcatacctatcaaccaaaccttcccaaaacccgtgcaaatagtattgattctccacaaacactttctccatccatgtatctttctgagaaagcaggagatagatcaatgct

SEQ ID NO: 154192 - DNA, 289 bp, Arabidopsis thaliana landsberg
gagttcctatgtgagaagtataaggtcatctcagtaggtaggctctggctcttcgagataccgaacgccgctaacatgtccagccagcctggtgaccggttttgctagagtgcgccaaatattcgttcttcgctacttcttttaattggagcgccgcatagttcgatgtgagtttaaaaatcgttattaaaatataaactatatccagaggcttctcattaaaataaattatgcattcgatcgttattactctttgtttcataatgttttaagaggcctagcttcatac

SEQ ID NO: 154193 - DNA, 352 bp, Arabidopsis thaliana landsberg
ataattgcaaatccagtatcaatttaaaactatgaaaaaaagatttataagcaacatatacaaaaaaaaaacggtgctaaaaatcagggagaaacaagaaccggatcggtttgtttccaaatgttacagaagaagaagcagctggcaagcgcgggaaacttacttaccgatgaagagaagtgtttattcttctttacgtggttttggttttgaaggttttgcaggaacaacgtaactgaggagaatcaatccaacaggtatgatcgttcctatgtaatatacgcttccgtaggcggtgagtgtttctgcaagcttaacacctgagagtttgcgattgttaaaaggggtttat

SEQ ID NO: 154194 - DNA, 229 bp, Arabidopsis thaliana landsberg
agttgatgaacaacccaacccaatagaatagaataaaccttcttcttactgttcaacattcaaataaaaaagagatctttttttcctcatttctgtgttggtgggcatcttttgacaaacaagagaaagagagagataaagattaaattttgtttatctatcgatgaccgacaaagccattagttctctgaattgggcaaaggcaaagaaaaagtgagagagaaatggg

SEQ ID NO: 154195 - DNA, 528 bp, Arabidopsis thaliana landsberg
catttaaatcaacttcagtttctttttatatccacttactagaaaagtgtttgaccaattaaaagattgatacatagtaataactaataagagaatcagagatccaaatgaatttagtcatctataagaaagcagaaatttcatgtcattatatagaaccatgatacataaactcaacaaaacaaacaattcttctgcagcaaaaagaaacaatcaccaaacacttaaataagaaaaagattaaatctgtctccctctctttttcactctgtgtttgcttggaggaaatttcatgaactagagccgagcaagctgctggatatcataaggatgagcatcagaagcagattctctctgaaaagatcgactaccgatgacaacattcgcagcttctcctggatgaaacgcgtcccagaacacatactcgtccctgttaagacatggagcttgacccggaagacaagttatctgtccattgttcctcccaactccacaacatcccgcgtttgtcaccctaaaccctgaacc

SEQ ID NO: 154196 - DNA, 389 bp, Arabidopsis thaliana landsberg
aatctctcaaagtttatgaagatccaatagagaccaaccaaaaaataaaacaagttgaagctgaacaggactctagccacatccattcttataccagacttagatacgaatgatcagtaaataactcctatcatccaaccaaactgtatcttttggttggagtaattagagatcttacttgatttaatttagaagaatgataatttagagaggcacagggtaacggttgatgcaatccacccaaggattgttcctggttggcttcttcaccttcctcattgccttccacaccacactgttacacttaaaaccagaaccgaaagcgatctgccaaaccctatcgcctctacgaacactttccttggcctccatgtaagccaactcatacc

SEQ ID NO: 154197 - DNA, 307 bp, Arabidopsis thaliana landsberg
tccatgctatccagtctagtatctcaaaactcgtaagcgttgaaacttttcatctgtcgatggtatgttccgttctcacctaaacatgtttaatcatcaacactttgcacccacatggaaattatacgtgcactgtaggaataaaggggaagatttagggcttcataagatagaatatcgagaacaaatagatttcaggtttcgtgtcaatctacgcagaccaacaacatacacttgtaaattctcgtggccaggaaatgaaaagacgttcgatatttttagagcggatagagacgatagttcaaaa

SEQ ID NO: 154198 - DNA, 547 bp, Arabidopsis thaliana landsberg
atttaagtacaaaagcagccgagggagagattattcgtcatcatcaattgtattttcatttgttttcaccagaaaacacactagtgtcagccatccaacagatacctcaagctacagaaagcttagggcgaaagactaaaacaccttctcttctccaatgggaccaccggctagtcccctctgtccattgccatgaaacataccaccaccgcagataaataatcaaatgagttccgccccaaagcctccatcaccagctctcgcgcacatcttgggggatcgtagtggcggtttaagccacgcctaacaatgctaaccgctttttggctcgtcaagacatcccaaatcccatcgcacccaatcacaagaaactcatcgtcttcaggcagagttatctgcttgatttctggttccgagatcagtggagattgagagccgtgtggcagttttaaatcccagtcgcccagagctcgggttacagctaggacttcatttaggtaaccgtcattagtgatgaaaccgccggattcctccactcttcttctct

SEQ ID NO: 154199 - DNA, 313 bp, Arabidopsis thaliana landsberg
caggaggggacgaattatagtaatttgttccaacccgaggcataaacaaagacaaggataatcttactaaaggaactaaagtaaaagaaaaggcacttccaaagagttggaaaaaagggtctattttgacctgaaatggatatatccatatatttcttgtgaaatgaaaaaaaatggcaaaacctatattaagaattggttcgcgtaaaaatacacgtagtggtttcacgtaaaaatgtacgtagaataccaaagggagttattcatgttcaagcaagtatcttttatataccatagtaaccgttacagatgt

SEQ ID NO: 154200 - DNA, 68 bp, Arabidopsis thaliana landsberg
gtatctcaagatttttcacttcacgcatattattgctccaatacaaaaataaaaaaacctttaacatg

SEQ ID NO: 154201 - DNA, 531 bp, Arabidopsis thaliana landsberg
  unsure (1)..(531): unsure at all n locations
gaagaagcctacggttgttctgttcctttcgatctcaccaaattttcatcttcaccttcaattttgatagattctcttcaccgaaccaaatccgtaaccctagcttcttcttaaattgtagagaaaaagagttaattcgaatctggatgaaattggttttgtctagatggaaatctagatgtgtctgattccgaaatctgagtctgagagatgctaggagcgattcatttgggagtattagcagcttgtttcgtcctcttcgttcccatggcaatggctggttggcatctgagcaggaacaagatgctcttctttagtggcgctttgtttatttctctcgcggtttgtgttcatctcacgccttatttcccttccgtttccgacatcgttgcctctgtttcctctgttgttgtctacgatcatcgtatctcttgtatcaacgaggttaatcagattgtctgggatgttaaaccggtaccgaatccggagnnnnnnnnnnnnnnnnntggctcaacaaagcttgattatttc

SEQ ID NO: 154202 - DNA, 400 bp, Arabidopsis thaliana landsberg
accatagagtttgttatcggagacgttgaattgattaagcttgagcctcaacagctccgccggaatctcaccggtgagttggttgttagagagatccaggtagtttaaaaccggtaaatcaccgagttccggtggtatcccgcctcgtaaacggttgttggagagatttaattcggttaactcggtgcacgaactcactgaactcggaatctcgccgtcgagcatgttctcctgcatctctactctctctagattcttcaatttgttgatgcaagacggaattgatcctaagaaactgttgcggctaagatcgatgactctgagatcacggagatcacaaagtttgacgggaatcacaccggagaagttgttagcggagatttcaagctgagatagatga

SEQ ID NO: 154203 - DNA, 178 bp, Arabidopsis thaliana landsberg
  unsure (1)..(178): unsure at all n locations
tcattgtgataaatactcattgtttgtgattaatgaaagcaagcangtcaatatctaattctacagataacattttacagcttgagaagcagtgtgttcttgcggtttaaatcgctattctgtgagttatatcaatgttttgattagaatcttccgaggagatagtttaatctttcta

SEQ ID NO: 154204 - DNA, 71 bp, Arabidopsis thaliana landsberg
catcagttagtttcttcgatgatctcttcttcctcatccactttcttagccccttcaaattttaatctcag

SEQ ID NO: 154205 - DNA, 197 bp, Arabidopsis thaliana landsberg
accaaaaccaagcacgagcaccaccacaagcatcttcacctccgccacaaagctactatggggaccatctcttcctccaggtctacttatctccaccgctcgaacagcttggacaaccgggtggcagctcatgatgacccaactcgctccatccgattcatccgggtcatacccccgacccatttcaaaatttcgtc

SEQ ID NO: 154206 - DNA, 666 bp, Arabidopsis thaliana landsberg
gagcgacaaatatttctgaaaacatatatgagttattcaggtgattattttatcacactttcttgctatgagcttcagcaataaatcactgtacagccataattctctatttgtatttgttcttgtgagtccaggtgaaaagcccagcgatactatggtcaaaaaactcctagaagacgttgagaaatatacacttgctagtcatctaatttggggtttatggggaattatatcggtaatttctacaatactcttctatcatacctgcattttgtgaaccatatatagattctcgattttcattttgtaaatctttacaggaacatgtaaatgaaatcgactttgactacatggagtacgcaagacaaaggttcgaacagtattggttaacaaagccgaggctccttgaggcttcggaacacaagtaaatttctatggaccaaacccaagaagagtatttttacggtggtaaagaggtatatatacacacaaaaaggtgcctggttacaatggtatttaccagcttcaaaaaataagaaaatgtaacgttttctgttttaccctttttacaaggcaaaatggaatggtcagtagtttatcatcaacagttgaatttgtttcagataaaatgtagttctcgcaaagaaatcgttttaatttgtcgat

SEQ ID NO: 154207 - DNA, 393 bp, Arabidopsis thaliana landsberg
accaccagcttttagataagcttaaccaagtctccgacaacaatgatcttgttattcaagagaactcgagtcttaaagaagaaaacttggagcttcgtcaggttatcacatccatgaagaagcttggaggaggcatacatgacaaatattcttctccgtcgtctatggatgaattggatcaagacttctcttctatcacagatgatccaagaactcatcatccatcatgagttgttctgatcgagaaaaacattacttcaagtttctgcctctaatcttatctattttctttctttggtatcactttttaaaccgtttaactacgtaccaaagtttgggttttatttgtttttctgttgttttgtcagaagataattaaatgatggatatttg

SEQ ID NO: 154208 - DNA, 528 bp, Arabidopsis thaliana landsberg
ttaagtccatcagaagcagactgaatcatatctttaaccaccagaggtactttagccttggagttaacaactaccggctccaaagaaagcttttttggtggcacaatgctcttagcttcacgacccttcttatcttttgcttgtggggcaacaatagacaactcaaagttcttctccaccggcttaactcgaactttagcagatctccgcacaagcagatgcaaaaccgagtcatcgattctacaaatgtcattaataagactctggtcttccaacttctcaccttcgtaaagaatctcctgttcatcaggatcaacaaagcctccacgctttttcgaaatctgcttcttcacatacccaatgtttctccctctctcgacatgaaacctgcagcgtttcccacaggtagtcttaacatcaagaacctgaagatcagagagcttaagaaccaagtggagaatgttgccttcactaacaccataatcacgcatattagaattgcttctagctagctctcgaccaccgaaa

SEQ ID NO: 154209 - DNA, 562 bp, Arabidopsis thaliana landsberg
cctgtcatataataagtacacttaaaatggcttatggactatattacagatcttgagtttgtacataaaatcattcgtatacgtaacatacaaggctgagacaatctattgtgacaacccggagaagaaggacacaccggtggatggcaaccacgaagaaccagaaatgaactgagccaccgtaaacttactagcctctaccgttgaggtaataacatgataaccaggccatttgactcgttgaccaattcctgaacccaaccctttgttcatatactcaccatagtacaacgagtccaatgcaaacggaccattccactccaaccatcctcgcgggtcaatatggtcacccatatccgacatcatgtacacaactctagaatacaacttccacggacggccgagatacgtcggataactacccttagaggcttcaagatccggtgttgctagtagcttacaagcatgaatcgaaatccccgtattctgattcggatcttttcggttctgagccgtaatagtaatcttctgctgagccattggtttacgcgcataaatgtta

SEQ ID NO: 154210 - DNA, 413 bp, Arabidopsis thaliana landsberg
tgcaataaagggaacataaaaccaacatgaggattctaactgaaatgttttcttatgtatatcgaaattcgtgaacaaaggtgataggtatctgtttgtcacctaacatagtcggtatcagaatcttcttcttcgtcttcttcttcttcttcttcaccttgctcaatggtctttacgtcaaggttgagagccaaatcctcaactgagaccttaatgacgtcgcttctaacaccaatatcggtagcatagcgactcatacagtacataccagcagtaactgttgccacaccaatgggacttggaataagcaatttgaaaggagaagagaggagtgcagccaaaggagcaccaacaattgaagaagcttgaccgcttctccctacaccgagcttatccattataagcaaaccggt

SEQ ID NO: 154211 - DNA, 580 bp, Arabidopsis thaliana landsberg
aaatttccaaataatacgaagcaaattatataatccaataccatagattaaaagatctctgattccaaaatccaacaaagctgagttcaataacatgaaataaattaaaaagagactgaattgaaaaaaaaaactaagcagtgagaacaacagcaccaccagcttccttaatcttcttctcagcagtcttagagataagcttagccttcacaacgaaaggtttgttctcaggcaaatgacctttccccaaaaccttgaagaaaccatgctgcgtcacatcgatcaacggaacattgtccttggttgatttcgccttcacatcttcagggacgagtgaccaaagcttgtccaggttcacgattgggcaaaagaacttgttcctcagcttgtggaaatacctcataccaactttcccgaagtaacctggatggtacttgtcgaagaggatcctgtggtgatgcatacctccagcgttaccacgacctccgggatgcttacggtgcttaccgatacgtccatgaccggcgctgacgtgacctctcttctttctgttcttcttcaacgccgtcgccattttagt

SEQ ID NO: 154212 - DNA, 240 bp, Arabidopsis thaliana landsberg
taaacgtcatttcatatatattttttcaaaagcataaacttttaagtttgagatttatataatttttaacagataatatgtatttttagtatatataagaaaattagggagagaggtttggtgtagctaaagtgaaatcaagattgggagtttcagtctctggtcttgtccctgtaaggcttgacgaatctgacgacaaccgttcgttgcttggacatcttcgattcttccattcattct

SEQ ID NO: 154213 - DNA, 144 bp, Arabidopsis thaliana landsberg
attaatgtccgtactgtatagcacgggttatgatctagtttttgtgtataaatcaatgtatactatctgaatcattctatagcagctttggtgtaatattgatgatatatatactatatatttgaaagttagatttttcatata

SEQ ID NO: 154214 - DNA, 313 bp, Arabidopsis thaliana landsberg
caatcaaatcaaagagacgagaaaccgacctttccaagagtataagcaagagcagaaccagcaacaccagctccaacaacaatgacatcagcaacggtatctccggtaatattaacagatccgacgtcggaggtgacggtagaaacagttttccgatcgtgacggagaccgttccgcttcggtttgacgaagaatccatagaaagcaacgaaggagatgaggagagaagagatcaaaagaggtaagatccaattccataattgtgactccattatcgttctgcttttacagagatttttttgctttgtgcgga

SEQ ID NO: 154215 - DNA, 900 bp, Arabidopsis thaliana landsberg
atctcaactttttgtctcttcagttgaatttaggtacattagattacgacaatgcctgataagtatttgcacatgacatagtacagagtattattagtagtcacgtcaactacacagataaaggaaagcgaagagcttaaccttggacttcgactcatacaagcctagagactagagatcacacatagtcacatagatacaggtttctacagaatatgtgactcagcataacgatacagagatcacatatccatgtcggcaaagatctcttcatcctattcatatggaggactgtcagtgagaaatgcatcatttgccaggttactgcaacaaaacatttttcgagttggaagtactttttaagaagaagacagtgagagagaaagacaacttggtaggatgacaatcatctaacctcgtgcaggagaaacgaaaacccgcaacgcgcttcagttttcggttgtagaataagaaacagaaagaccatctggatgtgaaccaaaagaaaaagaaagcagccttttagttgacagtcaggctaggatctctgaataggcgtttagaaaaaagaaagttgttgtaactcacattgctccttcctcgaggaaaggatcagcattaggatttggattgtaaacatatatctcacattcagctacttttacgacctgtatcacatttgcatgatttagttctttccattacacttgcccaggttctaagattccttattacagggaacttacctcatcaagagccttgtagatcacctcaagaagggaaccatcctcattcctctcagtccattcctatagagtaattagaagaatacatatattctacataagcttatgtgcatcacaatccattacattatcgtccttaaagaaacttatggaa

SEQ ID NO: 154216 - DNA, 628 bp, Arabidopsis thaliana landsberg
  unsure (1)..(628): unsure at all n locations
aaatctttagtgtaaatctcgggggttattgcagggggattttgttagttctgcagtggatttccttcacaggattggtcgancagctagagctgggcaatatggaactgtgaccagtctatacaccgaggctaactgtgatttagtagaggcaatccgtgaagcagtgaagatgggtcagccagtggtataaattctatcaaagatcttaatgtagtttaatccgctgcatactcaagcgcaatattattagctcatgaacattagcatattccttctgatgattcattcttgtgttatgttgtatgaaatattcaggaaactgcattcagcaggaagagaggttttaggaacaaggttaagaagagaggtaagtaaactaagaatccatagatgcaaaacaatgagaaagatagagaagctaattgtttttaatgtttcagcttttttgaaagctgaagaagcagaggagcctcaagctgtgagatattaagttctgttgttgtttttacaattccatagctttgttgtatatagaagtacgcaaaatcgaataatcactatttgttattttcttgtaccaaattttttgatatgagataatacaatctggtttatgccgagaatc

SEQ ID NO: 154217 - DNA, 105 bp, Arabidopsis thaliana landsberg
gaacttgatctgctgggtaaggaccacgatcacgaagtgttcgataagcttcgatcacaaacattgcctcgtttgagttcttcccagataaaccgtattgtcgat

SEQ ID NO: 154218 - DNA, 463 bp, Arabidopsis thaliana landsberg
ttaatactctcatcaaccaaaacttttacatacacccctgaacccaccatccatctaaacaacgcagggtagtttgtcattacttgcgacggaagctacccgaatatagaatcgtatgttatcgatcaccggtttccgccaatgtcttctgataattcttcaaccaaatcctcaaaaatctcaaactcgatatccaaaaccgtctctgagacatctgcgtcgttctttgagctccataatcccaatctctctgttctgaaatcatgttcgaccatcatatcgattgtgtttgactccacatctctccaagatctcaatctctcgcatacccttttggctacaatcgcggcttcagcttcaccgtcgatgtcgcttggcaattcctctgctgcaaggtctgagatcaatgcttctacgccttccggaacttctaccatctcttcaaagtatgttttaagaactc

SEQ ID NO: 154219 - DNA, 223 bp, Arabidopsis thaliana landsberg
tcttcttcacaggatcagcaatgaatatagcttcgaggattcgacgaagttttttaagagagaagaaggaatcttcagatgggaatagcttgaagaatggatcgagtgttaagaaagaaggtaaagatgagattttgggagttactgatgagttaatcgatcacgtcagatccttcaccattgatacgtttaagaacttctctctggaaggtaattacgaaaa

SEQ ID NO: 154220 - DNA, 73 bp, Arabidopsis thaliana landsberg
gtggatgtggaggcattggtgattcaagggccaaagctagcaacagtgttaagccaagtaaagaaacttgaag

SEQ ID NO: 154221 - DNA, 494 bp, Arabidopsis thaliana landsberg
ttgtttcataaaaatagttgtctatatttaatttcggtaatctattgtgcaaacatcggctaaatagtaattacacaggttcttttaagttataacagatcgaaacttacttcataatgtgaagtgaggagataattcaagagttactaagtgtctcttagcgcccatgcgagacaaatggttctgtaaacgtcaatgtagccaccgaacagggctctgcaagggactcatctgcttcaccgaagccttcaatggctccaacgttctccctagctttcacaatgtcaaacaagttgtttggtagctgagccacaccgtccaagaactggatgacgctcgacatgcttggtctgacggctgcaaccggatgcaaacagtcctagccgagctttagaaccagtgctacttgctcctcaaggtacttatcatcctgctttaccctctcatcaaccacttgcaatatgtcatctttcccaaaaatttagcaccccaat

SEQ ID NO: 154222 - DNA, 342 bp, Arabidopsis thaliana landsberg
aaggtctggatcaagctgaaacagcgtcgtggaggaaggagaaagaggatccgaaggagattgttatttcggctgatagggtgaagaatagaaggaagaaagaagatgatcaagcacaagtataggaaactcaggaaacagcttggtcgcaagtcatagattttttttactattccggtgagaagtttgctcctttcatgtcttctgaattactgggattcaaaggatgaaccttttttattgaatcagaacaacaaatttctaaattccattgcattgtcattagtctgtgttcatcgtttgtcttgacaacacatttctaataaaacgtttgctcaattc

SEQ ID NO: 154223 - DNA, 386 bp, Arabidopsis thaliana landsberg
cgtgaatgatactttattatgaagtctaaaattttagcccgagtaatgtatcgagaagctctattgctgaagactcgctaataaacaaaagaccactattctagctaggaaactgtaagacatcatttccttgattgtgtatagagaagttaaggctcgtccatgagaggaccacctattttatttatcctttctcggaagtcctcaaatagaactctagtatgaaaacagttactaactactagcttcatttgttgccttataatagtaaactgacatgttttggcctttgtatgacaattacattgtgtgatttgtgaagtcgtagagtttgatcctcccatagagagatatgatttcgtcaatcttgagatatgatttattga

SEQ ID NO: 154224 - DNA, 436 bp, Arabidopsis thaliana landsberg
ttcgtccccatctccgtttctgatactttaattaatactcattgaaaaaaatcaattcgaactaaaaaaaatctcgaaagtctttgcgcgtaattttcttctttattttgttctcactgattattttgcattagctcttttcttttttggggtcgaaaaaattaggtttttttttgggattctgttgatggcgacgacgacgacgacgcaggggcagcaaacggcgattgactcggcggttctcgatgatataatcaggcgactcacggaggtccggttagctagaccaggaaagcaagtccagctctctgaagctgagatcaaacaactctgtactacagctagagatattttccttcagcaacccaatttgcttgagcttgaggctcccatcaaaatctgtggtatcttcccaatttgattcgttgattttaat

SEQ ID NO: 154225 - DNA, 268 bp, Arabidopsis thaliana landsberg; identical to SEQ ID NO: 7533

SEQ ID NO: 154226 - DNA, 283 bp, Arabidopsis thaliana landsberg
gatttaatgtgacgtactaagaatgtataacttttaattaccccacacgcttacaaaaactaaacatatccgttaggtccttgacctgatttgcgctttgagagaatttttcataacgaccgtgaaggcgtacgtctcagtcgggtcgggtggagaatccggaaccgggatccatttaaacgaatggatcatccttgcaagcatcaagttgatgtgcagaatccctaaagaccaagccgggcagatcctacgacccgcaccaaaaggcaacattgtaacacca

SEQ ID NO: 154227 - DNA, 318 bp, Arabidopsis thaliana landsberg
tgaagtctaagtaacaaaaaagtttgtctgagtctctttggataattttaaagaagaagaagaagaagaagaagtagagggaggagaagatgaataaagatttttattgttcaatggaattagatttgtgtttccttatcttatgggtcttatcaaatgatcttgacccttgattcctgggagaaccttctcatatatctgtactgtgaaagttaatttatttatctaacctcctccaatgctttgattgttctcttctcttctctctgctcatatttttaattttattaatgaaaaattgcacattatttttcaaaa

SEQ ID NO: 154228 - DNA, 381 bp, Arabidopsis thaliana landsberg
ttaaaccatatttctccgatcaaacatggcgtccgtatctccatctccgtcgtgttccactatacccataccacttcgacgaacatctttcgccgttgctgagttgagacgattaaaacaaagaagagcgatcccacctgtgtccgtcggtctcggacacttcgctgatgttgtacgcaatgacggtgatttcctgaagaacaaaatcggtatcggactccgttgggctaacgaggcttttcgtgtaccggaagtgactaaatccgctgaggaactgttttggcttaagcatcttgaggatcatacttctcagaatttgaagtcacaatcttggcctcagccttcctactcaggtgttcgttttcgttttcggtgatcatg

SEQ ID NO: 154229 - DNA, 221 bp, Arabidopsis thaliana landsberg
cttttatttccttaaagccacatgtatacatatgttttgttgtttacgttaatgaagccagccatgacttgacacaaatatttagcaaactacattactttgtttagtgagatataaggtttgtttatgtgctaagaaaatgttatttattggctttatgtagtttaaatcagttgcttttgtatcaagtttgtaataagaaggttgggttaatccaacaa

SEQ ID NO: 154230 - DNA, 195 bp, Arabidopsis thaliana landsberg
aaattgaacgacacagacacatttatagaaacatgattacacatgcgctaacaactttaatatttactgagccaaagcacttgtgttgtacacaagaagagcacctccggcaagaattccggcgagagttaccgcccaaattgccaatccggtgactcctcccttgtacacgtcaccactcgctgaccactcgtt

SEQ ID NO: 154231 - DNA, 200 bp, Arabidopsis thaliana landsberg
aaaatcgagtgaggtttgaattattgtaagtgaagctttttttggttcctattcttctttgtaacagatttgtttccaggaaaatggagagaaaaaaagagagaaagaacctatgcagatcattgtagagttacagacacgcgaacagagagatatgtttattgattggaaatagaaagagagaaaccaaaaaaggaaaa

SEQ ID NO: 154232 - DNA, 73 bp, Arabidopsis thaliana landsberg
aaagaccctctcgccgtcgagcgtgtgtggtgggtgttttgaaattgaaacgacttcttcttgtcaaagtaaa

SEQ ID NO: 154233 - DNA, 310 bp, Arabidopsis thaliana landsberg
acagaatacataaaatgaatacttttttcatgaaggacattatctaatatgtaatatccaatgttaaactcagaatactaaagattcgtataaacacacatcaaactccacaagttacagaccatgaaccgccttgaaaatccgaggaataaaactagacctaaacccgggtttacatttcgagcagcaagcaacacaatatcagtccctttccgattctcaaacgactcaaagcaaagctttttttttttaataaaaacaaaccgacttcttttgaccaacatgagattctatactttgatctcctggt

SEQ ID NO: 154234 - DNA, 419 bp, Arabidopsis thaliana landsberg
tcatagataatctcagagaggtttgtttgataataataatgacacaaaccatgtgataatatgccaaataaatgataaaaacacaaaaaaaacttgacaatacaaaaagactaaacacattaaactctcaattaaattataatgaacataaagctttgattatgaaatatatctaaaagatatacactctgttgtcttcgttttgggatcttctgtgaaaacttggtttagccattcaagaaatcaaaatctattggctggcttcttattggagggtaattggttactcgtctctcggttgctgcattctctgttggtttcactgctgttgtcgtaacagtttcaggcggcgctgttgtaataggttcaggtggcgctgttgtaacactttcaggcgttcttgttgtttggctagtatt

SEQ ID NO: 154235 - DNA, 72 bp, Arabidopsis thaliana landsberg
attttctccggcgagcggtgctgataacttcgtagctccgaaacgccgccatggccgcagaatttgatgtaa

SEQ ID NO: 154236 - DNA, 76 bp, Arabidopsis thaliana landsberg
agaattaacgaaagagattcaagatgtcgaagagagggtaagaaatcgtgagattggggctgttcagcctgttggt

SEQ ID NO: 154237 - DNA, 384 bp, Arabidopsis thaliana landsberg
tgtaaattgattaaataaatcaaaaccaattattagtctcgcaaatcttacgaattatgacactgaaatgttaactcacattgggagaagaagaagaaggcacaatttttgtcacaccatttgtctctaaatcttacactacaatccaacatctcagatgggttctgatttaaatctttttttacatttatagatccaaagaatactcaatatatggaccattgcctcactgtttacagacaacacaagttgttgatgcttgtgatgatcaggaccgcttcaacaagtactgcggagatgtatcatcagttggttcttggaggagctcacgggcaagtctcactggtctgtcctgtagatacgcaatgtcgctgtttggtgctg

SEQ ID NO: 154238 - DNA, 223 bp, Arabidopsis thaliana landsberg
tgctaacataattaacatgaaaacgatgacacaaacgtaaaaattgacacgaagtataagagagaaaacataaataaagcattacatgtaatacaaagcaaagtccactctctactcttagattattcatccaaaagatgaacacacagaaactgtcttcaagctttaacgaaaacgaaaaatcgtcaaaggattaaaacctcaagaagctctttatcccttt

SEQ ID NO: 154239 - DNA, 139 bp, Arabidopsis thaliana landsberg
gaaattctccgtcttcttcattcgtttttgactcttctctatacttgtcgtctcctatcatcgcaattcatcttcccccgtttggtgtgttaaaccggagaaatttggagtttcgccggaatcttcctctgtctattgt

SEQ ID NO: 154240 - DNA, 612 bp, Arabidopsis thaliana landsberg
acatagttggaacaattattcatcaggggattatacaaggccccaaaacacaaaccaccaaagttttacatgaaacgaaacattgaacttcttaagtataacagagacgagatttagaaaccaccacgaagacggaggaccaagtgaagggtagactccttctggatgttgtagtcggccaatgtacgtccatcctcaagctgctttccagcgaagatgagacgctgctggtccggagggataccttccttgtcgtggatgttagccttcacgttgtcaatggtgtcggagctctccacttcaagggttatggtcttgccggtcaaagtcttaacaaagatctgcatacctccacgcagacgcaacaccaagtgaagggtcgactccttctggatgttgtaatccgccaaagtacgaccatcctccaattgttttccggcaaagatcaacctctgctggtccggagggattccttccttatcctggatcttggccttcacgttgtcaatggtgtcagagctctccacttcaagagtgatggtcttcccggtcaaagtcttaacgaagatctgcatacctccacggagacgcaagaccaagtgaagggtagac

SEQ ID NO: 154241 - DNA, 503 bp, Arabidopsis thaliana landsberg
tggacatttatcgatacggcgattcttgttgcgtctcttgactatggtcaagaactgaaacgtcggagagataacatcgtcgagcgtctctacgctacgtcgatggctaacaagtgtagaaactgcgattttggcggcggtggtaacgttatggaggcggcgattggtagggttaataatgggagggttcacgaggagacggaggaggaagatgaagaaggagtaacagcagcagcagcagaagaagaagttagagagaaatctgttaatgttgaagacgatgacgacttcgatccctttgctggtttgtttgatgatgagcagaagagtattgttgaaatcaaggagaaacttgaagatcctgatgtggtttgcttaaaagtttttttcacttggatcttgatttgatgatttcagcccgaagccggaaacttgttttgtttgtggtttcagtataaaaaatctttggttgagttgcttcagaatctggaagatatggatat

SEQ ID NO: 154242 - DNA, 489 bp, Arabidopsis thaliana landsberg
caattatctaataattaattatggccaaatccaagttctagagttttttctagaaatatcatcatttccacctccttaaaagattctagaaattttctagaatcatcttccacctccttaaacataaaaatctagatactctaatagaataatctagataatttgaataatgtaatctagatcttatgtaagaactctctagacttaggattaaaatattttagatattttgtagtttggaggctataaatacctcctccccctctcaaatgttgcaatgttgtgaagttgtcttcaagtttaaagcaaagtaataaaagttctatttcctaaaaaactctctcaaaacacttaaacactttctccgttacctctaaaagaattttactctaacattgctcaatataacattttaagaaggaggtccacgatagtgcattaggctctatcttagcagtaatccaaatctctatcatagatgtatccaag

SEQ ID NO: 154243 - DNA, 85 bp, Arabidopsis thaliana landsberg
ggactgataattccagacacaagaactcagtcttttgagttaagctgatggagtctggctctgactgttgatcaatccgtactgt

SEQ ID NO: 154244 - DNA, 312 bp, Arabidopsis thaliana landsberg
atttgtttatgctttaaatttggtgagacagacgaaagaatgagcaataatccacaaggaggattttcatcttagtcgacaatatttcgttgaatccaggtaaaaagcattgccatgattttaattttttctttccttcaaaatagtattgtagggaataataactatcaaactgaattatgtgatcgaaaattttaactgtcgttaattgaggttgaagatgcatacaaattctgatcactgcatgttatttttgcaggttttttttggtttcattttaaaaagctttgtaataatacacatattacaggt

SEQ ID NO: 154245 - DNA, 87 bp, Arabidopsis thaliana landsberg
gataagtattatctctgttgtgtcttgtctttcctttggagtaatgtatacaaatttcattatttagtatgacagatattgttccgc

SEQ ID NO: 154246 - DNA, 199 bp, Arabidopsis thaliana landsberg
aggacacagaggagagacatttgaaaactacttcgttagagattgagggaatttataagaaaactgaggccgagcatcctagcattgtggtcacatatacacggcgtggtgtccttcagaaggaggtcattgcccaccccacagactttaggccaacaaatcccggaaacagcccaggcgttggacactctaacgggcg

SEQ ID NO: 154247 - DNA, 775 bp, Arabidopsis thaliana landsberg
taaaccatattaattctctttagctccatccttcattcaaaactcccaaaaacaactaaataaacaaaaggggcaccgtttacaaagaggtattaaacggcagcgtattttgcttaattatctctgaatccaattgaaaaataaaaacacaattacaataaccaaaaaaaacttttttttttgtttctctgttcttgatgaaaaagtttcaaagaagacaaacttcttgatcttcagcgataaccatacgactaagaggactaggtccaagcttcttcttcctcctcatctgatttctcttcctcacaatctccatttgatctctctttctattctccattatcgcttcttcttctgccaccacgaatctcctcatcaacgcgttttccctcaacgacttccctctaaatatcctcctccctgaatccacactcatcctggccgtcgccaccgccaccgccgtctccataggaagaggcttcgacggaggatagcttgaacttcttctcggcgggacgtgattccgaaaaacgtcgtcgtatggaccaatcggagcgcagaggcaaaccctagtgaacgaattcgcagctacctttagagacgagcattttctcagctggtgataaatttggttatgattggatgacttgctgttgacgctagggtttcgagacggacgaaaattctctggttgttgtgacgatgatttagggattgttctccaattcgttgcgaatctggcgaccgccatagctctctggtaccaaggttttct

SEQ ID NO: 154248 - DNA, 155 bp, Arabidopsis thaliana landsberg
tttgttgggattaaggtgaaccggatcttggttagcgattgatctctggttctcgttcttttttttctttgtcatgaacttttgttgtttcgtttaataatccaaagttgtataatctaagtttgggattaccaccctattgagtattgagtgat

SEQ ID NO: 154249 - DNA, 143 bp, Arabidopsis thaliana landsberg
gatcagtaggcaatgtgattgagacttcacaagacgtcgtcgtttcttgattcacggtggtcggagaattattattattcgacataaagaagcttaatgcttaaactaatgttacaatgtgtttttgtttgtgttctgttttt

SEQ ID NO: 154250 - DNA, 237 bp, Arabidopsis thaliana landsberg
aaatatctcaacattttctcgaactcttcggttccagctgctttagtgatgctatatgcttcttctttagagaggaataagccttgtgctaagagctctgttaagctggtcttgagtgattgtggcgctttaccgaagaatcagaagaactattgtttaccaatagtgttagagttttcgaaactgcttaggaaagtttgccctgatcagaagctatatgttacttgccggaacacc

SEQ ID NO: 154251 - DNA, 180 bp, Arabidopsis thaliana landsberg
cggttggaaacacgatctatgaataacagcaacgggaaaaggtccaataacgatctcaatctgcgacgggttaaataatcgatcaaagatgatttccattaataatctataattaatttcataatcaacccaaactatatatccttcaataaattaactagacttaatttaataaattaa

SEQ ID NO: 154252 - DNA, 209 bp, Arabidopsis thaliana landsberg
ttttaaaaggatcaaatgtttcttcttagacatgccaagactcaatatccaaccctagtatagttgatttctgattttggtatggtcataacatattattaaattacatgtttaaaaacccagatacagtatagtgtttttttgttctccctatataagtgttgatagaaaatttcttcattgtaataatattaactcttaattaaaaa

SEQ ID NO: 154253 - DNA, 84 bp, Arabidopsis thaliana landsberg
gaagcagaagtacactgtctcaatgggggagaaggatttgttctgacatttttttttcttttttttttccctttgctgttcaca

SEQ ID NO: 154254 - DNA, 658 bp, Arabidopsis thaliana landsberg
ccttacaacaccgaatataactttgaaaaaaaaaacaaatggcttcaaagaactcaacctctcttgctcttttctttgccctcaacatcctctttttcaccttaaccactgcaacaaattgcaactgcaagccaagtcctaaaccaaagccagtcccaagtcctaagcccaagccggtccaatgtcctcctccaccccgtccttcagtcccaagtcctaatcctaggccggtcacacctccacgcacccctggttcatccggaaacagctgtcctattgatgctctcaagctcggtgtatgtgcaaatgtcttaagcagtctactcaacatccagttgggacagccatcctctcaacaatgttgctcgctcatccaaggtttggttgacgtcgacgctgcgatttgtctatgcactgctctgagggctaacgttcttggtatcaaccttaacgttccgatatctctcagcgttcttctcaacgtttgtaacagaaagcttccatctggtttccaatgtgcttgagcaatatccattatgcatacgatgcgatgccagtgcacaatatcgtcttcgaaatttattatagtttgaataaatgcatgtaaggtatagtttatgtatcaatcttaatttgttaaagagaaaaaataaatgtg

SEQ ID NO: 154255 - DNA, 322 bp, Arabidopsis thaliana landsberg
cttcaacagtggctgaaacaatagagagagagcgatacaatggcgatgacacttatgaacagagcaatctctagtaccgaaaccgttggtgctttcagaatctcgcttaatctcctaaggaatttctctgcggcgccggcggcggcatctactccggcgagtgaaaaccctagctccgattcgaataaacctaaacgaagaaagaagaaaaacttaatcgaagtcgctcagttcttacctaattggggaatcgggtaccatatggctaaactcactggaatggaactcttatgaaacactaagacaatcctataaggttctc

SEQ ID NO: 154256 - DNA, 112 bp, Arabidopsis thaliana landsberg
ggggcaatactttcatattcatttaatttccagttccgagagtacatactcaaaagtaaaaatctaaatgtacaaaactcatggaggaatagaagactcctctagttgaaaa

SEQ ID NO: 154257 - DNA, 245 bp, Arabidopsis thaliana landsberg
tggagttctctacctcaaaacgtccggcgacgacagcgacggcggcggagtctgtacatttccgtcttctctgtccggcaacaagaactggtgcaataatcggaataggcggctcagtcattcgacactccaatctgtaaccggttcaaattccgcgtcatcgatgatattcacgttcgttcagaagagcgtgtagctgtgataatcgacctagtggatagaagaggacgaacgaatgtgtgtga

SEQ ID NO: 154258 - DNA, 152 bp, Arabidopsis thaliana landsberg
ttcacttacacgttgggctgagtaggctccatgattacagttcctgactcagaatcaatcttggcatcaagctttgaggtgcggattaggttcacaatccatctctcggcctcctcatagttcagattcaatttttcagcaagtaccctgac

SEQ ID NO: 154259 - DNA, 276 bp, Arabidopsis thaliana landsberg
agatgatagaatcaatcaacagagataatatctccgaagaaatttgttatttagagaatgacaagtgacttaacattacgtttccagataccaaaatacctaatcacgaactgttacatcaaatctaaagcagaaccagaacaaaatagagaacacacaaaaccaagtagaagcataacaagcgagagagagaacattcattggtaatcccaaacctaattaaaggaattaccatcctccaccaccaccgcttcctccgtaacctcctccttcacc

SEQ ID NO: 154260 - DNA, 426 bp, Arabidopsis thaliana landsberg
aagaatagtttttattgcttgatggaagtggagagaaagtatcgtaaagctgattagtactggagtagtgacaaacaaaggtgaatgtgggtttttgcttcttacaacttcaccaatctatatatatacttgttgagaacccacaagagatgaccctttctaaaaggttatcttggacccgaggggtaatcgttttcgataagggaattggaataggggatgagccagtcagtgccagcatgaggataggcttgatagttaaaatcatgtattggcatctcctccttttgccattcttcccatctctcagctaaaccatctccttccagcattctcactacttctgacatctttggacgttccattgcagaactttgagtgcagagcagagccatttgtatcagctgctccactttctgttccacg

SEQ ID NO: 154261 - DNA, 105 bp, Arabidopsis thaliana landsberg
gactaaggtgaatccatggcgtccaagattgtctcagccatagtatttgtgtttaacctcattgcctttggtttagccgttgctgctgaacaaagaagaagcact

SEQ ID NO: 154262 - DNA, 378 bp, Arabidopsis thaliana landsberg
tattgatctcgtaataaattttgcccaaatttatgtttcctaatttcacatgtacgtattactattaggtagtaattcttcttattacggaattcttcttcttatattttcattaaatccgagagtgtgcaacaacaatacatatatactcacgggccaaacatatgaattaatttgttattcatttttttattattaaaagatgaattaattatcttatcttataatactaaatcgaggaaagttctaaatttataatagactgataactaaataaaagttatgttgagaaaaaaaaaacaaatcatcgatattttattcaataggagaaatgaacaaattatttgcgatacaacaaaaagtaaacaacacaaaccc

SEQ ID NO: 154263 - DNA, 486 bp, Arabidopsis thaliana landsberg
cgagttcatcatcaggagaaactcttcaactcgtggggtattagtgagattctgaggcgagaaacttttcaagtgatgattagaaccagaggtagcagagacagtgaaccgagcagttaaaagatctgcccgagaaaacacaacagagaaatggagacgcacaaagtgcagacccagagaatcaagtttgaacttgtaagaagaagggtgtctaaatatcctaaccgtccggtatatttcaggcgcaacggacgattggtcgttgatgacttcagttcctttgttggtgaaggaaactgagttagtactcgagttggtatctccgacgaaggtctggccaccataaaatacattagaatccgatccacagttgacgtaaaaattctcaggacgggtgtacgtcgaagtatcagaaagactgagacgggggagaagaacaagaaccatgatcgtgataaatagagaaacagagtcttgaaaacagaa

SEQ ID NO: 154264 - DNA, 551 bp, Arabidopsis thaliana landsberg
gaagagttctgtgcggctgcggtcagcgtttaccaactggaggctcttgaagaatgggaacagattgcaacttcagcatttgagcactttgaacatgaaggaaaccgaatcatatcggtccaagaactcgccggggtatggtcctaatttaagcatctatgagattgtgtaatcaccatctctttcttaggatgaaaaacaattttcttatatttgggcgtgatttaaagcaggagatgagcgtgggaccgagtgcatatcctctgctcaaggattggatccggagttcggatggaaagctgagtttcttggggtacgctaagttcttgcatggtgtgaccgtacgaagctcaagctcgagacctaggtgacacatcatgatgtaaaaagtcttctaacatgtgaattgagtttcaagaaacatcctagacattgtcgtcatcagagacctttggattcaaagattaaaaaaaaaaaacatgaaatggaagtgaagtcaggtaggtatttcctttgtaaatgattctttgagcatttcgttttcgaaacaa

SEQ ID NO: 154265 - DNA, 537 bp, Arabidopsis thaliana landsberg
cttcggcggttgatcttcccgaaatcatagttgctaccccactgcaacctcctatcttgtcatggaatttatacattccactcctcaaagtacttgaatatcttccacgggggagtccttcggaagcatgcttgatgaaaatatttgttgccactgtggaaacaatactcagtagaacttttccgcctgaatcttccagggaactaaccagaaaagctagatcgagttttaccacaagatcagcgaccaaaaatcttgctatgtctgagcttcgtgctatggtccatgctctctttttagaatcatgcgctggtgtggaattagcttcacgcctactttttgttgtgttgactgtatgtgttagccatgaagcacagtctagtggtagcaagagaccgagaagtgaatatgctagtactactgaaaatattgaggcgaatcaacctgtatctaacaatcaaactgctaaccgtaaaagtaggaatgtcaagggacagggacctgtggcagcatttgattcatacgttcttgctgctg

SEQ ID NO: 154266 - DNA, 235 bp, Arabidopsis thaliana landsberg
aatcaatatcgttttgctaaaactcaaaatgagagtgtttgtacgtattatacgctatatcttctacaataagatagttatgtacgtcagatatgaataaatatgcgatttttaatgaatacgcaaattaaatctctcgtgatatgctgatgtaaacaacaaaccacggaaaagtaaaaggaacaaaccatcttataatgtgcattttaatatgtatgaaaaagtattacagtat

SEQ ID NO: 154267 - DNA, 154 bp, Arabidopsis thaliana landsberg
cttttgcgggcttaggaattgctatgtctatgagggcaggtgttgctgctgatgctgcagccgctttgcttttccgcatactctcacagccggcactgctttttcctccgctaagtcaagttgagggagtagaaattcagcacgcgcctattgg

SEQ ID NO: 154268 - DNA, 114 bp, Arabidopsis thaliana landsberg
ttttaagtagaagaagaaaagttcgacgaagaacccagattttgttaagaaatggatgtgccagaggagacgaggcttcgccacaagcgagattttatccagttcctcgatagt

SEQ ID NO: 154269 - DNA, 565 bp, Arabidopsis thaliana landsberg
cacttataaacactatacctatttatatgcatagtggtttacacccatacaattcaagagtcacgggtcacatttaagcttcaactatatatttgcatgttatttgccaaaaggatttgacaataatgcaacaagagtttcattgaaaatttcaagaaccctagttaataacaataatgggttcgagagttttggcttccttctttgttttcttgattttcacggtcatcacattgcctccaacgatccaagcttgcactccttgtattcgtcctcaccctccggttccgaaacctccacaacacggcggtggtggaggtggtggtagcaagccgccgccacatcacggtggaaaaggtggtggtaaacccccaccccacggtggaaaaggtggaggaccgccgcatcatggtggaggaggaagagggaaatcaccgccggttgttagacctcctcccgtagtggtgaggccaccgccaatcataagacctcctccggtcgtctatccaccaccaattgtgaggccacgccaatcacaagacctgccatcataatccctccaatt

SEQ ID NO: 154270 - DNA, 72 bp, Arabidopsis thaliana landsberg
cagttagcagtataaaacagagagagctgcgtattcctgaaaacaacaagacatgttcaagcttctttaata

SEQ ID NO: 154271 - DNA, 74 bp, Arabidopsis thaliana landsberg
cttacgaggtatcgagctttatgatcagaatggagcctggacactaaatggtcaatgaatagatcggatttgtt

SEQ ID NO: 154272 - DNA, 113 bp, Arabidopsis thaliana landsberg
gagaagaagagaagaaaatggaagggataagccatatcgcactccctgttcttggaatcgtcgcagtctcggtcgtaacattctatgccgttagctttgccgagatcccagag

SEQ ID NO: 154273 - DNA, 375 bp, Arabidopsis thaliana landsberg
gtcaaccattatatagaattgtgattttcttctctaaacaagtcctttcatgtgaaatggtttccaaagctttgtgcattctgttgagaatcctctccatagtctttctcatagacttaatctcattctctgttttctttatctttctttcccttgactctatcttcttccttcttcccacaactttctttctcttttgttcaccttttaactccattgcctgtatagtatattacagaattggctaattcggtaaatcatatattcataataaaatggaatcaagaaatccggttagacctgaatctggtcgcgtaagtccttggtagaaggtaacgatttccacagagaggctttagaaggagcattaacaaa

SEQ ID NO: 154274 - DNA, 183 bp, Arabidopsis thaliana landsberg
accaagaatgaagttcacgtatacagataataataaagaagaaaaaaacagagacactttttccggagattttactttataaagcatataaaactaaatcaaaccaagccttcaaaaattaagtagctcttataaaccggatcataaaaccaatcatcaaaacatatgtttgctctttcaaaa

SEQ ID NO: 154275 - DNA, 237 bp, Arabidopsis thaliana landsberg
  unsure (1)..(237): unsure at all n locations
ttttagggaaaataatgttttttttnttctatcnataaatcttcgtatgactttccaataagagctcatttttcttattcctctcgtgacaaaagcaaattatcccatccacacaaagtcacaatccaagacacaagcccaccaatagagactccatctcctcgctaaattcatctacaatagtaattcattattgctattatgttactataattgctttaaaattgtttcctatga

SEQ ID NO: 154276 - DNA, 87 bp, Arabidopsis thaliana landsberg
cgatgaagaaatctacagagactccggcgagaccgaacgcaactgttaaaactcagaaacctcctttcagacctgccgttgatgaca

SEQ ID NO: 154277 - DNA, 98 bp, Arabidopsis thaliana landsberg
aagatatataatcgatgcatatatgttatataatcacagtctgtatgtattatggaaacaactttaactaatttttgagattgatgctacttcatgat

SEQ ID NO: 154278 - DNA, 487 bp, Arabidopsis thaliana landsberg
gttcgtcgtctctctcgccggacttgttcattcagatttcgtctctctctctctctcgcactcttctttaattttgtcctccgtaaaatcttgagatggcgtcgaggaactccgttgccgtaatcgctttattcgctttcgttttcgccgtcatctctccattcgccggcgctcaatccttagctcctgctccttcccccactagcgacggtaatgttttccgattccacattctctcaccagatctgatattgttctcttaacattgcattcagaatcaattaattttgggggaaattaaatctatgattgtttgatgattgataacacaggaacatcgattgatcaaggaatcgcgtatttgctaatggtggtggcgttggtgctgacgtatctcattcatcctcttgatgcatcttcttcctcctacaccttcttctaatctctctctctctttcttctgtttttttttatttctttgcaactt

SEQ ID NO: 154279 - DNA, 630 bp, Arabidopsis thaliana landsberg
ccgacgaagatggttgcagtgaagaagacggtatgattctctccgatctaatttcacaatccatgaaatttttggtgtactgatttttgttgaatccatgtcttgcagaagaagtctcatgaaggaatcaacagcagattggctttggtgatgaagagtggtaaatacactcttggttacaaatctgttctcaaatctctttgcagttccaaaggtattagaaaaaaacttttaagttagcttattcataatctattggtgctttattgatctctttgattgtgttgtaggtaagctgatattgatatctagcaattgcccaccattgagaaggtcagagactgaatactatgcgatgcttgctaaagttggagttcatcgctacaatggcaacaatgttgatttgggtactgcttgtggtaaatacttccgagtttcttgcctcagcatcgttgatcctggtgattccgacatcatcaagacactttctggagatcagtgattctgattttgatgattctgcccagctgtcctatatgcttgattatgctttgtgttcttcaaagacttaatggtagaatttcttcggtttcccgacttcctcttaatggttataattaattactacat

SEQ ID NO: 154280 - DNA, 622 bp, Arabidopsis thaliana landsberg
tcgattgaataagaatggagctttatactgcaaattgtctgtccaccgaaaacaaacctactcttgagctttcaaaactagtcaaagacgagaaaagctcggtgaaaacgaacagcgaaaacacccttacacttgtgaatcatggtacattccacacctcagcttaagaagatgactaattcttattattgccacattgtgttaccttacctctgtttttgggtgacaccgccggatattttaacttgttggctctgtaatttgatatttgatgttcttgaacactatctataaggatctttcttgattacaggtgcaaagatgtggcaagagaacagggaaaaatgggtgggagatcaatctcgacaaagaaaaaacactgcaaaggatcagattataaggtattatgtgtttcatcaacctttaagttcatctgacaatctttttgcagtgtcaaagaatcaaagaaggcaatgttttctaagatgttcttgaatctcttgcagctggtctactacatatgaagatcttctctcaactcatgaacctttctctgagtcgattcctttacccgtaagctttaatctaatcccaatatctaccttgacttaaaaaagggaac

SEQ ID NO: 154281 - DNA, 656 bp, Arabidopsis thaliana landsberg
ccacattgctagtggcagctacgactgtttcaggacagggacctcatattccgctggctcctagtccttcagtcaacgaagctatgaactgtgcggctggtttggctgtttgtcttccggcaattactcagcgaggacctccgtcgcaggaatgctgcacagccgtagagacggcgttgacaactcagctatcttgtctttgcggattcatcaaaagtccaatgttgttgatccctttcaatgtcaccgacttcaatgctcttttctccaaaacttgtggactcaccactgatcccaacttgtgttccgaaactgccggtaacattttggttataacttttgtagaatacatgcattaaaacattagatagccaaatattgttgttgttgtcgccttaaatgccatttatctcttttaaaacaagtctcatatatatgtttatatcatagataaaaaagaatacatcatttatttgcagctttgccaccacattattgttgctgctagttttatttagcaaagaaacatacacattgtagatatattttgtaaccaggtcagttcatatttgataatgtgatttttgttgtccttttgtattttgtagcccaagctcctttgccgaagacggcagcacctgttccaggtaaggaac

SEQ ID NO: 154282 - DNA, 665 bp, Arabidopsis thaliana landsberg
  unsure (1)..(665): unsure at all n locations
nnnnnnnnnnnnnnnnnnnnnnnnnnnnnnnnnnnnnctaaccgaattagttataaacttactgagttactgttagctatttatcgccctgttgatagaaggtcttgaaatttatattcttttatttggctttgcaggaagcagcagataacaattgtgtgtacagaaacgaggttcatcactctgtaagtgaacaaactcagatcctatctgacgttgcttccgacccaactcttccacgtaccaaggctgtgcgatgcgccaagtgtcaacacggtgaagctgtcttcttccagtgaatcattatcttatatcttaatctttaattcgtcatcaatcaaggagtaaagaaacattctttcgtttttctctgatctaacttaaagatcaaaagagatttctttctcttgctttttaatgtgcttatggctatttcggtttgatatagctcgtgtgtgtcatcgaattttcaggccacggctagaggcgaagaaggaatgactctgtttttcgtttgctgcaacccgaactgtagtcaccgttggagagaatagattgatagaagactacatttttcaaatgtaacgtgtatttgtgttccgctttatgagttttatacaattcaatttggagttttctgtgtaaaaatatgaatactatgagac

SEQ ID NO: 154283 - DNA, 2641 bp, Arabidopsis thaliana landsberg; identical to SEQ ID NO: 34287

SEQ ID NO: 154284 - DNA, 3026 bp, Arabidopsis thaliana landsberg
  unsure (1)..(3026): unsure at all n locations
tcaaggatgtcgcgaaggaagtatttgtggcgaatgcaagggctacagtgcttaacgggattccgacaagagtggagaggcagattggatgggtcgcaccaagtacgggttggtataaggtgaacacagacggtgcttctcgtggaaacccggggttagcgacggtgggtggtgtgatacgggatggagctggaaattggtgtggaggctttgcgcttaatatcgggagatgctcagcgcctttagcggagctgtggggggtttattatggactttacctagcttggactaaggcgttgactcgtgtggagctcgaagttgattcggagttggtagttggttttctcaagacagggatcggtgatcaacatccgctgtcgttcctggtgcggttgtgccatggcttattatcgaaggactggattgtccgaatcactcgcgtgtatagggaggctaatcgtctagccgacggtctagctaactatgcattttctttaccattaggttttcattctcttattgatgttccggatgatttagaggtgattttgcatgaggatagtcttgggtcaaggcgaccaagacgagtccggttgtaagctttgttttttttcttttttaataatattccgggncttccatctcccggtgaatcaccaaaaaaaaaaaaaagaggagcctcagggctttaaattgatctgtagatcgtctcctgagtctctctagatcactgggaaattgagcctgagttcggctggtcggatagagacgaatctgcgcttgaaagaaacgccaatatcgcttggaagattgcttcgattggatctaggttagattcgttggaaagataaagctcagggcttcaaatcgacacgtagattgactcctctctctttaactcgccgggaaactctcttccaagtcaaccgtgttgacaactgaatctctgacctagaggcttatcagtagaaaatcagcgatattcatcgaaagaattcacctatagagatgagataggtctctataaaactcgaagctttccgttgtcgcgtagatcgtatcttgtttctttccaggtcgcttggagttggattcttaagttggctgttccgacagctgcggatttgtcagggaaattgtgtctagtgcagacaagtgatgatctctcctaatagacagctcggatcgaggcgaggtcggcttctttagaaagctgactcttggggcgatctgtagataggtatatcactgcctagttcatcaggattttcaaggaaaacgatcccgaagctgactggttttatagagttggatcttgtgacaaactgcacttgcctgaggtaaacgtatatatatctcatcatatatcttagattaaggcgaggtcgaattttccgaaaagatgactctgtgggcgatccgttgatttattaacccttacgagattccctgtgatttgccgggaaatcggccccgaggcgaactggtctattcggacggatctgttaagaaacagacagcatcgacttcagaaaaacggcgataactctgagcagagatatccgatggagttacggttagattccctggaacgctgatctccggggcaatccgtggaatggttgtacgtcatctggttcattgtatcttgacgggaaatccccccgcaagtagacggatgtgattgtcttggcttgatgagcgtacatcgaatactttggatgaatgatatgcgaagagagttctttgtcgtccccacagacggcgccaattgttgaaccaaggattcacacaatagatttgtttagagagggaaaacaaatctaccaatttctcttcattaggtattctatccaagactcgactacaaaagatgttctaatctcttatgaaatacattaggtttttaaaaaggtatagctgcatccatgatagattgcctacgtaccctgtgaagggatcaagccattcgtagttctcactaggtataaagttatgtgtttcttctgagtatccaaagatccccttttgtgaagtccctgagacactttatatagggtcgttaaaccgcctctctagcgatattcttcggaagattcttatttatccttaggtcggttctagaggataatcgtcctaaggatattctccttattcttcggaggttttggggagatttcctgatttcgacattatcttcaaagattctcctttatcatttccgaaagtcccataaaagatcctattttaccggaaatgatccttggagaatgaacggtttttacaagtcgtttgagaggtggcttcggggcaaacggtatgtaccggctcggggcgcgcttgatgactccgttaagctcagttggctgtctcccgagccgacatagatgtttcccgcagcgttctcatgattggctcgggctgtgttcatatgattaacacccgagccattttgcaaactctcttcgggacggtcgatcgaataaggtcccgaggtgctttgttctaggctaggggccaatcatatgtttaatcatgaggtgattgttattcttagactgtttggctcggtcttgcttgtgggggaatccgaccccaacaaacgtgaaagtaggaaccaattgaagtgtatcccatctaacaaaggcattgctgttacaagagcaggtcaagttttgcttgtctatacgttcgatttaggtacctctgcaagtcataggatgttccgtttgtacaagagggatcctaaagatcttgacccgaaaaccctcgacacctggcttcttgaggtgcattctctaggtgatgaggccctctttcttgatttgggtattactgtgcctgctgaccatacccttggtattgagcctaactccatttatttcacccgtggtgatcgtatccgtcacaaagaatcgtcatgcctcgacatctgtgtcttcaatcttataacaaagaccatcaaacgcttccacggtctctccaacttcaacttctacgatgctcagtggtttcttccttcttga

SEQ ID NO: 154285 - DNA, 3374 bp, Arabidopsis thaliana landsberg
  unsure (1)..(3374): unsure at all n locations
aattagggtttaggatagatggagaagaagaaggtgacgattccacaagtgtgccatggccattcaagacctgttgttgatttgttctacagtccaattactcctgacggtttcttcctcatcagcgctagcaaaggtgataatacttttggtttcttacaaaagtttggatttttttggtcaatttagttactagaactgtgcaaaaattcatgttgatcgaattgagaacttacaaaagtctttgagttttctctgagtaatacttatttcgtagttcatagagttttgagaatactcatgtcttgatggtttagattcgcatccaatgttgagaaatggggaaactggagactggattggtacatttgaagggcataaaggtgcagtttggagttcttgtctggataacaatgcattacgtgctgcatctgcttctgccgatttttcagcgtatgtgtttaattttttttggttcattaagtcattatttgcgtatgttttatgttcttagatacagcacatttatccaattttttgttatcttgttttgttcagcaaactttgggatgcgttaacaggggatgtgctgcattcttttgagcacaagcatattgtccgagcatgcgccttctcagaggttcgttcaacctatttactctctccatatagattctcgatttggtcaactggggttttgtaagatggtaggctaaaagaattggaattatctactgaaatactttaatcctnnnnnnnnnnnnnnnnnnnaagcttttgtatctctgtgttttggattatcggctgtgggcaggttgttatgtaatagctcttattcaggcaactgcacggaatttaagtaaaaagctttgaggatttgtttaattaggtgatagtgaaattgttcttcagattggactattcttaaacatttgttgttgtggatggtgtcgatccgcttttatgcatcgtcactaattgaatgacatttttctttcactaggatacaaaatcgttgctcacaggagggtttgagaaaattcttcgtgtttttgacatgaatcggttggatgcacctcctacagaagttgataaatctcctggttctatcagaaccctcacatggcttcacagtgatcaaacaatattaagttcatgtactgatattggcggtgtaaggtatgaactaaacaagacacagactaaatacacattgtcgcacataaaaaggcatagtttgatagacgttttgtttgcttttccgtctcctctactgctatcttatacaggttatgggatgtgaggagtgggaaaattgtgcaaacgttagaaactaagtctcctgtcaccagtgctgaagtgagccaagatggacggtatataacaactgctgatgggtcaactgttaaattctgggacgctaaccagtaagttctcattctaggaagagaatcaaatattttctaattaccttttgtatcttgctcaaaccccatctttgccccttgctttttcttccaagttttggactagtgaagagttacgacatgccctgcaatattgaatctgcatcgtaggagccaaagtctggtgaaaaatttgttgctggtggagaggatatgtgggtccgagtgtttgatttctacactggcgaagagattggtaagtgactttcaaaacatctatgctatcatattccaaatcagactgtgtcatattacctttttgtcgtccaagttaaattccagatagcttcaagcttaattggagtttctgactctgttataaactccatgagtgaagagcttaatagatctttgaagcatggttctttaagctcctgcgaggttttggttttctgattgtttcatttgtgtctgaaacttaggatgcaacaagggacatcacggtccagtacactgcgttaggtttactcccactggtttatcctatgcctcgggatctgaagacgggaccatcagaatctggcaaacaacaccagcaaatcccgaagagaacgaaactagctcgaggagagtgaagcatagcgtggatgaagtttcaaagaagattgaaggctttcacatcaacaaagaaggaaaaaccgcagagaaaccatctgatacttaagctaaactgagcgtacaaaaagcctctatatgtcttagttcatgatttgctatgttttgtttccagactgaatgattatacagagaaaacaaacaaagatctgcttgttttattttgaatcaaaacatgggtgttaaaatttaatagttttctttcaagtgtctttttcaatattgaactaaatttagggacgaatttgtgatttatgattatttgactttagattgggcttgggcttttttcgcaggttggggtataagggtaaagtcgtcatttgacagaccgacttgtctctctctatctggggaaaacgtctatcgggagactcctcttcgagctcatcttcttctctctctttttatctttggttgtgcgatctcctttctctttcaatctccaaggattttactgtgagatatttggcgggaaaatgtcggggaaaggtgctaaaggtttgattatggggaaacccagcggtagcgacaaggataaggacaagaagaagcctatcactcgttcttctcgagctggtctccaggtagattataatctccctcacactctaagtcttccgtgtctgtttctttgggaatcgaaatggtcttatacacctgaacgattagtagatcgcgtttaagtggtagatcgatgagattctgagctagatttggtaatttcagctgagaattagagacattgggatgcgagatttggttttctattgtgttatctgctggagaattgtttcattaagcttttatggttgatattgaacccgatctttgatttcacggagtcttgttgttacagctaccttgtgaattgaattcggagttttttttgtagagatttattgtcatatatgaaatgtttctgggagcaattgagatttgagtattcatttaggttccattgttgtggctaattgaatttacattgtgtgcagttcccagttggtagggtgcatcgtctgttaaagacaaggtccactgctcatggaagggttggagcaactgcagctgtttacacagcagcaatattggagtatctgactgcagaagttttggagttggctggtaacgccagcaaggacttgaaggtgaaacgtatctcgccgaggcatttgcagcttgcgattcgtggagatgaggagctcgatactctcatcaaaggaactatagctggtggtggagtcatccctcatatccacaagagtctcatcaacaaatccgccaaggaatagg

SEQ ID NO: 154286 - DNA, 1104 bp, Arabidopsis thaliana landsberg
  unsure (1)..(1104): unsure at all n locations
gctgacgttttagtgctcaatactggacactggtggaacgaggggaaaactactagaacgtaagtttttgtcccgtatacccgagttcgatgtgtcacttaatctcttgtctgaaatttgttcctgtgaccaaatcttgaatgttgttactaacaggggatgttactttcaagaaggagaagaagtaaaattgaagatgaatgtagatgatgcttataagcgagctctgaataccgttgtgaaatggatacataccgagctcgattcaaacaaaactcaagtcttctttcgcactttcgcccccgtgcatttcaggtttgtacggtattactcttgataaagactcaatcgtttgtaatattcagttgcttgattaggtttaggtcttatgatgtagaatgttctgcatttagtttcaatatatcttcgtcgttgtatgtatgaaacaggggaggagattggaaaacaggaggaacatgtcatatggagacattaccagaaattggaacctcattggcttcatcagagacctgggaacagttaaagatcctccaagatgtgttgtcacatanactcaaacagatcagagactgttaaagtgaaactgtttaacataacggcaatggctgctcaaagaaaagatggtcacccatcactctactatctcggtccgcatggtcctgcaccgcttcatcgccaagactgtagccactggtgccttcccggtgttcctgacacgtggaacgagctcttctatgcattatttatgaaacaagaagctccttcttcttctaaaagagttgaagaagcgaacagtacaggaaatgttacaatgtcgtgatgcctggacaggacaaggaaaccacaacaagctcttgtttcttaaagctgttggcgtttttcttaagatgccaagctcaaagatcaaaaagggttcgggattttttgattgggtgattagattaattgggtgggggaatatatgtaattaggttggtaatcttaatctctggttgtaaagataaaaaaaaatcttaaaattatttttcgatgattcaaagatatacagttttgggcctagcccaataaaagtaaatttccggg

SEQ ID NO: 154287 - DNA, 1516 bp, Arabidopsis thaliana landsberg
  unsure (1)..(1516): unsure at all n locations
caagaatctccaattccaaaggctgactctctaagatcttgtgtttcatacatttccctgaaattaataaactttgagggaagatgagcgctacgaggttcgtaaagtgcgtcacggttggtgatgtagctgtcgcaaaaacttgtttgttgatttcttacacaagcaacactttccctacggttatgtcccaattattctttcatgtttcttgtttcattaccacaacaacaacatatctcatgtttcttgtttcttttgtggatatacaggattatgtgcctaccgttttcgataatttcagtgccaatgttgtggttaatggaagcactgtgaatcttggattgtgggacactgcaggtttttcattttcctatatatcttggtgtttgaaatttggaatatgttttttggatctgaagattttgaaaatttgggtatgaataaacagggcaagaggattacaatagattaagaccactgagttaccgtggagcagatgttttcattttggccttctctcttatcagtaaagccagttatgaaaacgtctccaaaaaggttttaaaaatccatcaatcttgtttcatattattgagttttcgtcacattttttgaactattgtcacaaattgtgtttgcagtggatcccggagttgaaacattacgcgcctggtgccccatcgtccttgtggaacaaagcttggtgagttttccattgttttttcctgatctcgctccttttactttattagttgtgactgagtttgtgtttttgctctccagatcttcgagatgataaacagttctttatcgaccatcctggtgctgttccgattactactgctcagggagaggagctgaggaagcaaataggagcacctacttacatcgaatgcagttccaaaactcaagaggtacgtagattagtatatatacccttgttgcagatttctaatgttaatgttaatgctaatgttgatgatgtgagagtgcagaatgtgaaggcggtgtttgacnnnnnnnnnnnnnnnnnnnnnnnnnnnnnnaagcagaagaagaagaagagcaaagcgcagaaggcatgctccattctatgatgattggaaatctctgtttttatgtatttggttttggtatattaatcttctaacaatgaatgaattaatgtgttaatggacagacacccaagtttgactggtcctttttgttcttaatattaatggagtttgtcggaatcaacgtttcttttgcttttacaattcagtcctatgcataattccacacaaacaccacatgttttgaatcagttttcattcccaccatttcttcagctgaccatattttgtatgttactgttttaaactttgcaaacatgtttattggtagagagtgtaactaggaaatgaaaagtaatgatacaagttttatttctcaagattactcttcatgcttctgcaacaagacgagaagccattgattattgatgatttgcctaacagaatgcaagaaataa

SEQ ID NO: 154288 - DNA, 527 bp, Arabidopsis thaliana landsberg
tactttttactcaaaacaaaatggtcattaagatccctaatactttcattaaagccacttcacttctctcattgatcctctatttcctaataatagcaacatctaagtctaactcggttttagccgatgaagttgtcgaccaagaagatgacccggagtactacattctcgacgaaactccctcgatactttcaaacgtgacaatttcatccaaaactaggctactagtttcccactacaagaagatcaagaaaggaatgagatgtcacgtcgagagttacaacatttgcaatggcgtaaaagcgaataaagggacgagcctcttgcattgctgcaagaagcattgtcggaatgtgctaggagataggaacaattgtggtcgatgcggtcacaaatgcggttttgggcaacgttgttgcggtggcgtttgcacttacgttaactttaaccctaaccattgtgggaaatgcactaggaaatgtgcgtccggggttaaatgcgagtacgggtattgtgggtatgcttga

SEQ ID NO: 154289 - DNA, 1908 bp, Arabidopsis thaliana landsberg
  unsure (1)..(1908): unsure at all n locations
tcagcaagagatcatgtttcagcatcagcaacatcagcaaaggttggatctttactcttcnnnnnnnnnnnnnnnnnntggaccaagtaatcataaccaattcgatatctccggcgaaacttcaaccgccggcgccggaagagctgcggcgatgatgatgattcgtagtggtggtagcggaggaggaggaggaagtggtggtgtgagctgtcaagactttgggaatcaagcgaagaaagattgttctcacatgaggtgtagaacttgttgtaaaagccgtggcttcgagtgttctactcacgtgagaagcacgtgggttcctgctgctaaacgccgtgagagacaacagcaattagctacggttcagcctcaaactcagctgcctcgcggtgagagcgttcctaaacgccaccgtgagaatttaccggcaacttcatcgtctctagtctgcactcgcataccttttcattcaggtatatgtcactgcaatgtgaaatatttatttatgtgtatatatatatatgtttattattatatggtcgtgagatatataatgaaatgcaagcagcatttttataatttatataagtaacgaattgggatcagcttctagagtaaaaaaagaaaaaccctattttgaatttataagttttccaaaaataagttttgttatttattgtgaaaatattgctgaacgggtattttcttaaaagtttgtgctagatgatttgcagtaccaattctattttctatctcattcttgttttgtcattaagcttttctctattcattttgttaggtgaataagtgatcggattaggaggctgcaagagcttgttcctaacatggataaggtacatttcttttacaaggcagattggtttaaagtttttcttggaagtaaaaatattagaattaggaaagtatttagaaattcttagttaattctgcgaaaaaatatgcgaataagtatagtaaatatttctacgagaatattctagatcctttggaaaataattacaccattagcgccttaaactttcccaaaaatacctaaaattttcattaaccgcttaaattttgccaaaattttccccactcaataagaatccctaaatccgcgtcaaaactatttaaccatctccctctacctctcagaatcgttctctacgctacttccttttttttagagagattggtttgtctgttacttcagagatctcattggaaggtatttctacataattcagattttttttagaagttagcctagatgttaaactccaaatctctgctctcccattgtctttcaaatctccatgtctctagtcatgtttctagtgatttttccaatgttactcatcatgtgtgatatactttgtttttcagaaaaggtttaactaggatgattccatcaactatcaagttgaaagatagtttaataagcttgctacttatcgcctcaaaggaatgataagccatgcaaaaaatggaggagaaaaatcaaattggatattgtctgactattggaccattatgcaagcgcatttggcaactgaaaaaagcaaaagcaactagtgagaaggctcgtgcttctcgaatgtctgatcgcaatggtttaggcccacattcccaccaagcgggttcacgctcctttctcaaagttaaagatgttttggtaattatatatttcctttcttgttaatttctaattgtgataatttttctgttgtttcactttggtttattgtttctttgatacaaatcaaacaatgatgcctacttttttattattgtgatgaagaaaacacatcagaggcctgatgtctcgtacgttttcaacaaccacggttggttgcagacacttatgaaaagcatatagtagaacgcttggttcaacttgaatat

SEQ ID NO: 154290 - DNA, 653 bp, Arabidopsis thaliana landsberg
gagtgttgttgtttgagtttctttaatgatttactctcattttttgcttcaactatgcaattcgtgatttcttggatctaatttctgtagtaggatcgaagtaatggccagcaaatctggaagcggtggcctaagagaaccgccgaatgagcaagctgttttgaacatgtatgaaggcaagagatcagagctaagccaaatctactccaacataaccgacctcgagatgcaagtgagcgaacattctctggtcattaacgccattcagcctctcgaccaatcgaggaaatgcttccgcatgataggaggcgttcttgtcgaaagaaccatcaaagaggtactcccagctgtccaacgtaacaaggacggacttgaagaggttgtgaggaagctatacgagacattggagaaaaagaagaaagatcttacagagtttgaagctaagtataagatcaggataacgaaacaagaagataacaaggaaggaggtaacaagaaggaaggtaatgctcaaggtgttcttgttggagctgccagttcaagccagtaaaactctacatatggcagtttgttttactgttgtatctcttttttggatcttatggttaaaagccgaaaactttgctcgaaaaaatcaacatcttttgaatgtc

SEQ ID NO: 154291 - DNA, 297 bp, Arabidopsis thaliana landsberg
cgagagcttctctctattcatttccctaaaccctagcaaaaacctctctctctctctcaattcacttctcctccttcaatggcttggcgcaacgcaggatctgccgctcgttctttcgtctccgccaccgcaagatcaccatctctccgttctcccaccacggcgcttcctcgcctccgtcctcctcaatcctccttacctagccgtcgcttcaccttctcatcaccttccaggttcgtgaacctaactccttcacagtctctttatcaaatttcaacaaaatccaatcaattcagt

SEQ ID NO: 154292 - DNA, 1381 bp, Arabidopsis thaliana landsberg
tattagtgagagaaggacgaagaatagatagaggaggaagaagaataaagagaaaagatgaacaagaaggagatcttcaagctagcgaagggtttcagaggaagagctaagaattgtataagaattgcgagggaaagagtcgagaaagctctgcagtactcttacagagataggcgcaacaagaaacgtgagatgagaggtctctggatcgagcgcatcaacgccggttctcgtcagcacggtgtacgttttccccccaatattgattagatttttgcctatttgcttcccgtcactgctaattgcattgattcgataaatcatgattagtttataaataaaacttctgagatattggttggtttatttttgcaatctatgatgagtttcttttaggatggagcttgggatttagggttttcttttgttaaatttgggtgcttgatttctccagagtctgtggttgctagtataacaagttctagtttgatgtttcaaacagaacttgatggattacattatagtcttaacttttttgctgtattctagagatttttcttatgcagtggcactctatgtttgcatctacctagtgatagagttaaaacttgttggttataactagaagcgaaagaattagattgaatagttgaattaaagtgcattttagattagcttattttcttcagattttactgttgtatctttgatcaatttggagctttccaatatctgagtttgagatatttatccaatggagattttggatgtgaatgtttaatttgaaactcaaatatgcttaaagaagtgaatcatttcggattgattagaggaaaaacacatttcatgtcaatagttttgatctaactgaaacaatgattacttcctaattcaagtagagaaacatatttttctaacttggttacctcgttttagctttgtaacaagctaaatatatgctattataatactctgtttcttttgaataagatggaaatgacatgtttgattggaatcctaacatctaaaacttgaaacaggtgaactacgggaacttcatccatggactgatgaaggagaacatccagctgaaccgcaaagtcctctctgagttatctatgcatgaaccttacagtttcaaagcacttgtggacgtctcatgcaagtcgtttcctggaaacaagaacctggtccaagcatctcagaaagtaaacatttgatccatgaatgcctagttaggaccaagttactttcatctcgtccttcttatgaacacataatatttagttatttttttgaataacatgtacctcggtgatattactatacatttggaatttgagagaatgtatttcctcttcttattttgtttagcagatct

SEQ ID NO: 154293 - DNA, 1692 bp, Arabidopsis thaliana landsberg
  unsure (1)..(1692): unsure at all n locations
aaaaagttttcccagaaatcctatcaaaagaaggactatatcaagcttctgtttctgttttttaggtaactaatgatttttttcttctccgttacaaaagtcactttatatttttgttttgtaggatcactaactctgtttgtgaggttcttcttttctgttttcgtttgttctgtttggttgttctgagatttttttttttttttttcagcccacttttttagtttccaggttttactgttttttatttttttaaccactctgttttcagttcttcgtctattagggtttggtaactaatagtatctctgttatggtaaaccaagttttttttttcatttgaaagctcaagatgttcttaggatcatatgattttccatgagtactcaacatgaaatttactttcttcataatgaacctcataagtacacgagagtctttaatcttatatttgtcatcacaatggatacacatatttgtattgctttaatctctgtgactattattctctcattgttagtgtatagttagctatgttacattgaagtgcttgtggtgtttgagtttggttttccagttacttagtatgatcacagagctagattttgcctcccattagagtttcaattaggagtcttatgaattttttctggatactacaggtcttttggtaacctaaagagctgctatacactgatctgagaactgtcaaaactttatcataccaaagaatgggttgctgctgttgtctcccgagtatacctgaagtaaagcctccacgtctttcttgtttgcaaccatcttgggttatggtttcagtcatactacggtataatgttttgtgtagagctcaagacctatagatgagcatcttcccatatctcgtcctgcgccaaactctctctctaatgcatacagttcacctctttcgccgcctattcctttagccatcaggaatataaatcttcaactagtccgccgaaattgccaagaatcagggcaattgagtaagcatccccgggactncacaagttgttccagagaagaaacatggcatgttatatctactgattttagctaaagaacagtatgagaagccatcgatgaatgtccaatttgcttagaaggtattttgtttatcattcaaagttacatgttaaatataacattttggtagatatcttcatcttgtttgtttgcagaatatgagattgataacccgaaattgctcactaaatgtggccatgactttcatctcgcttgcattcttgcatggatggaaaaaagcgaggcgtgtccagtttgcgataaggtatgtgtccgtttaaaatccgccattttcgcaatacattttgaacttcttgagtcactagaatctgttttgacaatagagtctactttttgggtattcttttcacaggaattagtgctcactgaatcataatcgtgaacaagaaaccaatagctcggaacaagaagtgcgaaaaacggtacagaagatttgatataaacaggcattaggacttactctggtggtatgatgaacattgttgctctctactacattcagaagctttcacttccttttgatgatatacagaaattagatttgattgtttaatattctttgaaaaactcttatgtttaagatttgtttctgaatctgaattaattcgagaaaagttgaagaac

SEQ ID NO: 154294 - DNA, 615 bp, Arabidopsis thaliana landsberg
caaaacaaagcaaacaccaaaaaaaacagagatgggtttggttacagatgaagtgagagctagggcagagaaatacacaggagatgagatatgccgtgagaagacaaaggagtttctcaaggaagtttctatgcctaatggtttattgccattgaaggacattgaagaagttggttacgacagagagacaggtattgtctggctgaagcagaagaagagcatcacccacaagtttgaagccattggtaaacttgtctcttacgccaccgaggtcattgcacaggtggaggtcggaaagatcaagaagcttaccggtgttaaggccaaggagcttcttatttgggtcactctcaatgagcttgtcttggagcagccgacaagttcagggaagatcaatttcaggacaccaactggtctgtccaggactttcccagtgtctgctttcgttgttcctgaagttgagaagcctgcaacggagaagaacaatggaaccactgaggtcaaagaagctgttgcagtcacagatgcttagtctctctaatcttattaatcttatccttccaatcatgtattactttctgctatttgctgcttaatttccttttatcaataaga

SEQ ID NO: 154295 - DNA, 359 bp, Arabidopsis thaliana landsberg
caacaccacaaacacaaacaaacatatagaaaaagagagaggaggataataatatggcgagcaagaaagcagctatggctatgatggcgatgatcgtgataatagctatgttggtcgatacatcagtagcgattgatctctgcggcatgagccaggatgagttgaatgagtgcaaaccagcggttagcaaggagaatccgacgagcccatcacagccttgctgcaccgctttgcaacacgctgattttgcatgtctttgtggttacaagaactctccatggctcggttctttcggtgttgatcctgaactcgcttctgctctccccaaacagtgtggtctagccaacgccccaacttgt

SEQ ID NO: 154296 - DNA, 444 bp, Arabidopsis thaliana landsberg
  unsure (1)..(444): unsure at all n locations
caacagaaaatggaaatgatactgatctcgtcatcgacactcaggttccatccattgaggacatcacaaagaatcgccaccggaagcaatagaagacgaaccaccaccgtgtgtgctgactactacagaggaggaagaacggtggacgagaacatggtggtccttaggaaacgaatccatgagatgaagnnnnnnnnnnnnnnnnnnnnnnctccttctcattggatgcaatgggagaaacgtttctactgcaactacgacgctactatatgtgatgcactcactcttctccaaacttttctcatgaactctcgtcccagcgtcgcgtttggaacgtgtcttcttctcctcgtcagcgttcccgtctcctccgccgtttttgcttttcgcatccttgatctagctctttggcttttggacgccgttcacgtagtatgatccgta

SEQ ID NO: 154297 - DNA, 222 bp, Arabidopsis thaliana landsberg
tttgatcaatgtttgcagcgtaagcatatacactagatcaaggacttccttctgatagctagaaggaaacatgcacgatctgtcaagatcaagagaagcaaggatattgtcaagtttaaggtcagatgcttgaggtacctatacacgctatgcgtctttgaccaagagaaagccgacaagcttaagcagtctcttcctccaggttttttattcttcttaact

SEQ ID NO: 154298 - DNA, 171 bp, Arabidopsis thaliana landsberg
tgtgcaacgtttactcattcagccaatttcatctcttttgttgtgaaatttcaaatttctcgatctctttagttgtccttggaagctggaatgtgttcagtcgctgttcccgctgcacagcacggtggcggcggcgaggctgacgtcatgtctaagcacaacttcaaggag

SEQ ID NO: 154299 - DNA, 382 bp, Arabidopsis thaliana landsberg
atggctcttctagccattgatctcgatatgtttgggcatggatcggcgggccaagtattgggtcggaccgatgtggatcgggttgagtatgtgcggatcgggctctgataccatattagagtgtgggcttccaacctaaaaccaattggcaataggtgaagaggcacatatcttatatatatcacttaagatcctatcaatttccgatgtgggacattgtccctaatacgcctcctcgagatgatggctcttctagccattgatctcaatatgtttgggcatggatcggcgggacaaatattgggccggaccgatgtggatcgggttgagtatgtacggatcgggctctgataccatattagagtgtgggcttccaacctaa

SEQ ID NO: 154300 - DNA, 1213 bp, Arabidopsis thaliana landsberg
aagatattcagactgttgatctcatgtctgagcttcttcgccgtatgaaatgtgcctctaaacctgacaaacgtctcgttttcatcggtacaatcatctctttcgttacctctgaatctttcactcaatcggtactttaggtttgatctctgtgaaaattgtgtagcgaaagttccgatttttatctgttttagtgtgtaaaaattgcattttgctgttatcgttaatgctttatctgatgatcatagcgaagggattgtgaatttgtgttttttggttcaatagaaaggaagaattgagttttggttcatgtatgatttggaatttgcaggtccacctggttcagggaaaggtacacagtctccggtcataaaggatgagttttgtttgtgtcatttgtctactggtgacatgcttagagctgctgttgctgctaagactcctcttggtgtgaaggcaaaggaagcaatggataagggagagcttgtttctgatgacttggttgttggtatcatggatgaagcaatgaacagacccaaatgtcagaaaggtttcattcttgatgggttcccgcggactgtgactcaagcagagaaggtttctggttcttttctgtggttagttgtttgtgtatctgctcgctcttgtaaatgttctgactctttttgtttataaatcttgtagcttgatgagatgcttaatagaaggggagctcagatagataaggtgcttaattctgcgatcgatgattcggttctcgaagaaagattacttgaaggtggattcacccttcagtggaagaagcttcatactaaattcgcacctccgaaagttccagcagtcgatgatgtaagaaaaggcaccaatttctgatccctcattcgattctagtagatcgagttctctcgtgcgatctgatctctgtatcaaaatggttgtgtgttaggtgtctgaagatccgttgattcatagttaaaatgacaatgcgtatgtttttagatcaaggctagatgcattccacaagcagacgcaaccggtatgtttccttatagtacatgaacttgaggactatcagagaatttgacatttgttcttgttgttgttgttgcaggtaattgactattatgcgaagaaggggaatctggtgaacataccggcagagaaggccccggaagaggttacaaaagtggtgaagaaggttgtgtctacatga

SEQ ID NO: 154301 - DNA, 1833 bp, Arabidopsis thaliana landsberg
ttctgagacttctaaagagaggaaaattagttcgtcgaagcatcgagaaaatgatcgtactttctgttggttccgcttcttcatctccgatcgtcgtcgtcttttccgtcgcgcttcttctgttctacttctctgaaacttctctaggagctccttgtcccatcaatggtgcgtttcgcctgttttcatccctactcgccattagattgtatctagttatattgtgaatgcagatttcatcttgtttatctatgtatcagtgatagaatctaaggtcttagttagctgtgaaatcgtatgtcctggtagaatcagatggaccaaaatgtgctgaacttgtgattgattttaactctaaattaggtttatggaggtgcttcagaatgcttcatagtgaatttggttgctgatatggtacagattcgctgcaatttcatcgatctgtagcttattagaggatccaaaatttgtttagaaatgcttacatagcttaaatacttagaaattgtgatgttaatactggttcttgactcttgaatggtgatctaggctggccaatcgtgaggaatattagtgaccttcctcaggataactatgaaagaccaggtctttcccacatgactgttgctggctccgtatcgcatggaatgaaagaggcaatgttcagagctgatacaggtttaaaactctttccattggtatccgctcggctcttatctgtgttttatcatggttggatgttcaggtcaaaatatggcttcagacgcttgctccaggttcagagacaccaattcacaggcactcctgtgaacaggtttctgttgtcataaagggcagtggtactctgtatctcgctgaaacacatggaaatttccctgggaaaccaatcgaatttccaatctttgccaacagtacaattcatattccgatcaatgatgctcatcaggtatctctttctacctcccacatcgtttcagatgacttggctctttccttgattcttagagtttgaaatcctagattgttagagtttcccctttaattgtaatcttgattgagggcaaaagaaactccatgtaaggctgatgataaacaatccaatttcgtatgcaacagatgttagttgaaataacattgaacaagtaagagcaaaaacatactattatgtttaagattgcttgagagtgttagaggtgccgcaggtcctatgtcacatgtagagacaattattagaaaactgaccttttcgctaacgttgtgtatattcttatgaatcagtgaaagatgacgttttcttctgctaaaataacttttgtgttatcttatgaaactagctcacaatcatttattacggttcttacaggtcaaaaacaccggtcatgaggacctgcaggtgttggttatcatatctcggccgcctattaaaatgtgtgtaacatcctttttgaggaatttgcttatagatcattatgtgtagatgtatccttttactgatcgtttgtttttaaatagcttcatctacgaagcctggtttatgccacacgttgttgcgaggttgaagttccctaactattgggatgagcaaagcaacgcgttcaagaatcgcaaaaagatgagctttaaagcaaagtttgaggtcaaaaccaagcacaacctttagatagtacgtaaaattatagttgaggttttgtgacactacgtagatgctggtaaattggcaaggattttacctgaatgttgttaccagaaagtaattaaatgttcaatctctgatgttctcaagtaagtgagtcttattgggaataatattaactcatgttcttcttgcatttg

SEQ ID NO: 154302 - DNA, 562 bp, Arabidopsis thaliana landsberg
aaaaaagtgtcaattcaatttaccagaagaaggaggccgccccaccaggcatgaaccaaatccacaacaaaggaaagtaaaacgggcatgcacctcaacaacataccctacaatgtgctacacctgtctgtcctcctattcctccaccatcaagtccgacccaatcaaactatgcacaacatcgctaaatctcaacgtcaaatccgctaaaaacgccacattagtcgtctctaaccttctccaaaaggccaaagccgcgaaaagccatgaggtctcgatccttaaggactgcgtggacgagatgaaggacactatcgacgagcttaagcaagcggtcgccgagatgaagtatgtcagaggcggagggaaaactacggaggagcatttaaagaacgtgaagacgtgggtgagctcggctttgaccgacgagggcacgtgtacggacggattcgaggaagggagagtaaatgtggaaacaaagaagaaggtgaagaaggctatttctgagctttcaaagactacaagcaatactttagcccttcttactcattatttaagttat

SEQ ID NO: 154303 - DNA, 1958 bp, Arabidopsis thaliana landsberg
gatggcagagaggcaaacaatacggtcttctttggttcaaagacttttctcaccacctttttggtgattggtccatgggggctgttcatgccaacaacctcctcgaggatcagagccaggtcgaatccggtcctttgaccaccctctcttcttctgggccctatggaacctttgttggcgtctatgacggccacggaggccctgagacctcccgttttgtcaacgatcatctctttcaccatctcaagagtaactacttgttgttactactcaccactgaattttatttagctagggaaccattggaactgaacattcatgtctgcaggattcgcagcggagcaggattccatgtctgtggatgtgataagaaaggcctatgaggcaaccgaagaagggtttctaggggtggtggccaagccagtgggcagtgaagccacatatatcaacggtcggctcttgctgcctggtcggtgtgttttgcgatgggaagctttacgtagctaacgttggggactcccgtgcggttttgggaaagcgtcatcaaggccacaggtgaggttattgcgcttcagctctcagctgagcataatgtgagcatagagtctgtgaggcaggaaatgcactcctaacaccctgatgactcccatattgtcgtcttaaaacacaatgtctggcgtgttaagggcattattcaggtgccgctctctacaaagagatcttcttatgctataaaatctgagccaatattattatgtcatgttccttcactgagttggataagctattattgttggccacttgtcaaatcttgaaagcttggttgtctatgtgtttgcaggtatcacgatccataggagacgtgtatcttaagaaatcggagttcaacaaggaacctttgtacacgaagtaccgattgcgggagccaatgaaaagacctatcttgagttgggaaccgtcgataaccgtgcatgatctccaaccagaggataagtttctaatattcgcttctgatggactatgggaacagatgagcaaccaagaagctgttgacatcgttcagaaccacccacgaaacgtgcgttagacccatttcttcctttttttttcactttcagtaaaaaccaattacaaaaccaaagattgactctatcctttgttgtggaaatgaatgcaggggattgcacggagactggtgaagatggcactgcaagaggcggcaaagaaacgagagatgagatattctgatctaaagaagatagagagaggtgtgaggagacatttccacgatgacataactgtggtcataatcttccttgataccaatcaggtgagctctgtgaaaggacccccactctctatccgaggcggtggtatgacattccccaagaaaatctaagatactccacttttaggctccatcttttgtagttatataaaaaaaaaagtcactgttgttggtataagaatgtataattttaacgtgaaagccacacaatactgatgtttggaactcattccagtaattattaatttttatttattcagcaaactttgtgtaacgatgtaatttgttgttgatgatgaatgaatatgaatgtaggccttcttcttctgtcatgtatttgtattgcattcataatacagaggtgcttgatattgctttttattctatatatgtgaatgaagccaagaatcagttaatactaaagctcaagtgtgcaatatacatcacaatacctttgtccttgtttcaggtctacttttacatcatagaacttgctcctatagataatacaatgcatggtattgacgtaagaactcttagcttttcatattagtagcttataatgttccttaaatgcgacattgatattaagctactactcaataactcaatggtaacgaatcataagtctgaactattcgaaaacagtaatcctgaaaagaaagaatga

SEQ ID NO: 154304 - DNA, 1287 bp, Arabidopsis thaliana landsberg
gagagtttataggagacatcataagcatgagcttgtggataatcagtgtagctctacgcttgttaaacatatcaacgctcctgttcatattgtaagcttctcccttcttcttcttccttcatgcgctctgattttctctgtttaagttaatcggttcttcttattgttgattcaatccagaatttgaaatctctctctattttcatcgattgttgatcttactgatgaagaatcgattggtttctaattatagaaagcttacatagcatttgtgtaatcccaatctgagtttgtttgatctggttttgctttattggaaaaaaaagctccaaaaaacgcttatggattagtttgaatctctctggtgaataggtgtggtcacttgtgagaagatttgatcagccacagaagtataagccgtttatcagtagatgtgtggtgaaaggaaacatggagattggtacagtaagagaagttgatgtgaaatctggactaccagcaactagaagcactgagagattggagttacttgatgacaatgagcatattctcagtatcagaatcgttggtggtgatcatagacttaaggtaatcaatgaatcaaaaaggttcgttttctgtttacagtgaatcaaagacttatatgttctatattgtttttggatttagaggtattcttcaatcatctctcttcaccccgagactatagaaggaagaataggaacacttgtgatggagtcttttgttgtggatgttcctcaaggcaacaccaaagatgatacatgttacttcgtggaatcactcataaagtgtaacctcaaatccttggcttgtgtctctgaaagattggctgctcaagacattaccaattccatcgcaactttctgtaacgcttccaatggatacagagagaagaatcatacagaaaccaacctttgaagatttggctagattagtcccacgaacaaactcagtgaaggaaatttagattcatagaagcacgtgtgatcatgcttctctgctgctttactcagatcagctccatgggccattttcgagcatgcagtcaaagttttgatgtaatttgttttctggtgtttgttggacagtgtctgtatttacgcaccattgttagaaaaaacagagctaggtagtatctatattatcaccaagagtcgttgcaggaacattttccgtctctgaaatgatgaacccttgccccttcttgtaaaacaatctcacggtttctcaaaaccgatatgtatttggctacggtgtggctatcag

SEQ ID NO: 154305 - DNA, 2242 bp, Arabidopsis thaliana landsberg
cacgaaagcattcctacggtcaagctttcaacaacactcccgttcccatcaagaactcatctttctcattcaacatcatcttcgggatcgtccctgaacataagcagcaaggttcacacggtatggctttcgttttctctcctacaagaggccttcccggagcttcccccgatcaatacctgggaatctttaacgagacaaacaacggtaaagcctcgaataacgttatagctatcgagttagatatacgaaaagacgaagagtttggagatattgatgataatcatgttgggattaacattaatggtttgacatctgttgcctctgcttctgctggttactatgatgatgaagatggaaacttcaaaaagctttctttgatcagcacaaaggtaatgaggctttccatcgtttatagtcacaccgataaacagctcaatgttactttattacctgctgaaatctctgttccgccacaaaaatcgctcttgtctttgaaccgagatctctcgccgtatttgcttgagaaaatgtatcttggattcactgcatcgacggggtcagttggagcaattcattacttgatgggttggtttgttaatggtgtaatcgagtatccgagattggagcttagtataccagtccttcctccatatccaaagaaaacatctaatagaacgaaaactgttttagccgtctgcttaacggtatctgtgtttgctgcgtttgtcgcttcgtggatcggtttcgtcttctatttgaggcataagaaggttaaagaggttcttgaagaatgggagattcaatatggacctcataggtttgcttataaggagcttttcaatgccacaaagggtttcaaggagaaacaacttcttggtaaaggaggctttggtcaagtctataaaggaacacttccgggttctgatgcagagatcgctgtgaagcggacttctcatgattcaagacaaggcatgagcgagtttctagccgagatatcgaccattggtcgtctcaggcatccaaatctagtcaggcttctgggatattgtaggcataaggagaatctctacttggtttatgactttatgcccaatggaagccttgacaagtatctagaccgtaatgagaatcaagaacggctcacttgggaacaacgtttcaagatcatcaaagatgttgcatctgctctactacacctgcatcaagaatgggtacaaatcatcattcatagagatatcaaaccagctaatgtcctaatcgaccacgaaatgaatgcaaggatcggggattttcggattggcaaagctgtatgatcagggacttgaccctcagacatctagagtagcgggaacatttggttatatcgcacctgagctcctaagaacaggaagagcgaccacaagcactgatgtttatgcctttgggttggtaatgcttgaagttgtttgtggtaaaagaatgattgagcgacgtgcaccggaaaatgaagaatatcttgtggattggatcttacagctttgggaaagtgggaaaattttcgatgcatgggtggaaagtatacgtcaagaacaaaacaggggacatgttgagcttgttttgaagctaggtgtgttgtgttcgcatcaagctgcatcgatgagaccggctatgagtgtggtaatgaggattttgaatggtgttacacagctaccagataatcttcttgatgttggaagggctgacaaatttacagaatggcctgagaacatcaatggtattactactacttgatgtgaatacatcgagttcattggagttaaccgactcttcttttgtctcccacggccgctgaaattttaagtttaccactgattctttgtttgctatgaagatgtatcacaactgagattattacacattgtaatacacagccgaatgtttttttccctggtatgtacaagaataagaccacaccgcctcctccaaacatttttttaatccttttgtatttgataacaactcgattattaatcttgaaaatcaactctttagaggatatatctaaatcaggtaaagttttcgtctctgtttcttagagaccattgtccggtaaatcctatgaaattgaatggttaagaaatcttataatactatactgttgcctctttgatacgccaattcgtcaggagtatctgcagaaattatccaaatagaagaacgtgatcaaacaaagctccgattatgtttctatggttcatga

SEQ ID NO: 154306 - DNA, 2040 bp, Arabidopsis thaliana landsberg
aaaacagaagcaagcagattctcgcatcaacgaagaagaagaagaaaaggacgagtagattgatttcttagacgacggagaaatgcgagtgatgagatcattgcgcggtaattccggtgctggattggttttccggccggcgaggttaaattctcttcggagcgtctttaccggttgccgtgctgtgattttgccccgctttggtggtccggaggtttttgagctccgggagaatgttccggtgccgaatctgaatccaaatgaggttcttgtcaaggcgaaagctgtctccgttaatcctcttgattgcagagtgagtgttaatctgcttgatccgttttgatttcattttatgagtggcattagatatcttcggagattgctttatttgggaattaagattggcgtgatcggttagcttggatctcttgcatatgttctaggagtttaatctcacgttgatgataatatccagaatgtttgctgcttgctgcttcacttctttagatttcaaatcaaaatcttgtcttcgatactttgaagagtagtgaaattgtttttttcatgatcattttgctgatatggcatcaagtgttaagatgagaaatgtgtttgttttcagatacgagctggatatggacgttctgtattccaaccgcatctacctattatagttggacgtgatgtcagtggtgaagttgcggcaattgggacttcagtaaagtcacttaaagtaggacaagaagtttttggtgcgttgcatcagacggcgttaagaggtacttatactgactatggaagtctttcggaagacgaactcacgacacagccctcatcaatttcacatgtggtaagtagaaagatttagataccctattaacctctctaccttttttttttttattgttttttggttaagtgatttcagctattcttgtgtctgtctcttgtaggaagcaagtgccattccttttgcagctttgactgcttggcgtgctttgaagagtaatgcaaggataactgaagggtatgattttgagaaactattattcatgtggcaagaagttgatactaattcacctttcaacattcacacaaatgcttttcgtgttttttgtgaactactatgaactcaatagcataatcttaaaatcctttttatttgcagacaaagactattagtctttggaggaggaggagcagtaggtttttctgcaatccagcttgcggtagcatctgggtgtcatgttacagcctcttgtgttggtcagactaaagacagaatacttgcagctggggccgagcaagctgttgactacacaaccgaggtaatgacaccagctgtttatttatctgctcacccaaagtagagccattatgatcttgttctgattcttgaatctgaatctgtttcatgtacaggacattgagttggcggtaaaaggaaaatttgatgccgtgttagatactattggtgggcctgaaacggagagaataggcattaacttcttaaggaagggtggaaactatatgactctccaggtatataacatttcttgtgtttctgctttacaagctgcagtgaccttggttggtcttggattttgttttaacaacagtgatttattttttccctcttttgaatttatctgttaaagggtgaggctgcatcgttgactgataaatacggttttgtggttgggcttccccttgcaacatcgctcttgatgaagaaaaagatacaatatcagtattctcatggaataggtatatgatatatatatatatatcctgcattactctctctctctctctctctttgattttgaagtaactattctgataataagacctgtctcattgagcttttgagtgggaaagaaatggttaatgtgataaaatctgactgtgatgaacttatataaaaacagactattggtggacgtatatgagggctgatcctgaaggtctagccgagtatcagaatttagtaggagcaggaaagctaaagatacctgttaaagaacatttccaaaaacc

SEQ ID NO: 154307 - DNA, 2430 bp, Arabidopsis thaliana landsberg
aggtcttctttaaatattatcattcctgcgaaatcttcatttttagtgtctctagattttcccattaagtactttcttaaccttgtgagaaacctttgttgattcatataagaacatcagtatattgtcagacctcatcatttttttttcttttggtcggtataatcagagttctctgaatcattgggggaaatgggctcatgcttggagcaaatcgcgcctcataatgatcaagaaagtggtaagattttgggtatttagctatcatggacgtttgtttgtcctgtttccatgctgtaacattgtttcttctgcaggtggaattcttctaatgttaggtaaagttcagtttgagcttaagaaactcgtcgacacttatgtaagttgtatgttgcaactttgtacttttcatgaagcaatatgtataattatgaacaaaactgaggtagttcttgtttcattctttttttttctccttcagcgttctcaaatattcaagaccattacacgaccttcagagtcacttctcagtgaccttagaactgttgaggtatgccctagctttggtcttttacagtcagagattatttaaaagccggaaaagtttcacggtttgagcaagatttaaagctaaagtgaacaaaaaagcacaaccttaataaagaccgctgattttgtcgtatttccttttcttttcctctcaggatatgaagcaacaatgtgaagaaaagaggtcagtgactttctgcaatgtagttttttattctctcggttttgatttgataaaatcttgccttaacctctgactcttacttacagagacgttgttaagcacatgctaatggagcatgtgaaagacaaggtacaagttaaaggcactaaaggggagagacttattcgccgtcagctagagactgctcgcgatgagctacaagatgaggcgactctgtgcattttccgattgaaatctctcaaggaagggcaagctcgaagtctcctcacacaagcagcccgccaccacactgctcaggtaccttctgaataaaattactattctatgtaagaaaccttcctgcaatttctcaatcaatgtcgcttatactttcttatttttgcatagatgcatatgttctttgctggtctgaaatcgcttgaggcagtagagcaacacgtcagaattgctgcagatagacaacacatcgactgtgtgctctctgatcccgggaacgaaatggattgtagtgaggataatgatgatgatgaccgacttgttaatagagatggagaactcagttttgactacataacaagtgagcagagagtagaagttatatctacacctcatggatcgatgaaggtaatttggattttaaatttaacctgaattgggaaagaacaaatttattcgttaaaaagtaagctcatgtactgccatttctgtatagatggatgacacagatctctcgtttcaacgcccttcacctgcaggatcagcaacagtatgttcttttcttgatttttatgtcagatttaacatttcatgtcttgagaactctcagttagtcaactgtatgagaactgcattggcgattctgtgttgaagtctattctctgatgcaggtaaatgcagaccctagagaagagcactcagtttcaaaccgtgatcgcagaacgagcagccattcagcacctctgtttccggataagaaagctgatttagcagatagatcgatgaggcagatgactccatctgcaaatgcttacatattaccaactcccgtcgactcaaagtcctcaccaatcttcacaaaacctgtcacccagacaaaccacagtgcaaacttatggcattcatctccactagaaccaataaaaaccgctcataaagatgcggaaagcaacctctattcccgtctcccccgtccttcagaacacgcattttctggaccactcaagccatcctcaacccgtcttccagtaccagttgcagttcaggctcagtcatcttctcccagaatatctcctaccgcttcaccgcctcttgcttcttccccacgaatcaacgaactccatgagcttccaagaccaccaggtcaatttgcaccgccacgacgctcgaaatctcctggtttggttggtcattcggctccattaacggcttggaatcaagaaagaagcaatgtagtagtgtcaaccaacattgtagcatcaccacttccggttccaccgcttgttgtaccgagaagctactcgataccttctagaaaccagagagcaatggcccaacaacccttgcccgagaggaaccaaaacagagtagcctctccaccgcctcttccgctgactccagcgtctctgatgaatctcagatcgctgtctcggtctcatgtcggggaagttgcccagagcggactaattagaggtaacgga

SEQ ID NO: 154308 - DNA, 1464 bp, Arabidopsis thaliana landsberg; identical to SEQ ID NO: 36337

SEQ ID NO: 154309 - DNA, 763 bp, Arabidopsis thaliana landsberg; identical to SEQ ID NO: 44552

SEQ ID NO: 154310 - DNA, 1093 bp, Arabidopsis thaliana landsberg
agtattggtatgtgatatgcgtaccgtgaagttatagaagcttctctattgtccattattcattttgatgcttctctgtccttttcttcaccagattaggaaaatggatctcgaggcaaggacccttccacctaatcttaagtccagcctccttgtcaaattaagagaattcaagtctgatctgaacaatttcaaaactgaagtgaagagaatcacatctggacagttgaacgctgctgctcgtgatgagttgctagaagctggtatggctgacacaaagacggtatgtaaaggactcggtagtattgtttcaattttatctcatctcatatctttgctattaaaacgacctatgattttctttttttattgaaacgctgagatcaggcttcagctgatcagagagcaagattgatgatgtcaactgagcgtctgggccgaaccactgacagagtcaaggacagtcgtagaacaatgatggagactgaagaaatcggtgtttcaatcctccaagacttgcacggtcagagacagtctctcttacgtgcccacgaaacggtattgtctctctgcaacacatttactccatattctcaacgatattctgaacaaagtgacaaaataagatgagaattaagggctatatcataaagaagactatgttttcttgttttctttatctacgctggattgatatcgtgctaaccaaaatttagaactctgttgacagcttcatggagtagacgataacattggaaagagcaagaagatcttgacagacatgacgaggaggatgaacaagaacaaatggaccattggagccatcatcatcgcattgattgccgccattatcatcatcttgtacttcaaactcaccaagtaaagcctctgtacctaaatccgaccaaatcgaagaacaacggttgtgttcgttttgtgagtctttgatttattctgtttcttctttttgtgtgaaaagttgttttgccacctttgtattctaaatttgaccatacatacattaagcattacttcggcataagtgtcacgtatagtgtttatattgttcatatcaaatccagaactatacatg

SEQ ID NO: 154311 - DNA, 991 bp, Arabidopsis thaliana landsberg
agctgattgttttctatattttttgatataaagctcggtataggtaaagagaaagcgttaagcattactcaggcagtccaaaagtatggcaacctctcaggttttggtaagtagcaaattgaatgcaggggaaaacattcgtatagaatgtgatgaatgagtttatattgtgttgaatgcagtggaaagattttctgtgggaatgaggaatcctacagcgttcttcgccggggctcttgtaagtctgttgcggaattgattcaatatgtagcatatggttaaccaaacctatcatacatgaatctttacagggaatatctccagagtgtttctttgcaggagtttgttgcggtggtttgattactcttccacttcaggtttatctacttttctttatatattcgatttcgattctttgttacaatgtgaatccgaggactaactagaggatactgattctaaaaaatgtttcagcttgtgattgggtttctccttagagaacgccccatgtttgctcttgcagcagtagcaactgcagtggtaagtagagtaagagaaaactgatgtaaatttggtttcacacaagtttgaagttttggttccaatatttgtgcagggaatatggacgatctttccctatgtggtggctgcatcaacggctctgttcctctacattcgcagtcgctactccacgaaagattagttcttcttgttactactcaatatcaatacatagaaagatgtaagatcatataaaaagatcaattatagtactcagccaaccaaattaatggctttatgttgtactggagtattatgtacaaaggaatatagatacaaacttgctcaattgagttttttaaaacaactgttttgtgtttaggattgggacatcttaagagtatttacaaaaattcgaactccattttagcagactcatcagatctgtgatgatactaaggttgccacatgtgacatcatatcaaatttg

SEQ ID NO: 154312 - DNA, 5432 bp, Arabidopsis thaliana landsberg
agttatcccgatttgctgaacccgtgtcagagacttctgcaacatggggtcaacatgtggcgccagagaagttggtatggttcttccctttcaagtcgtctctaatatttatcgggactctgctaagcatctttttttatccttacatctgtgaagctccatgtcactcttctcttacttcacttgtgcttagttacaacaaacacacagcaagttcttatgtttttgggactgtgaatggtaattactttttgggattaatgattgatattcaatctagatagaactttaatagctggatacatcattcgtgtttgctatgggaacaagattaggatgctaaatttgtcaaattatagggcacttatttctcttagagaaatgctttgtagtgcgtaagataatctgacaactgagtggcacatggtctccaataagtctcgagttctggttgggcaaatagaatttgatggaagggtttttgtattattatttggcaaacttcaatcttcaaggtttttttgaagaatagttgtgtacaatttacccacctttgcattatctaccatgaaatttatcttcattcttagacttctcattgttttctacagggagttgctccatcaaagaatgatgggttttctttgacttctggagattttccttcccttggtgctgaaaaggacacttctgaaaagagtacaaggccacaaggtaccatctattaacagtaaaaattattgtgtcatccatgcattacagtactttgatttaagaatagttctctttgctcttttcaaaaagtacgatcagcatgtaaactaggaaaaaaaaattgtttcaacttgtacacaattcaatcttatactcgtcgtccttgccttcaagggagtgacgttagcacagacgggttcattttgaaagttggtacttctaaatgtaattctgttgagaagtttatctacacggatattcagcaaagttaaaactttcgggaatgacctttttttttggcttgctgttggttgaccactttttcgatcttagatgacctcctaatatgtgccactgagaattttaggattacctagatagaatgtgatgtgcttatatgaaggagatacgttagacatggctcttagaaactacaaatttgcagatgctggacctcacgctcgtcctccatcttcgtctggaagatctgtggaagggcaaggtgtagattgcacagaaggttcttactttcaaacctatttttctatgttttggggatatacaacagatgttggcatctcatttcgagagttacttatgtttataatcatctcttatgagagggccatgttaccctcacaggtgttcatgtgaattcttcttactgctttattccccgtacatctttttagtggatgttctcgcggacactatatttgaccatatcttgtcttttatttgcagaagctaatgaccggattggggatgccaattcctggagaagagagaatcaaccatacagtgaagatgcacctagacattgtagagaggaagggcaattggactcacgtggttcacaatcttatcctaatgctaattttcctcctcagtatgatgcttggcgtggtcctccagtaaataatcatcaaggaggtggctggtacggagggaaccacccgtatggtgccccaatgggtcctgggggttttcacatggatccttttccattttatcctacgcaagttccacctgctcctggacatggggctggtcctaggggtaatcacgctaataatgaaagaatgttcagacctccaatgcttgactcttatgtccacccaaggatgcagactaggcctgggttttatgttggtccagcgccacacgaaggctactatggtcctcccatggggtatggcagtcccagcaacagagacctaccttttgcaggtaggcctactggtccgcatgcttataacaatcattctggtcaaggtggatatgatacgcctggaagttcagtgtctttggaacggaacgagtcatcacattctcaagaaacacaaaggccatacaaggttctcctaaagcaccaagatgggaggtttggggaagataatgcaaagcgggaagaatttcttggaaataggctcccgaatgcagagaagatagctcaacagatgcaaacttcaagaaacgagaggagagaaatcagaaatgacgcacgtggtgaagtacaaccagtcaaagcagaacttgctgcccctggagatcctagtttgattcagaaaatcgagggcttaaatgcaaaaactagaactaatgatggttggcaaaattcgtcatctgttgttaattttgatgagcaggaaagccaaccacgtacactcaattctgggaactctgcaaataaagtttcagccagaaatcatcgaactggtcatgcaagtgacagtaagaactcatcacactataatcaaggtgattctgccacaaacaagaatgctgaacccgcagctatgggtggaactagcatattcaggtcagttatcatttttcaattgtgtttcggccagttatgccatcctttatgtcgggaaagttttgatgttagtacctacaggagacctactcaacagactcaaggcagagcagatccgcagaccaaacgaatagtgaacagtgaaggcaatgatgcttggcagaagacaactgttatgtcaggctcctcccatacaactttagctacaaacacagaaagcttttgcgaggttaatgtcgatgactctttggataccgagtccatcaggaggcctgggtcgggaatatcagcagacccaaaggataaccaggtataaactagttcatatgattctggttgttatttatacttttatgtatctcttgtttgtagtcatccttttttggtttgactgagtgtttgccatgttcccttaaaagcgttctacgatgagagagttagccaggcaacgtgctcaacagaggcagaaagaggaggaagaaagagcgagagatcagcgggctaaggctcttgcaaaactagaagagttaaatagacgttcccaagtatatgaggagggttcagttaagaacatggaagctgcatctaatgcttctccggctgacatgccaacagatcctggatctcattcatctaatgctacaaattccgtagaacctactggaggatcaggaaaaaacacaacgcaaaacacgaggacttcaacagaatatgcaaataatgtgggcccttcccaacaggataatcttccacgtgatggtggtgcctcaaaacagaagcgcttgggttataagcagaagcaaaatattatatttgagaaaaaaccgacagggagctctgttgctactgcagaggtgtttgatgttgtcccgtctcctgaggttgttaatgaaggtgtctcaagcaataactcagacatgccagcgacgtcaaccgtttcagctgagtcaactttcccgaaaagaaaaaataacaggaatggtaagaaaaaacacaaggctgaggagacagcaactatgaatactacaagagttgccgttggaaaagaaacaaaatcgggagatgagtcaattgagactggtagggcaagggcagctgaaattgagttggggtctgtttcagttccaagcctggatatcaaagtgtctggtgattcgtctgaacaaatcagttccttcactaatgaagagtctcaaaacagagctaaaaacaactggaaatctcaacatgtgcgtaggactcaaagaaactcactggtaaataagcctgcagagaaattttctggcaacaatgctgttatttgggctccagtacatccacagcaaaaagctgatgtttccactggtggagggagtcagactactgtccctgagtttggcacctcttcaaaaagtcagcatcaaggacagactagttctaaaagcaaaagagtggaaattgaaagatatgtaccgaagcctatagtaaaggaaatggctgagcaaatcgtcagtaaaaatctagtaacctctgctccagatatgtcggagaatgtaaaccagaaagaaaatcgtggaggtgagggtacaggaattctccaaccttctggttcaactgcagggaaatctgggtctccttcaaagtcaagacatgggaatggtaggcagggaaagcatggtagagaacatggatcatggcaccagagaggttctggagcacctactaaagctttggaggatggacaatttgtaacctcaaatcagcccatccgaggaacagtgaactatcactctagtaagcaaaccgaacaaattgctgccaaggatcaaaccacatgtaataaggatggatggaacgatggctggtatatgactcctgaaacgcattactctgctgctgaagaaatggaatccagtgctgttggaaaagatcaaggaatgagcatgcacggcaggcagcatgcttcaagaagcaacaaggatggaggaagcaactatggtgaccctaaaaaaggcaataagagggatttcaataaagctcatacgcagcactctggccatgggtttagccaaccagatttgcctgctgcttcaaaagaaggtcgtgtccctggagatcatgtgtggcatacagctaataggacaggtaagtatggtggtcgtgaaagtacaagggacaaaccttatggatctcaggaaaaaaatgttgttggatacgagcatcaagggtttactacagaacaaaaaacgacatcagctgatacacaagcccagttgcaaaaccgatctaccaataaggaggtccaggttgagcaaaatccgaatagtatgttccaaaagaacacagggcagggtcgacggtttggaagagggcaggagtcacaaggaggttggggtttaccggcgcaagagaatatgcaccatcaccatcagaggccaccttcaaacagagatagacagaagcaaaatctgcattatgaatacaaacctgttgggtctcatacttatgatggagaacgtagtcgagaacaatcgaaagagagttctcagacagaaggtccaagatacagagagaagggacaggggcagcaaaggcagggtggataccaacagcaaaggggtactagtgggagaaacggtggtcatggattcactggtgatagaaactaagattggcctcttattgttatttaggtagtaagagctgccatgctgaggatacttgcattttgagatatggcgattgaggaagctaattcgtaggcacatagcttgggagattgctgagaggagacctatccgaggaggtattggcagattaaaaaaaaaaagtctttgtcttgagagtttattattatatgtttcagtcacttgtttgaatatgattataactactgtagtagccttttgtatacact

SEQ ID NO: 154313 - DNA, 2439 bp, Arabidopsis thaliana landsberg
aaccctgaacaagctcatcgccacgtccgccgtgatcgtcttccccctccgcgctaaaacacggcgacgtgtacccgaaaaggccagtaagacgaggaccgttatccacgcaaccatggtggctcgtgctgctgccaccagtaaaacaagcgacaaggctgcagcgaggaagaagccgatgaacagaaggagttgatagagcggattcgtgacagatttagcggtggagattgtgtagaatgaagaaacaaagaagatgagacatgagagagtaatggtggttgttgctctacttttgcaaagatccatagctttgtgaatgtgaagtcaaaagtggttgtttaaattttttaagttaacaacaatgcttataaatggaaattaataggcttaggaaattagtttagttgagtggtgtttcattggaatgcatgtgaaggcacatggggggaggttgagttttatgggttgtgttatgaaatgattcatgagagtggtttgaagtaggagacacttaaaggcattgggtgtctattttggattaaagaaatgaaaaagatggatgaagacaatgaacagacagatgcatgggaattgtgggattcctcatctcggggcaaaaactgaggagcagtgtatgttatgttcggttgctgagtcagtttttgggatgtgttactgaggtaccaactcgaggtttaaagattggctattagattgatgtaatattatatatatatatatatatgttaaaacggagctagccttgcaaaactcaatttgatgacaaactcaattatagagaaaaaaactcaatttgatgagagaaatagttttctatttgttttggataatcaagatatcccgtaccgaagctaccctaatttccaagagatgtgaaaaattcatgaatctctcatctttggggttagaactgtcaattggacaggcggcccatgggcttgcccagtccaaatgcatatggacgggctatattctggaccaaaaaacaaatgttttaattaggcatatgaccagttttgtccgcgaataataagggcttgaccatatggacaatgggctgcccatgagcatgaattgagtcaataaacatgtcttcatttatttatattttttataattttaattacaattacaactaaataattataaaattacatattttacatttataagtttctacttctatgaaaattttaaattttaataaattatttttattaaattatttacggttttgaaggaaagatagtattccactatttttttgaatacgcaatttttagattttacggttttgacgggaaaaatacaattctccgattttacgattttgacagaaaaacgtaattccgcaaattttccaccaaaatcttgattttattatattaacgtgaacacaattttacggttttgacggaaaacacaattctccgattttacggttttggcgggaaaacgcaattttccagccaaaattgtgattttataatattggcgagaacacaattttacagttttggcggaaacacaactttcagattttacgatttgggcggaaaaacgtaattttccctttaaatcgttatttttttgtatcggtgaaaaaaatagttttacgattttaccgttttggcgggaaaaagcaattccataaattttccgccaaaatcgtgattttattgtattgggtaagaaaaacacaattttaccgttttgtcggagaaaggcaagtctccgatttttacaatttttgcggaaaaatgcaatttctcaatttttctttaaaattatgatttttgatttatcaatactaacaataataaaatgggctgaccatgggcttgccatatggacatggtctttattgggcatggacatttttcagaccattgtccattatagaccgtccaacttggcccataaaaaaaactgtccgtacggacacgcctaatggtccctggacggaccatttgacagctctagataggtgacaacaaagcatcaccgaaaaccaccgccggagacaccggggagaaggagatctgaaaatgatctacaaaccgagatttgctccgccgcttaagcacatcgctagggaaggaaactagctactgcctagatccatcaccgtctacaagcaatagaggcagagaccagaagattccgaccaccgaaaaccggccgacacgcacaacaaaccttcaacactcgccgcgagccgcagagctgaatcaaatccttcgatctcttcaagtgcacgtacgggaacagacaaagagatctagagccctctcacggcaccggtcacaaccggacaccggagaggcaagcaaaattgacagtgaaagaagatgttcggcgaagaagatgagagaaaagttttgtcgatcggttctagacagttttgtcgattag

SEQ ID NO: 154314 - DNA, 1010 bp, Arabidopsis thaliana landsberg
acattctgatgaaggagttcgattacgacaagcttgtcactgccatagatcgattctctccttcgaaactaatcgggaaaggaagccatggctatgtttataaagcccttcttcatcaccaagacgatgacgaaacacgtcgaagagtcgtagccattaaaacaccatcatcattatcattatctccctcatcaccatcctcaccatcatcatcatcatcatccaaatcagaacaaacgaagaaactagaaaacgagatcaatgttatgtcatcgttaccttatcacccacacgtgttaagctttcttggccatgccgagaaaaaactcatgatcgttgagtacatgccaaacggatcgttacaccagttattacacgtgtcaactgatcctcttcccacgtggcttaaacgcatcgaaatcgctcttcagatcgcgagtgcggttcacttcctccatgaacaaggtgtcatccaccgcgatatcaaatcggaaaacattttgtttgattcgaattgggaagcgaagcttgctgacttcggactcgccgttgaatttggaggtgataagaagataagaccggctccggcgggaactattggatacttggatccgtgttacacgttaccggagaatctgagtatgaagactgatgtttatagttacggtgtcgttttgttggagattgttagttgtagaaaagctattgacgtctctcgttcgccggcgtcgatagtggactgggcggttccgttgattaaggaagggaggatcggagaaatatgcggcggaggaggaggaggatcgggtgttttccggggaatgagtctacggttgttgcgtatggcggcgagatgcgtttcgtctgacgtggaatcacgaccgtgtttcagggagatcacggcggagataatggcgtgtttggaggaaccgttgaagagtttgccgttatggatgagcgttttgcgtcgggttgttaaactgaaacggcggaaaaaacggttgagagaa

SEQ ID NO: 154315 - DNA, 1841 bp, Arabidopsis thaliana landsberg
gagaaagtagtatttgttggggcggatatggtcggacttgccactgccgttgctcttcaccggtaagtatatagattacaaaatccggttctttgaattttcttagaaactcagagccacttagccggatatttttgtttgatgggtttaggcttggaatccggtcggtggtgttggagcaggcagagtcgcttcggacaggaggagcatcgctgacgctatccaagaatgggtggcgtgttcttgacgccatctccatcggacctcaactccgaaagcagtttcttgaaatgcaagggtacagtttctttctgcccatatcaaaaagatgattcggtcttctaataatgttaggagttttgttatccagaaagtgagaaactttgttattggttttacctgagtgtgttggtatgatcagctgagcaggatggtagtgaagaaggaagatggaagagagcttcgttctttcaaattcaaagacgaagatcaaaggtagctacttcagctttctggttaggagcattccatttgattcatgcgtgtaaccaacaaagtatatgtcttatatagccaagaagttcgggcggtggagaggcgagtactcttggaaacacttgcaagccagcttcctccacaaaccattcggttttcctccaaactggaaagtatacaaagcaatgccaatggggacactctccttcaacttggagatggaacccggttgcttgcaaaggtattcttctctcaggatctgagcctatggttatgtgtttatactcggtacatggatcttttgcttatcagacatcatgatgaaccaaactagtatgaatagagaagatatgtgccttagctgatttgatgatgtatgtctttgacagattgttattggttgtgacggtatccggtctaaggttgcaacttggatggggttcagtgagccgaaatatgttggccattgcgcttaccgtggcctcgggttctatccaaatggacagccatttcagaaaaaggtgaactacatatacggtaaagggcttagagctggatatgtacctgtctctgcaacaaaagtctactggttcatctgtttcaacagcccatctttaggtagatttcaacacttctcagacattccgcaaagataattccttttccttttcatttcctaatatcaaaaccacttgagacatgcagggcctcaaatgatggatccagctatcctaagaaaagaagccaaggaactggttagtacctggccagacgatctgcaaaacctcattgatctaacacctgatgaagcaatcagtagaactcctcttgcggaccggtggctttggcctggcattgctccttcagcatcaaaaggtagggttgttcttgttggagatgcttggcacccaatgactccaaatcttggacaaggtgcttgctgtgccttggaagattcagttcttctggcaaataaacttgccagagcaataaatggagggaccgaatcagttgaaagggcgatggaatcatataggagtgagagatggtctcaggtattccggttgacagtacttgcaaacctagtcggaaaacttctgcaatcagacaatcctctagtgtgttccgttagagacaatattgtcataccaaagttgctgaggcttggaccaatgcttgaacacgcaatctttgagtgtgaacctctctttgtttctaaaagctgaatttcgtatatatagtgagatccattgaatagagagacttgaacaatgtataatcataggagcaatataaactctgtgattgaatgtaaaagaatcatacaatgtaattctagaagcgat

SEQ ID NO: 154316 - DNA, 1602 bp, Arabidopsis thaliana landsberg
aagttgaaaatcctgctagagcttggcagatatatttgtttgcatataacaacagaattagatttccactttcttcaatgagaacctaatctcactttgctttacttatggaattacaggcacagtttcttaaagtttcctgcgaaataccagcgacaccaattgaagttaggaacacatccaaaaaactggaaactcctaaaggtggtgaacatttacgatcttccccttcctgtaactctgaagtagtgtttcacttgaatgagaaaaagaatgagccctgtgaagaaatgggaagatcattagatacttcagagcaaactcctagcaggtgaaactgctaatgttactttgctagataatatctcttttagctgagcttttgaaaagtaaaagaatcttggttctcctttcaaatatctagaactggcatgattgcttgcatatcctaacataaattcttacatcaggcaaatagttttagaggtttcatggagctggaatttactctttttctaactttctatcagttgcttgaccgatgcccggaacaatgcaaggatctcttctgcatctagtgatgatagtgaagaaagcattggtactgtgttcagggatgaggtggatagaaccggcgttagagaaaagacaaagtcagtgcggtctgaaattgactttggtcaatcttactcttctagttcttccaaaaacagaactgcaagcaaacctgaaatggttggaaaaacttctatctcagctacctcgccttatacaacctcaatgaagctatccgatgagattcaaacccctggaaccatttttcctgcaaatatggaatcagcaggaagagagagacgtagaatcaggtctcagtttgtgcattcagcttccaatctaattgtgaatgcctccctatgtaagctccacgaagattcaaatgcgaacctagaacaagctaaagttcaggcttacaaagagaagacagaaaatgaatctcccacatcaacaatatgtggggaaaagttggaagagagttcagatggaaaaaaacagataggtgaaattagtagttctcctttatccataaatcctggagacagacctatcattggaatggttgctgctcattggaatgagaaagagcattctcaaatctcacccaaatggtgggatggtaatgggataccaaactctacaaacaagtacaaagaggtactctcctgtttctttccgaatctctaggtttcttcacatttcatgtcattcattatgaatatatatatttttttttggcactcattatgaatatatgagtttctttttataatgcaggaccagaaagtgagttggcatgcaacacctttcgaagagagattagagaaggcactttcagaagaaggtggtcaaggtttcattcctccaaggtattaaccgtaaatctcattgataatctataggagaagtgatgaaacctaaataagcaacccccataaatgtgtgtgatgcaggaaacttgaagtgatgatggaggaggttgaaggggacacagacatatcgcagctgcaccattcagtgcaaccaaactcggtagtttccttctga

SEQ ID NO: 154317 - DNA, 1457 bp, Arabidopsis thaliana landsberg
ataagaatgaattaatgagagtatcgcataatggcaatagtcaaactcttcaaatacaccaaaacaaaaaagctttgaaactaaccgataatggctgatcaaatatcagaaccattgttgtctcatctcaccgatgattctggagtcaacgacaaaaccagatcagaagcattgactttcgacaagatcgtcgaacaaagtctatcagatttcggattctggcaatttttccagatatccctcgttggactagctttgctcttcgatgctcagcagatattcatcaccgtgtacacagatgcttatcccacgtggcactgtcttaaccacacgatctgtgatccttcagcctccgacatctgcaagcttccaagatcagcttgggaatgggacggtggctcccagggcaaatccgtcatttccgaatttggcctcgagtgctcgagctctttactcagaggtatgcctagttctgctttctacatcggtgccattgttggagggttttttcttgctttgattccagacgattccttgggtcgcaagaaactagttttgttctcaacctttgcaatgtcaatcacttcaatctctgttatcttctcaaccaatgtatggatttatacattccttaagtttatcattggattttcgcgatcacagacctggtcatacgcgttggttctcatcagtgagcgagtctccaccagatggagaccgagagctacgatgattccatttaccctattcgttttagggtttatgtcgttgtctggaatcgctttccttgcacaagattcgtcatggagatatctatatctatacacatccggtccagcggtattttactgtatcttcctctacctctttgcactcgaatcgcctcggtggcttcacatgcaaggaaaggataaagaagccattgatgttctctcaaagatgtcaccgaaggaaaaagtttatttggaatcagtggtttctaagttacccctcgagcaagaaaactttgaaaaagtgccaacttactcgattaaagacttcttcttccgaaaatgggcttttaggaggattttagttgttatgatcattatgtttgggttgggaatatcgtattatggtgttcctttagcagctagagacatagacgtcaacatctacttgagtgaaaccctaaacgcagtggtggagttgcctactttcattatcactccaatcttattggagagatttaacagaagaagctctgttctagtgaataccttactcggtggggcatcaggagtgctctgtttcgttctcagcattctcggaaaaacggagatcgcgtttgccttcgaactcggaacattcttctgcgctagaatcggatttaaccttatggcagtttttatggttgaaatgtttccaacttgtgtgagaagctcggcaacaatgatgtttagacaggctcttgtcgt

SEQ ID NO: 154318 - DNA, 473 bp, Arabidopsis thaliana landsberg
atggctaaacgttttctccttcttcttcctcttttgtcaactattctacttctttccgtatccgttacagaatccgaagcttactccacaacaaagccgtgtcaaggctacaagccggataaattcacccacctccacttttacttccatgacgtcatctccggtgacaaacctaccgccgtcaaagttgcggaagcccgccgaacaaattcctccaacgtcaattttggcgtgattatgatcgctgatgatccgttgaccgaaggaccagacccgagctcaaaggaagtgggaagagctcaagggatgtacgcattgacagccatgaagaacataagcttcacaatggtctttaacttggcttttacggcgggagagtttaatggaagcaccgtcgcgatgaatggacagaatgagatattttcgaaggtgagagagatgccaatattggaggaaccggtgctttcaggttt

SEQ ID NO: 154319 - DNA, 3412 bp, Arabidopsis thaliana landsberg; identical to SEQ ID NO: 28542

SEQ ID NO: 154320 - DNA, 2086 bp, Arabidopsis thaliana landsberg
tatgtggttaagaagattcgtttggctaaacaaacagagagattcttgtttgctgcaatccaagaggttgaatattagcatgatcttgattatatatccaatgttgattcttgaaaaacaaaatgtttattttgttgttgttataatgtagatgagtttgatatcaaagcttaagagtccttatattgtggagtacaaagattcttgggttgaaaaggtaatatattcttcttgttcaaagctcgttatctagcggcgcaggaaattctaaactattttgggattttgtttatgcaggattgtgtatgcattgtaactagttattgtgagggtggagacatgtaagtcaaatcatttcatatttcaattgtatgtttcttgattattctttggtgatggttttcctaagtgatcatggtaaatgcaggactcaaatgataaagaaatcaagaggagtattcgcgtccgaagaagttagcaatcactaaggaatctttttggtctaaatgatagactgatattgaatctaactaataatgatcttcgtcgttctctgtagaaactctgtagatggatggtgcagctactgttggctatagattacctccataacaatcgagttcttcaccgtgaccttaaggtaacaacttctattagtctttatgcttcttttgcttcaatggaacaacacatccattcacactgctaaccaaattttccagtgctccaacatattcctcactaaagagaacgaggttcggttaggtaaagaaatcctatgcaaaatcctctcttagttacctcttaagaagcttttctagaaccattgtcttaagattggctcttttatcaggtgactttggcctagcaaaacttctaggcaaagatgatcttgcttcctcggtaatgctcatattccattgggatttatagcttttcgtcgaagtatttctgaaacatttttttgtttttttttgtagatggtaggaacaccaaactacatgtgccctgaacttcttgcagatataccttatggctacaaatctgatatttggtctttaggtttaacttacaatcctatcttgtgatttcttaaaattcttgttcttggtttctcataaagatattggctctacaggttgttgtatgtttgaagtagctgctcatcaaccggccttcaaggctcctgtaagaagtttttccattttcgacttgttaaacccgaaattcttttcgagattctgaaactatcttgcttgtaaacaggacatggcagcactcatcaacaagattaaccgctcttcgctttctcctctcccagtcatgtattcctcttcattgtaagtatacaaatacaattagtttagtgcagaaaacaagcttttgagtgttactgacttaatgttatgaatttctaatatgttttgcagaaaaagactgatcaaaagtatgttgcgcaagaaccctgaacatagaccaactgtgagttgatgagttccattagtttcttcttctttttctactttacttccgcaatttcttctaactttcttgaatggaaaatgtctctatataggctgcagaattgctaagacatcctcacttacagccatatcttgcacaatgccaaaatctgtccccagttttcaaaccggttgtgtccaaatcagaacacaacaacaacgaaaacagaacaggtatccccccgaagaccaaatccgcaaaaacacccattaaacataatcaagaaggagaggaaacagagaagagaaataaggatacgagctctagttcaaaagacaaggagagaccagcaaagagccaagagatgtcagtgattagcacattaacactgctacgcgagtttcaaaagaaaagcccgaaaagcgaggagagggcagaggcattggaatctttgttggagctttgtgcaggtttacttaggcaagagaagtttgatgagcttgaaggagttttgaaaccttttggagatgaaacagtttcatcaagagaaaccgctatttggcttacaaagagtctcatgaatgtaaagagaaagcaaaacgatgatgaaaccaatctttaa

SEQ ID NO: 154321 - DNA, 1678 bp, Arabidopsis thaliana landsberg
  unsure (1)..(1678): unsure at all n locations
gttcagatttttctcctcgaatcccggtgagaactcgactacggcccntgagtcttcgccgactgattcaccgagaaagaaagatctcgttgtagaagatgtaagcaacaaaggtaaaacacactctatcctcttgtttggttacctcacacttgaaatggcctttgtattagttgaaatgtgtgagtttaattctcatctcaccatttctcaatacctcatagttttcaattgatccttcgatacaagattcgtagcttcttatctcatgaactagtagaatagctgtaggtaatcgtttgaaattgacttcatttattggattttgtggtctcagagcttaaaagccgtatagagaagtatttcaatgagggtaatgaagatgctttacccggagttattgaagcacttctacagagaagacttgtagacaaacacgcagagactgatgatgaattgttggaaaaaatcgagtctctacctttcaaagatgatgtcaaggatgaagattttgaatccgatttcgaggaagcacattctactgacgaagaacttgaggatttgtacaattctcccgagtatgtagctgaaaagatgaggaagaatgagtttttcaacatggatgataagaagtgggatcacatgattagagaaggtatccaacatgggtgtcttactgatactaaagaatgcgaggagattcttgaggatatgctcaaatgggaccagcttcttcctggtaatggctcgtttattttcaatcttcccgttcatcgactcacatccttagacatagattaggttgattaatagactaatgtgcgtcgttatagctaaacacaatctcttcgtggaacttagcttttgtagttaacctttctatttggatttttctgaatcatggtatgagaagttgagaaccattcgtttttttaactcgtagaaggtaatgtactatgccagatatgttacttctcggatcagtagggccgtttagagaatatattggtttgttcctgtgatgcgtacatatgaacatttctctaactgtgtatgttcattcagatgacttgaagaaaaaggttgaagcaaagtttaatgagcttggagatatgtgtgaaagaggtgaaattgaggctgaagcagcttatgagctttttaaggaatttgaagatgagatggtaattcagtatggggatcagatggaagctgagggtcctccccaatttggtgaaacagatgcttccgataggaatactgacttggatgatccccctggtaaaggcccaatcctcaggtggcaatcaaggatagtttttgctcctggaggtgatgcgtggcatccaaagaacaggaaagttaaaatgtctgttacagtgaaagagcttgggctctcaaagcatcaggctaaaaggctaagggaacttgtggggaaaagataccattcggggaaagacgagcttacaatcaccagcgagaggtatatataactataaatcttaagcttttcgtgagacaagaatgttgaatcatgaaatgtttttgtcctgtcacaggtttgaacaccgagaggaaaacaggaaagactgcttaagaactctttacgggttgatagaagaagctgggaaagccaacaagatcgctgaagacataagaacttcatatgtaaaacaactta

SEQ ID NO: 154322 - DNA, 1343 bp, Arabidopsis thaliana landsberg; identical to SEQ ID NO: 27634

SEQ ID NO: 154323 - DNA, 5313 bp, Arabidopsis thaliana landsberg; identical to SEQ ID NO: 15522
  unsure (1)..(5313): unsure at all n locations

SEQ ID NO: 154324 - DNA, 769 bp, Arabidopsis thaliana landsberg
ttttatgtttaaaggaattgaaagcgatgagaaaatacggcgagtgcggagttttggaggagaagctgtcgaaaaagaaacttccggtagagaatctggatcggcgaccggtcaggagcggacacaggcgactgtcggagaaagtcaaaggaagcgagggaggacaccggcggagaaagagaacaagcggctgaagaggtgtctttttctctattcattgaatttacatttttaccctttatatggaaggtgattatgttaaataacggttgcgtgatggggttgtttggtaattttgtggtgaaaaggttgttgaggaacagagtttcagctcagcaagcaagagagaggaaaaaggcttacttgagcgagttggaaaacagagtgaaagacttggagaacaaaaactctgaacttgaagagcgactctctactcttcagaacgagaaccagatgcttagacatgtacgttttgtcgatcttactgttgacttaacctgcaacgtcaatgcttttgccatttgttttttgatatatcacagtactggtttatcacatttacgagtctaggattgaccaataattagtttagttagttaaaaggatctaagaagctaacttaagctttagattaattctcagaaggcatgtaggttcttgaaatggtcattcactcgcatattctctcaaaaggcatgtaaattcttcaatggttcttgaaatgctcactcattttgttctatatgaatggacaaaatgacctacagag

SEQ ID NO: 154325 - DNA, 1603 bp, Arabidopsis thaliana landsberg; identical to SEQ ID NO: 29920

SEQ ID NO: 154326 - DNA, 1809 bp, Arabidopsis thaliana landsberg
agattaaccgaagggagttgactcgcgacgtctcgattcctcttgcggtggtttcggtggtgaggcggattcgcttgtggcggagcagggtagctcccgaagtgatagcgttgccggtgacgacagtgaggaagatgatgattgggaaggcgtcgagagcacggaactcgatgaggcttttagcgccgccactctttttgtgactaccgccgccgcagatcggctttcgcagaaggtaccgagtgatgtgcagcagcagctttacggattgtataagattgctacggaagggccgtgtactgctcctcagccatcagctctcaaaatgactgctcgtgccaagtggtatctctctctttcgttgaatctgctgtgccattaacttctatgtatcattttctggtgtttttgttcaactgtttgagatttgatttgaggtggaaatttttgaggttttaggttcttcatagacaatcacctagtttgcttcttagcttatgcaactgctggaagatgatgtggtttttactgttgtaacagttgattgtatatggaattgtggtttgttgtaagattgcaatttcattgattgggatgtgccatgatcttgttctatctcaggcaagcatggcagaaactgggagctatgccacctgaagaggcgatggagaagtatattgagattgtcactcagctttacccaacttggttagacggtggcgtggtataaagctttttccccttttctttgtttgattgcttcggtttcttcctctggcctgttcatgtgagcttcactaacagaaagccggaagtcggggtggggatgatgcagcctccaactcaagaggaaccatgggaccagtttttagctctttggtttatgatgaggagtccgaaaatgagttgtaaggttctcttcttgtattctcatgtgttttatatcctgatccttgcgttcatgtctagattagatataagtatcctgatttgtgaaagaggctcataaactcggtgaatatgtaacattactgtctcgttctagctgtagcaaattttgatggtgaaatggctacaattgtctcatggaactttgagctgttcgtttcttcctgtctatctgaatgaaacactaatcctctgctcattgaacttttgttttatctctcaggaagattgatgccatacacggatttgctagagaaggagaagtcgagaatttactgaaaagcattgaaagcggcattcctgtaaatgcaaggggttagtctctgcttgtatattccgtttcttggaagttcattctcgtgatgttggatctgcattctaattttcccataaactgcagacagtgaaggtcgcacgccattgcactgggctatagaccgtggccacctcaacatcgccagagttctggtcgataagaacgccaatgtgaatgctaaggtgacgaaagagaaattcctacccagtcattatctgcaaagttagcaacttctttagttatgtgaatctggatcttgtgttgaacaggacaacgaaggccaaacccctttgcattatgctgttgtatgcgacagagaagctatcgccgagtttctggttaaacagaacgcaaacacagccgctaaagatgaggatggaaactctccccttgatctctgtgaatcagactggccctggatccgagattctgcaaagcaggcagactaaacaaatactaaccacgtcttctctaaatccgcaatgtatatgatcaaatgacttagtaagaagcttttctttactttaaactttctttccatccct

SEQ ID NO: 154327 - DNA, 1515 bp, Arabidopsis thaliana landsberg
ctacgcttccgagttgcgatggattatcccaattacctctgttgtccttgtgacaggggcactgccaccactttttatgctccgagcatcttctttgcaattctgagccagtttggtcccgtccctcctcatgtaagttcctacttctttttttattcacttaacatcaccttaagaggcagctgtgttgggagattgatatgtgtatatatgtaatggctcccattaacagatagagcagaaacacaagtatgctgcttggaaggctgctgacataaggaaagccattaaagaaggaaggaagcccactccaggtgatcctgtggatgatgatactgatttatccatcccatcaagcggtcctagtggctcctatgtaagtttctcttcttgaatatttatggattggaaatatcttgatattggcttagcgtgtattctgtccaataatatcgaaaagtgtttaggagcgtaaatgtttatagaattcgcatagcgctgatcaaaatcatctagctagagacacacacattcacacccacctgtgtacttttaggtttttgttttctcaattgtcaaaacactatgataaaacgtctgcatcaacttaatcgattcattgtttgtgcatgttaattatctacaggatcacagtgcaagtgataccaacacaacaagtcatcatagaacagagcttgatccaccccatgactcgaatgatgactccagccaccatcaattccctgaagtgccacaacaccctctacctcccaggttttatgacaatccgaccaacgattatcccgcagatgtcccacctccaccaccgtcttcttacccttccaacgatcatcttccccctcccacaggaccatcagactccccttacccgcatccttacagtcatcaaccataccaccaagacccgccaaaacacatgccgccaccgcaaaactactcatctcatgagccttctccaaattctctccctaatttccaatcttatcctagctttagtgagagcagcctcccatccacttctccccactacccttctcactaccaaaacccagaaccttactattcttctccgcactctgcacctgctccttcttccacaagcttctcctctgctcctcctcctccaccttactcatcaaacgggcgtatcaatattgctcccgtgctagatcctgcaccgagttcagctcagaagtaccattacgatagcagctaccagccagggcctgagaaggttgcagaggcactcaaggctgctagattcgctgtgggagctttggcttttgatgaagtctcgactgctgtagaacatctcaagaagtcacttgagttgctaacaaatccatcggccggtgccggtcactgaattttatatctaatctatgacacttggggttgatgttagtgcgtgtgtgtgttctcaccacatttgtgggtttgtttattaacttttcaggctcagacttcgtttacaaagaaaatttgtgtgaatta

SEQ ID NO: 154328 - DNA, 2789 bp, Arabidopsis thaliana landsberg
gacatactcgactttgatctcacttttagatttactaaattgaattgcatgtttgttttgttttcttaacacaaaaaaaataaaataaaaaaatgggaagtggtttgaagtgcttgatgggctgctgggtccgtactggaaagcagcggggctcgcatttaattgcaccttcttgttattcggatcagtcatccagctcatcgcttgtgctaggtacttcttcctctcttttttattgctttttaccaatctttttaatagtatattgatatagagggacaaatacatatatctaaatgatatcatcaattgattcatgtgtgtgtgttgttgggatgatgcagcaatatatattacataaacgataggttagacaagaggacatggacttatatatttggggcttgttgtgccacgaccgttttcataccatcttttcacaattaccgtatttggtctttcctcggccttggcatgaccacctacaccgcttggtacctcaccatcgcctctcttctccatggtcaggtatgtcctcatcaaaatcaaatgatttaaatgaagaaaaaacaatgtgacttaaaccggttgtaacttactggtttgtaggcggagggtgtgacacattccggtccgaccaagcttgtgttgtactttaccggagccaccaacatcctctataccttcggtggacacgctgtgaccgtgtaagtatttttaatatttctcatggattttcaattaattgtataatccacaacaattggaaaagtgatgcattcctaacaaactaattatagttggatataagttataatttcttctccatatacagcatttgttgtgttgcaatttgcaaatattaaaaaaaaaatgaattttccctgaagatttatgtttccttcttcttttttaaagactcatctcttttagcttctatatgtgcagcttttgccggttactttaggttctgtcctaaacgcacaaacagacaaaatcattattacggaataaataaagacaaatttaccagaaaaattctatttacctttttaacacacactagctactagctactgaactcaattcctaacattctttttattttagtaaattttactcacaaatatctatctcatcttcgagagtacgactacgtaacgtaaccacagtggtcggacccggacggccaatctctggtcggacccataaatccactgtaaaagacttttatgccatttccttttacattttatctataaaaaaagttataaaattttcagggaaataatgcatgcgatgtggaaaccaaggaagtttaagagcatctacttgatggcaactctgtacgtcttcacattaacgcttccgtcagcctccgccgtctactgggctttcggcgaccaacttctcaaccactcaaacgctttctctctcctccctaaaacgcgtttccgtgacaccgccgttatcctcatgctcatccatcaggttcctatcatcctaactctcactatgttacatgtctcacaataattacactatgccattaatgattggtccaagttacatgctattatttatacggtaccggtccatactaagaacattattctctttcgcaatgaaattaatactataagagcatccttattgatggtctcttaatacaattcttatgttaagagacatgtcttataactaacaaatgactcttatttttgttagttataagacatatctcttaacataagagttgtcttaagagactatcaataatgatggtctaaggaatcttgttatagtttatgacatgtatatatacgtctaactagttaattaacatttttcgccctattaacatatagggcgaatgatatatgtatgaatacaaatgttatcggattatatattctttctcaaaattttgtttcgaatttatagtttataacgttcgggtttgcgtgtacaccattgtacttcgtatgggaaaaagcgatcggaatgcaccacacaaagagcttatgtctaagagcgctggtgaggctacctgtggtggttccgatatggtttttggcaatcatctttccctttttcgggccaataaactcggcagttggagccttacttgttaccttcaccgtctatatcatccctgccttagcccacatgctcacgtaccgcaccgcctctgcccgccgggtacctacattcttctctcgctcacattaccattcctactaaagattttatgaattcagtagatgacttacatttatttcatttagatagatagttttgtaaaaaaaaaatattggaggagagagataaagatataacatacgttgagttattatgagctggcttataagacttttgcatttaatcccatatcaatgaggtaggtccatagtatataatgtgtccattattatcacttggctagttttataaatgtctataacatatattctcgtcgatgattaaaataagtagattagttcatgcaatgatatgatacgacgtattgatttgcctttttttctttaaacgtgatggcgtggcagaacgcggcggagaaaccaccgttttttatccctagctgggctgcagtttacgtgataaacgctttcatagtggtttgggtcctagttctcgggttcgggtttggcggatgggccagcatgaccaacttcatcaggcaaattgatacttttggcctctttgccaaatgctaccaatgcaaaccacctccagctccgatagccgccggagctcaccaccgccgt

SEQ ID NO: 154329 - DNA, 2149 bp, Arabidopsis thaliana landsberg
  unsure (1)..(2149): unsure at all n locations
cgcagacgcacccagaaactaaaaaaaactgcttcctctctctctctctcttcccatcatcatcgtcgtctctttctcagatcgattttnnnnnnnnnnnnnnnnnnnnnnnnnnnnnncgtttgatttcatcgccggagaggatctttctttgtctacgtatgccctttcgtatacgcgtttcgtgttttgattttccccgaaacctttcgttgttctggtgagaacctggcccatgtttttgaatctaatctactatatcggtttctcctgtggtgatgattgcgaattgacttagaaatcgtaggttgatttcttgttgcttgtgtatttgttagatcatttctctgatgaaattcgtgttccttggtcttgactcggttattcaggtcctgagtttccgagttcggtttatctcctctctcgtaggagcttttcattgaatgattaatctcagatcgttttggctttttttttttaataagaacttcagatctttttggtttcttaagctttatcgattttgaagtgagtcttatattttcattgtgtgcttactgcagggttactgtgtgaggaaggacgtgcaaatttgtttggaagttgtgttaagttaaagcagagtattggagatcgtctgatagagaagagaatagttcttgtgtaaggttatgggttcagtttgttgtgtagctgtgaaagacagaaaggttcctcctagtggtggacctgcgagttcatctgttcatcggaattcagcatgttcgccacaatggagttttcgacgtgataataggaggcgagtggctgatgagattgagggttcaccttattacagtccttatgttgcgagtagaggtattagtatggataagatgtcattaggctctgagagaggaactttatctgaaggaggaacccctcctgatggacatttagggactcctgcttctcagaaatcagcaactccggaaatgagcaccaattccatggttccaccttcttcaggtaattctttttttgagacaatgacactattgggagctaattctgactgtaatctaactctttgctttgagtcgttttaattttttccttgaatcttttcgttccaccaacgtgtataagtaaagcttgctagttttcatgatctcttcacggtgttgagtagatatagttgacatagggatttttaagttgaacgttaatgactatattcctttttgtcaccaagaaccatgttattgtaatgaattagtcttgcgtatcgtattcctgctgtgtcttatgttatgcttttctgtgcggcaggttcatccttggcaagcagtgatctcattgaggtgagatgatcgacttgactctagtgttcctctcgtggaagctttcttttctttccttcggtgtatctttaacccttgttggatcttcattgtttcaggtgaagaacttagttgactcacctggaattgtcccttcagctcaatcgaagcctttgttctccacgccttctcttcccaatccagttagtgatctttcatcggctcacacgcgtttgcttcctcctaaatccacaccatcaagacgggctcggcgttcacctgggcatcagttgtttaggcaggtttctgatagtcaaattttaggactgaaatccccaattaataattactcaatctcagaaggaaggtcgtcctttgtgctttcgacctgtagcaatgacttcgccactggatcccagtacgcatcttctgaaggtggctggtctatgaacactttttctgagctcgtggcatattctcaaagggatagatggtcctttgatagcgaacacttgggttctggcagacggaaactaagtggtggtagcagcagattctcattctccccttccgttgttgatcagcaggtttgtggagcttgttcaaagttgctaaccgagaggtcttctatagccacttttgagctcccaatcgctgctgttcttgcctgtggtcatgtttaccacgcagagtgcttagagaccatgactactgatatagagaagtatgatcctgcttgtcccatatgcacaattggggagaaacgggttgcgaaaataacaaggaaagccctaaaagcggaggcggaagcaaaggcaaagccgtta

SEQ ID NO: 154330 - DNA, 3204 bp, Arabidopsis thaliana landsberg; identical to SEQ ID NO: 4707

SEQ ID NO: 154331 - DNA, 1038 bp, Arabidopsis thaliana landsberg
tatgtaagagaggtgaactgatttggctttaaatctgctaacaagatggaagctgcgaaaatagaggccaatgttgtgatctacagcacagtcatagatagtctctgcaaatatagacatgaggatgatgcactcaacttgttcactgaaatggaaaacaaaggagttagaccaaatgttatcacctacagctccctcataagttgcctttgtaattacggaagatggagtgatgcttctcgactactcagtgatatgattgagaggaaaatcaatccaaatgtagtcactttcagcgcattgattgatgcatttgtgaagaaggggaagcttgtagaggctgagaaattgtacgacgagatgatcaaaaggtctatagatcctgatattttcacttatagttcactgatcaatgggttttgtatgcacgatcgtttagacgaggccaagcacatgtttgagttgatgattagcaaggactgtttcccaaacgtagtgacttacaatactcttataaagggattttgtaaggctaagagagtagaagaaggtatggaactcttccgcgagatgtctcaaagaggattgtttggcaacacagtcacttacaacactcttatccaagggttatttcaagctggagattgtgatatggctcaaaaaatattcaaaaagatggtatctgatggtgtgcctcccgatatcataacatacagcattctgttagatggactttgtaaaaatgggaagctagcgaaagcaatggttgtattcgagtatctgcaaaggagtacaatggaacctgatatttacacatataatattatgattgaagggatgtgcaaggcagggaaggtggaagatgggtgggatctattttgtagcctcagccttaaaggagtgaagcctaatgttgtaacctacacaacaatgatctcaggattttgtaggaaaggtttaaacaaagaagcagatgccttgtttagagatatgaaagaagatgggactcttccagatagcggttgctataagatgcca

SEQ ID NO: 154332 - DNA, 1081 bp, Arabidopsis thaliana landsberg
aacgaagaaacactctaccagaaaactgcttcaggtcttaactctaaaacctcacaagaactttcaccattttctggttcatatatctgttctgatttgtagaagaagttgattctggcgtttctgatgtgtatagaaggatctgtgaagtaattgtttatatatcttagtttaggttaattcaatcactatattgaacaatgcttgttcagatcctatactcatgattctagtattgatgtgcttggtttctgatacagggaaactatttgttgatgtaatgaaagaagctggagtgcttccaggtattaaagtcgataaaggaaccgttgagctcgctggtacaaacggcgaaaccacaaccatcggcctcgatggacttggtgaccgttgcaagaaatactacgaagctggtgcacgttttgccaagtggcgtgctgttctcaaaatcggaaacaatgagccttctgagttagctatccatgagaatgcttacggtttagcgagatatgcagttatttgccaagagaacggtcttgttcccattgttgaaccagagattcttgttgatggatctcatgacattgagaaatgtgcttatgtcacggaacgagtccttgcagcttgttacaaggcactaagtgatcaccatgtgatcttagaaggaacactcttgaaaccaaacatggttactccaggttctgacagtggttctaaagttaaacccgaagtgatcgccaagcacacggtccgtgctttacaaaggactgttcctgcagcagttccagccgttgtgttcttgtctggaggacagagtgaggaagaagcaactgtgaatttaaacgccattaatcagctcaaagggaagaaaccatggagcttgacgttttcgtatggacgtgcgcttcaacagagtacactcaaggcttggggaggtaaagaggagaatgtggacaaggctcaaaaggcgttcttggctagagccaaggctaactctgaagcaacccttggtggctacaagggtgatgctcagttaggtgaaggtgcgtccgagagccttcacgtcaaagactacaaatat

SEQ ID NO: 154333 - DNA, 4994 bp, Arabidopsis thaliana landsberg
atggagcacaataagggattatggaagcttttcagcaataaagatcttgaaggacgtttttcagaagcttgtgtcgatcgacaccacacctgtgtcgatcgacaccacacctgtgtcgatcgacaccctcgtcggtgccaggagaatattcgttttacaccaagtctttgagaagccctaaagttttccttatttgcaaaatagtccctgcacgtttttagagttaaatacctaattgtttggtcattattagacctagtttttgttcttgagcttttgttacactttagagaaacagaatccaatccctaaagagaggatctgaactgctttgctattattcttaattcatcaatgaaaactattcagattatgatttgtgtttttattgtcaagtctgagtaatcaccttattgggtccagggagtctcaatagggatttagatggattagtagatcgaaaaccccttaggattgttcttaaagttcttcatcttgattattcttaatgctagttttagattgatcacctagaacttgatattagataataggtattcccgccataggtatttgttatttgaaccatcatagatgagcctaggcatttaagaaagaacaggtaggctcatagaagagctctggtttagatactaggtgaactaatcaagcttattaacaatgcatgctttagcataggatttctcggcttctccggttatcttagttgtaagtatagagtgtttcgcggaacgccagcggttactctagaatgatagtttgagtttgagaacggtgcgataacaatcctgatattagctagatctacaatttatttatctcccgagacaattccttagacctgacgctttaatcacttgaatctacaactcatttacatgcttatttgcctttaatattcaattactttatttagcttattaaacaacatcataagtctattgtgtgaacatcgagagctcagtggaattcgacccttaaatgctaacgacgatctcttatttgagggagtaagcttatagcaatttgagctatatcaaatttggcaccgttgccgaagttctcttttagttcaccattagactaggtgtcattttaagtttatatacttcttttctatcacctattcacgtgtttctttatcttttggtctcttgtgtttcaggtaccttcagattgagaatcacgtttcaatgacagactttcacgatagtgtcgaccgacaccatcagggtgccgatcgacaccctttgcagaaccagacagctacaataggcgactttaacagaattgatattttctacaccaaccgatcagcattcaagctacctccatttgaaagagaagactttgctatacaccatgcctattatgatcttgtatcaagaggaaagtttagaggagctcccgatgaatcaccattagatcatttggaagtcttcaaagacatagtgtcctctatcaaagcagaaggtgtaccagctgattaccttctttgcaaactcttcccccactctctcgcgagcagaggaacatcatggttgtgtcaactagaaccaagttcactaaccaattggactgatacaaagaatgcattcatgaatcacttctttgatgaatccgtgacagaagcacttcgtttgcaaatttctttgttcactcaagctccagccgagtcccttagagcagcttggctcagtttcaggtcttatcagggagaatttttccaacatggcttccaagagagccaactcatcaatctattctaaagaggaataaccaagacataccgaagtcaactcgatgcaacaagctactgtaacttcatgacaagaaccactagtgaagcattactcctcatcaccaatgctttaactagtcttttgacacatgaagttgacccagaacaaagactttcagctgagattgcaaccacaagcacagaggatcatgtttcagcaatctctgctcctatccaagcccccccccccccttcgaccctccttagacagccgaatggaatccatgcttgcgcagattcttggcaagtttgatgctgtctacacagatcttaatgggaagatcgacaatctgagctctcacttgaagaagctggatgtacaggtggctcaaactgcacaatctatcaagagacaagagggctttcttcttggtaatcctgatgcaaacccaaggaagagctgtaatgccatcttgattaaagaaggagatgatgtgtgggaggaattggacactgaagaggagttggagcttgcagttgcagagatggtgtcgaccgacactctcctgtgtcgatcgacaccatacgagactctttctctaagacgactcaatacgacggtgttgatcgatacccctctagtgtcgatcgacactggatccggactgccccttgtgaggtgcaagtacctatgtagcccgagtctgtctacactcctcctgtcccctatccgaggaggcgtcgttgtaaacaggagattcatgctgccaagtgcacatctataatggagaagatccttcatactcttcctaaggatgattctaagacatcttctgcctcactcaacaggtatgtcaagcgacttgttgacaatggaatgagctcagatgaagctaaactgctcacacaggacatcagtgcaatcatgctgcctaaggccaagaaggagaaggcacagagagtggacatagctgagtacatccgcactatccaggttagaccactaaaaagctcccagatccaggtagcttcgttcttgattgctctatctccacaagcaggttcagccgctctttgtgtgatctgggatcaagtagcaacctcatgcctaagtatggttcttagagattaggcatgactaactacaggccaactaaaatcaccctcctattcgcggattgttccaaacgaatccttgaaggaatccttgaggatgttcctgttaaggttggcaattccttaatccctactgattttgtggtcctggactacaataaggaacccaaatatcatatccttggaagagctttcctagctacagctggtgctaggattgatgtaaagagaggtacagtgtctcttaacatttgtgacttggagatggagttaggcagggatggtacaaagttaattaggcttatcagtagcatgatctccacccaggacacacctcctcagactgctcagaatccccaaatagagccaccaaaaacgctccttttagctcagctcgcaaatgggagttgtagagcaacggtgtcgatcagtttacatgagtatcgatcgacacctgtagctgcccataccagatctttttacacaccgctgataataggtttttaagatcaattaatcctaaagcactatcatgtcgttgtagtactgaaggttgtcaatccaaatgggtgtgatgctagcaatcaagatgcaatcagagttcacagagtcaagccaagcaataacaggttttggggtgttctagcagtcctaagtgaacatgcaggaaacataaaatcaaacagaacagtaaaacactcgaccaacacagcttgctgccaagcactgggtgtggtcgagtgacatgtcgagtaacagacaaaaaatgtaacagggatactcgactgcacagtctgttgccaaacaactgggtggtcgaatatcaggtcgagtaacagtaaagaattgcagaaactaagcaacatatgacaagattcactaaacaacagtaaactaaacaataaaatcaatcagataaagaattcgcgaggatgggataattgagtagtttcgtttcctcactttacaggtgattgacatgctcaataaattatccctagacaataagttcattaaccaaatctaagtgccaccgcaacagagaccctcaagttaacctagtcccaaactcaatcaccattgacaagagctaacctaacatgcattacgaatcaataagttaaagccaaaacgctccatgcaaccaataccttggtacagagccacgaatctctggaattagtggttcagacttttcatccaacaccttttgggcgcggaaatatctgggctcaaattccaattaatcagaaagcaataggcattaagaacaactaatccagaaggatctatcaatcaaactcaaccacctagcatactgagaattctaaactactctaacccatcctcagaaaccaagtcactactaagacatcattgtagaaagcataaacgatgaatagaatgaaaacatgatagcaacaaagtaataacaagatgataacacgatgaacaacttagtaaacgcaacgaaaaacaaaatactgaatagattaagagaaatccgtattacaaaatgtcaagaacacagtgtctgcggaattaaaacttagtaaacgaaaatgaaaaatgcatgctacttatagcgaaatattccgaaaccctaatactcaaaacgacacaatattgggacggattaagaacggcactcgacccaggtggtcgagtgattggtcgagtgataagctaaagtcttcttttcttccttgtgcttgagtgtctggttgagtgcggaatggagaagactctgaagctggcagtcgagtaaggacgtcgagtgaatgatgataagggactcgaccgtgtggtagagtgattggtcgagtggatggtggtggtagtactcgacttggtggtagagtgattggtcgagtgaatgatgatggtgatactcggccatgttggtagagtgatttgtcgagtgaatgataatggtggaactcggccatgttggtagagtgattggtcgagtgaatgatgatggtgatactcgacctgttggtagagtgattggtcgattgagtgatgatgatgatactcgacctgttggtagagtgattggttgagtgagtgatgatgatgatactcgaccatgttggtagagtgattggtcgag

SEQ ID NO: 154334 - DNA, 1575 bp, Arabidopsis thaliana landsberg
  unsure (1)..(1575): unsure at all n locations
atcatcattcccggtggacgttcaccgaacttttgagcgccgacgagaaatgcgtgagtcttgttgctagattcgccgaactcaagaagctcatcttcacgagctgccacagccagctgtttcttgcggcggcaggtctgctcaccggtggaatgaagtgcacggcgttcgaaannnnnnnnnnnnnnnnnnnnnnnnnnngcggcgcatggtggcaacagcctggagtccagacccttttcgaaatcactgattgtgtcaaggacggcagtttcatgtccactatggggtggccaacgcttggccatagtctcaaagttttgttagaatcacttggctccaagatttctagctctaaagagaatcatcagacttctttgcttttcttgattggggtaagtagcttattttcataagactctcttttagactttatatattggaattaaaaaaatggtctgactaatacgtaattttggtatatttaggattgtgttgaagattatagtatcaacgtaccatttaaagcgtttcaagctttgggatgtaaagtggatgcagtgacgccaaccaagaagagaggtgagaaatgcgctacaatcgtacacgaccttgaagacggacggcaacttcctactgagaagtttggtcacaacttctatgtgaccgttgcgtgggatgatgtctctgtggatgattacgactgcattgtggttcccggaggaagatctccggagctcttggtgatgaaccccaaggccgtcgaattggtcagaaagtttgttgagaaaggcaagtttgttgctgccattggaatgggaaattggctacttgccgccacaggcgcccttaaggtaatatacaccgttttacaaaaattcgttttactattctaaagacttaaaagttaaaactgaagccgaaccaaaccatattttaatttaaacgaaacaaaaatgtcaagataagttgctctaagcacataggaatctcctatggttatggttatgactaatattattccagcatattgttgaaggttagtaagatataattcatcacatttatggcaccacttccttagcatagattataatttttgccagcttgttataactcatctaattcccattgtggcatgctatattattacattgcagaagaagagatgtgcaagtagttatgggacaaaggtggctgtgaaggttgctggtggtgagatcgtggaatctgaacggtgcgtgaccgacgacaagctggtcacagccgcatcaacttccgatcttcctgcctttttgtatgcattgtcgactgcacttggtctctctgttgtattctaatgtcaagtggtgctttaacgtctaatgcctaaaaaaataaaaacatatctttgtatgtcgaaatataaggtcgtccctctaattatttatgtacaagcttggatttgcatatatatatgggaagaagagttgccacacttgcttacacctcttctaattgtgtttttttataagaaattaccactatcaagttgtcattctcctcgttttacatttggtaaacaagctctattga

SEQ ID NO: 154335 - DNA, 862 bp, Arabidopsis thaliana landsberg
aaacagttgaaagaactcgcctctcaaggtttcagcagcagcagcagcaacaacattgccaaggacgaaacgactgagaaaaaaggagacatcgacactctagttagagctatagctggagtctcagtcactgctcagcaagagcactcaaagcctagcaagagcgtgaagaggcgcgagaaacgggctaaggaagaagcagacagagagcagagaattaaagaggagcaaagccacgtgaaaagtgatcgtatggttgagaacgccaagcttgagaagaagcttaaaccattgggattaacagtcagtgagattaaaccagacggacattgcctttaccgtgctgttgagaatcagcttgccaaccgctcgggcggtgcatctccttacacataccagaatctaagagaaatggctgcttcgtacatgagagagcacaaaaccgactttctcccgtttttcttgtcagagactgagggtgactccaacagtggatctgcagaagagcggtttgagaaatactgcagagaagtcgagtcaaccgctgcttggggcagtcaattggagcttggagcattaacacattgcttgaggaaacacataaaggtgtattcgggatcgtttccggatgttgagatgggcaaagagtatagatccggcgatgactcgagcctcatgttatcgtatcacaggcatgcttttgggctcggggagcattataactcagtggtgctcgtcaacaacatcaccggatgatggatgatggactttatctaaagctttaacaaaagtgcttttgtatcaaaagtttactgaaattctttcttctttaatgtgtgttggatttcacacaaccaatgtg

SEQ ID NO: 154336 - DNA, 1269 bp, Arabidopsis thaliana landsberg
gtaccaaagaggattttgtgacctggcagcgtattatccgtctagacgctctccgtgcagatacagaatggactccatattctcaatcccaagctttggtttcagagaatagggcacgtcgtgctgctgaagcagttggtctaaaggattacagttatttggaaccttcgaaaatctttcacgctgcacggcttgttgctgttcttgaagcctatgccttacatgaccctgaaattggctactgccaaggaatgagtgatcttctctcccctatactctcagtcatacctgatgactacgaggcattttggtgtttcgttgggttcatgaagaaagctcgtcagaatttcagactcgatgaggttgggatcacaaggcaactgaacatagtctcaaagattatcaaatccaaagactcacaactctacaagcatcttgagaaagtcaaggctgaagactgtttctttgtttacagaatggttcttgttatgtttagaagagagctgactctggagcaaacattgcatctctgggaagtgatttgggcagaccaagctgcaataagagctgggatggggaaatcttcctggagcagacgaataaagcagcgggctcctcccacggaggatttgttgctgtacgtggtagctgcttctgtgttgcaaaggaggaaagtcataatagagaagtacagtagcatggaggagattctccgagagtgccacaatatggtagggaaactagacgtgtggaagctcttagacgatgcacacgaccttattgttaccctccacgccaagatcgaacattctatcccacaataatccttttcattgttattgcggtttataagaactgccttggtgcttgtgtttgcgcaactatgaaatgtggcttcctggcaagctatcaggggatatagtagccgcggttggaacagaatcaaaccgaggatttgatttaccgctatctaaatccaggtttaacatatcaaatggcctgaatcaagataggcatgatttgtgtggtgtgttgggaaactttcagaggtgagtttctctgctttcattatcaattttgtatatggaaacaattttgtttgtgccgggaaagagaatctttcgccggtaaaagaagaaaccaactctctttctgttcattcatattccaaaagtataaatattacataagacatgtaagtctggtttcaccctctttaactgtctactcctaacctaaccacatctagtatacatttctccggcggta

SEQ ID NO: 154337 - DNA, 565 bp, Arabidopsis thaliana landsberg
acccctagctcccttgttctcctcacgacttctttcttccctgaactcaggacttaaaccaatagaactctggtagacgaagaagaagatgacggtagaagaagtgaaccctaaggcgtatccgttagctgattctcagttatcgataacgattcttgatcttgttcaacaagctacgaattacaaacagttaaagaaaggagctaatgaagctaccaagacattgaaccgtgggatctctgagttcattgttatggctgctgatactgagcctctcgagattcttcttcatcttcctcttcttgctgaagataaggtatttgaatttcttcttatcgtttcactttcttatgaatctcaattagtagtttctttggctcttgcaagttttactggattcacttgggtatcttcttcatatgataaaaagataagactttattggctattagactccagttttgagattgtgattgttgatgttcgtagtaatcacttaggtaatttagttaatgaatgtaggagacagattcaattaggatttttaggcattgagaagttcgtt

SEQ ID NO: 154338 - DNA, 1868 bp, Arabidopsis thaliana landsberg
ccgatctctacaagaagaagtgagtgtctttttgtgatcctagagaaacaagaaatcttttttgttctagctttttctatgatccaggagaagaaaaattggtgtcaatgttgaatagtagttcattttctttcaacaggtgcaggatcttccgtcttttgggatcggtcattcactgggatctgttattcaccttctgattggtaactaggtttaaatggttgtgaatgtttaaaactgattcagctcattagtttttttattgagttggttttcactagtcattcaggatcaaggtatgctgttcagcgaaatgggaacgtatttatggcattcaacaacaaggtaaattggttttgctatcttaccaaagtcaatcagagttgcaatcagaattgtttggggaaaactgatctaaagtaatacttttttttattgtaaagatattgtgaatcctgttatggaatcacaaaacctgtaaaaagtgatatctttttggaaccctacatttttgcaggaagcaagcttagctattcctttgttctccccagttcttgtcccgatggctcaaagccttggaccactgttgtcacaggtggcaacatccccaacaatccgccttggggtaaggttttgattcatttgctctactctttttaagatgtgcagctcttagctagtttcccaagtgatagtctaacttcttgctgttggtgttgtatatgatcaatttgtttggtaactcaagaaatgctgtcataagtgcacttagtccctatagattttgttctctaattatgtttttaaatggcagtaaatactacctttgaattttgacacatgaagtcataatgctttctaccttgtaatgtctttcatcctttgtcgtttatgttctcctacatgcaggcagagatgacgcgaaagcaattagaaacgcttagccctcccatcatgaagcaaattctgcctttagtggaacagctccctcccttgtacatggacttagtaaagggaagagaagattttgttccaaaaccagaagaaacaagacgccttgtaggtgaaacgcataatgttattgggtttatgtctcatcatggagccttatctcgtcctaataaaccatctatcttattccctcacactaatcgagattcttcctaataatgtacagataagatcctactatggaatctctaggaatctgttgataaaattcgaggatgattcaatagatgaaacatcaatcctagctcaggtgcttggtgtggaatcatccataagctcaaagctagacatgtctatccgtacactgcccggagatcacggtctccctctgcaacaggtaccgagttatgtttaagacaaactattttgcaactgtgatttgagccatcaccatggagatagtcataaacaaaagcagattgaacatgcatccttagttagaatcaatatggagacttttttgttgctttcgataaggtggtaatgttgaaagtgggttatattactgtctggacaggctcttccggatgttccaccaggaatggcagaagcggtgaatcgaggaagtgagtttttagcgaatattgctgtcgggactccgtgggaatctatggctaaagaggttggaggttcgctgggaatggactcgaagatccttcgtgctgacatgtccaaagatcttgcgcagctcgttgatgcaatcacttcttggatgatttcaaatatgggtccaaagcttctgagaccataatgttttctcatgtacacaaaacatacaaaaatctaataacacagggcgattgcatactatttaatgtaatgtaactgtatatattataacatgaagagtttggtta

SEQ ID NO: 154339 - DNA, 3560 bp, Arabidopsis thaliana landsberg
  unsure (1)..(3560): unsure at all n locations
cctctgcatgcagtcgctacaaaaacccgtctcggttttttttttctttgctttagctcttatgcttggggggtgtctcgaatctgtatgttgaatcacattattgtcacttgatttacttattttagcttgtggcatagaatctattgacacaattaattgttcgcttagactaaattgttcttaattacacatttatagttcacggttgttaatacacttgtttaagttatcctgtttttttttaccctttttggggtttaggttatttagttgagaggtgtgtatcatcgtcttgtgttaggattaggtgtgtgtacactttttgttgatgcttgatcttttctattttgttgtttatgggatgttttctttatttatattagaaaactaagttagggttcctataattttgttattgactattcgaaacatatagtagtagtagtagtatttaggtatagagctgatggatatcttgtccgcttagactaaatagttcttaattacctatttatagttcacggttgtttaatttatcctgtttttttttaccctttttggggtttagattatttagttgagaggtgtgttatgttaggatttggtgtgagtacacttttgttgatgcttgatcttttctatactgttgtttggttgccgtttatgggatattttctttattagtattagaaaattaagttagggtttccaataattttgttatttactattcgaaacttgtagttgcagtatttaggtagggctgatggatatcttgtgtgtttcttttttctatatcgattttatttttatttttaattttgggatgtttatttatattagacaattaagttagtgtttcatataattttgttattgatgagttgcaagcaaggctattttatagagtgttcatttattcttttcaaaaataagtagggctaatggatatcctgtgtatttctttttcagacaccatgtgggcacaacgcttgcttgaaatgtttcttgaagtggatggggcagggacaccgcagttgtggaacatgccgcagcgtaattcctgaaagcatggttaccaatccccgtatcaacttgtccattgtgtctgctattaggttagcaagagtatccgaaaaagctgatgcgcgtacttcaaaagttgttcactatgttgacaatgaagaccgtccagataaagcatttacaactgaacgtgctaagaaaacaggaaatgcaaatgcttccagtggcaagatttttgttacaatccctcgagatcattttggtcctataccagctgaaaatgatcctgttaggaaccaaggtcttttggttggagaatcctggaagggcccacttgcttgtcggcagtggggggctcacttcccacatgtttccggcattgctggacaagcgagttatggagctcaatctggcgtgctcgctggaggttttgatgatgatgaggatcatggcgactggttcctatacacatgaaggctggtcttcttttcattactccgaccaatcttttggttcatttgttttattttaataatctcttgctattctccaatgtgctgatagattttatctcttttcttgaatgtgttacatagtgggggaagaattctcaaaggcaacaaaaggactaacacgggtcaagcttttgatcaagtatttttaaactttaatgaagctttaagacttagttgtaaactagggtatcctgttcgagttgtcaggttagtggttatttgagcatgtacaactctattgcatgcaacgtctttattactatttcattaccttcttccatatatgatcaggtctaccaaggacaagcgttctccatacgcccctcaaggaggactactaaggtatgatggtgtttaccggatagagaaatgctggaggatagttggaatacaggtacacacatatatagcaaacaatgaaacaacaataaattttccctcgcgttcttttctatgaagtgacacattcttctatggtgttccatatatagggcactcataagatgtgccgtttcctgtttgttagatgtgacaatgagccagctccatggaccaggtttgatctacttcgtgacatcgtgcgccatatatatatatataccatttgtactgtttaatgatgtgatattatattgcagtgatgagcatggagatcgcccaagacctttgcctgatgttccagagcttaatatggccacagacctgtttgagagaaaagaaagtccatcatgggatattgatgtaagttccaaagacatctaacatttctttatttgtagttgtacccacttgttatatgcttgctcgatcaggaaggtgaggatcgttggagatggatgaagccaccacctgctagtaaaaaggcagttaaaaatgttttggatcctgaggagaggaaacttttgagggaagccataaagtcggcaaacccgaataccatgagggcaagacttttgaaaggtcagtgtgtccaagaagttaaaatgtttatagtatcaagaagttaatgtttccaaaatgtttattttagtatctcaactgtcattgggattttgatgatgcagaatttaagtgccagatctgtcagaaagtgatgactaatcctgtgacaacgccttgtgctcataacttctgcaaggcttgcttggaatccaagtttgctgggacagctctagtgagagagagaggcagcggtggacgaaaattacgttcacaaaagaatgtcatgaagtgtccaattgcccaacagacatatctgattttgtccagaaccctcaggtgaaacatcatctatcttcttcttctttcatatcaaatcatatgaatacaagtgcaaattgcattagcattgattttgactctgctagaataagatgaagttggttcaatggtaataagtctgttttcgttatctgcaagcacacacttatttgatgctttccattcatggaaagtgaaactgtagcagatctgatcatacgatagttaccatttttatgatcacagaaattgaggaataatctctttggtgaaatgtgtgtaaacaggtcaacagagaagtagcggaggtgatagagaagctaaagacccaggaagaggacaccgcagagcttgaagatgaagatgaaggtgaatgctcaggcaccacccctgaagaagattctgagcaaccgaagaaaaggatcaagttggacactgacgcaacagtttctgcgaccatcaggtgaagttggtaccaaagaactctttagtaaaaaaaaactctagtgccttattttgtacgcaatatttgtggaacgtacctattgcgatgtgttaatttggatcttacaacaactannnnnnnnnnnnnnnnnnnnnnnnatgagttaattttggtgtctctggtttataactcggataggttggttttgataataccatcaggtactaagcagtgaattctccatttagtatagaatggatgttgcttcattttctctaatctaatttagactcaaaaaggttcgaatgtga

SEQ ID NO: 154340 - DNA, 775 bp, Arabidopsis thaliana landsberg
ttttgagatctctgaatcgtctttgggaaccaccggagtcaactgtgttcttggacggtgaagatataaccaacgttgatgttattgctcttcgtcgtagagttggaatgctttttcagcttcctgttctttttcaaggtaataatcaaattttgggatttgcttagcctctagtttcataggtcttgataatgtgtggttggttacagggactgttgcggataatgtgagatatggtccgaatttgagaggggagaaactaagtgacgaagaggtttataagctgctaagtcttgcagaccttgatgctttctttgctaagaagactggtgcagagttatctgtgggtcaagctcaacgagtagcacttgcaaggactctagccaacgagcctgaggtgttgctgctcgatgaaccaacaagtgctcttgatccgatatcgacagagaacattgaggatgttatagtgaaactgaagaagcagagagggattactactgtgattgtttctcacagtatcaagcagattcagaaagttgctgatatcgtttgccttgttgtcgacggagagattgttgaagttcttaaaccaagtgagctttcgcacgctacgcatccaatggcacagaggtttcttcaactcagttcttgagaccattttctcattgatggttcctgcaagttatttgctattttgcttgaatcttaataatctctttcaagagaggaacaaatgctggttgaatgtaacaacacctttcatggtttatgtctt

SEQ ID NO: 154341 - DNA, 3318 bp, Arabidopsis thaliana landsberg
gagctgtgttctgttttgtttttctttaggtcgcttgggcatacatttccatgtgtaaccgcatttgcagcaggtcaagctgcagcatataagatgtttgagacgatcaaaagaaagcctttgattgatgcttatgacgtaaatggaaaggttcttggagatatccgaggagacattgaactgaaagatgtgcatttcagttaccccgcgaggccagacgaggagatatttgatggattctctctgtttatcccgagcggtgcaacagcagcactggtaggagaaagtggaagtggaaaatctacggtgataaatttgattgagaggttttatgatccgaaagccggtgaagtactcattgatggaattaatcttaaggagtttcagttgaaatggatcagaagcaaaatcggattggtctgccaagaacctgttctgttttcgtcgagcatcatggagaatatcgcctacgggaaagaaaatgcaacgcttcaagagattaaagtagcaacagagctagcaaatgcagcaaagttcataaataacttacctcaggggttagatacaaaggtaggagagcacgggacacagctctcgggaggacagaaacagaggatagctattgcaagagctattcttaaagatccgcgggttttgcttctggatgaagcaacaagcgcgctcgatacagaatccgaaagagtggttcaagaggctttagatagagtcatggttaaccggactacggtggtggttgcgcatagattaagcacggtaagaaatgcggatatgattgcagtaattcacagcggaaaaatggtggaaaaaggttcgcattctgagttgttgaaagattccgtgggagcttattcgcagctcattcggtgtcaagagataaacaagggtcatgatgcaaaaccatcagacatggcttcgggatcatctttccggaattcgaatttgaacatatcaagagagggatcggttatcagtggtggaacctcgtcttttggaaatagcagtcgtcatcattctttgaatgtccttggtttattcgctggactagaccttggtagcggtagccaaagagtaggccaagaggaaactggaacgacgagtcaagaaccgctccgaaaagtatcactcacccgaatcgcagctctaaacaaacctgagatcccggttctccttcttggaactgtagtagcagcaatcaatggcgcgattttcccgcttttcgggattctgatttcaagagtcatcgaagcgttcttcaaaccagctgaccaattaaagaaagattcaagattctgggcgattatatttgtagctctgggagtaacttcgttgattgtctcaccgtctcaaatgtatctgtttgcagtagctggaggaaaacttatacgacgaattcagtcaatgtgctttgagaaagcggttcacatggaggttagctggttcgatgagccagagaactcgagtggtacaatgggggcaaggctctcgactgatgcagctttgattagagctctagtaggagatgcattgtctttagcggttcaaaacgctgcatctgctgcgtctggattgattatagcgttcactgcgagttgggaattggcgcttataatcttagtgatgcttcctcttattggtatcaatggctttcttcaagtcaagtttatgaaaggattcagcgccgacgcaaaggtctgttcatggctatctagggtttatttcttgtggatcaagaaacttactctggttttgaatatctttgcagtcaaagtatgaggaagcaagccaagtagcgaatgacgcggtggggagcataagaaccgttgcttcattctgtgcagaagacaaggtgatgaacatgtataataagcaatgtgaaggtccgataaaagatggagtaaagcaaggtttcatcagcggattagggtttggattctccttcttcattctgttttgtgtctacgcgacaagcttctacgcggcagctagattggttgaagatggcaaaactactttcattgatgttttccaggtgaattgatgtcctcgtctactgtcattgatggcaagactaaaatatttttggaaatctcggtgcctagtaatgaagtagaatggatcttgctctggatcttacaggtgtttttcgcgttaaccatggcagctattggaatttctcagtcgagtactttcgctccagattcaagcaaagccaaggtcgcagctgcttcaatcttcgcgatcatcgatagaaaatcaaagatagactcgagcgatgagacagggacagtgttggataatgttaagggagatattgagcttcgtcatgttagtttcaaatacccagcaagaccagatgttcaaatcttccaagacctctgtctaagcattcgagctggaaaggttaggatttcaaaactttcattctttgagcaaaaaaggcagaaccttttgagtaaacctctgttctctgtttcacattccagccacgttgctttggttggagaaagcggtagcgggaaaacaacggtgattgcattgttgcagaggttttacgatccagattctggtcagatcactcttgatggagttgagataaagacattgcagctgaaatggttaaggcagcaaaccgggcttgtgagccaggaaccggttttgttcaatgaaacgattagggcaaacattgcttatggtaaaggaggagatgctactgaaaccgaaatagtatccgcagctgagctatctaacgctcatggcttcatcagtggactacaacaggtaactttaaccgcacccaaccaaaattctaagttcgaacattgaacagcttaaaataacccgaataatcgaaccaaaaaaaagagtgtccagccataatttccaggtccatatggatacagattaaactgaaacttttgcttaccgttgcagggctatgatacaatggtgggtgaaagaggagttcaattatcaggtgggcaaaagcagagagtagccatagccagagcaatcgttaaagaccctaaagtgttgctacttgatgaagccacaagtgctctagacgctgagtcagagcgtgtggttcaggatgcattggaccgggttatggttaaccgaaccaccgtggtggtggcacatcggttatcaacaatcaagaacgccgatgtaattgcagtggttaagaatggagtcatcgtggagaagggaaagcatgagactttgattaatatcaaagatggtgtttatgcttctttagtacaacttcatctgagtgcttctacataaaatttcctttct

SEQ ID NO: 154342 - DNA, 1510 bp, Arabidopsis thaliana landsberg
tgggcttcctatttacttcagaagttccttaaccattttccgtctgaaactcagaggaaagctatggacatagcccctgaactgaaaggagcttccatatttctggttggtaaggccggcttggctaagattttttactgcaagctcccgtttttgaagtgtgtacttcatatggatggatactgatgtgtgagcattaacaatttggaataggaattaataactttattaaaacgaacacggggaagcttttggctgaggcattacgatattactactttgataggtaagcactcataagttcatcataagttctactttttgttttttttggaaacccttatagttgtttagagtggcctgaatttcagacatttcttactgttactaactgtatttatcttcgtttcaatccaatttatccttgtgcaatccagtttatccgagcattagtgttaagctttaagctctaagctctctcttttggacctttacctccataacatagggttgtccgttgccaccataatgtttctcctcgtcttgaaataaattcacattgaatgtttgtaagtactttcacattactctaactttagtttactttgattgggtagtgataatttgatcacagaggcggctggtggaaatgtgtctgctcaagctttgaaggaagctgatgagaaggcttttcaagaatcagaggtaaactatatatcgtttgatctgcattttttatcgtacaaatgcatctctggtccagttcctgaaagagtattgatcgcacttacaaaaatggtttttgacgatgactttctaacatcttttctgcagactgaagtgctgaagcagctatcatctatgggtcggcttgtagtttgcgctggagatggtgcggtccaaagcttgagaaatctgtatgttctatataagtttcactagtttctctctagcagttcattcttttagaagacatacacacactgcttatatctgtttaatatctctcccgtctgttctcatttgatcgtaaatatttgaacagtgcacttcttagacacgggatctccatatggatcgatgttcctctggatatcactgctaaaggggatgatgattcattccactcagaaccttcccctgaggtttttcttccttctttcctctgagctgcataacttttctatttggccttattacagagaaactgactttcatgatggatgaacacagttgtttgacacaataaaagcgagttacgagaaatcaagaaagggttacgaaacagcagatgtatccatttcccttgaaagtaaggatctatcacaagtcaaataatattcattacaatttttattatgtgactgattctgctttgttacatggaaacagaaatagctacaaagctagaatttgaagacttggaaacagtaacttttaaagacattgctttggaggtaaagtcttgatctctttttggttatcattttgacttatgattaaaaatgtt

SEQ ID NO: 154343 - DNA, 1434 bp, Arabidopsis thaliana landsberg
agagaagaagaagcatctgcttgttgagaaaccaccagctcaagacgcgacggagctggagaagattgttgaggcgtgtgaatctaacggtgtgcagtttatggacggtacgatttggttgcatcatcaacggacggttaagattagagatacgatgtttgattctggattgcttggagatgttcgccacgtaagcgctctgcctttttattcaaattgcaaaattggtccatagaatctttgactttatttattgccccacatataagttagaataacacataaaacctttcaattgtactagaactagattagagtttttgaggtgttcaacgtgtaagatgttgtttcgaatgataacgaacgataggtttcgtcacttagtttaagttatattaaactattcatgagcatacgttgaaggattgaatctaatctataatgtttcacttatcattacgcctaaagtatatatgaaacattctctgacacatgttgcagatgtatagcacgatgaccactccggtaccggagcaagtattggaaagactgactaaagaagctatgggtttagccggagctatcggagagcttggatggtaccctataggcgcagctttatgggctatgtcttaccaaatgcctatatcggtcagggcacttccctcctctgtctccacaaactcggttggcactatcttgtctcgcactgcctctctcacagttcaggttcaaccgcaacctcaaccgcgtatcgttcattgctctttcctctctcaactttcaacggacttagctatctcaggttcttaccattgtctttattataccataagttgaaatagaaatagtaatagtctaggggactataatcaaactgacccgaatcgaaccgaattttaaaaactaattcaaaaaccaaataagtagtatagtttggttaaaatggtcatattcaatgtaaaaccgtataaaacaatctatagtagatttagttctacattttatttaaatttccaaaacccttattaaagactaatgtatatgtaaaatataagtgatcagctttgtactaacatcaaatgtcaaaatgaatgttcaggctcaaaagggtcgattcaaatgaatgactatgtgataccctacaaggaggacaaagcttggttcgaatacacaagtggtgcgaagtttgtggacatgcacattggttggaatgtgacgccagagagagttacagtggactgtagcggaactccggagacgcaagaggcaatgatgctgagagagttcacgcggcttgtggaaggaatcaagcggggcgacttagaggctgatcgtcggtggccggaggttagtaagaagacgcagttggtggtagatgctgtgaagaaatctgttgatattggttgtgaagtggttcatctgtaaaacttg

SEQ ID NO: 154344 - DNA, 5063 bp, Arabidopsis thaliana landsberg
ctcaattacacagtctgttaacatgttatgtacagtatttgttaatattttgttctgttgcaaactttacacctcattgaactataacatctcactgatcttggttcgtcaacacaaattacttttgttggatcaggtcttgctgatcatgataattaccacgtgttctgccgtctacttgggcgttttaggctgaattatcaggtaaatttctcggttagattcctttctagtttacagattacggtttgtacaattttgtttgtgttgtagcttgaaatttatgttatgatgccatgtacttgagtaaatacacacatgttccttttttctgtatgtgacagttggacagtcttaactattcgtaatttgtgacgctatctatgattgtcatataccatttggatataatttattggtttatatggctaaattcagacattatgtaatagcatgttacgtgtatgaattcatctgcagctttcagagcttgtgaagatggaaggttatggtgagtggatacagttggtggcagagttcacacttaaatctctccagtcatggcaggttcgcaagtttatgttagtgaatgcattagcataccaattatagaccctactagtctttaaagttctggttatcctccagcatgatcgtttttagtatatagcttaaatatttggcggagattgtatcttgtttgcaaaatccatgtgaccttttttcttacagtgggccagcagcagcgtgtattaccttcttgggatgtggtccagattagtagcatctgtcccatacttgaagggtgattcaccaagtctacttgatgaatttgtacctaaaattacagagggttttatcatctccagattcaattctgtgcaggtatataacatcacttattctggaggattgccagtactgacttgtagtttttctttgatattttcctatttgaaatcccctttccaggctagcgtcccagatgatccgactgatcatcctttggataaagttgaagtcctgcaggatgagctggattgctttccttacctatgcagatttcaggttagtcttttcttcatatatgtgtcatgcagtaccctggttttgctcacatgttttgtttgattatgttgtatcttaacacaattgaactgcatctgagagtcttatcaattatcatgcagtatgaaagaactggtatgtatataataaacacaatggagcctcttctgcaatcatatacggtaaagtctactgttattctgtgtttagcgtattgttgttctgtcaattcttgtacgtgtcttcctaatcttgagctgagtgattgtgtaacaggaaagagggcaactacagtttgctgataattctgaactagcactcattgaagcaaaattgtcatggattgttcacattgttgccgctattgttaaaataaagcagtgcagtggttgtaggtaagttgatatcatatcttggggtttctttgcattttggtctgtttgaagaacaaaataatatatggattgaaatttatacgtattttgcagtgtggagacgcaagaggtgcttgatgctgaactctccgctcgtgttttgcggctagtaaatgttatggacagtggactgcatagacaggtgttacatctgttagatacaagcaatttcattaaatcaacttgaaatattattatataatctctatatgtatggttctattactgcatttctactgaacataaaccatcaatacagctacaaaatttagctaaaagggcgtaagcctgtatagccacaattagtaacataagagtgatttcattaatgattatgaaattaattttctgcttgaagtgcacctgttggattttgttttctctcaggtaagttcactacattaatctcatctctaattaatcaaaaacacttctttctgcagagatatggtgaaataagtaaacaaaggcttgatcgtgccattcttaccttcttccaaaatttccggaagtcttacgttggtgatcaggccatgcattcatcaaaagtaaatgcaaaccctgtttcttttttttattgtatttgttctatgtatatttctgatactacctttctgttgcagcagttgtatgccagattgaaagaactccttggactgcatgatcatcttgttctgttgaacgttattgttggcaagattgctacaaacttaaaatgttatacagaggtaatcttgtgttctttacttttttctagcatgccgctctacatcaacgtcacctactgttcaaacaatctatcttttgtttctccagagtgaagaagtcattaatcacacgctaagtttgtttctggagttggcatctgggtaactctgttataacctgattaagctgatgttacattagtttatatacattttcatatcgatttttttttatgttttgccgttctcgtgcagatacatgaccgggaagctgcttttgaagttggacacggtgacctttattatatctaatcacactgtaattcttctccaaggactttcttttgtggacatcattgtgcattgtaatttattacgagcaacactctgactatgtgaattgtctaattccagagggagcaatttccattcttagaagagtatagatgctctcgcagcagaacaacgttttactacactattggctggttgattttcatggaggatagcttaataaagttcaagacttctatggaaccccttctgcaggttatactttgttttctttcagcattttatcttttgcagctttccttttagaataatgattctgtctgaatctgcactgcacactcaccctatttacagttctaggcaaaatttgatatcctataaacagggattgttccacatccattttacaatatatcttataggcagattcacatagtggtcttagccagtaaaccacatttttattcaatcattctaggttttccgcaccctggaatcaacaccagattcgatgtttcgcactgatgctgtgaagtttgctctgatcggattgatgagggatttaagaggaattgcaatggctactagcaggttttgagttcatctagttactttgacatccatagacatgttacaatcttatgatttattgaagctttctctttggatttcagccggagaagctatggttttctatttgactggctctatcctgcacacatgccactccttttgagaggggtctcacattggttcgacacaccagaggtattaagttatgcattctgctccattggattgacagaacactggcctagtaataacctgagtccgtgcatagaaaaaatgattctaatccactgcttgtgattttacgccttctgccattttagtgtggttagtggtgccttcattgtctcatctcctcttcttggcttgttgatgtaggttacgaccccgttgttgaagttcatggctgagtttgtgcataacaaaacgcagcgccttacttttgattcttcttctccaaatggcatcctgcttttccgggaagtcagtaaattgattgtggcttatggttcaaggattttagccctgccaaatgttgcggatatatatgccttcaaatacaaggggatctgggtttcactcacaatactgtcaagaggttagaacatgattttgaccaatgagagctaaccattcgttgtttagtttattgttatgttataatacttaaccatcatctaatgggcagcgctctcgggaaattattgcaacttcggtgtctttgaactttatggtgaccgggctcttgcggatgcacttgatattgcgttgaagatgacccttgcaatacccttggcagatatattagcatatcgcaaggtatgtgtggcattgcgttttccacgtgcctccaataatttcatttggtgatcaaatcaacacgtttttgatattgtttgcattatctgaattatgtttactctgaattctttctttgtcgttataaaatctctaatctttatagtcttcctttcatccttcagcttacaaaggcatactttgggttcgtcgaggttttgtgtgccagtcatattaccttcatattgaaactggacactgcaacctttatgcatctcgtaggttcccttgaatctggactcaaggggttgaacacaagtatttcatcacaggtgagaattgtgacaaaactgttaagacacatcaatttatcaagaaattcttaaagctttaagctgcaaaagatattcctcgaaatgcaactttctgaagcattgatatctattatcctttcagtgtgcaatagctgtcgacaatcttgcttcatattatttcaataacatcacaatgggtgaggcacctactactccagctgctattcgttttgcacagcacattgcagactgtccgagtttgttccccgaggtaactcattacactcctcaatctctctttgttaaattgaacacaataatgatgggctataatgccttttaacaaatatcctcttacaagcagatattgaagacactgtttgaaatagttttattcgaggattgtggcaatcagtggagtctcagcagaccaatgttaagcttgattcttataagtgagcaggtatgtgtaatttatacatttatctctcttgtgcagttttctgttccgaatgagctttgttgttcattcatctaacttatttcaattgatttccccagattttctctgatctgaaagctaagatcctctcatcacaggtgatgatccaaaattctatatctatatatattttacccctgagtgttgctttttgtgtatgccttagagcattattctaatggtgcagcctgcggatcaacaccagcgactctctgcctgctttgacagtcttatgacagacatatcgcggggattagattcaaagaacagagacaagttcactcagaacttgacccttttcagacacgagttccgcgttaaataaaatcggccaaacacagtccctgagccacagtctactacattaggggtctca

SEQ ID NO: 154345 - DNA, 1177 bp, Arabidopsis thaliana landsberg
gccgctgataattccgcctctgagaaattgcgttcgattacagctccacagaggttagtgtcgtcgagtctcttctctccactcatcatctatcgatttatcgtcgttaatcattgaatctgggttgttgatctgcaggattcggaaatggttgagtcaaaggttgtggttccagaggcggtgttgaagaagagatagagagaggaggaatgggctttggagaagaagcagactgttgaagccgccaagaagaagaacgccgagaacaggtagcttatcttcaaaagagccgagcaatactccaaggaatatgccgagaaggtaaacatttttatcctccattgtacaaatgcttggaaactgtagttgatgttctcttttatccttgataggagcccgagctcatgtcgttgtaacgcgaggccaagcttaagggaggtttctatgttgaccctgaagctaagctcttgttcatcatccgtatccgtgggtatgttatactgttgttgtttgtcttataagcatttctaaagccagtgtctatgttgttgtcttatctgttgttctttttaatattgcagtatcaatgccattgaccctaagactaagaagattctccagctcttgcgtttgagacaggttcgtgtattattgtgtttgtgtagattagtcttttgatgaattggcataaactgctaggttgtttcaatacaatgttgtcattagtcttaggttaggtcttgaaagttggaatctttccatgtaatttgttgataatcagttggtttgataatgtcacatttcatggcaaagactagtatatgaaatgattctatcagtgttgtatactgattgattttggcattgtgtaatgcagattttcaatggtgttttccttaaagtcaacaaggctacgatgaacatgcttcgccgtgttgagccctatgtcacttacgggtatgtatatacactctcatcctaaaccctttaatctgatgctatgagataacaagagtcttgaagagtgtgacttttctcttctgtttttcagattccctaacttgaagagtgtcaaggaattgatctacaagagaggttacggaaagcttaaccaccagaggatagctttgactgacaactctattgtagagcaggtttgagatcggtctctctgtgg

SEQ ID NO: 154346 - DNA, 1681 bp, Arabidopsis thaliana landsberg
tgtttaatcttgatagaggacaagaggagcaagattcttgcatggttgattattaaagcagtgtgttctttaattctaaatttctttcctttatatgaaattgtagataaatggatcaaatcgttaacgtggatgagtttcaagagctggccaaacaggccctccctaagatgtactatgatttctacaatggaggagcagaggatcaacacactctcaatgaaaatgtccaagctttccgtagaatcatgtaactaatccatatcaatatgatgctatatctacttgatttcaccgtgtcatatgtttgtgtgttgtgtgctttatgtacaggtttaggcctagggttcttgttgatgtgagcaacatagatatgtctacaagtatattgggttacccaatctcagctcccatcatgattgctccaacagcaatgcataagttggctcatcctaaaggtctgtttagttttatgttcataactagctctgtcaactgtatacaattgctggatttggaaaattgatttgatttgtctcctatctatgttaggagaaatcgccacagcgaaagctgcagctgcgtgtaacactatcatggtactacggtgtttgttggaatgcatttttacattgtttggattttaaggtgatgattatggtgtttggttgtgtgatttcagatagtatcattcatgtctacttgcactattgaggaggttgcttccagttgtaacgctgttcggtttcttcaaatatatgtaaatacacaatctgaatttttagctgcttttctcatttcctccaaaatatgcttttttggttcgggccttaggcctcggttcttaactcgctttgatatcttatataggtgtacaagagacgtgatgtaacagctcagattgtgaaaagagctgaaaaagctggattcaaggctatagttctaactgttgatgttcccagacttggtagaagggaagcagatataaagaacaagtaatactctgatattttcatgcaggaataagcattcctactttgcttagtctatctctatcttataaaaaaatttttctgaaatggtgttccatttttttgttctgtagaatgatatccccacagctgaagaattttgaaggcttagtttcaaccgaagtccgacctgtgagtaaaaaagcttgaattaagattcatgtaaagttaaaccttaccagttgttaacatgataacttctcttagaatgaaggttcaggggttgaagcctttgcctctagtgcatttgatgcttcgttaagctggaaggtaaaatcttgtgaatggttctatttgtttccttggatattagacacaaagttcccatgtgaatacattccttataatcttttgcactgcaaaatcttaggatatcgaatggttaagatctattacaaagttgccaattctggtcaaagggttactcacacgtgaagacggtaaagatccatgtctcgtagactcgtagtctaatatatagcatatactctatagaaattccaaggcatataaaagaaaactttgtatgatgctgttggcagctcttaaggctgttgaagccggtgtagatggaatagtggtatccaaccacggggctcgccagctcgactattccccggctacgataactgttttagaagaggtaaacc

SEQ ID NO: 154347 - DNA, 1271 bp, Arabidopsis thaliana landsberg
tatacaaactttcattttcgtcggatatggtcatttaaattctcaacggcattaatgtgcattgaatgtaatggctttagaatataggtgtagtcgttgggagagtcattgtctatgttggtctcgaaactatcgtccaaatcaaacactccaaaccattaacatgaaaaaaaaagcattacactaaaatttaaaagaaaaataaaaacattttcacaagtattaattaaccaacatttttcgtttcgcaacaggtgaccaagctaaaagatgggcttgcaatgggcctagctttcaatcacgcagtcttagacgggacatccacgtggcattttatgagctcatgggccgagatctgtcgtggagcccaatccatctcgactcaacctttccttgaccgatcgaaggcgcgtgacacgcgcgtgaagctcgacctcactgctcccaaggaccccaacgagacctccaacggcgaagatgctgccaatccgacggtggaaccgccgcagctagtagaaaagatcttcaggttctcggactttgctgtccacacgatcaagtcaagagctaattcagtaatcccatcggacagttcaaaaccattctcaacattccaatccctgacatcacacatctggcgccacgtcaccttagcgcgtggactcaaaccggaggacataactattttcaccgtcttcgccgactgtcgccgccgcgttgatcctccaatgccggaggaatatttcggaaacttgattcaagcgatcttcaccggaacagcggcggggctactagcagcgcacggaccggagttcggagcttcggtgatccagaaagcaatcgcggcacacgacgcgagtgtgatcgacgcacgtaacgacgagtgggagaaatcgccgaagatttttcaattcaaagacgccggagtgaattgtgttgcggtgggaagctcaccgaggtttcgtgtttacgaggtggatttcgggtttggaaaaccggaaacggttaggagcgggtcgaataaccggtttaatgggatgatgtatttgtaccaaggtaaagcaggaggcataagtattgatgtggagataactcttgaagcttctgttatggagaagcttgtgaagagcaaagagtttttacttagtgaggaggaagaagaagatgatggaaagaagctcaccaatggtaatggccatgtcaatggtaatggccatgtcaatggtaatggtaatggctatgtcaatggaaatggcaatgggtttgtttga

SEQ ID NO: 154348 - DNA, 1028 bp, Arabidopsis thaliana landsberg
tatttctccgttcgttctctccctctctctcgcttcacgttggatcgaaatcggacaaaagtaaacgacaatggcggaagaattggagaaatctatgcacaaggaagaatctctgatggaaaagatctctgataagatccacgatcacgactcttcgtcgtcgtctgattccgagcacgagaaaccagagtctccgtcagctttgaaggccaagatatatcgtttgtttggtagagagaagcctgttcataaggttctcggtggtggcttacgtacgttttcttctcatctcttttaatcgtttgtcgatgcttgatctgctatatgatatgaggattgattatgtttgttgataataagtgttttgctatgttttcaaaccatttggatttgtcttactgttgccttatgtttgcagcggctgatgtgttcttgtggagggacaaaaaactctcagcttctgttcttggtgtagcgactgccatatgggttctgtttgaattggttgagtatcatttcttgagtcttgtgtgtcacattttgatattcgctctcgcagccctgtttttattgtccaatgctcatgcctttatgaacaagtaagcttttttgttgccatgtttcaagttacaatctacacgtttctctttctttgctcttgcttaaaggttccaaaaattctttatttccaggactccacctaaaattcctgaaatccatattaaagaggaacatttccttttgattgtttctgcactgagaaacgagctgaaccaggcctttgttattctaaggagcattgccctaggaagggacttgaagaaatttctcatggtatgattgtgttcgaattcgatattgtatacgttcgagttaataggacaaaatggtattgttgtagcataagttcaaaacttattcaatctacttatgaaaccttctctatcatgggttttgcgacaaggactagtatatatatattggtatctcaggtgggtattgggctgtggataatctctgttgtggga

SEQ ID NO: 154349 - DNA, 1787 bp, Arabidopsis thaliana landsberg; identical to SEQ ID NO: 35624

SEQ ID NO: 154350 - DNA, 1746 bp, Arabidopsis thaliana landsberg
atgcaatagtacctcttcaccaggcctttcctagtttctgttaacgtacgccaaaaccatcttagtgaccctcttgaaaatataaattattctgcaacctctaaacttttaattttagacatggcctataaccttatgagtcatcgaatcctagaacctatctcaaaattagccaacctcatacaaattgacttatcttttcagaagacaccctacacattcaactttgatttcttgctcttcaagtctctagtgcgtttggatctttccggaaacagtgtgtctgtggttggtaccggttcggaaaatttgacacatctagacttgtcgagctgcaacatcaccgagttcccgatgtttattaaggacttacaaagattatggtggttagacatttccaataatagaattaaaggaaaagtgtctgagttgttatggactctgccttctatgctccatgtaaatctctcacgcaactcctttgattccttggaaggtacgtcaaaaataatcctcaattcgtcgatttcggagttagatttgagttcaaatgccttcaaaggatcttttcctattattccaccttatgtcaacatcatggctgcatcgaataactatttcactggaggcataccacttatattctgcaaaagatatcgactgagtctccttgatctagcaaacaacaacttcagtgggtcaattccgagatgcttgacaaatgtatcactcggactagaagcgttgaaactcagtaacaacagcctcactgggagacttccggacatagaagatcgtttagtactacttgacgttggccacaaccaaataagtgggaagcttccaaggtctctagtaaactgcacaaccctaaagtttctaaatgtggaaggaaaccacatcaacgacactttccctttctggctgaaggctttgacgcgtcttgaaatcattgttctgagatcaaacagattccatggtcccatttcttctcctgagatctctctttcatttacggcactgcggataattgatatctcccgtaacagcttcaacgggagcctaccacaagattactttgcgaattggagtgcacctttggttaataccccacaaggatatcgttggccagagtacacaggagatgaacactctaaatatgagaccccgctttggtcttatccttccattcatttgagaataaaaggacgaagcatagagttgggaaagattccagatacatacacatcgatagatttctcaggaaatagttttgaaggacagattccagaatcaataggtgatttgaaatcgttgattgttctggacttatctaacaactctttcactggtcgtattccatcgtcgttggccaaacttaaacaactcgagtcattggatctatctcaaaaccgaatctctggaaatatacctcaagagctaagagagctgacgtttttgggatatgttaacatgtcacataacagactcaccggccaaataccacagagtacacagattggagggcaacctaaatcctcctttgaagggaatatcaatctttgtggtcttcctcttcaagagagttgtttaaagggaaatggagtaccatcaacaccacagacacaagagcaagaactaccaaagcaagaacatgcgttgaactggaaagcagctgcgataggctatggacccggagtgttgtttggactggggatcggacaagcctttgctcaatacaaaccg

SEQ ID NO: 154351 - DNA, 829 bp, Arabidopsis thaliana landsberg
acctatgcgtctcaccaacaatgcaccacgttttattgcttctcaaccaatcctaggtttgatctgtcttcgaaatggtagtgaggttgtcattcacaatccgggtacaaaaaatattcagactttaccgaagatcaaagctccatcattaagtttcaaaaaaacttttttcggatacgatggagttacggaagtattcaaggtgttatgtataacagggccccgcgggtttaagccctctaggaaatgccatgtttacacgatggggcccggtaaaaattcttggagacggttcaaatgtaggaaacgtcattatccatctactgaagtactatgtaaagaaggaaatttgtactatggagctcagtccattagtcgcaaatctctattaatgaggtttaatgtgaggtcagaagagtttagtgtcattaaattacctaatcagcaagttaacttttgtcgtggttggaacttggttaattacaatggtaaaattgccgtagcgaagaatgttgacgtcgacactggagatttgcaaatgtgggttctagatgacatgggagaatggttaagcgaaatcattacgattcctcgttggaaagaaactaccaataattgcacgtatcatttcaaaggtaccattggaacaggagaacttgttttcgctcaagactctgtgattgagggatcattctatgtggtttattataatacagtcactcaaaatctcagaagatttacgattgaaggtgaagctagagatcagcttcatgatgttcgaaccttcttggatcatgttgatagtacttggcttatgtgaagaacaaga

SEQ ID NO: 154352 - DNA, 1043 bp, Arabidopsis thaliana landsberg
agtgcagagacgcctccttctctcgcctccgtgtctctccaatgctctctcgtgtctgcccaaccctccgctataatcgtatctggtctgctcatgcgcgtgaaatgccacgcgccacccttcttctcctccaacccaacttcttccactcttcccccaaaactgctcttgtgaatcgtctcgatgttacttcatcggagttttcttccatgttccgtcggagcttccacgctttacgcagcaccgtaggagactggagaaagcttccgaaaccgccgggtcaggtttttgcggagaggagagaatacaggaagattagaaggagagctccgaagaagaaacaggaattggagcttagtgttagtatctgcatcgaagaacagcttcctgatgatctcgagattcaggtttgagtattctttgataatcgaatttggaatcaattagccatttctagttgtgttgttttagattcttatcaaattccaatcaatgtagaatattgcagaaatgcttcgtctcaatgtacctatggcaatgacattggctttcaatggtttgaaagattcaaagtataaaacaagagagactgatatagaagatcttggtgggtatgaaactgttgaattatcggtgatgctttgtaatgatgattttatttgtaaactcaacaaagagtggagaggtgaagatcatgctactgatgtgctttccatgtcacaacatgtccctgaactgaagcttccagtagtaagtgtttgtttttgatttactggtttttaacaggatggttccaatggttactcattatggtcgttcttcttgtagcttatgatgggagatctcgtcatttctgttgagacagctgcaaggcaagctgcagagagagggcatactcttcttgatgaaatacgcattcttgtggtaagattaatagttgtggagtttgtatccgttactgacttactgtgaaccaaaacaaagaagtataatgtgaagtttctaggcgggtttttaggattcttgttgtttcaataccagta

SEQ ID NO: 154353 - DNA, 856 bp, Arabidopsis thaliana landsberg
aggtacaaacaaaaaaaaaggttactgttctactgttcttgggttaatgaacatgtgcatagctttaagtgtattgttttttttatgcagggagagttttgggttgatcctcgaaggtctattgcaaaagcttatgagaagacggaccaagcgattctatcgaatagttctgacttgggtcgtggtggttctactgctgtgactgctatattgattaatgggagaaagttgtggatagctaatgttggtgattcacgagctgttctttctcatggtggcgctataacgcagatgagtacagatcatgagcctcgtactgaaaggtcgagtattgaagatagaggtggatttgtatccaatctaccaggtaaagaacttattttgagtattgaatgtttaatgaagatagaatgattttgttgacaaggaggatgatgtggctgtgatgttttaataacaggtgatgttcctcgggtgaatggtcaattagctgtgtctcgtgcttttggagataagggacttaagacacacttgagttcagagcctgacataaaagaagctactgtagatagccagacagatgttcttctcttggctagtgatggcatctggaaggtaataatggcttgttctctgtatatattattcatctcttgttaaatgagtgttttgagaccatttttgtctgattgttttgttgtaatgatcatgttaataggtgatgacaaatgaagaggcaatggagatagcgagaagagtgaaagatccacagaaagcggcaaaggaattaacagctgaagcattgagaagagagagtaaagacgacatatcttgtgtcgtggtccgattcagatga

SEQ ID NO: 154354 - DNA, 1085 bp, Arabidopsis thaliana landsberg
gacaaccgcctaagaaaccgggggctccactacccgccggatctacaccagctcttccgatccaatacactatggtccctggtccgtcgctagctgcggcaccagctccgggacctggaggcaagcatcaccacttctacggtgaggctcaagtcaaagatttcatccatacactgttacattacggcggttacaacgagatggcagatattctcgtgaatctgacgtcactcgcgacagagatgggacggttggtgtcagaaggctatgtgttaacggttttggctcctaacgatgaagcaatggcgaaattgaccacggatcagctgagtgagccaggagcaccggagcagatcgtatactaccatataatccctgagtatcaaacggaggagagtatgtacaattctgttaggagatttgggaaggtgaagttcgatacgttgcgttttcctcataaggttgcggctaaggaagctgatggttccgttaagtttggtgacagtgagaagtcggcgtatttgtttgatcctgatatctatacggacggtcggatttcggttcaggggattgacggtgttttgtttccacaagaggaggaggttgttgaatcggttaagaaaccggttaagaaaattgttcagccgagaagaggtacgcttttgtttttattgcatttgatcttttatgtgtgttcctcaaattgtgtgcttagtattgattttctgcgtgtggcaaagtttagataatgaagtagcaatagtttggtacattgatctagtgtttaggtatgatcaaatccaattggcttcctggtttaggtaaataaccgaggcacaatgagatcatgataatggtagtgttgtcagttgtgaatgtttgagtaagaacaagattagggttctgagaaagtaagatggattttagtaattcgaacaaaattagtgttccaagaatggaagatggatctagtaatccaatcgtatgccgtggaaaatatgagccaccttttctgtcaatggctaggtgcagaatatgtcaactgcgagcaagaggcagagattaatagtatgttaggagagtga

SEQ ID NO: 154355 - DNA, 1132 bp, Arabidopsis thaliana landsberg; identical to SEQ ID NO: 4268

SEQ ID NO: 154356 - DNA, 1492 bp, Arabidopsis thaliana landsberg
gctattttggttcacaacaatgtctttaggtatgctgactaataagattgtttaaccagaagctaacaagaaaagaagtcgaggaggttattcctcaagtggtccaaccaccagagcaggtagatgaaggttgcagagccggttactatccctacccaacaacccaaggcgaaacagacaaccgaaaatacagtgaagattccagaaagagctgtagcaaatggacatcccaaaacacaggaggataatgttgtgaacgataaaagcaatggtgttgatgctcccaagaaatcatttgcacatattgtgagtcctcttttttgtgtgaaatcctattctatagcctaatctttgctcatataatctaaatattttgcaacttacccttaggtccaagatttggctcaaaacggtgctacattcaatgccaaagcttctcctgcaaagcctaagtctaagcctgttacaaagccgagtgctgctcgtgaatccaaagctcctgctcctgtttctgaacactcttctgctgcaacaatcgaccaacaaggttttaaatcaatgttttaacatttcagaaaaactgattttctttcacctttttctatgtcttaatatgattttaccatttttcgtgtatcagctgagggttatacgatatttgttgccaacttgctcatggacgctacaccagagcaactaaatgaaacattcaaaggttttggagctattacgaaagatggtatccaagtgagaagttacagggtgagttgtttattgaatggatcttttgaagaaacttgtttcacagccaatttttttgaaatcctcattaagttcttcttttgcagctcaagggaaactgttttggctttgtgacattcgcatctgctgaagctgtgaaattggtcctccaggtatgtttcaacatcaacgatgtttcttacaaactttttggttataaactggattcttcttttgatgttctactacagaactctaggctcacagggaatcaccaatcagaatcggaaaccgaagagcatctatagaagaaaagcgaggcaagtttctgaaaggcattgttgtctcaaagattgtaactttaattaaatgtaaaaacaaaatcctaatcttactttttctggattatgcaggaggtaacaatcaaaatggcaacagagtctctacaagaaacaacagtggttataaaaatgaggatggtttcagacgtgatggatacaaacctaggggcagtggcgtcaatggaggacgaggctatgggagacggaacagtgagtctaatggggatggtaaagcataccagaacaatggccatggcaatactgaggccaaaaactagattagttttttcttcttctaagctttgctcatggttgagaatctgaggttttaggcgatgttaaaacaaatttttgtttccgtggatatcttaggtgttgatctttttgatttgtgatattgtttggggata

SEQ ID NO: 154357 - DNA, 1032 bp, Arabidopsis thaliana landsberg
  unsure (1)..(1032): unsure at all n locations
ggcgacgatcctttctacacttcngcaaaaactcgcagggccaatcagcgcatcgatcagctccgtagagctcagagcgacgtctctaacgttccatcatcagctccttctccgcataaacaacaactcgagccgtccgatttatcttccagtaatctagatcggtttttagagtcggtcacaccatccgtaccggctcagtttttatccaaggtttattacaatctctatttctatggggtttttttttttaatctaagtctgtgttgttctctgatggtgatggtgataatctctgtgtagacatcgctacgagaaagaagagcagatgatgattataataaacttgtgccttattttgtgcttggtgatatatgggactcatttgcagagtggagtgcttacggcaccggtgtgcctcttgttttgaataacaacaaggatcgtgttatccaatactatgtcccttctttgtcagccattcaaatctatgctcattctcatgccttggattcatctcttaaatctaggttcttaattctttgtgaactcatcatagcagcattatagtataacaagctgtttttcattatgtcatgtacggttcctatggcaggcgtcctggtgatagtagcgacagtgatttccgggattcaagtagcgatgttagcagcgatagtgattccgagcgggtttctgctagagtagactgtatctcattgagggatcaacatcaggaagactcttccagtgatgatggcgaacctttaggctctcaaggtcgtttgatgtttgagtatcttgaaagagaccttccatacatccgtgaaccttttgatgataaggtttgtgcgttcatttctctactagaacagaaagcatggtgtagatactatatactaagatgatgatatatattattatcatcttttatgctcttatatcataccaggtaacttcaaatttcccccctcatgctcagaaatggcctttgttgtccctacgcctcaactgatggctatcaagtaaaaa

SEQ ID NO: 154358 - DNA, 2252 bp, Arabidopsis thaliana landsberg; identical to SEQ ID NO: 16741
  unsure (1)..(2252): unsure at all n locations

SEQ ID NO: 154359 - DNA, 2244 bp, Arabidopsis thaliana landsberg
cttttgtcagacagcatggaaaagctaacggttgttgtcccatccttgcagattttatcactctttatacctcattcttatgagatcgatgggattgtgatagaaactccttctttaaagtattttaaacttatagaccataacagtaagagtcatctactgtttggttaagaatatgcctaacctgatagaggcagatatagatgttgaattacatagcatcaagagtcttattggatcaatcacatctgtcaagcgtctttcaatatcctctaaggtaatcagtttcaatccatctttgatctgtgctttctaaattctctgttaacacttttcttattcgtccgcaggctatgtttggtgacggttatatcttcaaccgccttgagcgtctgacactacatgtattggaagagaacccgtcgaatctcctttcccagttcctcaaagactctcctaacttacaagaactagagtacttctctgaactagatgacgtatgtttcttctattagctattatttcttatttattgcacattatgtttttaaaaaaaaatctgattcttctcttgatctcagagttatgagaatatgcgtatgtttccctggaatcaaccgagtattgttcccgaatgcttgttgtcgagtctacaaaagttcacctggtcgcagtacttaggaagaacacaagacagagatattgcggtttacatcttgaaaaacgcttgttgcttaaggaatgcaacaatcgattcttatacatgtttggttccagaactcgagatgataaaggaattgactcgttcttcccgagcttcaacaacatgtgaactcaacttttcttgaggatttgagttttaagatgttttcatttataaatagggtctagtttccatctagactcgtctgattgtccagcaaagatcagatcatgaatgtcttgttcttttactctcctacttgtatggtttcttttccatctcttaaaactcgttttcgacagaaagcttgtttatgtataatggagatataccttgtatgtcagacagaaaagtttgagcgttgcgtaaagatgttcagctcaaagttaaaaagaagaatacaatagcttaagagttggtacttttttttgcttgcatgtgtcctttaatgtcaatttcatgttttcagagttatctaagtgtggttgtttttcttgttgccatggaacaggacaagacaagactgctcttcttttccttttttttttgtccccctgaaacattattaatccttagatcttattattggggtggatgtttgcctgcatttcctctccagctgtacgaggtaattgagtatgatttgggttgctttaaaatgtaatttttttatcctttttactaggcttggctgtcgtttctctatgctgggttagctatgctagagaacatattaagagctaaggggagcaatattcgggcatggggctcttatatgtttcctcatcgttcgattatgactgttatgatctcttaagtttttctttgctcgtgttgtcaagttctttgaatttggagtgttctttgtgtctcatgcgtcgctagtgaaggccatagaatgttatttcattgtatgtgtgtatctcagagtgatgcgtcatgctatatgttgaacgtctgtcctatgctcaaccaagcacatctgtagttttatggaagtcataggacgtacctaagtttagagaatattgggtttccaagtgttgtgtcatgttactgtgtggatcttgagttctatatccacaaagcacatgctttgcagttagcaaatgatgactattgaatgttgtaaaatatcaaatgcatcatcatgtggcatggtgattggcaaacatttggatttttccctctaaagggtctctttcattttggcatagaagtatacacatagagaactttagcatacacatatatggttttgtcaagtatttcatgattaggattagagaactttagcttccacggagtcctcaatggttgggggtgtttagtattgttattattatgcagtggatatcttttatatatgtattcatgtagtggtgtttcgtttggcttatctcatctgttgggagtgaattaaactctgaacttgatttggttttgcaggtggctatatcatcactattgtgccatggctctggcccttgtcagcctcacttgggaaagaaaaggtcaaccaaactgtgtccagaaacagg

SEQ ID NO: 154360 - DNA, 5224 bp, Arabidopsis thaliana landsberg
  unsure (1)..(5224): unsure at all n locations
atgcccgccataggtactatcatagatgaacctaggcatttaagaaagaacaggtaggctcatagaagggctatggtttagatactaggtgaactaatcaagcataataacaatgcatgctttagcgtaagatatctcggctcctctggttgtcttagctataagtatagagagtttcacgaaacgccaccggttactctagaatcatagtttgagttcgagaacggtgcgataacaatcctaatattagctagatctacaatttatctatctcccaagacaattccttagacccgacgctttaatcacttgaatctacacctcgtttacttgcttatttgtcgtttacatttaattacttcatctagcctattaaataacatcataagtctattgtgtgaacatcgagagctcattggaatttgacccttaagtgctaacgactatctcttattggagggagtaagcttaaggcaatttgagcaatatgaaatttggcgccgttgccgaagatctcttttagtttaccattagactaggtgtccttataagtctagatacttcttttctatcacctactcacgtggttctttgtacttttggtctcttgtgtttcatgtaccttcaaattgataattcatggctgtgtcaaccaacannnnnnnnnnnnnnnnntcgacaccctctacagaactagacggctacaataggcgatttttataagaactgatctcttctacacaaattgatcaacattcaagcttcctccatttgaaagagaagactttgctatacaccctgcctataatgatcttgtatctagaggaaagtttagaggatctcccgattaatcaccattagatcatttggaagtcttcaaagacatcgtttcctctattaaatcagaaggtgtacccgctgattatcttctttgcaaactcttcccccactctctcgagagtagaggaacatcatggttgngcaactcgaccaggttcattaaccaattggactgatacaaagaatgcattcatcaatcacttcttctatgtagccgtgacagaggcaattcgtttgcaaatctcttcgttcactcaggctccagccgagtcttttagagcttcttggctccgtttcaggtcttatcagcgtgaatgtccccaacatgacttccaagatggccaactcaccaacctattatacaaaggaataaacaagccataccagaatgaacttgatgcagcgagctactgtaacttcatgacaagaactactagtgaagcattactcctcatcaccaatgctttaacttgtctttcaacgcagggatttgacatagaacgaataatttcagctgagaaagccaccgtgagcaaagagactcttgttttcaggtgcaaaaggagcttaaaagcactctactcgatccattcactcgatccaggcagctacagaagaggcatcattctacttgacctctttactcgatccaggatgccatggaggaggctgcagtttactcgaccctcctactcgatcaacgcaacctcagatgaagcagcagattgatctactcgcccctcctactcgatccactactcgatccatttactcgaccaagggtgaccatccctacaagacttattgagctatcaaagcgtcttcggatcctcctcattccccactcaaccagacatctgagcatacggataggagaggaagaagcatctactcgatcaattgatcactcggagcatagacacaaaggcgcggactttgcagcaccctctttactcgatctccaagatcgagtattcgccccaaccgcctcaagtctcttgtcttctagtgaatctagggtttcaatattttactataaatagatcactttggggtttgtccaaaggatctatgctttatctttcagtttttctttgtgtttaagaattttaaaaccttaattacgcttaatctattttgtttttgcatttgattgtttaagtaaagttgtttagcttgtttagatctacattttagtatgattttagtaatttctgggtttgtgttcttgagaacattctggaaaaaacttcaaaatagaaaagctcacgaaaaatcagaatcaagagatgattagctgtgccaccacccaagaaacttacaagaagaaagtcatccaagaaaagcttgatgatcctggttcattcactctaccatgctctctaggaccattggctttcaataggtgcctttgtgatttgggaacatcagtcagtctcatgcctctctctagagtttaaaggctagggatcatggaatacaagttctgcgaccaagctttactcttagttgctggttctgttgcacatctcatggtcgattagtaaatatgcctgtcaagattggaaatgttgagatacctacagattttgtggtattagacatagatgaagnnnnnnnnnnnnnnnnnnnnnnnnnnnnnnnnnnnnnngcttcagcttgagcagtcatagatgtcgggaatggaaaaattgatcaaaactttgaaaacggtatcatgatgagatttgatatcaacaaagcttcaagaaatcaacaacaggaggtcccttatcctaggcagaccattattatcttcagctggagcagtcatagatgtgaggaatggaaagattgatctaaaccttgaaaaaggtatcaagatgaaatttgacatcagcaaagcctcaaggaaatcaacaacaggaggtcagaattctgggattcatgacatggatgttgacacaggatcaaagctggaaccccaccaagatttaactatacttctcaactcagcaagcggaaaagaacttttgaccacaagaagatatcattttaagggttagctcaaactgaagatcctacaaaagatgactcgtatgagataagaaaaaaatttaaatggcaaagtagagtcatagagaaattatcttcaagggtgatgaagctgaaagatcaacatggatgtttgaaaaaagagttaataagttttcaaatggtattgatccagagaagatggaaactgctctagctatcaaagagaacgaagatttcacaacagaagcgtttgcaccagaagattagaaaggagttcacttagaggaaagaagcctagagagcaagttgttgactgacgaggaaacccctattccgacatattctctaagagtgcctaaacagcccaccaacccctatattgaagaagaacacttgattcatgattctgtttctaaagaactcctggagctctaggttagatataaaggtcaagaggatacaattggaaagttaactcataagatggaagagttaaacagcaccattctggaacttcaagaaatggtcaaggactaccccaactttgaaattgaggattggtcgaaggagcctggttcagaagaagaagactactctgctgatcagaaaaaagcttattttgaagaaaaatcaaatgagtattcatcctaccatatgtcaagagaggatgcagagtatgattcaagcattgaaagttcaacaactgaagatgaggacttctctgttcctctcttcaacctttttttgactaagctctgtaagagtcaagcttcgtgacttaaaacaagctcacttggaaggaagtctcatgtctatccatgtatataaatttctatttttctttttatttttgatgtttttgtttaagtgcttcaggtttgttttagtgaccttgaggaagtcaaatgtcgagtaaattcaaaccaagtcaagaaagatctcaaacgttgatcgagtagaatgaggaggagtgttttgaggcgttgatttgaatgaccaaatgagaggagcattcgtccccccattgcaattcccgaactcaacaaccgcatctctccgcctcccataccaaagaattctcgaatccttacaattctctctttatctccttcacttccctttcttgtcaaaaacttttcacaaattcatttgtttcctccatcattcaatctcctaacctactaaattttggttttgagtttctcccacttttgttcttgatgacgaactggcgctcgcttttgtcaaggattcggaacaaagctctctccccatcgaagaggtacccaacaccttcttcgcatgcagcagctcgaggaccttctgaaccatcaccgttggggtcgagcaggagagaacaagacagtttcgagatcgatcacagtgaatcgagccaagaggatgaagtgatgcaagaagaagagacttttagctctcctgctggaaatactcaatcccgaaggtcgagtgagtcctctgcaaaggaattcttgaggaacaaggcagataccactcgaggaaagaagcccgtggggagaaggttagacctcgtagatgaagactctgaggaagaaatggtttcaccagaggaagatgatcaaacagagaaaggaggcgatgatgatttggaatcagagaagtgtgcaactcgaaacgagtactacaagctgctgaagcgcaatgagtttttaggaactcgataccctcatcccgagaccatggagagactcggcatctatgatgatgtagactatatgtttaagcagtgcagcctgaatattcacatgtttcggccaatggaggagtatgaggaagagaccatccagtttctttcatctgtggaattgttcttatatggagagtaagaggacgatgaaatcaggccagatggaagtttgggatacttggagttctgtgtgtatgacgtagagtattggcttccaatagagcatttcgagctgatgtatggatttccaagcggaaaagacacaagtcatcgttttgacaagagagagcttcagtcattttggccacaattgggtctaagcatggattttcatcctctaggaccaagagcaacgagataaggagtccagtggttagatactttcatatgtccttggctagtgcgctatttgcaagagaaaggaatggaaccttcgtcaatggagaactagagctgatagagacagcgctgcaagagctgcttggcttagcatcagacagtacagttctagttgtgactccaattctgagagcatgcaatgtacctctgcattcaaagcctattcctccaagatggattgatatgcaacaccttatcaattccaagagtttttgggtctcaggagaagaatggcctatataa

SEQ ID NO: 154361 - DNA, 713 bp, Arabidopsis thaliana landsberg
cccctggagttttaatctttatctctgcctgtttcttatccttgccttttctttctggtgaccagcaagaatgatatgcacccaaagaccaagaggattcttaacaatttgcaactaaagagcgtctttactggtgtatttgccaaagcaactgacagtttgttccaaaagcttctcaaagtgcagccttatgtcacttatgggtacgtagagacaatcaatcctctttcaatatttccttgttactcgatttccatgctgtttctctattctcttatgagctaaccgatgtttacgactcttgaagatacccgaatgataagagtgttaaggaccttatatacaaaaagggatgcacaatcattgagggaaatcctgttcctcttaccgacaacaatataatcgaacaggtaaaatttcctactcttaaaagtataggagcttattccagataataaccatgctgttcttaatcgattccacttttgttaccttaggctctaggagaacacaaaatcttgggcatagaagaccttgtgaatgagatagcaagagtcggagatcatttcagagaagttatgagattcttgggacccttgaaactcaacaagcctgtggctgatgttttgcaccggaagaaacaagttttcagcgaaggatgagataccggaaaccgcgaagataagatcaatgatctcatcagcaaaatgaat

SEQ ID NO: 154362 - DNA, 2370 bp, Arabidopsis thaliana landsberg
ataggctttgatttcttatactctataaacttccttctttcagtcttttgggacaaagatggcataagttcagaaaccagtggtgggcaaagacactaataagatcgtcatgaagcaaatacatgcgtttactttcatggaacaggtatatataagtgttcatgtatatctttctaatagtgtgctttgcaagtatttaaattttgaccggttgatagttgagggcttttagggttgacattgttaatgagttagtatttttttaatctctcgcttttcatgacatcttttattatttattccatatgaaacctctttgtgaattacatttctagtttgagacaatgtcatgtttgaggtggttaagacgataagaacgttgacattttctgattgaaaataaaagacctggcttccattaactttgccttggatgcgcttactctaattattttctgattaaagaaagacattcccttaatttgtaggtgaccattacacagaacagtaagctctcaccacgcacatggcacaaggaagcgttcaagagttttaatagaaacggactaacttgtagtctctttcccctgtcaagaattagcaaatcatcttgcatttctcatctccttcttttacttggtaagtctctctctctgccccctcttcttggtatcattgacttttttttttggtgcttggggaacttaaatatgtgttttcaaacgatttgtgtgatgattttaggattgagatggacagttctgaagcacatctagatagaattgaggcacagaggtcaacggatgtgtctcatgaccaagagaaaaaaaaatacttccccatgaatctgataaacaaagtcgcaagcaaactctgttcacgaggaggacatggcgccacgccacctacgggagacaatgaatctgggctagagttcctcaacaacctcaaattgtcagatcttttcgatctccctagtgaaaatgtccagatgaatacggaagtttttagcggactgagtgatggggacaaagagtgtctggacaagttgaaaagccatggaacgacaatggcatgtctcaagagcgatagaggagattcagttcttcatcttgctgctagatggggtcatctagaactagtgaagaacattatctctgaatgcccatgccttgtattggagttaaactccaagaatcagattccgcttcatgtggcagctcatgccggtcattcggccattgttgaggctcttgttgcgtcggtaacatttttttcagatagactggctgaagaagatagggagagactgaatccatatgttctcagagacaaatatggaaatactgctctgcacttggccattgaaggacgctatatggagatggctgcctctctggtgaacgtgaaccagaatgcttcttttcttgaaaataatgagggaatatcttccttgtacatggcagtagaagctggagatgtgactcttgtgaaagaaattttgaaaaccgcaggtaacaatgaccttgaagggaggaactctaacttagattcaaagttggaagggagaaaacatcttgtacatgttgctttgaatgccagaagtacaggtttatctctcgctttggcatttaatctgttcaaatttctatgtaaaaccagctgcgttatgctaattgttgttcccaattgtttgagcaggtgtccttcatgttattcttatcgaatatccaagtcttggggatgagtgatgtgaagaagggataaattctctttcaattggagcatccatagggttttataaaggagtatgtaacctgttagtacgattaacgaagagtgtttatgtgtgaaacaatgatggaccctttccactcatttggcagcaacgaatggccatatcagaattgtcaaagagactctaaaacattgtccagattcaaaacacctgcttaacaagcttggttagaacgttctttgcattgcaacaaatagtgggaaatgtaagtgtttgattccgttgttgttatatatgcaattctgtttcattttatttccgcactttgggttgaattgtcctgtttttctatttaaagaaaaaagtgcttcattttgatgctttgtcgatcaaactgaggtttgattcccaagagacacatacagattgtatcataataagctaggtccagtttgatcactgtgattgtagttgacagatagtcaaaatgacctcttgttgttttgctggtgatcattatttcagtacctaagttttttttacccaaccctcacttcgacacatcttttgctgccaccatttcctttcgctttcggccgctggtcacgactcacaacagcaccaatgactaa

SEQ ID NO: 154363 - DNA, 1116 bp, Arabidopsis thaliana landsberg
ggaccattgcagattgtggcgccacatcttcattgtttgagtttgagaaactctcaaataccatgtagtttagttgatttctcttctttaaccgaagctgacttgaacatttactttggcgatcttaaaactgttaccgctggttttcttcaacacaatgtggtcaagatgctacaaatgttgcagaatgtagagaagcttactattgggggtacctttcttcaggttcgttaaccatttttctgccttctctaacacatagaaatctgtatgttgtagaatcacatagcatgctcttttagaatcagttggttttgcataggcagatattggttgatcaggctttgatactcagattcatgattacctactaagtatttggtcaatggctcttgtcttgttgtgctttggttatttattttgctgaggtttgtgtttggtatgttgaactatatttgcattgcctttcagatgttatctcttgccgcgctatgtggtgtaccttttccgacgctcaaggtcaaaactttgactctcgaaacgatgattattcggtctgttattcctggtataacaaagctactacggtacacacctggattacggaagctaacaattcacactgtgaaatgcagcagcatatcggtcggtatctttaccatgaaacctcttttactctccttcacatatatgatcatagtaactatgacaaaatagtgtttatccaagaaccatgatgaagttttttgacactctttttgtatacaagttattagtttgcatgatgaaatccatttttctgtttgacaggaattgcatctcaatgactacttgcgtaaacatagcttgaatcagcgtcaatgctggagatcaaaagactcggtcttcccgggctctcttgagaccatttcgatgttggcgagtaaacacgcagagtccaatctcttggctttgttcatggaacgtctactgaaaagtacaaaaagtctagaaaccatggttgtactcttggtagattaccttgatgcattgggttttgaagaacttcttgcaatggctacaacactttctcacaacaatgatgtctctgttttgatcaaaccaagctatattaag

SEQ ID NO: 154364 - DNA, 1238 bp, Arabidopsis thaliana landsberg
atggagatcgatttgggagctaacgcgtttggtatcgacttccatccatcgacgaatctagtagctgctggtctcatcgatggccacttgcatctgtaattccttctaaagcccttctctttgcttcttcctttcgttttccacattcccaagaatcatcaacaatctatgtaatctccaaatttttctcttgcagataccgatacgactcagattcttcacttgtcaggtatcaaaacgctcttttcatctccaaagtttgtctctttcgttgactggacagactaagaagagaatcgctgaaatttgtgtagggaacgtaaagttcgtgcccataaggagtcttgtagagctgttcggttcattgatgatggccaaagtttgttcctttaaacttcaactatctgagctcaatatctgagctatgttttacattatatgtttttttgttgggttttaggaatcgtcactgcttcagctgattgttcaattctagcaactgatgtagagactggtgcgaaggttgcacatcttgagaatgctcacgagtatgcaattattccctttcgttttttaaattggatacatctttagctgactcgtaattgtttattgattgataatgtttcgctttgtttactctagggatgctgttaatactttgattaatgttactgagacaactatcgcttcaggagatgataaaggctgcgttaaggtctgttacattctctttcgtctttaatcacttttaaattgtatagcaactataatccaactcactctgatgctatctctctaatttttgtgactgaagaattaagatctgtgttccttagtatttttagatgtgtcatgtgtgtgtgtcttcagcctcaagaacttagttattccctacctgaagattctttacccaatttttatttggtgcattactcatttggagtgaaattatgtgctttgttttctgacactgtatgttcatctcctcagatttgggatacaagacagcgctcttgctctcatgagtttaatgcacacgaggattacatttctggcatgacctttgcatctgattcaatgaagctaggggtaacaaggtttggatttttgtagttatctgattcgatgaagctagtgtcttttgagttctcatagaagacttttctgcttatttgttattttggtttctttgacactggttaggggagaccggactttgtctggctccatcctta

SEQ ID NO: 154365 - DNA, 1534 bp, Arabidopsis thaliana landsberg
gttattgtgacttttctggcagcacagatgaatgtaaagctttgtgacaagttctctatcaatcattatccaatgctcttttgggctcctcctaaaaggttcgttggtggcagctggggacctaaacaagagaaaaatgagataagcgtagtcgatgaatggcgcactgctgatcttttgttgaactggatcaacaagcagataggcaggtatgtacgcactggaatgtcatatcgaccatttaagttaaaagtcatgtttatagaattcagcaatctgtttctctttatgttggctaatatgaaaacccctgtaacttattcagttgggtaatactgtatactaatataaatctgttttcttgttaatgttgtgcagctcttacggcttagatgatcagaaattaggaaatcttctgtcaaatatatctgaccaggaacaggtctctcatagtgtgttctgcccccactttgtcattgtggaagcatttgttttaattccaacgcactaaatagttctggttgttgattattgcagatttctcaggccatatttgacattgaggaggcaactgaagaagcttttgatatcattttggcacataaggtagagaagagtttttgctttattgttctaagcagccaaatcccttttagccttgtttatgaatagttttcatggcaacaggcaatcaagtcatctgaaaccagtgcttcgtttattaggtttctgcagcttttagtggcacatcatccatcaagaaggtagtatctcatcttcatatttccatttacgatctgctgctcactcttttctctcatgctaatcaaaagctgaaaatttctataggtgccgtacgggaagtgctgaaattcttgtgaattttgatgatatatgcccgtcaggcgaatgctcgtatgaccaggaatctggagcgaaagattcccttcgaaacttccatatatgtggaaaggatgttccgcgtggatactacgtgagtgccacccaaccaaccactttcttttttcgtgtgcttaaacacagaaatctgattctcctgctttctgtacgtaatcatactttggcagaggttttgccgtggcagcaaaaacgaaacgaggggattcaggtagtcttctgcaaaattaatctgttgtcatatatcatataattcaagcagaagctcctgaactcttatcaaaatattttggctgcagctgcggattatgggttttgatgcattcactttccgtgaggattgaggatggagaaagtcattttgcattcacgacaatatgcgatttcgtcaacaacttcttcatgtgtgatgaatgccgcctgcatttcaatgacatgtgcttgaggtaaaaataataataataactcacagttcgatttatcgtggtatttgctcaactgaacctcatatgcatgtgtttcatggacagcctcaacccccctttcaaaaaggcacgtgatttcaaattgaaggtgtggagcacacacaacaaggtcaacgagagactcatgagtt

SEQ ID NO: 154366 - DNA, 1216 bp, Arabidopsis thaliana landsberg
  unsure (1)..(1216): unsure at all n locations
gatagggatctctcttaattggcgctcctttactaattgccctataattccatgcatcttcggagtcttttaaatcaacaaaaaaagtacaaatcggatccctacgatatcctatctcactcttcacaaatccttctccgagatctacaaacgctgtttcattcttccgatttcaatggcgacgagaagacgtacattgcttaaggtcattgtcctcggtgacagtgggtatggaagattccgatctctaaattctttcaatctttacacatattgttcgattttgattttgatttctgattttcgattttcgatttctagggttggaaaaacctccttgatgaatcagtatccttttcaattgaacaattcattcgatttgggtttaattggttacagattcgttttcgtgtattgattatgtgattatgtgaaatctttaatgggtgaattttaaatatgtgcataagaagtttagtatgcagtataaagcaacgattggtgctgattttgtaaccaaggagcttcagattggggaaaagcttgttactttacaggtttggctttttgtttttaggttttgaatttactttttttttcaaagatttgtgtgttttacttttgttttttgtggtttttagatttgggatactgctggacaagagagattccagagtcttggtgctgctttttatagaggagctgattgttgtgctttggtttatgatgttaatgtcttgaggtcttttgataatctcgaaacttggcatgaggagtttcttaaacaggttcgtatgaaaatttcccttattttcggtacactttgatttggtatatgattgagtttggctctggtttgccttgtttgttatgttatagacatggaacataggaatgttatgataggaatcattagctttgactatttagagtcacaatcttcagattttggttatcgtcgtatgtcttttggttctcagaactatagctgaagttttgttttcccgttagtaactagatgattgagcaatggaacatgtttttatgtttgaatgatcatttgcgtttctatacctagcggnttactggttaagctaagtatattactaacttgctttcgtgtcatacagtttagaatcattatctataccattatacatgctactcgattgattcctttcatgcatcgtttggactgtccagcagccatcgatcc

SEQ ID NO: 154367 - DNA, 942 bp, Arabidopsis thaliana landsberg
  unsure (1)..(942): unsure at all n locations
ttaaaaaacagagccatcaatgccatagcagaggagctctgttgtcgcaatatttatccattgggccgctcattgtaaacgaaagaaccgacgataagaacgatagcaagacagtttcttgtctgaattggctggattcgcagccggaaaagagtgttgtgtttctctgttttggaagcttaggtttgttctcaaaagaacagttgattgagatcgctgttggtttagagaaaagtgggcagagattcttgtgggtggtccgtaatccacccgagttagaaaagacagaactggatttgaaatcactcttaccagaaggattcttaagccgaaccgaaaacagaggaatggtcgtcgaatcatgggctccgcaagttccggttctaaatcataaagccgtcggcggattcgtcactcattgcggttggaattcaattcttgaagctgtttgtgcaggtaaattaagtatatctatacacattttcaattatatatatgcttaaactgttcattgtggtgaattcaatttgtttattataataggcgtacctatggtggcttggccgttgtacgctgagcagaggtttaatagagtgatgattgtggatgagatcaagattgctatttcgatgaatgaatcagagactggtttcgtgagctctacagaggtggagaaacgagtccaagagataattggggagtgtccggttagggagagaaccatggctatgaagaacgcagccgaattagccttgnnnnnnnnnnnnnnnnnnnnnaccgcattaactactttactccagtcgtggagcccaaagtgatctttgaaagtaataaataactttgtagtttgtactctctcagaatcatgtctatggggttattcgttttacgagttcaaagttatgtctctgagaccgcagatggaaaaaacattttatgttg

SEQ ID NO: 154368 - DNA, 3034 bp, Arabidopsis thaliana landsberg; identical to SEQ ID NO: 26921

SEQ ID NO: 154369 - DNA, 461 bp, Arabidopsis thaliana landsberg
taaaacacaacatatatattttactttctcattccaacattagttgtacaaaaaaaatcacatcaaatcaaatttggacgaagaagatgaactgaaaacatatttttgtatactaaaagactacataatagtacaagcatggggattatcatcgctaaacatcgaagccgcgatctcatctccagccacagcaaccgagtaatccgcgggagtgtggaagaaagtgtggacaccaccggtgggatccgtacggtgtgcatcagagtaatagtggttggtcacgtaagaaggatatttatagaaagaggcaaaatggctattacctaaccggtatggccacagttcagctgccttaccggcacgtcgtaccgctttcaataccttcttttcctctaaccggtatcctcgagccgtcactttttgggtttccatctctacttccacttcttccactcctgtac

SEQ ID NO: 154370 - DNA, 480 bp, Arabidopsis thaliana landsberg
aaagacaccaaacggtcaaccaaaacttgtctgacccacaaacacttcttgattctgtcattgaaaagaaaactttttaatttttggatacatcatcctctcattggaagagagaaacaatgaagaatccgatattgaagacatggagaaaagtgaagtcttttgggcatacgagctcttcgaccacaccctcgttcacgaagagcaagtcttgccatggctcttttcgtctcgaggatgctaagagcaacgaatcaaaaggaaagccgaagaaagagtcgccgtcacatggatttttcacggtttacgttggtcccacgaaacaaagaattgttgtgaagacaaaacttctgaaccatcctttgttcaagaacttgttagaagatgctgagactgagtatggatatagacacgatggacccattgttcttccttgtgaggttgacttcttcttcaaggctttggcggatataaagtcta

SEQ ID NO: 154371 - DNA, 3212 bp, Arabidopsis thaliana landsberg
  unsure (1)..(3212): unsure at all n locations
tgcaaaagcggcagttgtgtaacctcttcttatcagacttctcggcgagatccctgagttcgtgtctgagggtcctgttctgcaaatactcaagctttcgcacaacaatttcaccggaaagattccttcgaaactcggatcaaacgggaacttgatcgagatcgatttgtctaccaataaactcacaggtttgatccctgagtcactctgtttcggaagaagactaaagattctcattctcttcaacaacttcttgttcggtcctctccctgaagatcttggccaatgtgaaccnnnnnnnnnnnnnnnnnnnnnnnnnnnnnntctgacaagtaagttgccaaagggtttgatttatttgccgaatctttcgcttcttgagcttcaaaacaactttttgactggagaaatccccgaagaagaggcgggaaatgcgcagttttcgagccttactcagatcaatctgtccaacaacaggttatccggaccgattcctggttcaatcagaaacctcagaagccttcagattcttcttctcggtgcaaaccggttatcgggacagatccctggcgaaatcggaagtttgaagagtcttctcaagattgacatgagcagaaacaacttctcaggcaagtttcctcctgagtttggtgattgcatgtcactcacatatttagatttgagtcacaaccagatttccggtcagattccggttcagatatcgcagattcggattctaaactatctgaatgtttcttggaattcctttaaccaaagccttcccaacgaactcggatacatgaagagtttaacatcagcagatttctcacacaacaacttctccggttcagtaccaacttcagggcaattctcttacttcaacaacacgtcattccttggaaacccttttctctgtggattttcttcaaacccttgcaacggttcccaaaaccaatctcaatctcagctacttaaccagaacaacgcaagatcccgaggtgaaatctccgcaaaattcaagttgttcttcgggttaggcctactagggtttttcttggtgttcgtcgttttagctgtggtcaagaataggagaatgagaaagaacaacccgaatttatggaagcttatagggtttcagaagctcggtttcagaagcgaacacatattagaatgtgttaaagagaaccatgtgattgggaaaggcggagcagggattgtctacaaaggggtaatgccaaacggagaagaagttgcagtcaagaagctcttaaccataaccaaaggatcatctcatgacaacggtttagccgcagagattcagacattaggtagaatcagacacagaaacatagtgagattgctcgctttttgttcaaacaaagacgtgaatctccttgtttacgagtatatgcctaatggtagcctcggagaagtcttgcacgggaaagctggagtgtttttgaaatgggaaacacggttgcaaatagcgttggaagcggctaaggggttgtgttatcttcaccatgattgctcgccacttataatccaccgtgatgtgaagtcaaacaacatcttgttgggtcctgagtttgaagctcatgttgctgattttgggcttgctaagtttatgatgcaagacaatggagcttccgagtgcatgtcctcgatcgctggctcgtacggctacatcgctccaggtacatgactgattcctaatactactttcttgtatcacacgtaacattcaaacttaggatttcagtacttctagttaaaacgtatgattgatcttagcccattttatccgtttcttgaatgcagaatatgcatatacactgagaatagacgagaagagcgatgtgtacagcttcggaattgtgttattggagatgatcacaaaccagcctgtgattgaccaatcccgtgcaaagtctcacatatcacaatgggttgggtttgagcttaacggaggagatattacgaagatcatggatccgaacctgcacggggattacgagtctcgttctgtatggagagttcttgaactggcaatgtcgtgtgcgaatccttcttctgtgaaccgaccaaacatgtcccaagttgctaatgaactgaaagaatgtcttgtgtctgaaaaatcgaggatgggctgtcagagttctcttaaagtgagcatgagctttgacacagagttgtttccgagggcaagatagtattgctgcaacaatcatgataattggttgggctatttgtcatttttgttttgatcattgacatgtcaagatcatactctttgttagtgatgttttcatttttcttgtatatgtggtggattggatgcttataatcattgaccgtaaaagataatacctctctgtggttctggttagacatttgtaaaatagttggaagagtattaatttaaattgtgtatagtcagatgaacatggcatagtcattctcgctagatagggaacattgcttgtttggaaagtaagatggatattgtgtgaccaagaaactaaacaaatgtactaattcaccaaatgcgacatatgtattgtcccaaatcaaatactctagaagtaaagaaatagagtgggggttgtgatttcttattcacttatctcactcttaaaacaaaataattaggctaatcactttagctaaacttgcgagactttagtgaaatgaaagtgaggacaggtgattggataatgaatccaaattcgttctagataatgggccgcgaaaaaatcaattctggcccaaaactaagcttcctgttatttttgcatccttgtagcaaaatatactgaccgttgcgtttaaaacgccagcctcgttgatcgcgttctcaaaattcaaatcagtgctaatcgccgatgaagaggtctcaaagggccaaacccaatggcatatattcctcactcaatatgcgttcctaaagatttcgtttcacagttttgtgaatggttgcgattccaccacttcaatcgttgatagctggtgagaaaaggtctcaccgccgggaactgctgatggtgaagaaccgctctctttctcctcgacgggaggtttctccgtcctagaccaccggatattatcattctcattcgacgactcgccgaagccggctgagatggatgaaagacctagatttctctcggactcagtgccctgtggattatccaaacaggtttttgctttga

SEQ ID NO: 154372 - DNA, 561 bp, Arabidopsis thaliana landsberg
tctcaagttcactacgagtcaaacacttgaaccaaaatagacatcagtattatatatatgcttttactattccaacataactcaaccgtagtagtaggcatacacgcattacacacaccaacacatatatatctcttttctcttacataaagtcggacccgttcattatttattgcagtttcaaagacttgcttaagtttcaaagacccacacacagacgaggagtaattttctattcctcggccaagagatgttcgtcgatctctttggagatctcgacacagaattggagaagggtttcgggatgagctacctcctcgctaattttctcatactccaggtgccagtgcgcaatactccctgacccctcttgcttaggggtcacttggagtgtaaatgcgaagctcttgtactcattcatcagatcaccttctaaaaccttgaacgtgatcaggttcttctccggatccaccgcctcgatcatatttttccccactgttaactttccatctgcaccatttgttcaacattttacttccctaggtttaaattaaggaatct

SEQ ID NO: 154373 - DNA, 901 bp, Arabidopsis thaliana landsberg; identical to SEQ ID NO: 17400

SEQ ID NO: 154374 - DNA, 1408 bp, Arabidopsis thaliana landsberg
atatagtattttaggtctcttcttacttcatatatgaaaagtacttaaatggtggcagatgttgtgagtcccaactagggttgttcaaagaagtggctgtaaatggtataatgggacttgcaatagccgacatagcggttccaaacatgttggttaaagccggtgtggcgtcagactctttctcaatgtgttttggtcctaatgggaaaggaacaatcagtttcggagacaaaggtagctcagaccagcttgagactccattgagtggcaccatctcaccgtaaaccctccttacacctttttcttttatttgtcccaataagtatattcatatgtaacgaacatgcatgatctaaacacaggatgttttacgatgtgagcatcaccaaattcaaggtaggaaaagttacggtggatacagaattcaccgcgacatttgactctggaaccgcggttacatggctgatcgagccttactacactgctctaacaacaaacgtgcgctttacgtacttttgcatttagttcattccattacctaaaacctcgaggcatgtaacattacaaaccgacccgtctgtgtgttgtgttatgcagtttcatctctctgtaccagacagacgactttcgaaaagtgtggatagcccttttgagttttgctacattatcacatcaacgttcgtaggcttatctttagatatacatatgataaatgtttgtagttaaaaaattgttgatgcatgtgtgtgtagctgtttgcagttcagatgaagataagcttccttcagttagctttgagatgaaaggaggagctgcttatgatgttttcagccccatacttgtcttcgacacttccgatgtatacacatatcttctcatatcatcattttatcatatttactatatctaaatatattaatctccattgcattaacagggtagttttcaagtctattgtttggctgtcttaaagcaagttaatgctgacttcagcatcatcggacgttcgtttttgttctttttttcccacaatcaacacaatttcttcttgtacattttaaccaattcctaaatcagatgaaattttttctttatgttagaaaatttcatgaccaactacagaatcgtccacgatcgtgagagaaggatcttaggatggaaaaaatctaattgtacgtcctacttgaactaaactcttctccaaaaacaaaaattactcatgttaataactaatttcttgtggacattttcaggtaatgatactaacggtttcacaggacctaccgctttagcaaaaccgccatcgctggcaccaacgtcgtctccaagaaccatcaacctttccagtcgtttgaaccctctggctgcggcttcttcacttttcatcatttgcttcatttcttttgta

SEQ ID NO: 154375 - DNA, 1277 bp, Arabidopsis thaliana landsberg
ttgaaatttgtaaaagatatgagaaattagtaaattccagaaacttattagaagcggcggatcgaattcgcgacgaccgttccattagggtttcgaatcaacatcaacaaacgacgagagaaaacttttaaaaacatgtacggaggcgattttgacggcaacgctgctttcgccggcggcggcttcatgccttctcaggcgactacgcaagcccatgaatcctcatcttccctcaaggtttcctctctttctctctctaaattatcttctcaatttgaaaaaaaccctttccgcgttttgtgtaatccaagttctctcttatcatgcgaattttagttctgcctgctctctatacctaggtttatgtatctgattctcgtcgtttctcgggaatatctgctgcaaaaagttccattcgagttttctaggaaatgttacatggatgaaaagtatcgaagaacaaattgttgactagatattatctagaaatgtggattttatctgtgaattttgaatcttatcataattgtacgtttgtgaatctggatatagagatcacagatgagcaccattttacttgagcagtccagcaatgtatgagagtgttcaccactattttgcagaaccgcgatgtacgtaccttgcttcccctgacactgaagcagttgagcagcgcatcaaccactggcgaatcaaatttctctattgatggcgttgatattaaaactgtgagctcctttttatcttctgctgttaaaacttgtttgctgataatgttacgccttaagctctattgattcaagcatttgagctttggtgttatctgtgtataggttgtaatcgttggacggatttctagaatggagaatagaatcactcaggtcgattttgttgttgatgacggtacaggctgggttgattgtgtcagatggtaaatacttataatactaatgctaatacagcctcaatatgataatgctttcataaaagagctcaactatatctcttgctaattcatctgcaggtgtcacgctcggcaagaaactgaagaaatggaagcagtcaagtatgtttcttctgcacattcctagatctttagaatagtatatcaaaaatttgatagttcacatgtataacaggctgggaatgtatgttcgcttacatggacacctgaaaatttttcaagggaaacgatctgtgaatgttctttcagtcaggtttgttttcctgacatacttttctctatcagtctatgatatatgtggtcagcgaatcat

SEQ ID NO: 154376 - DNA, 476 bp, Arabidopsis thaliana landsberg; identical to SEQ ID NO: 2720

SEQ ID NO: 154377 - DNA, 3217 bp, Arabidopsis thaliana landsberg
ctctcgttatgtctctctcaagccgtctctttaaagaatatgcttcttagtctcattgaattggaaaacaacaatcttgcgtccgtatctacaggtaagaacctttgttctggatgatgcgctctctgtcatgaactcaggcaagaatagtcatctactttctgctgtcaaacgtgattttaaagatgaagataaagtttctttggatgaagcaatcgacttggcatggacaaatgatgagtttgattgtctcgtagatctagtttcatctgaaggaagtcatgaggcttacaattaccagaactcagcgacaggcctaacaccacttatggtctttgctggaaagggcagggttagcgatgtctgtaagctcctttcagtcggcgctgactgtacactgaagtccaaagaaggtatagcagcattagaattagctgaaaaggagaatcaatttgaacctgcccaaataatcagggaacatgcgggtaacatccagtccaattctcagcaagcacaagacttacttgataagtatatggcgacaatcaaaccagaagaagtagatgtgggtcttatagtgaagttaatgaagaaaatatgcagcgattcaaaagatggtgccattcttgtttttctacctgggtgggaggaaataagcaaaacaaaagagaaattgcttgatgatcggttttttgcacatagtgctaaattcatcattctatgtcttcactcaagggttccagctgaggaacagaagaaagtttttaatcgcccccctcgtggttgtcgcaaaattgtacttgcaacaaatattgctgaatcagcagttaccatcgatgatgtggtttatgtgatagatagtggtcggatgaaggaaaagagttatgatccctataatgacgtgtcaacgctccaatcttcttgggtatcaaaagcaaatgcaaaacagagggcaggccgagcaggccgttgccaagctggcatctgttatcatctatattctaaactccgggcagcgtctttgcccgaatatagagttcctgaagttatgagaatgccagtggatgaactctgcttgcaggtgctgttctttctaacgtagattttttctatgatgtttaattgtcattcatgcatggtagcgtcctgtttgagacttcttgcgttcttgatttcttactgatgtccttctataatatcaatatgttcaggttaagatgctggatccgaattgcaacgtaaatgatttccttcagaaattgatggacccgcctgttgctcaaagtattgaaaatgcattaatcatccttaaagatattggagctttgactcctgaagaagagctgactgaacttggacagaaatttggtcagcttccagttcatcctcggattagcaagatgatttatttcgccatattagtgaactgtttggatccagcacttattctggcatgtgcagctgacgagaaggatccgtttaccatgcccttgtcgccaggtgatagaaaaaaggctgctgccgcaaaacatgaacttgcatcgctttatggagaccacagtgatcatcttgccactgtcgcggcttttcagtgctggaaaaatgcaaaagcaagtggtcaagctaaggagttttgttctaagtacttcatctcccaagttgtcatgaagaggctggatgatctgtgtcgcaagcttcagggagaacttaatagacatggggtcatacctagcagcagctcaaactgtagcctgaatgctcatgatccgggtattctccgtgctgttatagcagttggattgtaccctatgttgggaaggatgtgcccactttccaagaatcggacaaggtctgtaatagagactattgctggagccaaagtccgtgtgccctcgctatcaaacaatgttgacatgtcctctaccaagtttgacgaagctttaattgtttttgatgagatcactcgaggagattggggtgtggtgataaggagctgcactgttcttcccactatacctgtgttactgttttcaagagagatagccgtttctactacagagagctatgatgctgttaagagtgatgacgaggaagaccacaaagtaggaaatgtaggagacgcgatggacatagataaagaagttggtttgcctggagagaaaataatgcttgggccggaaaattcagtaaaagtagtagtggatcggtggctgcctttcaaggttacagcttttgaaattgctcaaatgtacatcttgagagagagactaatggcgtccattttgttcaaggtacatgagttatcactacgatttaagattttcattattttattttggcaatgtcatccttttcaaccttccatatgcatttgtaggttaaacatccaaaggaaaatttgccgcctcatctcggtgcttctatgtatgcaatagcttctgttctctcatatgatagcctcgcacaatcttcagttcaaactgtagctgtgcaacctattacttcagtggtagatgcaacgagtcccagagatgacataccttccactaaccccaatgagcttcgggagcatgacccgaacactactccaatggggtcaaagctcgaattagccaacaagttgggtttgggtaatatggaagagagcttgccttcaaatttcgctgatgggaatgagcaacctgacccaaacacttctccagtggaagatgtttcggcggctacaaaacaaaagaagatgcagtcagagtccaaaaggtgcaagtcgctcaacaacgtggatttggggaacattgaagagaatttcgggaacatggaagagaacccaccttctgatctggctattgggaatgagcaaacattgccgaagttagctagcaacttggacatggggaacatggaagagaacacgccttctgatctggccaatgggaatgagaaaacagagcctaactcagccaacagcatggatttagggaacatggaagagaacacgccttctgatttggcaaatgggaataagaaaaaagagcctaagtcagtcagcaagttggatctgggtagcgagaaagtgagcattccttctaatctcgtcaatggaaatgagcaacatgacctaaacattgctccaggtgaagatgcttcagcggcttagcaaccagaaaagatgcgatccaggtctaaaaagcgcaaatcatggcacaacctggatttgggg

SEQ ID NO: 154378 - DNA, 2349 bp, Arabidopsis thaliana landsberg
ttttacgacgttatacttttcgattatgagtgcatcatgggctgatgtagctgactcagagaacacgggttctgggtcttctaatcagaattctcatccttcacgacctgcttatgttcctccacatctaaggaacaggccagcagcttctgagcctgttgctccattgccagctaatgatcgtgtaggttatggtggtccaccttctggctctcgatgggctcctggtggtagtggtgttggtgttggaggtggtggtggttatagggctgatgcaggtcgtcctggctctggctctggctatggtggacgaggaggtggtggttggaacaacagaagcggagggtgggaccgtagggaacgtgaagtaaacccctttgaaaatgatgattccgaaccagaaccagcttttactgagcaggataatacggttattaattttgatgcctatgaagatattccgattgagaccagtggggataatgtgcctcctcctgttaacacattcgcagagatagatctcggggaggcattgaatctaaatatccgtagatgcaaatatgttaagccaacacctgtacagcgtcatgcgattccgatattgcttgaagggagggatttgatggcctgtgctcagacagggtcggggaagacagctgctttttgctttccaatcattagtggaataatgaaagatcagcatgtacagagaccccgtggttcacgaacagtctaccctcttgcagttattctctcaccaacaagagagttggcaagtcaggttggggttctcttctgatgtcaagattcttcgctttggtagaagttagttagtttctcatatcttgttctaatgatttttggcagatacatgatgaggctaaaaagttctcttaccaaactggtgtgaaggtggttgttgcatatggaggaacacctattaaccagcaggtatgtaatgagcaaatagtttgtttttttctacttttttgtttgaacttttgatttctgagttttgtttcatgcgtctgtcactgctgtctgttttgtgtcgtctcttaggctgattgttttgggttaagcatgttcgtttctaaggctacttaacttagttaaaagcatgttttggtttggagccagcatttttctatattaaggatttatcaatatatgacatgcagaagcattgctatatgtcgtagctgtatctatgtgttacttaatctgttttcaaaagtcaacatgttgatcttgtgtcttgttgtttgtgcagctccgggaacttgagaggggagtcgatattcttgtggcaacgcctggtcgattaaatgatttgctcgagagagctagagtctcaatgcagatgattagatttttagctcttgatgaggccgatagaatgcttgacatgggttttgaaccacaaattagaaagattgtcgaacaaatggacatgcctccacgtggagttagacagacactgttgtttagtgctacatttccaagagaaattcaggttggttacttgtctgtaaatcactttttctttattcaccttcacgttggttgaaatatcatttttagtgaacttcttcactttctgactactacccctgccttgctccgaatttttatttaagtttctttgccatgtgtgttgattcttgtgttccatactttttccttgcaaattatctgcttgttacattttctatgttggggttttgtcgtaacaaccttctgtgtccagttatatccatttggtcctctgaaaaaaatgagggggaaaaagaaatgtccaacttaaactgaaagtgtatgtgaatagtatatacaaagctatatgcatggtttctgcagaggttatatcttttctgagagaggttttcttgttgtaaagctgattacatgacttttagtcctactattattctagctaggctatgcaggggtaaatttatccatttttataaaacgatggtcaatgccagttaactgacatggtattaatagttctatgtgtcagaagattatatgccacttcattaatggatgatggtgaacctattatggcaagctttagattaatgaagtttcatacttttgtttcctgattaagctgcataatatagaatgtttctgcataatcacttgcaaattttaaaagattgtattgtttcatgtgcagagactcgcagctgacttcctagcaaattatatatttttggctgtgggtagcgtcggtacacatcataatctgaatcgtccgaataactaaagtccagtcttcgtagaagagcatataatcaaacgaagaatataacaaggcaaatgccaacagaatcacgc

SEQ ID NO: 154379 - DNA, 446 bp, Arabidopsis thaliana landsberg
tggatgatttggaagcttactattctcactataatttaccggcgatggttcctcctccgccgccgggagtttctccgattccaattacttcagctcattccgtctatttgcctacccatgtctcaattggagctcgcgatgaggttaggacgcttttcgtcgccggacttcctgaagatgtcaagcctcgggagatctacaatctctttcgtgagttcccaggatatgagacttcgcatctccggagctcagatggagctaaggtaatcattttctatctctccggatttgtgatttgggtaatgatgtttcccggcgaagagactgagaatcttactttatttgtttggtagcccttcgcatttgccgtgttctcggatctgcaatcagctgaagcggtaatgcatgctctcaatgtgagtacaaatttcttcaaacttgctctt

SEQ ID NO: 154380 - DNA, 1486 bp, Arabidopsis thaliana landsberg; identical to SEQ ID NO: 36665
  unsure (1)..(1486): unsure at all n locations

SEQ ID NO: 154381 - DNA, 1285 bp, Arabidopsis thaliana landsberg
ttaaacacagcctttgatttgagatattctggtatttgtttgattgacaaagtttacccgcgagatttcatgcaagtagggagagtgagggtgcaattgaaaagagaagatggtactttactcaatccagccattacttcaagtaagacctctcatctgtactcctgattatatctccgatcgctgtagaacatttttgtcttttgtgttttcttttaatgttatcctagtgtgatcaatcagattaagctagaaaatggaatctgctttatttactttacttactcttgttgtgttgttaagatctctccttgttacccatgtttggacttcttcaatcttccgacaaatgttgcctgatactagcctgcttgttatcaaatctctggtcgctaatcttaactttctgctttgttttatcacatacaaccctgaatcaaactttttcattgataatttagtcatcatcaccaatttcaatctttgatctggaggctttatgagctgttccagggatccatacatttttcatttatggtcagtatcattattctcatgtggggaaacaagctgttatacattatgtatatttcaatcctatgcacatggaacttaccgcagcaattatctgagtctttagatatttatgtttgttatgatagtgttaccgaaatatcaccttatgctaagtttatctgattttcttcttcacaaattctttttcaattcattgtgctatatcttgaatttttttggttgttattgtcgcatatggtcacagcagactcagatacagaaataacctatatagaacttgtttatttcaagcattttttgacaaattgcaagacttcagatgcgtttgtgtttgtgtttgtgtttgtgtatgcgtacgcatttgatactgttgataaaaccattttccacattgctggttttttagacgtttgtgcttactttgaccttatatccttatcatgcccaggaaagtgtaattatatgaatatacttttggcttgctgctttgcatgctttgaacgaaaagagtccacctgtgagaacactgcaagttgtttcctacagacatatgatgatgtgctcttgtgttgatatatattttgcagggaagcatctgatgcagaaaattgcagagttggtaccaagacatccagagagagtaaagaagcaggaagctcagaaagcgaagaagcaggaacctcaggccacaacttcaacctctggaacttcttcaaagtcaggcaaaggtggcaagaagaagagataa

SEQ ID NO: 154382 - DNA, 2226 bp, Arabidopsis thaliana landsberg
agaaagaacaggtaggctcatagaagggctctggtttagatactaggtgaactaatcaagcttattaataatacatgctttagcataggatttctcggcttctccggttatcttagttgtaagtatagagtgtttcgcggaacaccaccggtcactctaaaattatagtttgagtttgagaatggtgcgataacaatcctaatattagctagatttacaatttatctatctcccgagacaattccttaaacccgacgctttaatcacttgaatttacacctcgtttacttgcttatttgtcttttacattcaattacttcatctagcttattaaacaacatcataagtctattgtgtgaatattgagagctcagtggaattcgacccttaagtgctacgacgatctcttatttgcgggagtaagcttaacgcaatttgagctatatcaacctctttatccagattgcacaaacaacagtaatctctactattgtttcactctttaggctaaagactcagggtggttggtctacttgagtccttgtcaaatatgctacccaagggtaatgtcttgcacatatccttgtacgaggtgaagaagttttttaaaacttttgatatgggttatgaaaagatacatgcttgtgtaaatgactgctgtttattcagaaatcagtttcaggagcttgacacttgtcctaaatgcaattcttcacgatggaagattaacacgcgaactggtgaggtgaagaaaggtaatccatagaaactacttaggtactttctgatcattcttagtctcaagaggatgttcaggtcattaggcatgcagaagaacttaaggtggccctttagtaataagagcgctgacgagacattctgtgacgtgggatcgaatgaatgataaatacccgtcttttgcctgtgaagaaaggaatattaggcttggactctccacaaatgggttttatcctttcaatatgaagaatgttaactatagtgcatggcctgttttgttagtcaactacaacatgccacctgacaagtgtttgaaacaggagaacatcatgttgacattgttgattcctggtccaactcaacctagaaacaatatagatgtgtatctagaaccgctaatagatgatctcaaccatcttttggaaaagggagagttaacttatgatgcattcagtcacacaacattcacgttaaaagcaatgcttctgtggaccatacatgattttcctgcatatggaaatctagcaggctggaaagtaaaaggcaaaatggattgtcttgtatacgggaagcacatatatagtttgtggttgagtaattgcagaaaacacatgtatatatctcatcggaagtctgtgtcacccatacatgtttataggcaaaagaaagcattgtttgatggtaaagttgagcatggaagaaaatgtaggattctgactggtcataacatatatcaactactcaaaaaatacaagaatgattttggaaatgtaagagtaaatggaagaaagaggaagatgaacgattgtgttggatctgcttctggtactgaagaagaattcattgaatcagaagaagaggaagaacaattagatgaagaggagctacaagatggaagaagcactcaatcttattcaagttagattattggaaggtatgattgaaataatagtttttattccactatatgttcagatttggagtaagtttctaaaaataaatgtcttaaacatttttttattatctgttattattttatctaggaaatgccggttagacataacttagacgtgatgcacgtggagagaaatgttgccgctagccttgtctctacaatgctacattgtgggaagtcaaaggatggaattaatgctcgaaaagatctgcaactgctcgatattaggagggatttccatccccaagcacgtggaaaaagaacctaccttcctacagctcctaggtctttgtccaaaacagcgcttatttgacttcagaggtccgaatggctactgttctaatatttccaaatgtgtgaagatagaagattctacggttaaaggacttaaatcacatgattatcatgtgttgatgcaacaacttcttcaggttgcaattagaggtataagatgaattatgttagcttaactcttgcataatttgctacgttgtttttaatcttcaatgttatctacttacaggtttattacc

SEQ ID NO: 154383 - DNA, 1469 bp, Arabidopsis thaliana landsberg
tgatcgagatctacaccagatttgcttgtgagcaaactgcaattcctgttattccaggtcgaaaatcaaagttagagacttttgctggtgctgatataacctatactattgaggctatgatgggagatcggaaggctttgcaggctggtactagccacaatttaggccagaacttctctcgtgcctttggaactcaggtacagaactatcattatcttacaagtatgtcttgcttatcgaaacttgaatttgtttggagtttagttctctcattttttttagtgacgatagtattggtgcctactggttcatctatggtttgtttagtcacatcttcgttttgcaacttcatcatgaaagaatgttaaatgaagtaatgatgatgccagtttgcagatgagaatggagaaaggcaacatgtgtggcagacatcatgggcagtcagtacacgttttgttggtggcattatcatgactcacggagatgacactggtctcatgcttcctcccaagatagctccaatacaggtttatctttcttaagcagttttctttgctttaatctgaagttccattcgctagctaaagagaatttgttatggggaaacgggagctgtagttattatctctaggaagtgatgagagacttgagattgaatcctctcttttctttatttgaaggtagaaattgtgcctatttggaaaaaggacactgagaaaacaggagttctcagtgccgcatcatcagtgaaagaagctctccaaactgctggtgttagagttaaacttgatgacacagatcaaagaaccccaggatggaagttcaatttctgggaaatgaaggttcgttacaatcttagaaaaaacacacacactagaatcattttctggagtgaaaagaatttcatgatatttcaagctcttataatttacatttgttttgaacctttggtttgtagggaatccctctaaggattgaaattggtccacgcgatgtatctagtaacagtgtcgtagtctcgaggagggatataccaggaaaggcaggaaaagtttttggaatatcaatggagccatcaacattagtggcgtatgtaaaagagaagttggatgagatccaaacatctcttctagagaaggcgttatcattcagagacaggtactctttttgtttatctttctcccacaaacttactcaataaatggtattaattagcacatgctcaaattttgatattgtgcagtaacattgtggatgtaaactcatacgctgagctcaaagacgcaatttcatcagggaaatgggcaagaggtccttggtcagccagtgacgcagatgagcaaagagtaaaagaagaaaccggagcaaccattcgttgtttcccgtttgaacaaactcaagggaccaaaacatgcctaatgactggaaatccagcagaagaagttgcaatctttgccaagtcatattaa

SEQ ID NO: 154384 - DNA, 1164 bp, Arabidopsis thaliana landsberg
ttttttctcaaggtataagcaaaagtgaaggactatgtacagagtgctctgtttccagaagcagggttggatgaaggagttgggcaagcaggaggagtcggaggacttgttgttgtcagagacctcgatcattactcttactgtgaatcttgcttgcttccttttcatgtcaagtgtcacataggttatgtcccatcgggccagagagtgttaggactgagcaagttctctagagtcactgatgttttcgccaagcggctccaagaccctcagcgtttggctgatgatatttgttcagctctccaacattgggtcaaaccagctggagtcgctgttgttcttgaatgctctcacattcacttccccagtttggacttggactctctgaacttgtctagccaccgtggatttgtgaagctactggtttcctcggggtcaggagttttcgaggatgaaagctcgaatctttggggtgaatttcagagtttcttgatgttcaaaggtgtaaaaacgcaagctttgtgcagaaatggcagctctgtgaaagagtggtgcccaagcgttaaaagctcgtctaaattatcacctgaagttgacccggaaatggtttctgctgttgtttccatcctgaaatcactgggagaagatccgttgaggaaagaactcattgctacaccaactcgattcctcaaatggatgttgaacttccaaagaaccaacctcgaaatgaagctaaacagctttaaccctgccaaagtcaatggcgaggtcaaagagaaaaggctgcactgtgagctgaacatgcccttctggtcaatgtgtgaacatcatttgcttcctttctatggagttgttcatattggctacttttgtgctgaaggatccaaccccaaccctgttggaagttcactcatgaaagcgattgtacacttttatgggttcaagcttcaagtgcaagagaggatgactcgacagatcgctgaaacgctatcgcctcttgttggcgggcatgtgattgatgtggcggaagctgggcatactcgtatgatctctagaggaattgagaagtttggaagcagcaccgcgacaatcgcagttttgggtcacgtttcgagtgacaattacgcaagagcgatgtttctagacaagatccatacaactaat

SEQ ID NO: 154385 - DNA, 779 bp, Arabidopsis thaliana landsberg
tagattattgggtatctttggaaagcacggaatgaaaaagtgctttaaaatgcggataaggacccgctagacgtggtatgtctagctgaaaaagcggctcatttatggcagttagctcaagtagagttcaatactaaaagcctagtctccatatcaatcggaaaaccaactccgggtgagggatatctcacaagacattgtgtactgtggctttcgttgttttgtggacggttcatagaaagaaaacgacaagttttcaggtctaggttggttttgtacttcatttaatggaggtacgtcaacaatgggagctgctaagctacgtagaagtctttctcctctcaataccaaagtcgaagctctactctgggcaatgaagtgtatgattggtgccggcaaccaagaagtagcttttttacagactgtttagacctggtgaagatagtgtctttcccaaccgaatgaccagcattttcagtttatttggtagagtttcagaatgacaaggatgagtttcaaatttctctttaactttaatttctcgatgcacaaatgtaaaagcggataatttggcacggaaagtacgttccgaaccacatcacatcacctatgtaaacaacattccccaagaatcgctcttttgagctctaattaagagtagacggcaaaaaaataaacaaatttgttcaattaccttttagttaagaaaaataatatttgttgagaaattggtaagaatgccctttcaaaaatacctttttttaattatgtccctttct

SEQ ID NO: 154386 - DNA, 2645 bp, Arabidopsis thaliana landsberg
ccttgctatttgcatttgcttaatacagatccatcaagatttagactcacacatgagacatcatttgtccgagaacatgtcaattcttgggctagcaataaatttttcttctacgttgtacgtttatcttaaattctaagtgttattcttgctcaattatcgtctctaatctaatggaactagaggttaattttcagatgtgcttcttccgtcaaatacttagatcagtgaggaagtctgattacttgacaatgcgacatggattcattagtgtgagtgcattaatatcttacattaattctccattaatattcaattgttgttgctctaaaaacctatgcaattaggttcatttggcacctggtatgaagtttgattttcaaaagtacatcaaaagatctttggaagacgacttcaaggtggttgtaggaataaggtaactcatatcctctttcacatttttagtctagtttgctttatttatttctaatgaaatctaccactgatgatgacagacccgagctttgggcctttgtaatgttgtttttactcttcgatgttcacggttagtctttagtttatcgtacttctacattatgatatcttgacttactaataattgatctatatataaaaacaaaaaactttataggatggtatgttactgccgtaatcaccatgattcctcctttagtaagtcattaatttatctactatacgaagctcattcttacttcaaaaagattaaagaacattttatgaactaattgtggtttatgtttaaagttaacactagccataggaacaaagctacaagccattatatcgtacatggcattggagattcaagagagacatgcagtaattcaagggatgccagttgtcaacgtctcagaccaacatttttggtttgaaaaacccgatctagtacttcatatgatccacttcgttctgtttcaggtgaaaattcatataagtgaatgatatatgtgatgttttagtgatccgaatccgacaccatccgaaccaaaaccgaaccgaatagtcgtataatccgaacggataacaaactccctcatccgaattatccaaactgaatccgaaccgaaatccgaatgcctaagcctatgatttagtataattactgattttatttttttggatacttttcagaatgcttttgagataacttattttttttggatatgggtaaacttttcagaatctcttcttctagtttttactttatgttggtactaatgcttctagaaatttttataataatgttataattattcttgttgcagtatgagtttgggctaaggtcctgttttcatcaccattttggccttataatcattcgtgtctgcctagggtgagtaatagtattatcataaacaattttttttaccaagttttcgatcgagtttgtgaaaattgaatatatggtcttggctttagggtgggagtacaattcctatgcagttatatcacattgcccctttacgctctcgtcactcaggtatgcaacatttatatatctttttttcctttgaatgttttcatagagttagttcttttagcatggcataattcttttacaatatatattttatagatgggatccacaatgaagcgatcagtgtttgatgagcaaacttcaaaagcattagaacaatggcataagaaggcgaggaaaaagaatgaaaagtgagaataattggcttctccttttaatctatggatagaccaaatttaacagtctaatagtttggttacttaatagtctatacacaatttttggaaaataggatttagctatgtaattattatttattatataaattccttacgtgggtttaatttttgagttgattttttctctacatgtttatcatgtcctatttatagttttgtacaaaatagttttggaaaggtagaatttttatgcatttgtacactttagagttaatatataaaagactttcttagaaaagaaaaccagaaaaaacaatacataacattagggaaaattagttgaaccaattcctgaaatttaaaaatttggtaaaaagacatttgactaatgtttgttgcaggtaaaatttgaaacccttaaaaaataatatacaaaacataaataaacaaatgcatcttattgtatagtatgaatacctccaagatcaactaatgcaatttcacatcagggttccttatagatttaagccacatatccgccattactctagatgacaagctccacaacatctcctcttcttcttcttccttctccttcttctttatattactcttcttcttccctttctttccctttccgtgttccacaagccattgcgccgcggtaagcctccgcttctccgccgcatctttcttcactcccccaatgtgcaaacttcctacctttaaccctttctcctcctcctcttccgcttgtactgctaccacaactgtccctcctacagcctcatatctccttgtcgggtcacggagctgtactgtcgccaaaaccgttagcttttgctgtgtgcgatgctccttttgccattcttccagcggaatggtcgattcaagtggattcttctgacctttcgcagccgaaacctcgaaaggagcttcatcatcca

SEQ ID NO: 154387 - DNA, 1380 bp, Arabidopsis thaliana landsberg
agaaagagagaaagaaagaagcacctctcatggcgaaccagctcttcaccatcttccgattccttttcctctccaccgtcacttctacctccaaaacgccgccgttttatagcttctcctcccaaaaatgctaaacccacattcctcaaatctctcaccgacgcttttttaggttagtttcgaactcaagaactaatcttttgtgttttgtaatgtctaatcgacttaaacaattaatgggtacttctcattttcgtgtatttttcaattattgcttgaaagatttgagctttaacaagaccaaaaaaaaaaaaaaaagtcaagatttttattttagtttatagatcattttttcatgatgtggatacatttcttttctcagctttactaaaaattttcatttttgtgacaaattgactttatttagtttggtgggtcggcaggcaaaaaaaaacgttgaagattcgtgtagattgctttcactttattagcttactaaatgttttcacttttttagcaactttttttcccacaaatctttatatgtccggaaaggtacggttagtgttttcttacaagaacttgagaattggatcattacttttttttgttttgtttgttttatcttcatttgttacttcagattcttgtagaggaagataatatttttaaggaggttgttttcgatggagcattactaggttcttgagcaaattgggaaaggttcttttgggtcagctcttcttgtgaggcataaacatgagaagaaactgtaagagattgtgtttatttgaaactgaaactggagagagtttttgttagttcttcaatgattgattctttgttatgttctgtttatttttttttttgtgtatttgctttctaaaggtatgttttgaagaaaatccggcttgctcggcagactggtaggacaagaagatctgctcatcaagaggttgcttctaatttcttctgtgtcctgtaacattcacattacgctttcgttaagccatttcatttgcaaatttggattagttagatcaaatagcctgttatctctttgtagatggagttgatttcaaagatacataatccattcattgtggaatataaagattcttgggttgaaaaggtatcatctatacatatcttttcgtttcctgaacataagtattgaagatataaccagctctattgtctttatggatgtgtgctatcagggatgctatgtgtgcattatcataggctattgcaaaggaggagacatgtaagtttattccttctcagcagttttcacctgtttgactagagaaaaggctctctgatacacttactgattttttctggttcttcccgttcttctgcattacagggcggaag

SEQ ID NO: 154388 - DNA, 2071 bp, Arabidopsis thaliana landsberg; identical to SEQ ID NO: 6953

SEQ ID NO: 154389 - DNA, 1798 bp, Arabidopsis thaliana landsberg
tttgttcatcagtttactttatggacgaggtcctcatgtagatttgactttgtttcaaagcggaggaagaaggagaaggcaacactaaagatcaaaaccttagatctttgcttacgctttcctctggttaggtaagtgtttaagaatgttcaatggctttatgctgctcctaggattttgattttgcaattctcttggttggtaaaaaaggcttctgggtgtttttccttcttatttcgagatttgatcgaacccacttgatttctatcttgattagttggttttactagtgttacagaacaatttgtgattttgggctttgattctctgcgactatagttgcgtgttagctctagggtatcttctagcaaaccaaaagtgggatctttggtttatcatggagatctcgatccaatttcggttagaattcaaagaaggaaaaaattgaatctttgagaagcttttgttattgagttaattcagtgatgatcctatgcttgtgatgtgtgaaaatgtttttgttgcttgtccttgtcttttgtataaatcactgagtagcttcgtttagtgtctcaccaatgatttaaccttggtttgctagtttactgaacatggagtacaatgtctagatggagttggaattgtatgtctagtaataatgtgtgtaatgcttcatgatgcaaaaccttgcttttgaattttttgtaggaacggtttttcagaaacaaaagattccatttttagattcaattcccttctggtttgaaaaatgatatcaaaatggtgaatagaagtgatttggtggtgattggcatctcggttgggcttgcacttggtctcttgctcgctctgcttttgttcttcgccataaaatggtactatggccgctctcacctcaggcgatgcgctaatgaacagaattccccgactctacctgttcacactgctaaaagaggtgtagtaatccctgatgatagagcaaacacagaatcgtcacagccacctgagaatggagcaccaactcaacatcagccatggtggaacaaccacaccaaagatctcactgtatctgcatccggcatacctagatataactacaagtgagtattcagtctaaagctttagtttgcgtgaatttgttattgggttgttgtagcttatggtctgaaacttctttagggatattcagaaagcaacacaaaatttcacaaccgttctaggacaaggatcttttggtcctgtctacaaagcggttatgcccaatggagaattagctgcagcgaaagttcatggctctaattcaagtcaaggagacagagagtttcaaaccgaggtaagtgtacagatccactcatttccctggtccatgcacaatggagataacagagcagtattggtttcttgtttccaggtatctttacttgggagactgcatcaccggaatcttgtgaacttgacaggatactgtgtcgataaaagtcaccggatgttgatctatgagttcatgagtaatggaagtttggagaatcttttgtatggcggtgagtcgtcctttgttttcttctatcaatataagacgcagcaagaaattaatcacaagattttctactttacttttcaggtgaaggaatgcaagtcttgaattgggaagagcggcttcaaatcgctcttgacatctcccacggcattgaataccttcacgaaggggccgtgccgccagttattcaccgtgatcttaagtcagcaaacattttgttagatcattccatgagagctaaggtaagagagcaaatattta

SEQ ID NO: 154390 - DNA, 1641 bp, Arabidopsis thaliana landsberg
tctgcaatatgttattttccatggcctttcaagcatcatgtagctttaattggaatatgtgttgagaattgttagctttggtcgggtttttttaaattatatgtcagaagagaaaccagtggtttttgattagctgattgtgagttttggatgtggtttcaagtatggtaataaataagatcctagaaaaatggctagctagctagtggggtatcaattttatgataggctcattagtgttagagcaatgtgaaaattttaggatttaattagaggatgagttgtctacttatctgtaatgactggttgtaaatttttgtaggagccttgttaaatcctatcactcttttagtaattaatctttatataggtacgcgacagaaccgtcggtttttcgatatgcgaagattgctatgaaaatgaaagataagactgttcgagatgttgccctgcgctgtagatgaatgactgtaagtttcttgattttgcttaatccggcgacttttttgttgttcttgattaaccttcttcgtgtattggctttattgattagtaagaatcaactgacggtttttcacctccatgtggttgctgatggattgcagaaaaaggaaaacggaaagcgtaggaaagaagatcattcctcgaggaaaagcaaagataagaaagtatgtggatttcaatcctatttgctgctacttagcaatttcgatactagcaaggctaagaaagatatttgaagtacaaaccataaatcagcttgattgaattctaatgtgtaactagcttgaacctttagtcatttacttgtgagtttggacggatgaaagttcttgtgttgtcttgtggatccatttgtaagtctacaaaaactgattgattgtctttcacatatctgtttagcaggaaaaagctacagattcttcagccaagtcctcatctcatttgaatgttcatcctaatggtccttcttatgctccgcctatgatgcctatcgatactgatgatggtatttcatataaaggtttgtctaagattctaggctttttccatttaaaggctaaatcttctagattggattagaaggagcataagtgtttcggctttattgcagctattggtggtgtgagtggagatcttctcgagcaaaatgctcaaatgttcaatcaactttcaacaaatttctcagctttccaggtgaattcaacttccacttttcatcttgtaagttttgtataattcgctgagttttttggacttgatttgattctctgccttgtgctgttggcttttgagcaatccagtggttttatgattgattttgtactatatcagcttaagtttacgttagttctatccaattgtgtacttatgaaagattctttcccattgcagctacatgagaatgtcaatatcttgtgcaaagctcgagacaatatccttgcaatcttgaacgagtaatacattttcccatatatctatagatcatttcgatgtcattgactcactttgggaaatgccattcttttccaacaaagttttcgagctattatagtgtatcaactcaaatcttaacgtgctttgctgattgaatggattgcagcttgaatgacatgccagaagttatgaagcagatgccac

SEQ ID NO: 154391 - DNA, 486 bp, Arabidopsis thaliana landsberg
aacaaaaccaagaatcatacaaaacaagcatcctccaatatgatgaaacaatcaccattctcacttttaacatcaatctttctcatagttgctctttttactgcaactaccgcactcgatcctgcacccgaagacccgatttttgaattgtacatgcacgatatacttggcggaacagtcccacagcaagacccattacgggtttgcttggaaacatctacaacggtcaagtaccgtttgctaagcagatcggttttgttccacgcaaaacggtgtagccatacccaacgcaaatggggcaatgccacggttaacggtatcaacggtattccattaggtactggtttgtctggaacagcgttttctggtcagaatctaaatgggattcagactcagttgggtcctgatggtctgagtcttgggtttggacaatcacggtgattgacgcataatacatccggtctgacttggggtcacacacttggt

SEQ ID NO: 154392 - DNA, 1344 bp, Arabidopsis thaliana landsberg
  unsure (1)..(1344): unsure at all n locations
aattgcttctttttaacattggtcgggaagcctatcatcaaggtttccccagagaatggtcttgatgttaatatagctggttcttccttgactgggaatcatccaacaactttatcaccgtcaactttagtacttgattggaattgtaataattcctgttatcttactttttgcattgtgcctttgatctttgttgttacttaatctgtaacctttactttttttctcctggaaatttcaaaggtgagaaatctcggcgaactccatatgaagtcaatgtcaccatcccagtggatggttatgatcctgttcagtttttccttacaaaactctgcggtgagcttattatagactcggcttgatcatccacaaggcattccccttgagctaaatatttccattgcttgatatcatttcagaatacaatcaaggtaacgaaggaggatcagcgaaaggatggggtatatttggagtttttttcctgcgtgtaagtaatgctttgtgatcttccatggggacatataactgaagaatagtctcaactctttgtgttgtggagagtttattctgatcagattcctcgctgcatctgcacttttctgctgggggggctttatttataaaacaagagtagagcgtgtggtcatcttcatatctttatactattccacttccattctgtagttattgtctcacgtgatatacacacactcaatcgctgatgtactcgtatggatgcagcgtggaactgatgcannnnnnnnnnnnnnnnnnnnnnnnnnnnnnctagaaactgtaagtattacaagaaaactcaaaaggattccatttatgcaaaatctaagagaaagctcactgtggtctttggttacaatttatggatctctcaagagacaaatgctatgtaagctaattgattttggtcttgataaacaggtgagtggaagtggacaaagctactcaagaactgaagacatcaacaatgcttttgccaatgaagtctcatgggaccgctcttccgcatcttctactcaagcgacaacaacacagagaccaagtgaaagaacatatggtgcgatctaattttgtcaagtgcctcacaagaggtactgtttcaagccatggtatggcacgcttgtgatctgcgatttctggattttgctttgtatgtttattttctaccttctagaaagaggtcaaaaagttaatagcttcaccgtgagaatgttgttttcaccagattcatgtgctatgatagaaaaagacaaagcaaacaagagttctttctttgcttaggttacaagaacaagagtatcgttataaagtcaacaaagattgaaacat

SEQ ID NO: 154393 - DNA, 532 bp, Arabidopsis thaliana landsberg
gcttcacttcctgataatgactgcagatacgctgtctatgacttcgatttcgtcacttctgagaattgtcaagacagcacaatcttcttcttttcttggttagtctgatatttcccatgagtcattctataagggttttgatgtgttgagactaaaaacattttgaattgcacgacttatgtggtaggtctccttcgacttatccagttcgggcgaaggtgctttactcgacttctaaagaccagttaagtaagaagcttcaagggattcactatcagattcgagctactgatcctactgaggttgatcttaaagtgttacgcgaacgaccgaactgagagcaaccaagattgctatgtctattcgcaacctatggtaatgtaatgaataactcgtattctctgtggattgatttgtgtaaacacagtttcatgttctatgtcaactgtataacctctggtgtttcagattgcacaacctaaagcttaggtaaactgaatatggtttaagatcgtaaaagggttgatatatt

SEQ ID NO: 154394 - DNA, 1424 bp, Arabidopsis thaliana landsberg
cttccacctaaaactcgattataatcatctaaagactcagcctttaagtatccccagaagtcgtatgaccttacgtagcttaatccttgagatgcgttcgagaccgcatcgtgtggtccacgaccttgccgccgccgcagctgccgattccacttctgtgtcatcgcaagattatcgctggtcagagattcctgaagagcttcttagggagattctgattcgtgttgaagcggcggacggtggcggatggccgtcacgacgcagcgtggtggcttgtgccggcgtttgtcgtggctggcggctacttatgaacgaaaccgtcgttgtccctgagatctcttctaagttgactttccccatctctctcaagcaggttcgaattctcaatcactctctctttatatctttccttgtccatttcgatcggattaagacataaagttacgattttttttgttgatcactttcaaaatcttgaagactatgagttttgaagacgctgcgtttgcgtttgtatttgttctcaaactcagagtggctggctcgtaaactatgatattgatcatgaaacaagagatatatgatcatttttactgattgtatcagtttcagtttaattattgtgtagtcttacttaaatgttgattttgttggtgtgtatcttctgcagcctggtccaagggattcactggttcaatgctttatcaaacgtaatcgaattacgcaatcatatcatctctatctcggattaaccaactgtgagcatcaatctctctgtttaacatgttcttagagaaacaaacagtatctagtggagtctgttttcttttcacgtgtttcttggttctgcaattatttacattgacatcttctttgtgtgtatgttcttgtagctttaacggatgatgggaagtttctgcttgctgcgtgtaagttgaagcacacaacttgtacggattacattatctctttacgttctgatgatatgtcgagaagaagccaagcttatgttggcaaagtgaggtgcgtatatatgatcaaacaagctacacaaaaaggttaccgatctctagtattgattaagagtcttattattagcattttgagcttggcattgatggattagaaggacttaacatgatctagtaaacttcatgcagttccagtaaaggtcctttgcttatttataagttgttctttctattgaaactcttgttgatatattgctctttctaaacttgtcgaagatcgaacttcctaggaacgaaattcactgtctttgatggaaatctgctgccttcaacgggagccgcaaagttgagaaagagccgatcttataatcccgcaaaagtttcagcaaaagttcctcttggaagttatcctgtcgctcatatcacatatgagctgaatgtcttaggatcccg

SEQ ID NO: 154395 - DNA, 1370 bp, Arabidopsis thaliana landsberg
  unsure (1)..(1370): unsure at all n locations
aagactaaccgatgaatattcctccaatgctcatgcccggagacagcttccttccccggagcttctccctgttctctcagacaatgcattaccaccattttgttctagctacagataatatcttagctgcatcggttgtggtctcatctgctgttcaatcatcttcaaaacccgagaaaattgtcttccatgttatcacagacaagaaaacctatgcgggtatgcattcttggtttgcactcaattctgttgctcctgcgattnnnnnnnnnnnnnnnnnnnnnnnnnntgattggttaacaagagagaatgttccagttcttgaagctgtggaaagccataacagtatcagaaattattaccatgggaatcatattgctggtgcaaacctcagcgaaacaacccctcgaacatttgcttcgaaactgcagtcaagaagtcccaaatacatatctttgctcaaccatcttagaatatatctaccagaggtaaaagaaaatatgtccttttactttcaaaaagttcgcctttctcgtctaaatgaactatatggctcttaatgattaggtttcaaaattttgccatttcgtaaaaatgaagtaggtctaggatgaaattttctgtccttttatttttaatgttcggattgaggatataaatgtaatgcttgctttttttgcctatttggacagctttttccgaacttagacaaggtagtgttcttagatgatgatatagtgatacagaaagatttatctccgctttgggatattgaccttaacgggaaggttaatggagctgtggagacttgtcgaggagaagacgtatgggttatgtcaaagcgtcttaggaactacttcaatttctctcacccgctcatcgcaaagcatttagatcccgaagaatgtgcttgggcttatggaatgaatatctttgatctacggacttggaggaagacaaatatcagagaaacgtatcattcttggcttaaagaggtaaagtatcagagaagcctgtaatgttttgagttttagattcgaaattggcaaattattgatcatgcttactggttttgctttgatgtgcagaatctgaagtcgaatctaacaatgtggaaacttggaacattgcctcctgctctaatagcatttaaaggtcatgttcagccaatagattcctcttggcatatgcttggattaggttatcagagcaagaccaacttagaaaatgcgaagaaagctgcagtgattcattacaatggccaatcaaagccgtggcttgagataggtttcgagcatctcagaccattctggacaaaatatgttaactactccaatgatttcattaagaattgtcatatcttggaatag

SEQ ID NO: 154396 - DNA, 793 bp, Arabidopsis thaliana landsberg
atgataccgatgacgctgactccgtcggcgatgggtctctggcttgttcctaaccacgtatctgtcaaaattccattcggaaatagagaggtaatttcttcataaagctgtacccttttgatttcattggttgtttcatctggtcaaatttgaattcggagatgattggtaggatttgagacctttagctctatagtagagaagcaaagctcgctgctttagatgtatgtgttgaacattgttttagcttcttcttaagtttttcatctttttctttctttttgtctactgtgtagattttagttgagactggtctcatggggagacaagcaagttctgcagtcacggtgacagatggagaaactgtaagtgtgctgtttcattcaatttccaaaactttcaactttttttcttagttcctcgagtttgtattcttcagtttagcttctgttacttgcttatctcttcatcggtttgttagatgcggaagctttgtttcattatctaatctgtctacttgtcattgtagattgtctacacatccgtgtttgtctagctgatgttccaagttagccatcagattttcttcccctttatgttcactatcaggagcgattctcagctgtaagtcgaacttggcaagtgtttttcgaccctttgctattttggagtctcttgatgtaagaagaccatatcattgcctaaatgatgatctgaattctgaatggaccttcttatggtacagtggtggatttttaagcgacaagggagaaccaaagatcacgaggaggta

SEQ ID NO: 154397 - DNA, 1315 bp, Arabidopsis thaliana landsberg
ctttaaggattccttgtttgccaatacggatagttcttcagcttttcacccttttgtaccggataacaacgagcaaggtggagtagggtcaaagaaggaaaggttttaagtaaacctgctattgtagcaattgtggtttgtgattttcattggaatttgcattgtggattttctcttctcttgttgttacttgaagattttgtgcacgtcgtaatagtgtggataaggaaggctatgtgttgaataaagaagggaaagaaaagaaaggttccttctgtttcagaagagatggatcagagtccccttcttcggaaaatcttgagccgcaacaagatcttgttctgttggataaacatatggctttggatttagatgagctgcttaaggcttcagctttcgttcttggaaaaggcgggaacgggattgtgtataaagttgtcctcgaagatggtctaacggtcgctgttaggagactgggagaaggaggttcccaaagatgcaaggagtttcagacagaagttgaagcaattgggaagctaaggcatccgaatatcgttagtcttaaagcttattattggtcagttgaagagaaacttctcatctacgactacattcctaatggaagccttaccaatgcactccacggtaaactataaaacctttatgataatacttctcatatcgtttctctgtcttgaaaactcaattttggtttttgtgtatgcttaggaaatcctggaatggtgtcattcaagcctctgtcttggggagttcggttaaagataatgaggggaatctcaagagggctggtgtatcttcacgagtttagtcctaaaaagtatgttcatggatctctgaaactcagcaatatactgttgggacaggatatggagcctcatatctcggatttcggacttatgcacctctctagcattgctggaacattggaatcaactacagttgaccgaccatccaacaagaccgcctcatcgattggatcatctgcaaacttgagctcattttatctggctcctgaagccactaaagcaacagtgaagccatcacagaaatgggatgtatactcattcggagtgatcttgctagagatgataacgggaagattaccgattgttttcgtgggtaaatcggaaatggagatagtcaagtggatacaaatgtgtatcgatgagaagaaagagatgtcagacattttggatcgttatttggtgcataatgttaacagagattgaagaagaggtcatcgccgtgttgaaaattgcaatggcttgtgttagtactagccccgagagacgtc

SEQ ID NO: 154398 - DNA, 270 bp, Arabidopsis thaliana landsberg
caacaccaatgctcacaggagtaccaccgtctacagagtgttgcgggaaactttttttttcaacagccgtgtttttgtacatatgtgagagatccaagatatagtcaatatgttggttctgcaaatgctaagaaaacgttagcaacttgtggtgttccttatcctacttgttgatttttgagatattgctaaaaaaagttgttaatgataataatatttaacaaacataagcacacatgtttctacatttttgtatgctttttttttctt

SEQ ID NO: 154399 - DNA, 2035 bp, Arabidopsis thaliana landsberg
cgacctataactgaaggattcactaaaatattactgaagctcttttatgtggattggtatctttcattcgattctttttgaagattctgctaatcataatgcctttgagttgcttgcaaaatacagcgatactcatctcgtcttcaatgatgatatacaggtaacagtttaagacctctttttatgtttctttttgtcttcatagtaccaaagaattttgtctttgcctttcaatttcaggggacagcatcagttgttttagcaggattagtttccgcacagaagttaacgaatagcccacttgcagagcataccttcctctttcttggtgctggtgaagtaagaatcaatttttggaatcacagtatcatcctttatactcaatgttttcttatgtcttcttgtttggttgttgcaggctggaactggaatagcagaactcatagctctctatatgtcaaaacaggtagaaggaatacaaaactgtacataagaggaaatttgagagtagctgtcaacttattacatctttcttctgcagatgaatgcttcggtagaggaaagccgcaagaaaatctggcttgttgattccaaggtagaaggaatacaaaactgtacataagacatttcattggaactaccattttgatgcaagttttgttttctgatagggattgattgttaactcccgcaaagattcacttcaagactttaagaaaccatgggctcatgaacatgaaccagtcaaagacctcttaggtgctatcaaggtttgaaatttctcctgttaagcgtcatggtcctcttatatctcagatctgtcttctttcctcttaagtattatgtctcatcaggcaataaaaccgactgttctgattggatcttctggcgttggacggtcttttacaaaagaagtgatagaagccatgtcctccattaatgaggtatttacaactccctatcaagtgaatgagtgatcatattaattattaaagcatggttttggttaaagaggtagtgaaaccaacaatatgtttcttgcagagaccactgataatggctctctctaaccccacaacacaatctgaatgtacagccgaagaagcttatacttggagtaaggtaagtctctccacaccgcaccattgttccaatatgtattcccttcagatagaaatgaagttttctgatcttcttcgaatgaagggccgtgccatttttgctagtggaagtccttttgatccagttgagtatgaaggaaaggtgtttgtatctacacaggtagtagtcacagatagtttctcttctcttcatccgttgaggtttacggaactaggttaagaaaaaaatctgtgctttacttaaaacacaggcgaacaatgcgtacatattcccgggttttggacttggtttggttatctctggagcaatacgggtacatgacgatatgcttctagctgctggtaagcatctacgaaatgtaaaaacaagtaaaaggctctctcagctttgttgtttactaatattatgatgtgtttctgcgtcatagctgaggcattagctggacaagtaagcaaagagaactatgagaaaggaatgatatatccttcattctcttccatccggaaaatatcagctcagattgcagccaatgtagcaactaaggcgtatgaactaggtcggtctctctctctctctttcgcgcgcttgcagtcagccttatattgtggttctgaatattgatggtggaaatgctggttttgcaggattagcagggcggcttccacggccgaaagatattgtcaaatgtgcagagagtagcatgtacagccccacataccgtctctaccgttgaaagttgaaactcaagagtctttacttcgtgcgcttctcatcctttgttcagttattcccatgttttttctgtaatttccagtaataaattagtctttcaagttgagatttcaaacacatgcaagatctctcatttaactttgcaactctgaaagttaaaagactatatgaagtgaatttg

SEQ ID NO: 154400 - DNA, 1170 bp, Arabidopsis thaliana landsberg
atgaaccttcaagattcaaaagcctatatcctaagaactccaagacaaacagccacaatgagatttttcttaatctttgtgattttgtgtggtttttacaatgaagcatatgggaaaggttctttagatattgatctgaaattgaaggctcttaataaacctgcgttgaagaccatcaaggtatggactgaatctgaatacgaatatataacatctttgttatagtttttggtttctgagtttccaaatcgattgtaattttatttgtagagcgaagatggagatataatagattgtatagatatctataaacaacatgcctttgatcatcccgctttaagaaaccacaaaattcaggtaaacaaattctactatataacgatcgtataaataaaagattttgtatatacaaaatttggttatattatgctttgtatataaagaaaccacatttatgcatgcagatgaaaccgggtgtgaaatttggtgcaaagaagactactataccaaacgacggttcttctgaacacataaaatcttagatttggtctaaatccggaaaatgtccaatggggaccataccggttcgtagagttagtagagaagacataagcagagccttttcaccgtctcattttgggaggaaaactcctcacaaatacagctttctagacaacgcacttcaacacaagggtaatttcactataacacctgaaaaaataaacgaagcccaaccaaggttaagatcggtacgtacagtgtaaggtcttaaatatatttttttcagactaataaaagcttcatatggttaactagaaacacttatgctttgtggatgatggtataggaggcatttattgtggccctagggttcaattttgtcggagctcaatctgatataaatatttggaaccctccgagggttgaagctaccgactacagtactgcccagatctggctggttggtggtctctcagagaattttgagagcgttgaaggtggttggatggtacgtttccattgctaaaagtattatactttgctttagaagtaaaccgtgacccgattaacaaaatcctatatttcacgtgaatccagctgttttcggagactcacgtaaacgtctaatcatctcctggactgtgagtaacacttttatataactccgga

SEQ ID NO: 154401 - DNA, 651 bp, Arabidopsis thaliana landsberg
  unsure (1)..(651): unsure at all n locations
gaaagaaaaaaagaaaaaaacatgncagagaaatctgaaaaaatcgatcgtttaaacgatctcacgacttttatctcgacgaagacaggagtgaaaggactcgtcgatgccgaaataaccgaagttcctagcatgtttcatgtcccttcttctattttatcaaacaacagaccttctgatatctccggcttaaacctcaccgtcccaatcatcgacctcggagatcgtaacacatcttcaagaaacgttgtcgtttcgaagatcaaagacgcagctgagaattggggatttttccaagtgatcaatcatggtgttcctttaactgttcttgaagagatcaaagaaagtgttcgaagatttcatgaacaagatccagaggtgaagaatcaatatcttcctaccgataacaacaagaaatttgtttataacaatgatttcgatctctatcattcttctcctatgaattggagagactctttcacttgttatattgctccagatcctccaaatcctgaggaaatccctgtcgcttgcaggtaaatgttttagtgattaacagtaaaatatactctttgttgagattatgctatttcttaccattcaccaatacatatatgttaacggtaggcgattccgattacccaaatcata

SEQ ID NO: 154402 - DNA, 947 bp, Arabidopsis thaliana landsberg
cacatctcttgcattattcaatgatccaaaaagactttaaaaattgagtgacaaagacgaacgaagaccacgactagctcttcccatggcttcttcactgaagaagcttatctcaagctttctacttgtcttatactctaccaccatcattgttgcttcatcagaatctcgatgtcggcgctttacatctatcatcagctttggtgattccatcgcagacaccggaaatattctccatctctccgacgtcaatcatcttcctcaaaccgcctttagacctgatggtgaaagcttcttccatcctccctctggtcgtgcctctgatggccgtctcatcatcgacttcatcggtacctaatatttcctctgtttaggcaaaaccacttgtaatcatctatctgctttaggtctatcttgcgtggaaagcaagatagaaaccctacttcacctgagtttttctaatattgtcttactatttgaacagctgaattcttgggactaccgtatgttccaccttactttggatcccaaaacgttagctttgaacaagggatcaatttcgcggtgtatggagcaaccgcattggaccgagcgtattttgtggcaaaaggaattgaatctgatttcaccaacgttagtttaggtgttcagcttgacatcttcaagcagattttgcctaacctttgtgcctcatcttctcgtggttagaaactcagccttttattttgataaacagaaacttagccttgttcttacagggtttctttatttttgtgtttagattgcagagagatgcttggagactcgctgatactcatgggagagattggaggtaacgactttttttacctatcctccgaaggcaaaagtatcaatgaaaccaaactacaggatttgatcatcaaagctatttcttctgcaattgtggtaacaaatctttacacgaa

SEQ ID NO: 154403 - DNA, 4650 bp, Arabidopsis thaliana landsberg
  unsure (1)..(4650): unsure at all n locations
atgacgaagactgccaatgaaaactctactccacaatcacctagtgagatggaatccttgaaattgccatccattatcttaccgccttcttttaaacgaagagcttctgctaccgtcagagctgaagtaaatgagaccacccaagctcaacccatggctacaagggattataacattccaagggaagacacatgtggccccgaggccaagagacctcgtagtattcctgatgaagtggtaagggaaacccaagatcgagataaggaaactcaacccatggctacgaggggttatgatgttccaaaagaagataaaagtggccctgaggccaggagattgcgtagtattcctgatgaagtggtgagggaatcccaaggtcgagataacgcagctcagcccatggctacaagggattctaatgtcccaaaggaagacaaaagtggtcttgacaagagatctcgtagtattcctaatgaagttgctcaagctccagataaccacactaataaggatttggcaaagccaaggatcagagtttcttctaacatttctcaacaaggacaacaggaaaaatctggtaaaagccattcatttggtcgatttgccacatcttaccttctcattgctctgaatctattgtttcttttgttctttacagaattccgaggacatgatgagttgatagcacttataggtagaagctctttgcgtcccacaattgaaggccgtactgccggcatgctaccaagttgccacacgaaaagaatgagaagtcttgctctttctccttccaaccgtgagctatttgctacaaggtgcttttttacattatttatgtttttctcttttccaaaagtgaatagaagatgctacctaaattattatctgccattctcctggatgaacttcggtctcataactgtcgcttggggctttgtctggattttttactaaggaaatgatattatatgcataagagggaatcatggaaccaagaaagtcattggtcaattagctaacctaatatactctcgactcatgtgcttaatctttttcttttccctctcttgattttggtttttggttatgcttcagtgcattggatggggctgttcatttctggaagcttcagtctgataggtaagtctcctgtaaatatgcctgatctactgattatgatatttctttctgatttcttgggggtttaaatggttttaggaggggttattggattattcaacttcaaatccatatagaattccttgattttcatatgtatcagaaattttaattatgtatttctagttnnnnnnnnnnnnnnnnnnnnccatccacgtgataagtaggcgaaatttagtttcacttatatttgtcaacaagctgcaacatttagttgtacatgatcttaagagatagagttttgtacaattttttctactcttattttcgtgaacattttaatctgaatttcgttggatactaacctatccatcatgctttcaccattgagcaggtccacagctactttgtttaagacggttaatcgggtagcagtagatcagaagaaatgggcagaagatatagcttggcatccacataaaaatgcacttttctccgtgtatactgcagatgatggtcaccctcagatatcagccatatatctgaatgaagctggagaggtaaaagtatatgaatgctgtagcacattctagcgttttaccatattaaatttgcgattggacattcatgagtggagtgtgtgcttaaacttgtagaaagttaacttggtcttcataacctgttagaaagaaaaaaatcaatatagctggaataattgggaatttgattcgacccttgacttatctactagttgtaagatctaacttgatggttatagtcttttatccttggggaagttagttatgtgctcatttctttttggatatctgttcatctgcagagatgtgagtcgcaatttatggaggacaggcctcatagcaaaggtcttatcaacagaatcatgtttacgccttgggatgatccttgcttcatcacaggtgggagtgaccatgcagtagtgttatggcgggatcagtgtgagaataatgcgtggaagccgacgcttctgcatagggacttgcattcgtcggctgtgatgggagttactggaatgcgccataacaatcacgtcttgtcatgtggagacgataggagatttgttgggtttgatgcccgagaagaaaaagtcacatttaaacatagactagacaacagatgcacaaatataatgccaaacccgcgagatgttaatcttgtcatggttaacacgaggtaaaactgactcttgatttatatatatcccagaagaagcgattgccttaaagtccgttcttttgcttgtgttgtgtttgcaggcagctagaccggcaactgcggttgtatgatgttagattgcctcagacagaactattttcttttgggtggaagcaagaaagcagtgaatcgcagtcggctctaattaatcagtcttggtctccagatggtttacacatctcatctggttctgcagaccccgtgatccacatctttgatatccgatacaatgcaccgagcccgtctctctcgatgaaagctcataagaaaagagtgttcaaagccgagtggcactcttcttatccgctgctcgtctccatctcatcagatttagcaattgggattcacaagctatggtgaaaacttgtaaagccatcacctgaatttgaaggccattaacttctgaaacagaacttgtcttggcaagttggcacaaggtgttgattggcaagtaagaactgagtacagcacgcaggctggatacgaaaactgtcttgggagttgcataggtcagtccagggtctgatggctcttgtcttttgatttttttttaactgtgggaaactctagctttttagctgtcacattttgcggggattacaacattacaatgtacagtatacatttttgagggccaactcattggagccaaatgtcctcagattttctgtctgctataatcctcaaccatagttagcatgacaaagagttgcaacatctatatcgattggtcacaaaaaaacttttgtatgattgcataaagattccggtccatgtttcaaaattcaagatttgtccttgtgattcataatcttgagataagtaagaaagagattcataacatgactaaaaatgccaccaagtgaatctttgaatgtaaagtaactccaagtttgggcagagacttctccatctgctaccgagtataacggttcttttaagaccgcttcttgtggaaaaaaaaaaaaaaaaaagaccgcttcttaaaccgtaattttgtactaatttcccaatctctttttctctttgcattcagaaccggtttaggcctttggtttataacgaaaattcaattcagaaatcagaaccaaaatcctccgtctacctccgtctgattcctctattgggagaatccaaatttgcttcaggttccgttcgttcatggcttcgccagaggagatgggtgatgatgcatcagaaattccatccccgtgagtgcatcttcttcctcttgtacactttcatattcttcgaatctgctcttttattatctaattcgcatctctacaggccaaaaaacacttacaaggatcccgacggtggaaggcaacgattcttactggaacttgaatttattcaatgtctcgccaatcctacttacatccactgtaagtttagaattcgttctacggcttagggttttagtgttcgaaattgagatttaaaaaggtatttgttctaaggcttagggtttgtacttaccacattctgcttttggttactgtttggcagacctggcacagaatcggtattttgaagatgaagcatttattggatacttgaagtatcttcaatactggcagcgaccagagtacatcaagttcattatgtaagttggaatatcttatggaattgttgtagtcttgttgagtcttgtgaaggtttggataatatatctttggtttcctatgttcttgttacaggtacccacactgcctatatttccttgaacttcttcaaaaccccaacttcaggactgctatggctcatcctgcaaacaaggtacaagaatacgatatgaatcatcaagtgaaatcagcatgttagtgagcattgtgaatagggagtggttcattagggtactggtgtttttggaatgtgttttggggacttgtagagtttagggtctctctagtacaaaaccttgcttacgttctgctagtttggttctgtgattctgcgtttatgcccatctattcatgagatagagaaagttgtttaatattctaaactttatgtcctttgtcagaatttcttataggaaatctattgttgttgaagttttcttaagttttgaactttgtcttcggttgaatctggatttttccaggaattggcgcatagacaacagttttactattggaagaactacagaaacaacagactgaagcacattctacctcggcctcctccaaagcctgtacctccacaaccaccagttgcaccttcaacttctttgccacctgcaccatctgcaactgctgctctctctccagc

SEQ ID NO: 154404 - DNA, 1573 bp, Arabidopsis thaliana landsberg
  unsure (1)..(1573): unsure at all n locations
gtctctctgtctctctcggtatctctctctctcttcttccccgcgtggatttcacattttctcttttaagacagctttgaatctacagacaacttcatttttaccaaaatttctgtttcttcaaaggattgaactttcatatttctctcttgcccagttctgagttattgcaatcagaagttgtaaacacttttcctgtctctttctgctacccgaatttatcttctttagcgtctgtctctttcagcggacgtgtcttgtctctttaaggtaatttcaagacttaaacttgaagtatctctggccttcttctgctgtctgtttcatttttgaaatcgatttggagattagatctgactcagcttcgactaaaagccattgctttcgcctttggattgttgattccctagtggatgttctttatctctttaaaaaggtcctctcttttaaatcaatttttgctgaacttgcccaattcggaaactttgttgcaagtctcctcttggtctctggtaatcgttttcgcatcaatccttatattgatttgaatctgtaatcagattcgatctttgatgctaatttggtattctatagaagacaacatatctgaattgggtttcttcgttggataggataagtggttagggaatgagaaaattgtataggaagctggtttcattcagagacccatttgctagggtcaagagacatgttagttcacattcagggtttagagctttcagcgacagaaaatggttgttcccttttctagctagcttgatcatgtccattactcttctgattttgttaatttctggccaattcgacaacttctttggggaagaagatcaattaccagttgatgttgtttcagagtctaatgactactttgtagaatcagatttcaagcaatctatgaattcgnnnnnnnnnnnnnnnnnnnnnnntcctagattagcttatttaatatcggggacgaaaggtgatagtcttaggatgatgaggactttgcaagctgtgtatcatccaagaaatcagtatgttctgcatttggatcttgaagctcctcctaaggaaaggcttgagcttgcaatgtctgtgaagagtgatcaaactttccgtgaagttgagaacgttcgtgttatgtctcagtctaatttggttacttataaaggccctacaatgattgcttgtacgcttcaggccgtggcgattttgcttaaagaaagcttggattgggattggttcatcaatcttagtgcctcggattatcctcttgtgacacaagatggttagtgatcttgttttgaagttgcatgttttggtctttgatacttattagtgaccttttttggttcttcctgattctgcagatatgctgtatgtttttgctaatttgtctcgggatgttaatttcattgaacatatgaagctcaccgggtggaaactgtaagtagtaaccgctaaagtagcaactcattatcctgaaatagtgaataagatgtgcttctcatggtcttttgcaggaaccaaagggcccaatcaatcatttgtgatcccgtctttacctatc

SEQ ID NO: 154405 - DNA, 2735 bp, Arabidopsis thaliana landsberg
ccaactactctgcaattaaatcggtagagtgaggcattgtccttctttttctccctctgtttttttttttttttttttcctatcatctctgagagttttctcgagaaagttttgagtgtttagctactagattctgaattacgaatcatggaaggaattgatcacctcgccgatgagagaaacaaagcagagttcgacgttgaggatatgaagatcgtctgggctggttcccgccacgcttttgaggtttccgatcgaattgcccgccttgtcgccagcgatccggtgaatttcttctcgattctcgttgattttggttctgtttttgctgcgagggaatatgattaggtctgtcttagatttgtgaatttctcaatcttgtttatataggtatttgagaaaagcaatagagctcggttgaataggaaggagctgtttaagagtacgttgagaaaatgtgctcatgcgtttaagaggattatcgagcttcgtctcaatggtatggattgttctcacacacgtattgttatcaaggttttgtgatggcgtcttatttttgtgctctttcattttttgtttgttacagaggaagaagcaggaagattgaggcactttatcgatcagcctgcctatgtggatctgcactgggtactacctacgtctcatttatcttctagagacaggattttgattctttgattcatgtttttttgtatctctgtctgtagggaatgtttgtgcctgctattaaggggcagggtacagaggagcagcagaagaagtggttgtcgctggcgaataagatgcagattattgggtgttatgcacagactgagcttggtcatggctcaaatgttcaaggacttgagacaactgccacatttgatcccaagactgatgagtttgtaattcacactccaactcagactgcatccaaagtgagtataccaagaatcctttgattgagtattatgcacagtctctcttagttgtttaagattttcatctgtcttgattgttgaatagtggtggcctggtggtttgggaaaagtttctacccatgctgttgtttacgctcgtctcataactaacggaaaagactacggtatccatggtaggtaccgagaaaaagattccagtattttttttgttaactattacttgtttgggtattgattgcttaaatttcctcttccaggattcatcgtgcaactgcgtagcttagaagatcattctcctcttccgggtataaccgttggtgatatcgtaatgaagtttgtaaactggagcatataactcaatggacaacgggttttctatgtttgatcattttcgcattcctagagatcaaatgctcatgaggtcctctctctttggccctttctatgaataaaagcattttatcatttaatatccctaagagaaacagattcatggttgtgcatttttcttcttatagactgtcaaaagttacaagagaaggaaaatatgtagcatcagatgttccaaggcaattggtgtatggtactatggtgtatgtgagacagtctattgtgtcaaatgcttccaccgcgctggctcgggcagtttgcattgctactaggtacagtgctgttcgaaggcagtttggctcacatgatggtggcattgagacacaggtattcaacaaatctcactattcataactatggggcaaaaatgttttctgtaacttagttaagtaagaatccaatctctagatagaatatggtcatcagtcatgaccacaaacatagagaccagttattgatgttgttataattggcaggtgattgattataaaactcagcagaacaggttgtttcctctgctggcatctgcatatgcatttcggtttgtaggggaatggctgaagtggctctacactgatgtaacaaaaagactagaggccagtgatttcgcaacattgcctgaagctcatgcatgcactgctggattgaagtctatgactacctcagccacctctgtatgctttcaaatcttaacttattaaaataagttgaatattatcagctaaactgtgtttttttttttgttggttaaaaggatgggattgaagaatgtcgtaagttatgtggtggacatggatacttgtggtgcagtgggctccccgagctgtttgctgtatatgttcctgcctgcacatacgaaggagacaatgttgtgctgcaatttcaggtatttatcatcaactgcaagctattctcgcttactagaataattctgtcagctcaaatagatttcttagcatgtggctcgttatcttatgtctctctggacttctgtcagctcaaattgctttcgaattgtgagttttgtactttctcagatatggttatttgcaggtttttgtcaatttgtcctgtttcatattttttttttggcttttgtcacctgcaattttttttttatggttgatatgcaaaccacatttaaccgcttttgaagtgtttggttcattgttgtttcccctttccgacaattcaattcacgctattgtttaggttgctcgattcctcatgaagacagtcgcccagctgggatctggaaaggttcctgttggcacaactgcttatatgggccgggcagcacatcttttgcaatgtcgttctggtgttcaaaagggtgagatttcaagtttatatgtttttttcttcgtcctgctacaacgacaaagtaatgatcttgtaacaata

SEQ ID NO: 154406 - DNA, 763 bp, Arabidopsis thaliana landsberg
tgattccctgtatttactgttcaactttgattcgctgtttatataggtatcaaggtctataggagacatgtacataaaacggcccgaatttaacaaggagccaatcagtcaaaagttcagaattgcagagccaatgaaaagacccttgatgtctgcaacaccaacaatactctctcatcctctgcaccctaatgattcgtttctcatttttgcatctgatggtctttgggagcatttgactaacgaaaaagcagttgagattgttcataaccatccccgtgctgtaagtttctactttgatttctctcttagatggcgtttttggtctagataagttttagattgcagttttaagcgagtcaagtcacaagaatcctcattattacaaattcgttaaatatataaatgatttcttgcattgtgtgtttctctctatgttcagggaagcgcaaagagactgataaaggcggctcttcacgaggcagcgagaaaacgtgagatgaaatattcagatctaaggaagattgacaagaaagtgagacgacattttcatgatgacatcacggttatagtggtgttcttgaaccatgacctcagatcgagaggccacatcaactcaacccaagacacaacagtctctatacggagtgctcttgaacactgagaatcccaaacattttacaacaatgtttcttcttacttgattatatgacttttgcctagaatgaataaaaaaaaggcaacatatggaaaaaaccaaaaa

SEQ ID NO: 154407 - DNA, 2187 bp, Arabidopsis thaliana landsberg
ctaggaagctcagaactgaagaacccagctctagattttcatttcatttccgaatttcagcttcagattgtgttcccaacttccctgcgaagaatccatgaactctcgccgatcgtgatacaacataaggaggaacaaagcgggaagagagatcaaaaggaagaagatggctcagggaatggcgactctggctcgcctgcttcgtcaccaatttggttagctgcggggaagagcaaccgacggcgaccctgcgacagaaaatcgcatgcatttcgaaactaatttcaaatgttttaccaaatggcgcaaaaataagagaatagcatcaacttcttctgattattcatgaaaagtgtgtgtttcaaaaactcaggtcttttaagtgcaataaaatagtgatgtaaatgtaacaagaagtaacaactttctttttttaggtaaacaaaagattcctccggtttagggaaattgtaaatatacaacttccaactttcattaaaccatgacgttcccatctctaaaccacaatcccactcaagacaaggttaaatgtcttacaaaacaaatagtgggtggcattttcggaataagatgaaacattgagggtacaaataataatcttaattttgtacacgtcgtcatcgtctttcttcctttttcgtacagtgatagagtgccttgaaactaaataaaaaaatggcctcaaaactcaaaaccttcatcaatctccgtgactacccaataaccctattcaaccagattccatcactatcctcacgaattctcacacctatcaatcaatctcactacaggaaacgaattttactcgcgaatctccttaaaaggtatggtttccctccttcttcttttcaagcacttcctttcaataaacaatcacctttgaattcggacttagtagaaaccgaaatttctctcggcatcctattgtcattgaaaatccctcagaaatcactcgttttgttgatttccgattgccctaatgttctgcgatcagagtttctgaggaaatggagagttcctctgtctaattgcggtaaacacggtgtcgtctcatcttctgcgattaagagcgtccttgaacattctagtagaattgggattggtccagataagtttaatgagtgcgtaagggttttgaagagtttagggttttgtgatagtactgtgagtaggattttaagttcattccctggtgttcttttagtgaatgagattgaaattcgtaggaagattgagtttttagttggaattggcattgctcgagataacattgagaggttctttcacgtttttcctgaagttctagggattggtactgagactagacttaagccattgcttgatgagttcatgaagatggggtttagtaaggatgatgtaaagaaagagattgctagagaaccgagagttcttggtttggagttaggtgagcttccgcggtgtttggagttgatcaacacattgaaatgccgggaagtgattagagttagtataatcagcgaaggagcatttcgtgctgggtttgaagtgaagctcagagttgattgtttatgcaaatacgggttgattcgtagagatgcattcaaggttgtatggaaagagccgagggtgatcttatatgagatagaggatatagagaagaagattgagtttttaactaacagaatgggatttcatatcaattgtttagctgatgtaccggagtatctaggggttaatcttcagaagcagatcgttccacggtacaatgtcattgattacttgaaactaaaaggtgggcttggctgtgatattggattgaaaggtttgatcaaaccaagcatgaaaagattttataatttgtacgtgaagccatacccagagtgtgaaagaatctttggaaagagaaaagagaatgtccgagtgaataaacgacatcccgcagggctttggaagcttatgaagccgcctagcaatctaacaacaaaagaagatgtgcagaacatgaagtcctttatagagtcacttgcttagtatgttggatcttggacttgcctcttactagattgaaagagatcggccactctctagagggttcttgctccctcactttgctacgagctgctctgaattgatatgggttatcaggaactttcagtgactatcgaatctgatctcaactcgctc

SEQ ID NO: 154408 - DNA, 2682 bp, Arabidopsis thaliana landsberg
aaacttcctcagcttaactaactcatcagaacctgagagacgctccattagaatctccattgtgatctgatttggttcacaagactgttcgaccatctcatccatcagtttaagtaatgtctctccttgggttttctcgttaagacacttaaacaaggcattgtaagtttcaacattaggtctcaccatcttcatcttcatttcctctttcagagagagcgcttgcccgaaattccccagcttagaaaatgcgtttatgagaatgttgtatattacagtgttcggattgacctttgagtgcaaacccatgtccttaaagagcttcaatgcttcgtctaattcgccgactgagcaataagcgtcaatcaccgctccatatgtcgtgacagtcgggtctaacccgtcttctctcatctgctccatcattctctcaacactctcgaagtccttgtgtttaccgaaaaacgaaatcagagtgttgtaagtgatggaatcaggtttcttcccttctttttccatatcggttagcatctcatagactttctctgcattattcttatcacaaaacaacccaataagcatgttgtaagccaataagtcaagagaaaaccctccttctttcagtttctccaccactctaatggcgtcatgatcccgtctaacttggcacaatccagagatcaaagcataatagatctttgcatcaggagaacaaccagcttccaacattttttcataccaatacatagccttctctacattactgacgctgcaacaagcatgaatcaatgtcatataagtaaccacattccctttcacgccttccttttccatatccataaagaatacaaccgccatgttcaatccatggtgcctgcacatcccaccaacgattgtattaacagttaccacattaggtttaatctcgtcctctttcatccgagaaacgacttctttagccgtctcaagctttccagctctgcaatacccatcaatcaagcaattgtaagtaactgcattgggcacacatctctcttccagtttcatccttaccaataactcctctgcttctttcaacctccccaccttgcagagcccgtcaatgagagtattaaaatgaatcgaatcagctttaatcacatttccatcatcagttctctttccacgcatttgttcaaaaacttcgagagcttcatctacccttcttgatttgcataaagtgttaataagaatccctaaagtcacaacatcaggccggattttcacctcatccatcttcaagactaaatcattcattctactaatgtccatattccttcctaagcaagacaaaagcgcattgaagggaggagcttcaagtggggttttgttcttcatcaggtcgctcaaaatatcccaagcagcattggcgcgagcatttttgcatagacttgatataaaccgagtcaaccaaacagagtttggggagacaccatgagagctaaatcttgaaatcaaagcaattatcttttcttctgtcaaaagccttcccttccaaacctcgtgtaacacaatatccgctgtgattctattaggaggaaaaacagattctttctgaagcatttcgtcgagcaccttgaaggcatcatccacaagtccatttcttagcaagacgtctaccacaacattacgaacctgcgagtttttcatattcgaatcgagtctttcgtatacaagaaccgactgattcaccatacccatacgcccaaaccatcggatcagaagattagtggcaacgacagtaagaggaatgttcttctctttggcgatctcgtagagacggagaagtttatcacgcgggtccggttcactaccggcgaattcaatgaccgactgaagcgccaaggagagagattcttcacggcgtttcagagactgagacttcgcatccaggtactcgaagaacgagattgctagagaatacgatcctagccgccgcgtgatttgcgagaatactaaaggagaagcagaagaagaagatacgacaagcgcacttagcgactcgctcgacgcccaatcatgttgcggggtattttgaagagttttcacaaatttgactactaccaattcctggctctccgatttgatttccggccgtgggtcaacatcataagaaaaacgccggaggaatcgagaatggttgagcagaatataagagttctggcgccgggaaattgatagcatgatactcattgtctaaggttttgaaaaagacggccaccgggaaaagtgagacgacgaactctgttggcgaattcaacgtacaagaagttgggcccattttaaataatgggcttacacatatttagcccaaataaacctttacaatattacacaatggggacaaaaatttattttttctcataaaactgaacgtgagctttttatcatgctgattacattatatttataacaaaatgaggacgaatctttatttttctcatataattatcctcattgttttattaatcaagccaccaccctgaactctgaaatagctcctatgaattacactagttttacccgctaataactatcctattaaagggtttttatttcttcaacctactcaaaaaaaagagctacgagaattgcaacagctttgtgactgagaagatggtgaatctgaatgatccatctttt

SEQ ID NO: 154409 - DNA, 620 bp, Arabidopsis thaliana landsberg; identical to SEQ ID NO: 7921
  unsure (1)..(620): unsure at all n locations

SEQ ID NO: 154410 - DNA, 1395 bp, Arabidopsis thaliana landsberg
gcagatcctacgagtttggtctttgtctctatcttttcaatctttctctctcaatcgctcttcaatttgataacagcaaaggtttgtttgaatctctcttctttttgtatgatttgtattttggatccccattgtgcttgcttttatagaagttataggttttgatattgtttgattcatgtttgcttcatcctaatacaatgctgattcgtaaaggatcggtttttgtacaaggatgatttagatgttctattactgcgacttggttatgttttggttacattaattgaatccttaggattatgcagttgactttacgaagatgaatgcttgatttgcttctgctctttctatctctcttggtgcttctatgtttttatcaccttttacgtgtttgttatgtgatctaagagacaacgagttcgattataaattgtaatctgttttttttttctaatgtcgatttcatatttttgttatgcttgtccagtcatggcaggaatggcatctgatggaactcaatatgatcctcgtcagtttgatactaagatgaatgccatgtgagttaaattttagtatcttaatatctgaatccctttataacaaccaagaactgacttgtgtaatactttctagtctcggcgaggaaggagaggaaacattctacactaactatgacgaagtttgcgacagctttgatgcaatggaattgcaaccagatcttctcaggggtatttatgcttacggtaagtgaagtatttcctttgagaacacattctatacataccttcattgtttctgtctagttttgtattttcttttgtttgtttcaaagcttagtactgttactcttaaacaacctcatattggttttgttatttatcattaggtttcgagaagccttctgctattcagcaaagaggaattattccattctgcaagggtcttgatgtgatccagcaagctcaatctggaactggaaagaccgctaccttttgctctggtgttttacagcagctcgatattagtttggttcaatgccaagctcttgttttggcacctacccgagaacttgcccagcaaattgaaaaggttatgagggcacttggtgactaccttggcgtcaaggctcaggcttgtgttggtggaacaagtgttcgtgaggatcaacgtgttcttcagtctggtgttcatgttgttgttggaacccctggtcgtgtctttgacttgttacgcagacaatccctccgtgctgatgcaatcaaaatgtttgttcttgatgaagctgatgaaatgctctctcgtggattcaaggatcaggtttaatcttgtttaatctcccattcacattttctttttctctctgataaaatcaagtcatttgttcttataatt

SEQ ID NO: 154411 - DNA, 1039 bp, Arabidopsis thaliana landsberg
tggtacgattaggtgccagcagggaaccaggtctcctataatcgcgaagtccaagaagatctcaaccacaatcgagcctaaacattcgataaaactggaagttggatcggttctacggttgaaggagtcaaactatcaaaaaggttatcacattaacgaaatattgactaatggtacacttccttatcatattgcatcgccagtggatgatgcagggaagtctgtgtttctgtatgttggttctcctccttcacagcttgagccagcttgggaagacatgaacttatggtatcaggttcagagacagactaagatattaagtataatgaaacagagaggactctctagcaaatacctgccgcagctccatgggtctggtcggatcattcatccaggccaatgtcaaaaaccaagttcaggtggacgatgtgatcatccttggtgtggaactcccattcttgtgactactcctgttggcgagacagtagctgatttggtgaacgagggtcggtttggtccagaagaagctattcgatgttgccacgattgcttatctgcactttcttcatcctcttcagctggaattcgacacggtgatatccgcccagaaaatgtagtttatgtcacttctggtgtaagacatccttactttgtactaattggttggggtcacgcggtgcttgaggatagagatcgacccgcaatgaatcttcacttctcctcgacttacgcactccaggaagggaaactctgtgctgcctcagatgcagagagcttgatatacatgctttatttctgttctggagacttccctgaattggattcagttgaaggagctcttcaatggagagagacctcttggtccaaaagattgattcagcagaagctcggcgatatctcaaccgttttgaaagcattctctgactatgttgacagtctatgtgggacaccttatccattagattacgatatttggttgagaagattgaagaggaatctttcagaagaccatgggaaagaaattgaatcttcaggctaa

SEQ ID NO: 154412 - DNA, 1021 bp, Arabidopsis thaliana landsberg
  unsure (1)..(1021): unsure at all n locations
aacgcttttatgacgatatcaacggttatagcattcatgtccatgttcctagtatttgttatgtctggtccgatagtggtggagggacgtgcttttttcgtgttcggtgactcgctcgtcgacagtggcaacaacaactatctggtgacaactgcacgtgccgactctccaccgtatggaatcgattttccaactcggagaccaaccggccggttttccaacggtcttaacattccagatcttatcagttacgtttggttactaatctcataaaccggtttagagtaatcttgattcagatgagtatacaaatatttagtcataagaagctatttatttaccaaaaagacataataataaactggttaaatattggttaggtgaggcaatcggtaacgaagagccaccgttaccttaccttagtccagagctaaggggccggagtcttcttaacggtgctaattatcgcctccgctggtatcggaattctcaatgataccggatttcaattcgtaagtatatatantaaccgagtctgacatcaaatgaaaaatttcatattagtttccggttatttattagatataaattttggcatgcagatcaacattataagaatgtaccaacaactcgattacttccaacaataccaacaacgtgtgagtcgcttgattgggaaaccgcaaactcagcggctcgtgagtcaagcgcttgtattaatcacggtcggtggaaacgattttgtgaacaactatttcttgtttccatattccgctagatcacgccaattcactctaccggattacgcccgactcctaatttctgaatacaaaaaaatactattggtaagtggtaacagtcttattataatttgcttcattattgtaagaccaaaattgaattggaatgatgatatagtcttaggcagttgaactcatatgatttcaagaactttcactctcttgcaatgatttgactatttgagtattgttgcaaacaatttaattgtgtgttattgtag

SEQ ID NO: 154413 - DNA, 1257 bp, Arabidopsis thaliana landsberg
aagattaactagatcataacccgtgctatacagcacgggcattaatattttttataaattaaattgtatactttgtttgaattacacaagaaatagtatagtataaaaatgatgccataatatttttcaatgtttgtactatttgcatataatgctgcattagattgactttgtttaaaaatgttatttttataataaatacaacatatgtagttttaagtaaatgtgtaaaatttgtatacaagttgttttggtaaaaaacatgttttctttgtattagaggatctaatttttggcctaacttagaattagtctttttatagtattttggttatatttttggacctaattggggcttatattagattatctttaatagttctgacgaaagaacggatccgataaccaacctaatacccgaaccaaaaaaccgggttaaggcgggttaaaattttaggaaatttccttattgggtagagttttagtaaacccgtggatatccgattggtccgtaaattacccgttacccaaaaatagtattcaaaaacctcaacattaatttaatatccaaaatgttaattatatttaatcttaatataatctaattatctaagattataattataaatctaaatatgtaaattaattttagacctaaatatccctaacaactaaactatttaaaaattatttgttatgtttgtcaaaatttagtaaaatatattcaaatatgattaactttattaaaaataacaaattttaatgggttttttttgtttgggtacccactatctacatagaatatacttgtttctatttattttggatatttttaggacctgaaactttttacccaagccaacccaaacccgattggatccgatccggatcagaaccgaatatttagaattacccttattgggtaattagtgtgtgctaccacattatattacattgaactcactgccttttttagtatatttttttctcttgaaaacaataagacaatttgttcagttgttgttctgatcaccagaagaatcacaaatcagttcttttacttcaagaactcggttcaagttatatggaacagatgaagccaaattatatttaaacaaagactatttaagaaaaagaaaaaaaatgcattatacttatttctacttttttgtataaatataattttttttcacaaaaaacggtttttccaaaaatgcaacacaaagcggagtgtacaccaatgggattggatttctt

SEQ ID NO: 154414 - DNA, 732 bp, Arabidopsis thaliana landsberg
atggcgtctcgctacaattcctacgattctagatcatccgtaacctcctcgattcactcagatctatcatcctccgcagaattcaaatcgaacaagccaatttcatcgaaagccattgtcagatccaaatcttcctacttaaccaaaacaacgaagcccataaagcctgatagtaatcctggaaacctcactaatatgatgaagaagctaatggaaatgaagaaatctaattccaagagcaagagggtcgagcttgtgattcccgaagaactgaagaaaattgatactggcaaaggaggagggaagagtacattgggaacattgcagaggaagctattcgggaaggagaaggtgaaggcattgacagaggttaagagtaacactaggacattgtctatggttctgcgaagcgaaagggagcttctggggatgaacaaggaccaggaggttgaaatagctgagctaaagtttcagcttgaagagaagaaccgagaagtaaaatcttctttctctctttaaaccttggttttagtcgtttagggttttggaatgtgtcctgtgttagatccatgaaagattagctgtttgtaatcaaattaaggtgtttttgcaggtggagaagttgaaggatctgtgtctgaagcaaagggaagagataaagtcactgaagagtgcggttctgttttccgaatcgatgaatagtcaaatcaatcaaatgcaggagctgaatca

SEQ ID NO: 154415 - DNA, 564 bp, Arabidopsis thaliana landsberg
atctcttctttgagcttagcttttgatctggcataaataaaaagattgagatgtgtttaatttgctattgttctttacttggattttagaatggagtctgcttatagattgtggattagagagaagaaagatgagatttgtaaggaacttcaagcagctttaggtacagctaaatggcaggtacaataatgtttcttgaaacatttctggtttagttgtgttcttgttcttgtctagttcttgaaaagttttgaaactgtgttgaatcagttggaggagtttgagaaggcagtgagattgagtcataaacggtgtggggataatgattcttcatccacacggcataaacagtttgttaccgctattgaaaaccagattcatcgcgtagaaacttctctgcaagaagcttatagtgaaaatgggaaaaagcctctccgttgggttgatcttaatgaagaagagcgtgatgccatagcaatgtttctctctgggtcttctcgaacttccagagttttagtggtaagagcagcatcaagtcgagagagtctactaagagttatctag

SEQ ID NO: 154416 - DNA, 662 bp, Arabidopsis thaliana landsberg; identical to SEQ ID NO: 38850

SEQ ID NO: 154417 - DNA, 1817 bp, Arabidopsis thaliana landsberg
tttccacggaagaatccctcagagtcttggacgttgtcgatacttgctagacctgtggatggatacaaataggttgaatgggactatacctcaggaaatactgcaaattccatccctcgcttacatagatttgtcaaacaatttcttgacaggccattttccagaagaagttggaaagttagaacttcttgttggactaggtgcttcgtacaacaaattatcaggaaagatgccacaagctatagggggttgtctttcgatggaatttctctttatgcaaggaaattcgtttgacggagccattccagatataagccggttggtaagcctaaagaatgttgacttctccaacaacaatctctctggccggatacctcgatatctggccagtcttccttcgctgcgaaatctgaatctttctatgaacaagtttgagggaagggtgccaacaacaggagtgtttcgaaatgctacagcagtttctgtttttggtaacacaaatatttgcggaggcgtccgagaaatgcaactaaagccatgcattgtacaggcatctccaaggaagagaaagcctctgtcagttagaaagaaagttgtcagtggtatttgtataggtatagcttcgcttttgttaatcataattgtggcttctctgtgttggttcatgaagaggaaaaagaaaaacaatgccagtgatggtaacccatctgattctactactttggggatgttccatggaaggtaagttatgaagagcttcatagtgcaacaagtcgcttctcttaaccaatttgattggttcaggcaatttcggtaatgtgttaaaggatgcttgggccctgagaataaactcgtcgcggttaaagttttgaacctcctaaagcatggagcgacgaaaagctttatggcagaatgtgaatccttcaagggtatacgacatcgtaaccttgtgaaactattgacagcttgttcgagtattgattttcaaggaaatgatttcagagctctcatctatgagttcatgccaaaaggaagtttagatatgtggctgcacccagaggaagtggaagagattcataggccctcaagaagtttgacccttcttgaaaggcttaacattgccatagacgtggcttctgttttggattatctccatgttcattgtcatgaacctatagctcattgcgatcttaagccaagcaacgtccttctagacgatgatctaaccgcccatgttagtgactttggtctagctcgtcttctcctcaaattcgacgaggagtccttcttcaaccaactaagctcagccggtgttagaggaaccatcggctatgccgcaccaggtatactatcacacatctgtagcattatatgaagaaaattagtatctatcctttctttttatcattacagtcttcttaacattgtttctatgaaatatggtgcagagtatggagtgggaggacagccatctataaatggtgatgtatatagttttgggattctccttttagaaatgttcactggaaaaagaccaaccaatgagctatttggaggaaactttaccctgaacagctacactaagtcggcattgccggaaagaatattggacattgtagacgaatcaattcttcacattggtctcagagttggtttccctgttgttgagtgcttgacaatggtttttgaggtgggccttaggtgttgtgaagaatctccgatgaaccggttggcaacgagtatagtcgtcaaggagttgatctcaatcagagagaggttctttaaagccagtagaacgacttggcgttgaagtgttt

SEQ ID NO: 154418 - DNA, 1580 bp, Arabidopsis thaliana landsberg
ttgtcttgggaaatgtcagtcttcgttacattccggtttcgtttatgcagacgattaagtctttcactgcagctactacaggttagggttttcagatggaaagtttcctatttgtgatatttctattgtctattgtctaattgtttcgtatgtatatgtttgagcagttgtgttacagtggctggtatggaggaaatactttgactggcgtatttgggcgtctctcgtgcctattgttggtggaattcttctgacatctgtgactgaacttagttttaacatgtttggattctgtgctgccctgtttggatgtttagctacttccacaaagaccattctagccgaatctcttcttcatggttacaaatttgacaggtcagtgccccttcctggagtctccttatgaatgaatttcttgctatgatatactattcagttcttggaactttcatttccatgatcattgctgagtcatgaaaactgcacttagtttctaattacaatgatatttgcttgttatgtcttttttggatttgatatgcaataactttgcttctattgcattagatatgacatcttagtccaaattgaaaaagcagtcactttaatgtgatttagccataaagttgattgatgtataaagattcaatcacatcaccttttgagaagtaaactatgaatatccatctgcgtagaagaaaattttgatttttctgtttttcattatttagcataaacaccgtttactatatggcgccttttgccaccatgattctcgggataccagcgttattactggaaggcagtggaattttgagctggtttgaagcacaccctgctccctggtcagccctcatcattatactcagttctggtgttctagccttctgtctcaacttctccatcttctacgtcattcactccacaactgcagtcacattcaacgtggctggaaaccttaaggtaactaagacaaccctaaacccgttactaaatttttctttcggattgctctggatggtccaaaccaacaaaaggataagcactattaattcattatactggcattactaagttcttatcaatttacctatcttaccatggtaaaagaaatagaaagcctgtcagctagagtttcttcgcatctacgtcttgagcgtacttcatattccattatacgtcttattcgtagtggtcagggcatgactgtatccatataagtttgttttaaacaagttaatcaccactagaatatcaaattttcgaggcacattgctatggtttttgtcatcaccaacttgtgatttgtttgttgccttggacactcactctcatgtttgtaatatgatttgcaggttgcagtggttgtaatggtctcatggttgatattccgtaacccaatatcatatatgaatgctgttggatgcggaattacgcttgtgggctgcacgttttatggatatgtgaggcatatgctttcacagcaaacaccgggaactcctaggactcctcgtaccccaagaagcaagatggaattacttccacttgttaataatgataaactcgaaggcaaagtctga

SEQ ID NO: 154419 - DNA, 1347 bp, Arabidopsis thaliana landsberg; identical to SEQ ID NO: 27211

SEQ ID NO: 154420 - DNA, 2153 bp, Arabidopsis thaliana landsberg
cctatttggttccttatgtttagggacatcaaacccaaaacatcatcttcttgtctccaaatccaaacaaatgctgtgtttgtcacaacacctaaaactgtaaaccaataattccaaaaaaaactcttgttaaattattgtaaaatctcaattattcgttttgtcctcactaccatgttttcttctcgttgtcccttactttcagaatactaatcaacatctctttactatttttttcagattctatgtatcggaagtgatcgtagcgattgaatatcttcacatgttagggattgtttaccgcgacttgaagcctgagaacgtgctggttcgatcagatggtcacatcatgttaactgattttgatctctccttaaaatgtgatgaatcgacttccacaccacagatagtgctgaaccggaacaaccttcctaatggctcgtctgaccagaacgagatccaaggcatggaccaccgtcaaaccacatcatcctcttgcatgatccctaactgtattgtccctgctgtctcttgcttccacccgagaatccgaaggcgcaagaagaaaaccgatcaccgtaacaacggtcctgagcttgtggctgaacctgtagatgtccggtccatgtcattcgttgggacgcatgagtacttggctcctgagattgtttcaggtattcttcaaatcttcctcattctcatttcccctgtttcgatttgaatgatttttaggtcaaacgtttttcttcttagggaagtttatataatgtataattttccgatgtggtatcctaacatgaaacgtaaaatgtggatggcaggagaaggacatggtagtgcagtggactggtggacattaggaatattcatgttcgagctgttctacggaacaacgccgtttaaaggaatggaccacgagttaactcttgccaacatcgtagctcgagccctcgaattcccgaaagaaccaacgattccaagcgcagccaaggatctgatctctcagctacttgccaaggacccgagccgacggttagggtcatctctgggtgcaacagccgtgaaacgtcacccatttttccaaggagtgaattgggcattgctcatgtgtactcgtcctccttttcttcctccaccttttcgcaaagaacttttgtctgatgacatttgtccggaaacccatgtcgactattattaataacttaattagcgctacgtaattaattaattttcttcagatataaattatttctaagaaacaaaatcagcctaatactagtatagttgcactttatgaagaaaaaaagcttagtataaatgcgtttaattaacgtttagacattctttttgtaagttcttcaaaactagtataattgaaggaaaataacttggtaaattattaatgtcagctgcaaaaaaaaaaaaaaaaaacgatatacgcaacacagattcaaaactaatgcaaaccccgctattggatttggcaacacaataataatatacacgaagcatctcagccatttattctcagtgtttttgtttaagaaaacgctaagcgctaaacggacggagacttaatgcctatcacattgaacgtttaatcggatcttaaacaattttaggcggttaaagcgtttataatataaacattataaatatgattttatacataaatattatataaaatatcgagaaaaaaaataaatatgttaaattgtaaacaaaaattagacaaaatttatatttaactatatcaaatattatatgaagatttataactattaaatagaagttatttaaaacacacataaaatcgtttacaatacttgacaacatattttaaatgtcggcaattgatttttttccgattcaattcagtaatttttgttcaattgcctcctatcactcaatgaagagaaataataatatataagtctatgagatcatcacgacagagaactatggaaatgacacatactgtgtacggtgaatgtatataactaaatatccattggagggactcgcttagtctttggcatgcttgatgtgacacgagtattgaagaagaggagcaaagaatgggctcttaaacatcatatgaagatgtccgtaacacctcttcttcatattcacaatgatctcacaacactctt

SEQ ID NO: 154421 - DNA, 923 bp, Arabidopsis thaliana landsberg
atggagaaaccgggtcatgaaacggatattgcgggttcaagacgaacccatctgaagaaatcattcaaatccactcttcgacatcttctcactgcttgctccaaacaggtatatgcttcaatgtcataatcattttccattgttttttttttttttttaaatcgcaatttgggttttgttctgtctgatttaggtaaaattgaagttttagggtttaagtgttctcgatgattggatcctgagttaattagaattgaatttggtttttgattttgtttctggtttgagaactgtctatctatctatagcagtgtcttgttgattttgtttcgggtttatgtgtagtgtactaactaactaatagtaaccgtttttatgtgaaccatcactatgtaggattttgttgacattttctcgaaattcagtggggctgagcaagaactgctttttcagttgtatactcgggtatgtatctctctttatcattctctttcgatccattggtttcatttgttttgtgttttctcatgtatctttctttatctgacatgtttctaggttgttgtgaatttgcatcagacaatagaggtagtaacccgttgctgtgaagttttctcaagttgttgtttttatattaaaacatgaatttttgggattttttggctattcatggtgtgatgaattaaaaactgttagttatgttttgatcattgtgacaggaaaagtttgatgagcaatgtcacgaaactcaggtacatcttagttggtttgtgatcacacgcgtgggaagtaagagattttttcaaaatcgttctgactgaaacgctttcccctttgcaggtcgggccaattcttaatgcagttgagtaggtggtcgaagaacagagtttggattcctgtggtcaggtgagtatgtctcatgc

SEQ ID NO: 154422 - DNA, 740 bp, Arabidopsis thaliana landsberg
cataaggctttgttgatgatggatcatttggtggagacgaattcagttccgagcagattggtggaagaaaggcttgatgagattcgtagagtaatgggtaaagctgatgacgacccgttaaggatcgttggtgtaggagctggtgcttggggaagcgttttcattgcaatgttgcaggaaaattacggtaagtttaggggcaaagttatgtgtgagaatctggagaagaggaggcagagcaatcgataaagccacagctgaacatttgttcgaagtgattaattcgagggaagaattgttgaggaggttgataagaaggtgtgcttatctcaagtatgtggaagctagattaggggatagggttttatatgctgatgagatattgaaagatgggttttgcttgaatatgattgagactcctttgtgtcctttgaaagttgtgactaatcttcaagaagctgtttgggatgctgatattgtcatcaatggtttaccatcaactgagacgtttcaggtgttcaatgagattagtaagtattggaaagagagggttaatgctcctgttattatctctttggctaaaggtgtggaagcagagtttgagcctcatcctcggattgttactcctacgcaaatgatccatcgagcgagtaaattcacttcccattgtcttttatctgattgctagatgaatatttgatatcatcttccttagtatttttgttgatgtagagaaactt

SEQ ID NO: 154423 - DNA, 1214 bp, Arabidopsis thaliana landsberg
cagcgaccctattgatgttctcgtcattatgcacgggacatatgttctcatacacccttgagaacctgtttaattcattacgtagtgcttcttgttatatatagataagtgcatcggataagctttgaagaagatcaagcgctcacctcttagctatagactctactgtataactgtgtagcttacgaatgaatgtatcagatgagaaatgtagccacccagttatcgagcagttagtggctgctcggcttattaaggtgtctcaacatatagcttagagtgtggattttctagtgcttactctggaatttaaaacctcttattaatcagtcaagtctataagcatcagcagcatctcagtctgtcttatttgactggtggaaaacacatctcatgtgaatcttgaagaatttcttctacaggaaccggtgatcccaggatgctttcttctggccaaagctattggtctgatgccaatgattgatcaggttagatattcaacgtacttgtcatattagtacttataaaagtaacagagattgaaactagaagctctttctgcttgaatagggtgagaaagacgacaagatcattgctgtctgcgctgacgatccagagtatcgccattacaacgacatcagtgagcttccgcctcatcgtatggctgagatccgccgtttctttgaagactgtgagtgttcttttcttacaaacttttggttggttaaggatgatatgaggctcatactcttgtaatcttgttgcagataagaaaaacgagaacaaggaagtagccgttaacgacttccttccgcaactgcagcctacgacgcaggtcagcattccatgtaagcagccttcatgaaacttactgttatttacttcatatattatgacattgtaaatagctgcaatttgtttatatcaaagaataactaactaatcaaattgggacaactcttttgtgtcatgtagggatctctatgcagactacgtcgtggagaacctaagacgttgaatcaccacctcaagcaatggaatgaaagctcacaactgcattattcacaattataaatataaatataaatgtcaggcttctcaaaggatatttttgttgtgtatgtcctctgatgaatccggtagatgatgccgatcattcttttttttttgtgacgggtgaaaccgagaattaaagactgacacagggataagat

SEQ ID NO: 154424 - DNA, 1086 bp, Arabidopsis thaliana landsberg
ccagtcaaacaaaaccttcacaactcaattattcttccgattttggtttctctcttccaatcatccttcaagctcatctttttcttctacccaataacgaaagtctcctcctttactaatgggttgcttcagcagtaaacaccggaaaactcaaaacgacggcggagaaaaatcaatcccgatcaatccagttcaaacccatgtagtccccgagcatcgtaaacctcaaaccccaacaccaaaacccatgactcaaccaatccatcagcagatttcaacaccgtcttcaaatccagtctcagttcgagatccagatacgattgtaggtaaaccattcgaagacatcaggaaattttacagcttggggaaagaattaggtcgaggtcaatttgggattacgtatatgtgtaaagagattggtactggtaacacttatgcttgcaaatcgattcttaagaagaagctaattagtaagcaagataaggatgatatgaagagagagattcagataatgcagcatttgagtggacaacctaatattgtggagtttaaaggagcttatgaggatgagaaagctgtgaatttggtgatggagctttgtgctggtggtgaattgtttgatagaatcattgctaagggacattacactgagagagctgctgcttctgtttgtagacagattgtgaatgttgtcaagatttgtcatttcatgggtgtgttgcacagagacttgaagcctgagaatttcttgctctctagcaaagatgagaaggctttgatcaaggctactgatttcggattgtctgtctttattgaagagggtaaaataatcagacttttctttagggtttagtacattttgatgaagttggttgtctctaggacatagataggatacgtatcaaggttctggttatattggtatcttgtgtctcttggttccgtgaattgcatgaagaagttcagacctttcttgatatacggactaggctagagaccgctgtttttgttctctgatagagtttgatgtttcttactcttcatcatttggtgtttcttcttcttgtctttcaggaaaagtatata

SEQ ID NO: 154425 - DNA, 808 bp, Arabidopsis thaliana landsberg
ttattttgcatacttagccatctacgatcatcttgcatacgcattgcacgttttggtgtgttttcaggtgtagaaggagctaaaaagaactttactcaatccattcactcgatccaggcagctacagaagaggcatcattctactcgacctccttactcgatccaggcagctacagaggaggctgcagtttactcgaccctcttactcgatcaaggcaacctcagatgaagcagcatattgatctactcgcccctcctacttgatccactactcgatctatttactcgaccaagggtgaccatctctacaacacttgttgagctatcaaagcatcttcggatacttgataataggtttttaaatcaattaatcctaaagcactatcatgtcgttgtagtacttagggtgtcaatccaaatgggtgtgatgcaaacagatgagatgtgatcagaagacactaagtcaatccaagcaataaaagttttggggtttctaatagtcctaagcgaacatgcagaaaataagaaacaataacaaaattactaaaatcactcgacctcaacaggctgatgccacaagtaggatgtggtcgagtaatagacaggatatgaaccagctatactcgactgcacagtctgttgccagacactgggtgtggtcgagtatactggtcgagcagcggacaggaaacgagacaactgtactcgactgcacagtctgttgccagacactggaagaggtcaagtaagttggtctagtaattgcaaaacgaagaaacaggcaagtgagaacgattaaacaataacg

SEQ ID NO: 154426 - DNA, 1527 bp, Arabidopsis thaliana landsberg
cagattatctcagagaagaatcgccgcgagatctccaaataccacctcttcaaaggtacaactctttttattttgtttgcgaatcgtcttaactttgatctgtatacgtgtaatcagatacagtacgtagatattctgaatctcttgtacttagcccatcgttttaactttagctgtttctgaattcgatgccttacttactttgaacatagttagcaagaacaatgtgattcactaggattacttagaaatgttacttttatttcgagaaagttttgtatgctaaaagaggacttgaatttgccacaacatcccttgatcgagtgttccgaatcctgcaggtgattaagcttatgaagagctttttgtcaaaggagtatgtcaaagagacttttacttgggtacattactactggttccttaacaatgaaggcattaacttcctcaagactcacctcaatctcccacctgagattgttcctgcggtcctgccaccttaaaaagcagccttctttttttttccacgactgagaccttaattaaaagcagccgaataagcgaccaattttctgtaaaacgcacttactagattactttgttaggctttcccttttgtgtatttttgtatgtctctttaaaaagataaggcattcacggtaaaacaaaacaaaaaaatcaacgaaaaataattacggaaacacaaatatttaatgaaaataaaaaaccattttaaacacttttatgggtcgatttttatttttaaaaataaaatcctttaaaaaaaaaactaaaaaaggagaaaaaaatcgctttgattttaaaaacaagtgatcgaattcaggagagggatcagatgataaaagaaggagagtgctcaatagtcgtaacaggctgagcgaaacactcttctcgcattaagcgagtttaataaccactcctcatttcccctttaacttgcctgaaggatcatatttattcattgcaccacctttaatcttttttatagccaactaatcatatccctcccgtctcttctaaccgatgtgggacaaatatctcttcttcagtttttcaaaaccctaattagcctaccgaaaatgggcttaggcctggtaaaaattacaacggcccaacaagacgacgatttttcagtatgacgattacgatttctgttgacagagaaactttttgaaatgatgactactacgacgacgacgatttctcagcataacttctatggtgctggagattcggaaacttgcatttctattattgaggtattaagctctcactggtaaacaatggcgatttctaatcgagctttcttctttcgcgttttgttttttccatcgtttgtttgtgatttgtgtgtgtgtgtagaatttgaaggaagagtatggattgtttgtttggccttgtagcgttatcctcgctgagtatgtttggcaacacagatctcgatttcgtgattcttcgatactcgaggttaatttctatttcaactactctttgctaaaatcccttgat

SEQ ID NO: 154427 - DNA, 694 bp, Arabidopsis thaliana landsberg
gtaaattaacacagtcgggaagcaatcggtggaaaaggaaacagctttggaaggttgattccattacagattcgattcgaaactatggttcagatttccgatcttccacgggatttgacagaggaggtgctctctaggattccggtgacatctatgagagcagtgagatttacttgcaaaaagtggaacaccttatcgaaagatcggagctttacaaagaagcacttgcgtggagcaagaggagcagcaaagaagaagcagacgaaggagtttcaggtgatcatgatgattcaatttagggtttatttatacagcgtcaacctccttaatccatcaatagagcgtataggtaaacttattagcctagacgttgaagatcatgtcgacatatctaaaatctttcactgcggcggtttattgttatgtatcaccaaagacatatctaggcttgtggtttggaacccttattctgggcaaacaaggtggatcaaacctagaaattcttaccacagattggacaggtacgctttaggatacgaagagaagaacaagtcgtgtcgttgctacaaaatcttgagatttatggatgattacgaggatgacagggcactgcgcctaattcgtgagtttaaccctccccttaaactctgagtcatggaaggtaaaaaaattctccagatgggacgtagagttt

SEQ ID NO: 154428 - DNA, 281 bp, Arabidopsis thaliana landsberg
ccgcaaagatttctgtagagcaaactttgatcatcccctgcatctgcggcaatggtaatctattggcattttttttccatgtaagctcatgtgtgacttatgtgtaaccggtgctttggaaatgacagggtaaaggaacaggtagctttggtaagaggaggaacaagtcacacacgctctgtgtgagatgtggtcgccggagctttcacatccagaagagtcgttgctcggcatgtgcttatcccgccgctcgcaagaggacatgtatgtactctctctct

SEQ ID NO: 154429 - DNA, 568 bp, Arabidopsis thaliana landsberg; identical to SEQ ID NO: 52205
  unsure (1)..(568): unsure at all n locations

SEQ ID NO: 154430 - DNA, 606 bp, Arabidopsis thaliana landsberg
gtagtgaggaggaggtggtgatttgtaaaggtagggttggtgtgtaggtgagtagtggtgtactgtaggaggaggagaatggtataccgtagggggagagtaatggaccggaggaggaggagatttgtattcgtagtgcttcttgggtggtggtggggagtggtatacaactggagaaggtgagtagtgaaccggtggtggtggagagtggtatacgactggaggaggtgagtagtgaaccggtggtggtggagagtggtatacgactggaggaggagagtagtgaaccggtggtggtggggagtgatatactacgggaggaggagagtagtgaaccggtggtgggggagacttgtaaaccggaggaggcgagtagtgcttaaccggtggtggtggggacttgtaaacgggaggaggcgagtagtgcttaaccggtggtggtggggacttgtaaacaggaggaggagagtaatgcttaaccggtggtggaggggaagagtagaagtaatttgcggtggtttgagagacaaaagcaagggagaatgctaagacaaggaaagaggccattggtgcccccattgtgttatgtgttttgctttgtgtttg

SEQ ID NO: 154431 - DNA, 2290 bp, Arabidopsis thaliana landsberg
  unsure (1)..(2290): unsure at all n locations
ctttagagttattttgaggaagatactgtagtttctgtgaagaaacttctgcctgaatctgcaaatggtgagctagcagctgtttgctcatggcctgatgaaatcaaaaagctcccgcaatggcgatggactagtgctttgcattttgctgatacgcctgattacaaatgcaactatgagtactctcgtgggtcttttattgatcttttctttcaaatttcactcatgtttctgtttgacgttggtataaaagtatatgtgctttgttgtctttctgtgaaggggactgtcctaaagactggtgtgtgacaggggcaatcttcaattacactaaccaactaatgtctacttctgaaaactcacagagtatagtccactgtgagttagagttctagtgaattctgatacttttgtgtgtgagttatatgaagcatcataatagtgtgacttggtgtttttttttgctttgcagataacttaacagaggctctcatgttcttatcacattatatgggagatgttcatcaggttagtcctttttgcaaattcagtcgaatcataatattacgagcgaatgctgtcagagttatatgcatttgaggctactactctatctactctggactctggaggtttgattagtgtatagtagcaacacaagagtatggctaatctttatgtggattatgatnnnnnnnnnnnnnnnnnnnnnnntttcttggagatctaggtggtaacacaataatagtcaactggtaccataacaaatcaaatttgcaccatgtaagtgctttgttttttagtcatattgatgctaaaaagtatctttcctgacacggaagtggaacgatcttaacttgaaggtctgggacaacatgataattgactctgctctagaaacatactacaattcaagccttccacacatgattcaagctcttcaagccaaactcaaggtacaatcttgccttctctaatcagcttcagcaagttatagccgtatccaagataaacacaacttacattgagtgtttgttgttacgtctgtcttaatatagaacggctggtcgaatgatgttccgtcgtggaagtcatgtcactttcaccaaaaggcctgtccaaannnnnnnnnnnnnnnnnnnnnnnnngttaagttgcttaatagcagagaaaacttagttttcgttaccatatcattgttgattctctttgttctttgatgtgttaaaggtatgcttcnnnnnnnnnnnnnnnnnnnnnnnnnnnnnnttacaggaacgctactccggggactactttaggaggtatacttactctatgaaaccagatcgtggctttttgttttctttaatcatggacatgacttgatcttctgctttctctgcagatgagtatttcctttctcggttacccgttgtagagaagagacttgcacacggtgggattcgcttggcttttactcttaatcgtatgttttctgcaaaaccgtttttcgcaggattatgaatctaagaaaaagatccttgagaacccacgtaacaactctttttaagtgttttttataacactgtgaatggttgagtcatgactaatgagtgaacctccaaaatcttcatgcaaaaatttgttattttgggacatggttcaaacttccaataacaaaccacactaacggataacactttgcattttttttgtttgttttcagttttgttaattagtatccttctttttatcttatgaaaaaggtaagttaacataaaggagtaaaatagaaaaagaagttagatttcctcattagattaggaatgataattcgctatataaagatttcaagtgagacataaaaagcctaagcgcaaaacacacaataaagagtttcttacgtgaaaagctacttaaaccctaaaagagagagagaaaaaaaaagcaaagccgacacagctagcgctctcgggtgcacttccacagcaatgaacggagaagagccaccttttaaaagaagacggatgaattttcttatgcttcctgatgatttggttttaaactgtttaatttggcccgcatcttaagattgtactatccaactttctctttagtatccaagagattccgctctatccttacttcaacggagctttaccagacccaaactctcttaggctcgaccgagagttgtttgttcgtgtgcttaacgcagattacatatgacgcttctaacccacaattaatttggttcactttttgcctgaacccaaatagcttaaaaaagattttaatccctaattta

SEQ ID NO: 154432 - DNA, 923 bp, Arabidopsis thaliana landsberg
gtatggagttggtctgagaaacaagaagtcacttgttgtcacagcaagatttgtgtatggtgcattaggatgtgtgatgctaggagctttggtttacacaggcttcacgtatggttcgcctttccacatggagcttctatacccgtgagtataaatttctgtcagcattgtttgtgtttgaatcatctgtctcttgctttgcctttgacgcatttgctaaatcttcccacaggtggatggtggttttattggttaacttatacattgatgttgcagtcttatcagtaagtccctaatcttgaacactagattagtaaaagccttttaagctatataagctctgcaataactaggtttgttacatatattgccctttcatgagtcattaacttgtttatttcaggtttgggttgtctataaagaatctagttggatcattggaattctatgggttgctctattgataggacttggcaggtacaacttctctcaaagtcttaaaactctttgatggacagacaagggcattttgccattcatgtattgtttaatccttttcagcgttggcacaagcgcagtcattgtcgtgcagctattccgtctctctgctctcgacccgctctacctcgttctagtgaacaacagcaatcggtaagctttgaatatgcaaagagaaaaaaactcttaatctaagaagtttgatgatttagatacccaaagcagtttttgaagcatactcttatgaattctttttacattttaatcttggttggaggaagcaaagttaaaagtaaaggctaagttagtgaactctctcatgggtcaatggcagggctggagatatgtacgagcgcactcattctgcggctttgcgtataatgtgaagctttgtcatttcatttttaacattttaccacaaaagt

SEQ ID NO: 154433 - DNA, 393 bp, Arabidopsis thaliana landsberg
  unsure (1)..(393): unsure at all n locations
cagaaaggaagagcttgtgcgtgtaccgttctcttctccgtagattgacttgctctaatgatggaggtcaaattatggaacgacaatcgcgaaagagagatgtatgagaattttgcagagctttttgcaatcatcaaagccacagaggagctagagaaagcttatataagagacctaatcaatccttcagagtacgaatctgaatgccagaaactcattgtccacttcaaaactttatccgctacactcaaagacacggtgccaaacattgaaagatttgcagacacatacacaatggactgtcccgatgctctaccccgcctggtgacatcaggtcaaatgccnacagagaaactccgagctaccgttacagcatctncgtcggnctttgcc

SEQ ID NO: 154434 - DNA, 557 bp, Arabidopsis thaliana landsberg
  unsure (1)..(557): unsure at all n locations
ctgaatcttaatttcccccaaatcaaagcttttgacctaaatccgtttcccgggaaaaataaatcaacaaaccatcaccgnnnnnnnnnnnnnnnnnnnnnngaagaaaaaatgtcgcacaacgatacgattccgctttatcaatcatctcaatcagacattgacgagattgagaatatgatgaacgacagttttcaatcaggtcccggaaccgtgcttcctgctcgaccaccgagtccgatccgtccgtcgattcccgtttcatcctcaccgttcgttcaatccaatctcccaccgcttccaccgtcgtcttcctcctccactcagaaggtgatgcctgttccagctcctccaccgcttccgtcagcaggtaacgaaggtaacaagagtattggaggtagcggattcggatctccgccaaatacattgacggagcctgtttgggatactgtgaagcgagatctgtcacggatcgtgagtaatttgaagcttgtggtgttcgtaatcagtatagggaagatcctggganagcacttagggattgggactatggggac

SEQ ID NO: 154435 - DNA, 1180 bp, Arabidopsis thaliana landsberg
  unsure (1)..(1180): unsure at all n locations
aagacaaaaaagggtaatttgaaaattttcagatagaaacagtcccgtcaccggcgacgatgaaatggttactcgtcgccgtattgaccgcttttacgatcttctccgccttaacacagtcccatctcctccatggatctccggtcaattctctctgcgctgatctcattcatcccgctaattactcctgcactgaacacactgtaaaaaatctcatcttttattaccactctttcttaaaattaagatttcattgaatcattcgtagaaaaatctcaactttatttggttttgtagattcaaacaaaggatggttacatattagctcttcaacgtgtagcttctcttggtccaagacttcaatctggtccacctgttttgcttcagcacggtctctttatggtatatcttgtttaaaggctttaacttttcttggtgaaattggtttaaaattgctaaaaatcgtatcttttttggtgggtttgttttgattattaggctggagatgtgtggttcttgaattcaccaaaagagtcactaggtttcattcttgctgatcatgggtttgatgtttgggttggaaatgttcgtggtacacgttacagttatggacatgtaactttgtttgaaactgataaggtatgcagagacttctcttgtctttgttcctcttttatgtatgagcttcacctggaaatgtacatcttaggtttggtacaccatcaaattatgtatttctctgctttcacttttttgatgttgaggaatagtttaagaatatggccattgtttatgaggcttaatggtgattccttatacctgatttgatgttaatgaaagtgannnnnnnnnnnnnnnnnnngagatgtggatattgtagttgacattataagaatgtggccatagttaagaaaagtaatgcttaattgcttatatatatgcaggagttttgggactggagttgggaacgatttggcaatgtatgacttggcannnnnnnnnnnnnnnnnntattcaatttcaaactccaaaattttccttgttggacattctcaggttaatattctcttttaatcatatcaagtacccttttattgagatttaatatgctaactccttttaatctgtttggtaggggactatcaaggattttgctgctctcactcaaccacatgttgcg

SEQ ID NO: 154436 - DNA, 901 bp, Arabidopsis thaliana landsberg
tgctcttaaaccctaaaaatcctctctttttctcaaccttgattcttagctatggagttctggggtaagaatcttctctatttcagtcatttaatcgatgtttttctaaagctttttggtttttcttaaaaatctgttttcgaactctcttgtggctgcttccttgtgttttgtagttgtatagcttcatctagggttttaagttgcaatattctcacttagaaatggttatcttatataagaaatagtgtggtagggtataacttgaagctgtttcttgatactcatattgatttgttgtttaaatgatgtaatcaggaattgaagttaaatcaggaaagccagttacagtgactcctgaagaaggcatgcttatccacgtttctcaggtttagtatcaaatattattgattttgaatctgagagttgttagaggtctagtgtaaacaatcttggattgtttatctgtgtaggcatcgcttggagaatgtaaaaacaagaagggagagtttgttcctttacatgtaaaggttgggaaccagaacttggttctgggaactctatcgactgagaacatccctcagcttttctgtgatttggtattcgacaaggagtttgagctttctcacacttggggaaaaggaagtgtttactttgttggatacaaaactcccaacattgagccacaaggctattctggtgagtttgcaagataaaatctgtttcaattcaattattctgtttgtaactgtaatattggcttggttgctgatgattcgtttatgtgttgtattgatatattcagaggaagaagaggaagaagaggaagaagttcctgctgccgttactgctaatggtacttaaactagacagagactacttgatttgcgatcctgataat

SEQ ID NO: 154437 - DNA, 992 bp, Arabidopsis thaliana landsberg
agattgtagaaagtaatgaaaataggagacttcccaagcttccaaaggtaaattacaatctcgtatatggagaaggtttaggcctcagagttaatttttgatttgtttcattctatgacagggaactcgagatttcgctaaagaacaaatggcagtccgagaaaaagccttttcaatcatacaaaacgttttcaagaggcatggtgcaactgcacttgatactcctgtttttgaattgagagagacccttatgggaaagtacggagaagactcgaaattggtttatgatattgctgatcaggtagaactcttcttggctgctgtaatatcatcagtttatgtgatgatttgtttgtcaaaatttgagctcatatggatctattaattgcagggtggagagctttgctctttacgatatgatctaactgttccatttgcacggtatgtggctatgaatggaatcacatcattcaaaagataccaaatagcaaaggtgtacagaagggataatccatctaaagggagatacagagagttttatcagtgtgattttgatatcgctggtttgttcgaaccaatgggacccgattttgaaattgtcaagatattaactgaactcctcgatgagttagaaataggagattatgaggtaataacttaagttgaaagtcttaatctttcctggttggttttttctttggctatgttgttaattctggtttgtttcaataggtgaaactgaatcgccgccagatgcttgatggaatgctgcacatatgtggagtaccacgtgagaaattccgaaccatctgttcgagtatcgactagctagacaagcaatcgtttgagcaagtgaagaaagaaatggtgcaggagacaggcttgtcttcagagattgcagccagaattggcaactttgttaaggagaagggagctcctttggagaaattgtctaatctgagacaagaagggagtgagttcttagataacca

SEQ ID NO: 154438 - DNA, 2808 bp, Arabidopsis thaliana landsberg
  unsure (1)..(2808): unsure at all n locations
gaaaatatattcggtgtttatggcgagatcaaggaggtgatgcgtttttattctgttgtttctgtttgatttttttgaggttttaggtttctctcacgacctgcataatggttaacgtttgtgtaagttattgttctgacaaagcagatacgggaaacaccaaataagaggcatcacaaatttgttgaattttttgacgttagatcagctgatgcagctctcaaagctttgaacaggacagaaattgctggaaaacgtatcaagctggaacatagtcgtcctggtggtgctcgtcgaaagtgagtttactgataccaaagaaactgactttaaagaaactgtggactaattttctgttttgctttcttctctcagcatgatgttgcaaatgaatccggaattggaacaagatgattcctacagctacctgaatcatgtcgagtcgcctttggcaagctctccaataggaaactggcgtaatagtcctattgatcatcctctacaaagtttcagtaagtctccaatatttggaaacttgagtccaacaaagaacatccgttatccagaattttcgatgaagactgcatcggtgaacaatgaccaagaaggaagaaggtttagccacttggatcacctgttttcaagtagcagctataataatgcaagccacaaagcttctacctttcagcaaccgcagtcgtttggatctgtctcttcatttggttctttgaactcacacccgagtcatgtagaaacattatctggatcagaattcctgtggggaagccctagttcttcagcctggcctgtgaatccattctcttcaaacagannnnnnnnnnnnnnnnnnnnnncagctcagaacggatccctccaccagcttcatcatatcggatctgcgccatctggattcttcccgaggtcccctgaaacttcatcaatgggttcagtggctttccgaggagcaagtggtaatatgaatgctcaaaggaacttgcgtgaaactagctctccaaattttaaaatgttgtctgctccaagacgtagtcaattgtttacaggcaatggctcttacctctggcctgctgctacaatggtttccattgacgacccattggaggatggaagcaaccaacagtttgatagtaacggtaaccaagccgacatcaagatacagtttcagcttgacttgagtaagattatgaggggtgaagatccacggacaaccttgatgataaaaaacatcccaaataagtaagagtatcctttgattttgctgtggtccggttagtttaccgttttgcgacctgaaagaactgatattttttccgtgttctcaggtatacccggaatatgctcttagctgccatcgacgagaaaaacagtggaacttatgattttctttatttgcctattgatttcaaggtaaagaccatttaggtttgtttgttatatctttgacatcacttgatctgaattctataatgccctcttttggtttctttgtgtgcagaataaatgtaatgtggggtatgcatttatcaatatggtgtctcctaaattcaccattgcattgtacgaggtacaaaacctgattgagtctttagtgttgtttctcagagagtgaaaattttggggataaacttatgcttctgatctgtttcataggcctttaatggaaagaaatgggataagttcaacagcgagaaagttgcttcattggcttatgcacgaatccaaggtaaagctgcgcttattgctcactttcagaactcaagtttgatgaatgaagataggagatgccaacctattgtctttgatggatcagaatctaaatatccggtaaacaatctcttacaacaaacacatgatcttaaaatgatcatttatcttttctgtgtttatctgatgaactggttgactcatacatctatatttgaaactagatcatccggaagaattcgcagctcgaggcatcaaattcaacggtttctcatcctcttgttggcgagaacacacatcaaagctgacagtcaagtgaatcacgttattgcctctggtttaaaacgtaaatatcagtttctaggatgagatgatgatgaacaacaacaaactactacatagtaccctttagaaacatttctggttttctcagttccttctagtttgctggtatccagaattagaaagaattattgttctagacatgtgaattgatggttgtgttttacttttgtctggttggccaaatgatctctccaaattgtatacataggatagttaagatacaatcttattggtggtaataaataatgtacctttgttctaattaatacatttggtaagagaccaaatttcattaaattttataagccttgtaactcaaaatttctactttatgcttgaactaccctctgttcctcttgactcaacacctaacattgtcttcacttgaagatccacctgaaagaaacaccgttcgtcttctcggacataactcacacggccattcatctgctccaatagtttccgcgaaagcttaagccctaaaccatcaggggtgacccatccatctcgagtctcaaacatatcacttagcatctctgaaggaagtcctttccccggatgtatcatcctatcataaaacaacatcgaacgttttaagttaaaaaccatcaaaatctgcaaaacggctgcattgtgaaaagaagttgttttcagttgtttctgttgacgtttacctgaactgtagatggatatagcgaccattgtcacgtgaaagctcctgccctggtgagatactgatac

SEQ ID NO: 154439 - DNA, 520 bp, Arabidopsis thaliana landsberg
  unsure (1)..(520): unsure at all n locations
tatttcacaacgtgtcttttggtgcaatgtatatgcagtgtaatgtgttctcttgttcatcagcagaggttatgatatagtgatgaccactagtctatcatcagatgttcctgttggatatttctcgtgggcggagtatgatattatgtctccggcacagccaaaagctgagagagctattgcagctgcgtttatttctaattgtggtgctcggaattttcgtctacaagcacttgaggcattgatgaaaactaacgttaagattgattcttatggtggtagtcatcgaaaccggcatgggaaaggtaacataagtaaatcaggcacattatacattggtagatcaacgagctgtctttttgatgtgatttgtttttattaatannnnnnnnnnnnnnnnnnnnnnnnnnnnnaagcgatacaaattcagtttggcttttgagaatactaacgacccagattatgtcaccgagaagttctatcaatacaaagttgttggtatgtcttagatttcatctgt

SEQ ID NO: 154440 - DNA, 3008 bp, Arabidopsis thaliana landsberg
ataatcgtaaaaaacaaaagtcacgaaatgaaattacttactaaatactggtgaaattaccaaaatatttttgccataaattattatgtttttttctcgaacatatatactgtatatgattactacgtatcaaaagcaattcctgattgaatttggaatttgatttggtttagattgcctcgtcataactggctttagaaaagtaaaaagagtgcagtttgtgacgacttttagatatggctttgattcacaaacgtcaagctctcaattctaggggggtggattggtcggagcttcctgaggatgtgatcagattggttctgcgacggctgagactctcggattttcatcgagctagggcggtttgttccacttggtgtagggtttggggagactgtgtctccaaacctaatcaggttccgtggctaattcttttccctgatccagcacaaatcagacgcagttgcatgttgtacaatccacaggaagaagaaaacgtttacacaattcaagaccttggtgtggatccttgccttgcaagttgcggcacctggctcctcatgtcggaccctcggttaaatctatatcttgtgaatgtgctaaatttggagaggattaacctagtagctatcgagtctcaacgtgaccagctcttttcagcgtactctacaggaaaggtcattttgcaagcaaagccgagatgatggggtaccctagtactgataaggcagttgtgtggatagacgagaaaactaaagactacgtagttgcttgcagctggggtggagacaagcatgcagccttttgcaagaaaggcgattgtgaatggcgccagattcctcctttgttggggtgtagtgatattgccctcaaggaccacaaactttacatttactatgaggatggtagcatcggaatctcggatttgaagtttgttacacaaaaactgctcatgttcagctctatccctttcgcttccgcttgggatcttttagcccttatgatacaatttggacagactatcttgactggaagaccaacatagtaatcaccatctctggagattttttgatggttggctgcgttcttaaacgtcgtgacctttcctggctttttcgcggcgaccaggccgtgatcttggatctaggtatcaccgtgcaagcatcctccgatatccaaggtattaccagaaactccacctatttcagcggtcttccatctagccaaaaggatgtcttcgtcttcaatctctcctcccagaaggttcaacgcctttcgtcttcttctatctcctccagaccattctctaatgctcgctggctcttccccacttcttagttcacaatgatactctttccaaacattttcgtttttgttcaactttaagtgttttttttttttaataatgccaatgttattttccttttgctaataaaaacatgacttaaccattaacgcaaaggctacaaaacaaagctaattatataaagtagtaatgtttcaacatacacaagattacagatacactagttcacttttaaaccagactaatctcaacaatatcttctactaaaaatgctcaaacagatgaagagacttgtatcgtcaagaaactcaccaactccctggcccatcgttcccagctgctggcctccggttcaagtaacgtataactgcatcttcgaccctgcaaacattttaccccaaattatgattcagaaacattttacaactctttgaccaaaaaaaaaaaaaaacattttacaactcttaatacatatcatctgtgcgaataaaggccagagtagcagagtctagatgattagcttaccaaggttggttgaagaagtctgatcgacgttctctctcagcatttcgactggcttctcccgcaacgacctttagatccttgctctgagattcgatcagggcgtttatgaattcaactggcgattggctgaaccccaagaaaaatgcccgcctcctcctatgctcatggattttccttatggctgcacatattgcttcatcacaagcctcaatctctttgttcttctctgcgttggctagcaaattgttcagatctctttggatcgggaagggtacatccactagcacatcgtaacatgctgatacggccggattatttcctgagagcttgattttgtgttatcaggcatacctcgtgaaggccacaaggcatgtcatatactccaacctacaataggaaccatctctatggatgctccatagtttccaaaccaaactcatcaaactattcccacagaaagaaaccgtctttccccatttggctcgctatctttttcacccgacaaaccaagtttggggtatggtcaatagaacatacaatgcctacttatcaagagcagacgagacgcttggtattcagatacgggtattccagcgatcgagctggatattttcagcatgtaatggatcaggtcgtagcttgtacacaaagagagaaccttttgcctgaaccagctgcacaagaagaaccaaaagtcaatatatcaagaagccagaaacttaaagctgttcttgtcacatctttgtatccagagtactctgaaaccttaaagaacatgtattgggaacgaccgagttcaacaggggagatcattgaagtttatcagccaagtggagaaagggttcaacaaacagacaagaagctacacgaccaaaaggcgctcgccgagatgtatcttctaagtctaactgataaaatagtcacaagtgcaaggtctacatttggatatgttgctcatagtcttggaggattaaagccatggttactctatcagccaacaggtcctacagctcctgatccaccgtgtattcaatccacgtcgatggacccttgtcaccttactcctccgtctcatggatgtgaacccgaatggggaactaactccgggaaggtagttccttttgtaaggcattgtgaggatcgtgggaacgatggtcttaagctatttgatgagtta

SEQ ID NO: 154441 - DNA, 1518 bp, Arabidopsis thaliana landsberg
tactacatctctaaccttctcggagagttcaacgtcacaggtaaaacattttatatacatgtttaagtcttacacattaattatgaatgaacaagactacaatttttggtggcaggagtaaccggggatctcggtaaatacgcaagaaaacttttgtcggcggaagacggtataccaagttgggttggaccaaacactagacggctcatggcaacgaaaggaggtgtgaaagctaacgtggtggttgcacacgacggaagtggtcagtacaagactatcaatgaagccttgaatgcagtgcctaaagccaaccaaaagccatttgttatctacattaagcaaggtgtctataacgagaaagttgacgtcaccaagaaaatgactcatgtcactttcatcggtgatggaccaaccaaaactaagatcactggtagtctcaactattacattggcaaggtcaagacataccttactgccactgttggtgagtccaattctgtttctaatccctaaaaattcccacatttcaaccacaaacataattatcaaaaatttgataggacttaaattttatatccaagttggtaaaagtgatatgaagacatttagtttgcaaaatacccctatgttgatgaaaattgcgagctttatatttcatggtttcattcagtgacacttttttcatttttaacatgctatttttcaatatgtctcccttaattactattttgcgacttgtttttgtgcgatctagttaacccaatttaacatgcatactttgttacagcgatcaatggtgataacttcacggcgaagaacatcgggtttgaaaacactgccggtcccgaaggacatcaagctgtggccctaagagtctcggcggacttggccgttttctacaactgccaaatcgatggttaccaagacacactctacgtccattctcatcgtcaattcttccgtgactgcacagtctcgggcaccgttgacttcattttcggcgatggaatagtagtcttacaaaactgtaacattgttgtgagaaaacccatgaaaagtcagtcttgcatgatcacagcccaaggccgctccgataaacgtgaatccaccggactcgtgctacaaaactgccatattaccggagaacctgcgtatattcccgtaaaatctataaacaaagcatatcttggaaggccatggaaagagttttcaagaaccattataatgggaacaaccatagacgacgttattgatccagcgggatggcttccttggaatggtgattttgcacttaatacgctttactatgctgagtatgagaataatgggcctgggtcaaaccaagcccaacgtgttaagtggcctggaattaagaaactatcgcccaagcaagctcttcgatttactcctgctaggtttttacgtggtaacttgtggattccaccaaatcgtgtgccttacatggggaattttcagtagattccaattggtgaattttccactttctgtgtgctcttt

SEQ ID NO: 154442 - DNA, 547 bp, Arabidopsis thaliana landsberg
ctttcgaatactggacatggcaattgggggccatcgacccgtgtgctccactttgatgatagctttacagctcgtggggttttatccttcatggttgagctggacattcactatcattgtcaatttctcggtttctctggccttgtattctcttgtgatattctaccatgtgtttgcgaaggagtttgctcctcataacccactctcacagttcctctgcatcaaaggaattgtcttctttgtcttttggcaggtaatgtttgcattaatcagtaaacccctcaaaacaagatttctcatgtttggatatactcataagattcttttgattctgaaactgcagggaatagcactagacatactggtggcaatgggattcataaaatctcaccatttctggttggaggtagaacaaatccaagaagcaattcagaatgtgttggtatgtcttgagatggttatcttcgctgcggttcagaaacacgcttatcatgctggtccttatagcggcgagaccaagaagaaactcgataaaaagaccgaatga

SEQ ID NO: 154443 - DNA, 2101 bp, Arabidopsis thaliana landsberg
atcatacgctattgatctaagtatcactgaagtctcagccccttctttgacgcttttttctatacatatccatgaatcattttcatttgaatcctcagtcttcattatctcttttatgtcatcgtaatccaacttctgcaccgagtcttcgctttcctcggtagtaagttgaggtatgaggtgtaagatggttacgcttgtctgcttgtttctcctcatacggctggtgaatgctaaggcttctttatcgtctttccctcccacaactattgcacacacctgaaatacaaaccacgagaccagtttagaacttgttaagatcacacatcggaagaaatgtgtaggtaccaacactagtatagaaaaaacatgggccaaatatactaatcgtcggtttgttttgagttggaagccagacgaccccaaaaattaaccatgagatctcttaattacaaaagaaaaaaaacaagtaccttgtaacatgagccgtgcatttgagattcccataaaggtttccggtagacgaagattccaacagagcaagacgctcttttcaagactttgtggttgagattctgcatggccttgtcgtcagagacaatggttgagcggtcaacagaccaagaacggtgaaaaggaagtacaacgagagctacattcttgtcaagggcaagccaacagaggtcctcgtgcatgtgctctaccaagctagcagatgtaaagatgtcaatggaaattgcctctttggttaaatgtctacgaaggcttaagaatgcagttatgacattgcgggagcaagagctattgagcaagacctaataaagagcatccgtccgtacaaataaagaaaagaggccgagtgttgtgtgtaagctacaaggtgttgggccgaacacattgagaagcctatagggagcttctagaatgagtgaaggcacacaaatatctcttgtagccgttgaagagaactcacgagtggtcttagcttcatggtcaaccaaggaccggtcactctcaccattaagaccaaggaatctcttctctcatgtctctttcattcgcatgttatgtgtaaacggctatgttccctttgtgtgtccttaaatacaatgtaaacacacaaaggtaactaaccaattctagtaatatgtttttgtcattctcactcataacaatgctctcttgttcttcatgattctcttacccttactcttactctttccaaactacaattccgcatattctttcacgaagcagctgaagaagctcttaaagtacatgaccttgagtgttgacccgacctataactaacgtcacatcaaaactctggcgtgacggtcaagatatcggcttagccccatatggtgagtctttgagagagttgcggaagctttcctttctcaagtttttcagcacgacaaaggttcgatcttttaggtacatcagagaggaagagaatgatttgatggtcaagaaactgaaggaagcggctctgaagaaatcttccgtagatttgagtcaaacacttttcggtctagttgggagtatcatattcagatccgcctttggacagcgtttcgacgagggcaatcatgtgaatgctgaaaagatcgaagacctcatgtttgaggtccagaaactcggagcactcagtaattctgatcttttccctggtggtttgggatggtttgttgactttgtgtcgggacataataagaaacttcacaaagtcttcgtcgaggttgatactctgctgaatcatattattgatgatcacttgaaaaactctatagaagaaataactcatgatcgtcctgatatcatcgactcgctcctagatatgatacgaaaacaagaacaaggggattctttcaagctcaccattgataatctcaaaggaattatccaagtaagcatagttcaaaacttttatcgatatgttccctaacattttcttgaacgcaaactttgatagtacattagtatgttaatattcataggatctatagataaacgtgagatcttctatactcgttgttaaaagaattcttaacaaatcttgagtcaaaatatgtcattgactattatgcgacgttcttga

SEQ ID NO: 154444 - DNA, 709 bp, Arabidopsis thaliana landsberg
  unsure (1)..(709): unsure at all n locations
atttggtcccatgttccggatgtcttacctccatgtcgcagtgagctcgagggttgtgcacatactctctaaggtattaacataaaataaatttatgttctgtataaatctgggttataatatcattgtcggctatatatgatataggtaccggagaaagtagtagagaatgggtggaacaaaaggaaggcgtggatagaaggatctgatcgacaagtgttgatggcttacgcggagcaagcggacaaggacttagtcgactttttggcagagccgnnnnnnnnnnnnnnnnnnnnntaggcgaaaaaatatggtttaatagtttaataaaataatgtatacataacaaaaaaatattttcatgttcaaagtttaataataaattacgaaaatcttaagcaaaacttaaaaaaaaatttagaataaaaatatgccaaaaaaaataaaaaaacttaggttgattataatgtgtaatttagtaaattgtgttagtatcattattgtgttaccattcaaacggtataatgatgttaaaaaaaaaaaacataattttagtagttaataaaaatttaatatatatatatatatataatggtaatttccaaaatatagtatctatataaaaatataaaaataattaataaagtttgataaagatgattattgccttaagtgtattaaagaagtgagaaaagaaaatttaatgaga

SEQ ID NO: 154445 - DNA, 2959 bp, Arabidopsis thaliana landsberg; identical to SEQ ID NO: 25865

SEQ ID NO: 154446 - DNA, 1245 bp, Arabidopsis thaliana landsberg
  unsure (1)..(1245): unsure at all n locations
cacgcagtgtgattggttcaagttctgctggttgtgtctgtgcttttctttcaatatatcaagtgggaggagcagctttttcccagcttttccggcttggttttgtttccagtttctgcactaaagtatctgacactgtctcgagcgagataggcaaagcttatggaaaaacaacgtgagtatgctactgttatccagctatagcctcttctgttatggtctgtgtctgttttctgtctgatgtatggcatggacttgtggtgtcatgacatgaatccaatcgacaactgaaatgatcttactaaccattgccaattcgcaggtatttagctacgacatttaagattgtaccaagaggaacagagggagctatgagtcttgaaggaacattggctggacttttagcatcattttttcttgcatctgttggctgcttcctgggtcaggtaatagtgttatttgctaccaaaatttcccttcacagcttctttatgctactaaagactgttatcattacacgatttttaaacttcttttccttttgatatcttgaacacagatannnnnnnnnnnnnnnnnnnnnnnnnnnnnnnnnnnnnnnnnnnnnnnnnnnnnngagagcataataggtgcttcttttcaagacaaagaaggattcaaatgggtatgctcacttcaatgaactctcttctttttgttttattgatctcactctgtctacttgttgtcaatgcaagaagatgataatcaaatgaatataccgtcacttcttgcagaaagactgatagataactggcttgagtggaaaacgatttccattcaatacatacagaatttttaagttttcgtcttatgaatccattccttgcaattagttaccaactaaacaagaatgcaatgatctcgactgtattctgtctcatgttagtcactattttgctatgtgtagctaaacaatgatgtagtcaacgtgatcaacataagcttgggaagcattgtggcgattttgatgcaacagtttatactccagaactgggtcaagtaaaacctgccacgaaggtcatgtattctcagtgaggttagattctttttttatattgttaaacacagccttacgtattcagtggtgttgtaaattatactctgttgtgtacaactagtagtccaacatcaatgaggggaaaaaacttctgggaccattgtctagcaattattggatgatatttatgtgaattaagtttgcct

SEQ ID NO: 154447 - DNA, 1342 bp, Arabidopsis thaliana landsberg
tggaagttttgactctatgcagggtctcagaagccgttgttcgagcgatacattcacgctcagggtcttgttattttgcattcacgctaatgaataaaatgatgttttgtatcattttattcattaaatgcttttggttttggataatggttctcaggtataaacaactccagtgctcgtaattactatgatgttctcggtgtttctcctaaagctacacgggaggagattaaaaaatcatttcatgaggtgagtctttcggctcattgttagtggactgttcttcagctttaaacatttttttacatcaagcaaaaactattagtaaaagttgtctgctttaaattgatgagtgaatgcacaattgttgcagcttgcgaaaaaattccaccctgatacaaatagaaataatccgtcagcaaaaaggaagttccaggaaataagagaggcatatgaggtatttttttcttttccatctgccatcatctgtgtattttgaatgtatcttctgatatacttttgtgttggattaaaaaactgtagaccctgggaaattcggaaagaagagaagaatatgataaggtacgcttttttgttgtttttattcttatttatctggtggcgagatcactaaatatatttcttgatgttatcactcgatccagctgcagtatcggaattcggattatgtaaataatgacggtggtgattcagagaggttcagacgtgcataccagtccaatttctcggatactttccacaagattttttctgaggtacattattatgtttcccttttgctcatctttttatgtgattagtcaaatctctaacattagtaaactttattcagatatttgagaacaatcagataaaacctgatattcgggtcagtttctctgattctctcttttatttatacaactggaatctggttgacttatataaatcttgttgtgtagggctcttcagtaatacacatgtttatattgttaaaaattgaataggtggaactgtcgctttctctttccgaagctgcagaagggtgcacaaaacgtttgtcttttgatgcatatgtcttttgtgattcctgtggtgagtggccacagaagttttcttatattgcctcttttgcatttactaatattgacaagccagtcatggctcgcaagattttctgtaaagatacttgagagtatagacactttaaattaggagtcctaactcgtcatggtacattattattcagttgcccaaaatggtaaaatatttttcttaacgaagaatagacttctggaaatggctctgtgatccactcgatgttaatgtacatgtatctaca

SEQ ID NO: 154448 - DNA, 1119 bp, Arabidopsis thaliana landsberg
  unsure (1)..(1119): unsure at all n locations
aagaattctgtgaaagaagaagccgctagaagaaagcttttggccgccattgaaatcaactacacacagacatagcctaaagatgttgcattgtaaaagttgaatcagtctaatttatcttcgattcgacagaagcatgaagaaacaatccgcaatcaaatccactgaaatcaaaacccgaaacacacattgaatctcacaaacaaagtaacgcttttcattttccgacgctgattcttnnnnnnnnnnnnnnnnnnnnnnccttcgattcaattgcaatttcaatttttggggttttcgcttcgtctttttttcccccctccaatttggcgaaaaataaaataaaaaattagtagtgttgtttttttcctttttttttttctcttcccctgttttcttcttcttttgcttcattttctttttctggggaaaaaaaagaaaaaacaaaacttagttgatttcacctgcaaatcttttttttttgtcccagtttttgcttggaaatgactcaagaagattcatcgcgcggattaacaagtgtaggcagagttgacttcacaaatcggttcgctgatagatacaacgaatggctagggacaactggtgacgaaacaaaacaagaggacgatcgtgtggaaactgattctgaacttccaggccatgacatctatggtttcgagaatgagatcaaatcattgcaacacttcttgttggatcaaaagtcttacaaggtgttcaagactcttgtggttgtcggagaatacggtgttgggaagacagcattatgccagcagatcttcaatgatgatgatgtgaggagtgcttatgccccgaggatttgggtttctatgcatagcaatgaatctaaggagggacttgatgggaagatatgtgtgttgaagaagatcttgaagggtcttggagttgaagagtcaatgttcgaatccatccatagagaagtagtagaagaagtttcaaacaggcaggaagctggagagacgacacatgagtaactcggacaatccatacctttgataaaaagccatgacacaaacacaccaggaatgataactgatgttgatcactaatccctgccttaaaaaaatctacggtgtacac

SEQ ID NO: 154449 - DNA, 1302 bp, Arabidopsis thaliana landsberg
  unsure (1)..(1302): unsure at all n locations
atgggaaagactccaagtcctggtaaatggatcaagtctcttcttggaaagaagtcatcgaaatcgagtttggagaaaggaggcgaaaaattggtaagaagagtgaatgttctgtttttttttttttgttctgtgggaaaattatatgatgagtaattgtaaacattgttcatgttttggaagagatctgcaaagaaagaagagcttgtggtgaaggtgaaggataataatgtctcaaagttacctaccgaaccacctgtagtttcatcacaagaagttgcagctactcaaactgtggtcgttcctgatgttgtaattgctgagaagcaactaagtggagacattgaaggcgatgagtcatcgaatgtgaatcttgagtcagggaatgactctgaagaagtcaagcttgaagaagctgctacaaaggttcaagctgctttgagagctcagcaggtgaatgtgtacatcttcgacattctagtaatggtttttgtgtgtcttgttttgctgatacttttgttgttttcttaaaggcccgtgaagaatctcagaacctcaaaggtatcacaagggtgcaagcacttatccgtggtcacatggttagaaggcaagctgtttcgactctgtgctgtgttatgggaattgtcagattgcaagcacttgctcgtgggagagagatcagacattcagacattggagttgaagttcagaggaaatgtcatttgcatcatcagcctttagtaaatgctcttcaagcacttctctgtgatttcggtttcttggctgaatagctcttaactttgattaatgtttttgtcttatcaggagaataaagccaactcggttgttgatacacattcttacttgggaatcaataagctaannnnnnnnnnnnnnnnnnnnnnnntatacttgtttctactattactatgtttgaaaagttgagaagaccatggtggatgattctgttgccttattcttatcagcttctagcttcatcgccaaacgtgctgcctttgtccctcgacaatgattcttccaattcaatctggttagagaactggtcagcatcttgcttctggaaaccagttcctcagccaaagaaagcatcactcagaaaatctcagaagaagtttgccagtaattctcagatagtcgaggctgagtttgcgagaccaaagaagagtgttcgcaaagtcccttcttcaaatctccccaattccccggtggcacaaacatcatctgagaatgagaaaaaaaaacgcagcttccgcaaggtttcaacaagccaatcggtagaac

SEQ ID NO: 154450 - DNA, 933 bp, Arabidopsis thaliana landsberg
tagtcttctagatctgtagtttttttccgcgaccgcccaaaaaattctctgatcagacggtcgattggatcggagatttaaggtaaagaaaaaatggcgcaacaatcgttgatctacagtttcgtagctcgcggcacggtgatcctcgccgagtataccgagttcaagggcaatttcacctccgtcgccgctcagtgtctccagaaacttccgtcctcgaacaacaagttcacctacaattgcgacggtcacactttcaattatctcgctgataatggcttcagtaagtcacttttcgtttgatctatgcataggttttaatcttacaccattcggtgcttacctcgatttgtttctaggtttatttgcctaacctatcgattcgtatggatttgtgcatcctgagtagtctgatttcactgaggaaccgcatgaaccaagcttttagggttagatctatatttattaaacgcaataaatctctgtagagtcttacctgtataatcactcagatttggacagaatccgtggtagctttggttgatactatgtggaagaacaccaacattgatctgagacagggtttttactggttgctttatttgcgtatagtttcctaggtcatgggttttggctggcttcatttttcaatgaaaatctggggtcttattgtaagcttttgtgactatcctttagttgttgtagccatatcaatttcatattaaatcaatgtcacctgattatcccgtaagggaagacaaggagattgattttgttcctgttgtacagcctattgtgttgttgcggttgattctgctgggaggcaaattcccatgtcctttttggaaagagtaaaagaagattttaacaagcgatatggtggtggaaaggctgcaactgctcaagcaaacagcttgaataaggagtttgggt

SEQ ID NO: 154451 - DNA, 774 bp, Arabidopsis thaliana landsberg; identical to SEQ ID NO: 39331

SEQ ID NO: 154452 - DNA, 759 bp, Arabidopsis thaliana landsberg
gaaatttatttcgtgaagaaatcagacaagcgaagctggcaaaccctaccacgaagccagtaccctaaaccattgattttccatgatggccgtctcgcgatcaaaccaaccctaatgaacactttggtcttgttcatgtggggtcctttcgcagccgcagccgcagcagccagactcttcgtctctctttgcatcccttactctttatcaatcccgatccttgccttttccggttgcagactaaccgtcactaacgactacgtttcatctcaaaaacaaaaaccaagtcaacgcaaaggttgtctctttgtatgtaaccataggactttattggaccctctctatgttgcattcgctttgagaaagaaaaacatcaaaactgtaacgtatagtttgagtagggtatctgagattttggctccgatcaagacggtgagactgacccgtgaatgagtaaacctcgatgaattatttattcatgtgtcaacataaggaaattagtattggtccgtaaaaaagtacccacttccatagaaccatacctgcataggagtagtccctacttccacaagactaagtgattgtcatcgttcccgtggctgtgacggtacacgtgaccttcttctacggtacaacggcgagtggtcttaaggcacttgacccgcttttcttcctcttggatccgtatccaacctacaccatcctatttctcgaccctgtctccggtgccacgtgccaagatcctgatggaaagccgaa

SEQ ID NO: 154453 - DNA, 1148 bp, Arabidopsis thaliana landsberg
  unsure (1)..(1148): unsure at all n locations
ctataaagtataaattctgcttaatactatatggtacttgtactacttatatttaacttcattcgatgttaatgttaataattatcttctcagggaataagtatgcgtgagatgacatgtcactcgtttactcattgtctgacagactggattcgcactagttatttttagacgtttcttgaaacatttgttttgtttgtttgcattagtcatcattaattccacgtaagcagcgtcgacttaaatcaataaaacaaacgaaaaaaaatggtgacgtttcagtttcaggtcgtatttataagttttcgtaacaaagcagtagtggaagtctttgttcattgtcgttgttgcagcacaagttacagtgtctgagttttcattatctactaggttgatgcggttcactcggctttgaaatcgatgggattcgagaaggtggagattgtggtggcggaaacaggttgggcgtcaagaggggacgctaacgaggttggagcaagcgtggataacgccaaagcgtacaacggaaacctaatagctcatctaaggtctatggttggcacacctctcatgcctggaaaacctgttgacacttacattttcgcactgtatgatgagaatctaaagcctggaccatcttcagaacgggctttcgggcttttcaaaactgatctttccatggtctatgatgttggccttgccaagagtagcagcagtagtcaggttagatactagaagttgtggtttttatttagggaaagtaatttattataacatgtaaacgcaaatgcagataaataacaatgttttaatttgtgaggttatgttttgatcataaaattagacaccatcaggaaaagtgacatcgtcggngtggttgtgtaccaaagaagggtgcaacgaatgaggagttacaagcgagcttggattggagcgtgcggacatggaatagactgtggtgcgatacaaccaggaggggcttgtttcgagccgacaatgtggtctctcacgcagcatatgccatgaatatgtattttcagaaatctcctaagcagcctacagactgcgatttctctaaaaccgcaacagtcacttcccaaaaccctagtaagaatttattacccgttactttcacaccctaccaatgg

SEQ ID NO: 154454 - DNA, 1683 bp, Arabidopsis thaliana landsberg
caaactgctgagaagaataaaggattgggtgattggatgaacattataaagcctgttaatgaggagaaagatcattgggtaggttttttttttttggaagaaaaacacatttctcttgtagtcaaagtaaaagggctagggtagttttggtgattagttacatcacttgattcttattttcttgcttagctgtggtatgttgttctcattccatgttatttttggctttaggtacctgatgaagctgtttctaagtgcacatcatgtggttcagatttcggtgcatttatacgaagggtattattttccccgatctaacaatctgaattaaatttttggccatgttgggactatcaaaccttatggattttttattttctagcaccactgcaggaattgtggtgacgtcttctgtgacaagtgtactcaaggcaggattgctctcactgctgaggataatgctcctcaagtccgtgtttgtgaccggtgcatggtatgcttatctgtctgtttatttttccttaagttgagaaatcatgttccgttgattcctgagaatgtagctttaagttaatttgaactggtatcttgtcttttatgcgtatgcctctaagttcaatctgtttctggatgtgcaggcagaagtgtcacaaaggttgagtaatgccaaggaaaccactggcaggaatgtgagcctgcagagccatgaagaccttgctagaaagttacaggtgagctaatcgtccttggttctttattaagtttaatgatttacaagttgagttaatatcttgggcaaagtatataattgttttctgatggcggatatgtttgatacaggaggaaatggagagaaaccgcaagtcttcgtctggtaatttttcatatctaatatacttatgtttatgatatattgtttctggtattttatggttgctgacaatgatagctatgattctaacaggtttgagggaaggatctgggaggcggatgaaagaagtagcttgtccaacatgcactgtgcacttacaggttagatcctttgatagcatgtctttcgttgtatgattttgggacccaattttttctagaataaggaaaacagggaggtcctcataatcacttgtgtcagtgtgtatgatcatcttgcaaactacattgacgaaatagaatagctagagaaatgtttatgtcttacgtgagacctctagtattaaacagttacatatggtcgatgtgattttctattaagattggatcatggagattgtcgcttaatcatctgaataaatagttaaagcaagttgatagataactcgaggcagattggaatttgaagttggcttgtttgtagtgtctcttgatagtatgcgtttatgagagcattgccatttaaattgcaggtccaggttccagtctcaggatcagagaccattgagtgcggagtttgccaaaaccctttcctcgttagcgcacattgatcttcctacccgcttttttgcttgacatatatatcaattataagtatgagatttggttcatttggttattgaattgggtttgatcacatcaaaataagttcttgtcctgtctcatgtggatggtgtttcccctttgtgtgtatatgaaagtcttttgagtgatgaacatcttatacttttcatgtagtctgttgtcctactg

SEQ ID NO: 154455 - DNA, 931 bp, Arabidopsis thaliana landsberg
tgttgaaatcctctgtttctttcgaatgtggagaagaagagaggaaagagttaagtagaagaatcgaagagaagctagagaaagcaaatgtgggtgatctcttgatcagagctccagagggaggtgaaacagtctatgacattgacattgttgaaaccttaatcgatgagtttgttacacaaacagagaaaagagacgagcttgactgttcagacgacatcaacgacagttcaaaagcaaatgtcgccaagttaatcgatggaaacttagctgaaatctccagaatcgaaaccaatttgtctactacaaagttcattacaattgcagaaaaggtttcaactttcccaagacaatcacacgatggtgtgtatcgtgccattgacatgttcttgaaggtaatgtccgctctcaaatgcatcggatttatgtcattcgaaactaaagttttgatcttttgattatacagcaacatccaggaataacaaagagtgagaagaaatcatcaagccgattaatggattgccggaaattatcgccggaggcttgtgctcacgccgtgcaaaacgagaggttaccattacgagtcgttgtacaaatcctcttcttcgagcaagttcgtgccacaacgaaaccttctcttccaccgagcggctcgcacgggagctcaagaacgacaacagaagaagagtgtgagtcagtcacagccacggaggagacgacaactacgacgagagacaagacgagtagttctgagaagacgaaagcaaaaggagttgtaatgtctcggattttctcgaagctttggacaggtaaagataaagatggcgttggagatgttagtagctcagatacatctgaaagtcctggctcagttactaccgtcggtgataaatcgacgccgtcgactcgccggagaaggtcatcgtcttga

SEQ ID NO: 154456 - DNA, 766 bp, Arabidopsis thaliana landsberg
ataaaatttatggcatatgcaacaggaataacgtatgcctcaaggagtattttgcctatttgttccagaaccttcttatctccattgcgtgtgccttctttactcgtccttcctgagaaaccatctgcaactttcttcagaaggggccaaggtcctcaccttagatttttttgtactactactcagtactgttctgtggagagatcaatacattctactcgatctaccgagacagagaatcaagctgtttttcggcctaacgtagtccatatactagaagaacgaggtctgctccagtcaatcacaagcgagaatggcaggttattttgttctgatcctaatgtagctactttaagggtctactgtgggtttgatccaacggctgagagtttacacttgggtaatctacttggtatcattgtgctttcttggtttcaaagatgtggacaataaaccgttggtttaattggtggtgccacgggacgggttggtgacccatctggtaaaagcttaaaaagacctgagcttgacgctgatacactggagaaaaatattgcggggattacaaaaatcattatcaagattctaggtagtaatccgagtcccggtggctcttacgtgatttttaataactatgactggtggaaagatatgacaatgctcgactttctgaacatagtcggtaggtttgctagggttggtactatgatggcaaaggagagtgtgaagaagagattagaatcagagcaaggtatgagcttcaccg

SEQ ID NO: 154457 - DNA, 1680 bp, Arabidopsis thaliana landsberg; identical to SEQ ID NO: 8856

SEQ ID NO: 154458 - DNA, 944 bp, Arabidopsis thaliana landsberg
atggctattcatgtgcgcctcctccttcatctgcgcatgcgcagaatcctaatcccgcgccttattcatcatccttgtactctgcacctccttatagtagcggaggatgatccatacctccttcgtatgagaaaccgtcagtgaaatttgatgaatttggttatgacggttataaccggagcagatcggatttaggatgtgatctatacggaaaacgatctgatagcggagaatatcctgcttttgaagattcctatggcgagggcgtttatgcttatcaaggaggcaaagttgagccatacggatctcgtggaactgcgccgaaatcatcgaattcgacattgttcgatgattatggacgatccattagcttttcttcttcagggagagattcttctgttagctcgaattctgctaagatcgtgagagctgttcctaaggctgatgtgcaggaagattccactggtggtgtgcagaaatttcgtgtcaaattgttggctgagacttatggacaaaccacaacagatgttctttgtcaggtaatgtccccaattcaatttgaactttgtattacctaaactagttttagtgaattggttttgtgctagcagattggtttggatggtcttcgtatgcttgatccaagtactagccgaactttgagaatatatcctcttgagaacatcacaagatgcgaagtaagagattatctaccttcttcttatgactgaatttgttccatttttgtgactggaggtcttatctattgttgtaaatgtctttctatcagaaactagattcgtctattctggctttctggtctaagactccggtagacattgaagctaaacgtatcagattgcaatcaaacagccacaccaccaacacccttctggacactgaacgactgcaatgattcaggttcataaaattacaaattttgt

SEQ ID NO: 154459 - DNA, 625 bp, Arabidopsis thaliana landsberg
gttgttttatctcctccgtaggcacaaaagtgacgtttaataaaccaatagggagtgtgagtggtatcgggccccaaatttttcgggtgtccaatgccatgtggtgttcagataacaagaatggaacatatcaaagtcctctccagtaacgttgagtaccttgcttcaagggatccaacaatcatgggaagtcgtaacgggcatgctcctttgttcctctggtacaccttaaacagaaaaggttacaaaggattccagaaagaagttcagaaatgcttgagaaacgcgcattacctcaaagaccgacttcgtgaagctgggattagcgccatgcttaatgagcttagcagcactgtggtctttgaacggcctaaagatgaagagtttgttagaaggtggcagcttgcttgccaaggtgatatagctcatgtggtggttatgccaagtgttacaatcgagaagcttgataatttcctgaaagaccttgtcaaacacagattgatctggtacgaggatggatctcagcctccttgccttgcatcggaggtaggaaccaacaactgcatctgtccagctcacaagtgacggcaccatttctcatttgttggtattgttgttttctagt

SEQ ID NO: 154460 - DNA, 789 bp, Arabidopsis thaliana landsberg; identical to SEQ ID NO: 13411

SEQ ID NO: 154461 - DNA, 835 bp, Arabidopsis thaliana landsberg
gatagtacatccagggttcgatcttctgttgatagaaaaaggtaacagggacctgtgataaatgaagagtatagtggtgtaggtgttagtggaagggacattaatctaacatgatctgtcgatacaaaagagcccatcaagccaaaggatgaaggaggagaggaacaggatgcagaaaaatccaaaaaagcatctgacgttcatttaaacattcgattacctgatggtagtagccttcaggagaagttttctgtgacaagtatattgagaatggtcaaggattatgtgagcagtaatcaaacaatcggactgggtgcttatgatcttgcggttccttacccacgtaaggtgtatactgaccaaggtacgtaaaatctacaatgcatccaatagatttttatttttatttggtaaagaacattttaccttaaaaccagcttcatcttgatcgaagatgatgttttctgccatttaggttttttttttttttttttctggtcagtttggactagtgtagtagatacataactccattactcttaatctctgcagatctggataagtctctatccgagttgagattgttcgatagacaagcacttgtagtagttccgcgaaaaagagcaaccgtctatcaaagaggaacatcttactcggagtctaacaacaacacagaccctaatagtggcggttactttgcttatgttagaagagtactgtcttatgcaaacccgttttcatattttggcggtggtactgccaacgaatcaagctctgttccagaacgtcaaacaagtatgcgggaatatgatgagtttataaaatccattccaat

SEQ ID NO: 154462 - DNA, 395 bp, Arabidopsis thaliana landsberg
ggcaagtcttcttttcacttctatgtaaacatctttccctctctgatgtgaaaactcaactcttgtgaatgtgtatctgcagggtgttgagcttcagttgaggagacttgaagggttggtgctgtcgattcgtgagaacttaaactatataaaagacaggtgtgtttctttcgccttgctgcgattaagtggtatctattgaacttcgggaaacaagaacatagtgataaaacgaaaactttggatgcagggaagcggagatgcgagaagtgagtgaaacaaccaactcaagagtggcttggttcagtataatgtcactcggggtttgcgttgtggttgcgggttcacagatactgtatctgaagaggtatttccacaagaagaaacttatctag

SEQ ID NO: 154463 - DNA, 492 bp, Arabidopsis thaliana landsberg
  unsure (1)..(492): unsure at all n locations
atgaacgtgagccggccggcgattcacgcggttgatgctcttccggtggctcctactgccggagcgatcgatagaccaccagtgaggatgaaggatgtgcaaggcatgcccggaaccaccggcggtctcatcctccgtctctctcagttcgttcccgctcttatctccgtctccgtcatggtcactacctccgacttccgctccgccaccgcattctggtaactgaactctagagttagggatttagaatttgatgaatttagattctggaaactttagggtttttggtagtctctttgataacagttctatggaaatttggtgtttttctcatcgaatttgtttgttgttggtgtgtaattaggggtttgagatgaaattaggcttcttggttttgaaattagtggtttgagttcatgtttaatctgcatagcatcagaatttggatttagttngagcaacttggtttagactatatgaatctgacaagct

SEQ ID NO: 154464 - DNA, 1121 bp, Arabidopsis thaliana landsberg
ctcagtgaattcatcaagactgatgcatatagaatggaagtaacacagagacctccaatggctgtgacgaatgctgtctcctggatgagtgagggaatgcagtacaagaagaatgaagtgagtgcctttgttttcgcaagataggaatatgtttctgatgtttcggttggcaaataatgacaacctgcttctttttccaggttttcttggatgttattgagaatgtaaatattcttgtcaccagtaatggtcaaattgtcaggtctgatgatgttggagcgctgaatatgcggacttccttgacgtatgtcagctcatcaaattttcgatatagttcctaatcagccaaagcatgttaaatcacgtcccttttgcatgttaaatcacgtccctttttgactcttttgctctttgatccattctattgcagtggaatgccagagtgtaagttaggactgaatgatagagtattgctggaagcgcagggacgagcaactaagggaaaagccattgatttggaggacatcaaatttcatcagtacgtctttaagtttttattatattgaaacttggaaagtcttcactgatcttaacccttctattttctttttgttcaaaaagattatatacttgagttttatgtattctcttcttcaacaaccatttatttaatgcaggtgtgttcgattggcccgttttgaaaacgataggacgatatctttcataccacctgatggggcttttgatctgatgacatatagactcagcactcaggtttgacatgtgggatatagcatctactggaattgttccacgtcttcaacaagtaaatatcatgatttgtttcttttatgttcaggtaaagccacttatatgggtggaagcacaaatagaaagtcattcaagaagtcgtgttgagatgctcataaaagctagaagtcagttcagggaacgaagggaaatatattctatggtatttgtgccactttccttttttgtcttactgtcatgcaaagatcctgattgatcagattctttaaacctttgatcacgaacattctttttgtagcacccgcacgaacgttgagattgagttgcctgtaccaaccgatgcatctaac

SEQ ID NO: 154465 - DNA, 2036 bp, Arabidopsis thaliana landsberg
gaaattaaagcagaataattagaactcgtggcgcttgagcagcgccagtctttgtcaatagttagattcctagatgtcggaataagacgcgtgtgtcagtttcaacctttaaaagtctttaaagacttgtgactcttttttcactctacgcgcaatatagcgcgtgaaggtctacgctcctttcttcaaatttctttgattcaattgtgtgtgattttatttgtatgtagtaggacgttcatgggaatctcttcggcctcctagctgcccatccgataactccgtttgtattgatgcacaatcttgacgttgtggagccgatttttccaaacatgactcgtgttcgcgctatcaagtaactaaccacaccgatgaagattgattcggctgcgcttctccaacaatcaatatgttatgacaaacacaaaagctggactatttcagtctcgtggggatttgcggtccaggtgttccgtggatcattctctccccgggaaatggaaatgccatctagaactttcttgaattggtacaaaagagcggattacaccgcctacgcattcaatactaggcccgtgagtcgcaatcattgacaaaaaccgtttgtttttcacatgtcgagtgcaaaatttgacccgcagttgaacacgacggttagcgaatacacgagacatcgggttccgcaaccggcttgtcgatgggatatggttaaaccggaggagatcaacactatagtcgtctacaaaaaaaccgatcctcacctatggaaccgagtaagtgatattttgtttttgtttttgacagattcatttttgaaaattttaagttaatatgttaatgcttagtaaattattgtactttttttggcagcaacttacaccaaactgttgcagagtattacaaacaaagaggaataatacattatggatcaatgttggtgtatgtagagcaggtgaagtcactgaagtaaagtaatttctattttgtactaagaaaattttgaaagagaaaaataattaggggttttttttgttaggctttttaaccatatagttttgctgattattttatttttcctcataatttcatttattaagttccaaatctcaatttcttccatttgtagtccgtaaacttgttgtgtccccctaccaagtttcatataggaccataactacacagattttggatctcgctttcagtccacataaaccgaaagttaaactcaagtttactcctaaatcaaaagttctagtccttaatctccatattttcgaatttcgtggtttattattggttcagtgtactgaaccgatatgaaaccaaaaccaatttggctaaaccgaattgaaactcggtttgggttaaaatcctgtaatcacattcaattccctactatcattgcaattcgtgaattgaattctatataagagaaacaaattcgaagaagaaggactttttagcgcgtttgggatcgatgctccaaagctcagagagtttttcaagaggcatagctttcttagcgtccatgatttcacctgaatacatggcgcatccagcgtcaacggaattgttgtgacggtggcgaggacgagaggaagaatgaggaggattagcagcaccggaaacagagttggaggagagggaggcgtttgggaagtgattagaggtgaggctatcgacgtcgatgaaagaagaaaagagatcgtcgtcgggggaggtcggcggagggaagtggtgcggcggaggagaggggatccatgaacatgaacattgacatcgtcggagctagatcgacggtggaaggaagaagacggaatcagatcggcattaggactgggatgtgaaattggatcggaggggatgatagtggcgggcttggtagtggtggtggaggatctgatttctccattatttcaggtggattttgagaatttgagagatggaagttttgtgtgtgtgaattattattattctcaattgagaacactgtcaatggagataatgatggggatgaagaagacgaagctctttct

SEQ ID NO: 154466 - DNA, 622 bp, Arabidopsis thaliana landsberg
acaatggcagcaatcaccgttgactttcagttctgcttcattttcatcctcctatggctcttctcactcttctgtctctctgctttcttcttcaagaaaccaaaagacccacaacttcaaggctgtggtctacctccgagcccaccgtctctaccggtcattggtcatcttcaccttctcctctctgttccatgttacaaatcctttcagaaactctcctccaagtatggtcccctccttcacctccgcgctttcaatatcccaatagttctagtctcgtcgggctccatggccaacgaagttttgaggatccaagacctgaactttggtagccgtaataacgggcaggctcctataatggaaaaatcattactttttggatcttttggctttgtctcagttccttatggagattactggagattcatgaagaagctcttagtcaaaaaacttctcgggtctcattccctcgagcagacacggctcctccgtgggaaagaactccaaactttccgtgctatgttgtttgataaggcggcaaagaatgagactgttgacgttgggaaagagatgatgaagctaaccaacaacagcatttgcaggatgacaatgggaggagctg

SEQ ID NO: 154467 - DNA, 606 bp, Arabidopsis thaliana landsberg
ctgatcttcatctatcacccaaggaagtcatgatgtaccaagaagcagcactcctcttagctctcctcttcatctcttcgaatgtcgtcttatcggccccagtccgcgatggtagtaactctagttaaagctcatttcaactcaaatccgagattataaattaacatttcttaatattttttgcttcaggtttattaccaaacggcaacttcgagttgggtcctaaaccctcccaaatgaaaggatccgtggttaaggaacgaaccgccgtaccaaactggaacataatcggctttgtggagttcattaaatccggtcagaaacaagatgacatggtcttggtcgtaccgcagggttcctccgccgttagactaggcaacgaagcctcaatctcccagaaaatatccgtcctacctggccgtctgtactcaataacgttcagcgccgctcgaacctgcgctcaagacgagaggctcaatatatccgtgacgcatgagtcaggtgtgatccctatccagacgatgtacggcagcgatggttgggactcatactcatgggcttttaaagctggtggtcccgaaatcgagatcctgttccataaccctg

SEQ ID NO: 154468 - DNA, 500 bp, Arabidopsis thaliana landsberg
  unsure (1)..(500): unsure at all n locations
caaatgtttggtgttgcgatgagaacattaatctcaccatctcttgctcccttctctcttcatctccataaaccctctctcttctccaccgctcttcgcttctccttctcaatcaacaacataacccccacaaattcacctccttccaccatttccaccagaaagctacaaacgaaagcgacgagggtaacatcatcatcatcatctcagccgctctcctcctcatctcccggcgaaatccacgtcgtagtcggtccaatgttctccggtaaaacaacaacacttctccgccgtatactcgccgaaagagaaaccggtaaaagaatcgcaatcatcaaatccaacaaagacacaagatactgcaccgaatcaatagttactcacgacggtgagaaatacccttgctggtcactccccgatctctcgtccttcaaagagagattcngattcgacgactacgagaatcgattagatgtgaatggaatcgacgaagctcaatt

SEQ ID NO: 154469 - DNA, 3496 bp, Arabidopsis thaliana landsberg
gtcatgcattgactaattaagggttactaattttttctgacaaaacatatagagcgattcatatggagacaacagctgctacaatcttgactgtccaggctttgttcaagtgaataaagatattgcccttggtgcagccctcaacactatctcgacctacaatggtacccaatatgatttccttctaactattgagaaggtataatttatctacaagtactgaacaaacacaacttatagcagtttcaaaaagagtgtcatcactaaattgagctactatacctattttaggaacaagataccggactttggtggcttaagtttgatactcatctagtcggatactggccaagctttctagtcccgaagctagcagactcagcacggatgatcgcttggggaggtgaaattgtgtatgatgctagtggccaaaatgaacatacgcttacgcaaatggggagtggccatttcgcggaagaaggatttaagaaggcggcttatatcaataacatagagtacatcgataaatctaatcatccgatcaaaccctttcctcaaaatcttgaagcttctgttactcggcctgaatgctataacctcaaggttggctctagccgaaggtggggaacttacattttctatggtggacctggacgtaaccctcaatgcctatgaaaagtgacatgatttttcgaaatttctttagaaaatgtttgggacaacccttgtgattgaacttaatagcgttctaaagatgtaaactatttaagactaataaatggttttgcatttgagataaaacaaaaaagatcatatcaatattttaataagcaacacgtttttcttgttaggtcataaaacgtaacaagtcggtgtcactaatttacttatcaagtgataccttgcacgatttgtaacttgcagaaaaaagaagatagaaggatatgataaaattttatgcatatgtagaaaaaaaccttgcacgacaccttccgttagatcgatcagctttgacttatacgtttaaatttgcgtttttgtcattcacagagaagaatatgctttacacttatcctctctttcttatttctatattcttgatgagtaaagtaattgacaccaagatactgcatttctatataacccatgactacaagtttcctctgttttaacaaaaaacgaaaaaaacaaacaagtttcctctgtttaaatatcaatcttcctgtttatgttccgctatcccaaaaaatgggaaactgcctttcaacctctgatccatctcatgaagatgtatcaaagaagcttcccaaagcacttcccgtcgatgctgcattcaagtttccttcaccgttacctaattttactcgaggtttgtattatcatcggttcttactgatctctctctctctctgtctcccaattagttttgataatcttgatttcacttgcatcatcaggtgatggttttgcgaaaggaaccattgacttaggaggtggtctcgaagttagtcaagtttcgacattcaacaaagtttggtccacttatgaaggaggaccagacaatctcggagctacattctttgaaccatcctcaatccctgccggtttctccatccttggctactacgctcaaccaaacaaccgtaaacttttcggctgggtactcacagctagagatctgtcaagcaacaccttaaaaccaccagtagattacaccctcgtaggaaacaccgagtcactcaaaataaaacaagatggaaccggatacttctggcaacccgttcctcctgatggatatcaagccgttggcctaatagtcacaaactcctcacaaaaaccacctttagacaaactacgctgcatccgatccgatttaaccgaacaatgtgaagctgatacatggatatggggcacaaacggagtcaacatctcaaatctaaaaccaaccacaagaggaacacaagctacaggagtctatgtaggtacatttacatggcaaacccaaaactcctcgcctccatcattatcttgcttaaagaacacgaaactcgacttctctacaatgccaaatgggtcccaaatcgaagaattgttccaaactttttctccatgtatctatttccatccagacgaagaatatctaccttcctctgtcacttggtacttcaacaacggagcattactatacaagaaaggcgaagaatcgaaaccaatccctatcgaatcaaacggttctaatcttccacaaggaggatcaaacgatggatcatactggctagatcttcctatagacaaaaatggtaaagagagagtcaaaaaaggagacttacaaagcacaaaagtgtaccttcatatcaaaccaatgctcggagcaacattcacagatatatcaatctggatattttaccctttcaatggaccagcaaaagccaaggtcaaattcgtaaatctaccgttgggtagaatcggagaacacattggagattgggaacacacgacgctacggatcagtaatttcaccggagagctttggagagtgttcttatcgcagcatagtggtggaatttggatcgatgcttgcgatttggagttccaagacggaggaaataacaagtttgtggcgtacgcatcgctacatggacacgcgatgtatccgaaacctgggttggtgttgcaaggagacgatggggttgggattaggaatgatacggggaaaggtaagaaggtgcttgatacggggttagggtatgaggtgattgcggcggagtatgacggcggaggagtggtggagccgccgtgggttaagtatttcaggaagtgggggccgaagattgattataatcttgatgatgaagttaagagtgtggagaggatattgcctgggcttttgaaaaaggcttttgttaaatttgtgaagaagattcctgatgaagtttatggtgaagatgggcctactgggcctaaacttaagagtaattgggctggtgatgaaagttgatgaaatattggtttgtttgtttggtttgattctttgtatataaaattcttcctaaaccttaatgtaaaactactatgttttatatgtaaataaattaacattgtgtggctaggtaaaattttttttattggaaactgatttgtttcataaattcataataaaacccttcagatacaatcataagccaaaaaagaaaaccaaaagtacaattaagttctacaagaagtttatgaaaggaaaaacaaatattttctttttctatataatcaaatcattcactatgactcatacgattttgtagcttttttctcaaaattttagaaatccagagatccacattgtttgctctctatagattttgctacagatccaggcttctttgtttccttgttatgatcaccatttacgcctcgaggtcttccaatacccatcttaggcaaaccacggttcagtccttccagcaaaacacaagctttacaccatttctgcatatcattt

SEQ ID NO: 154470 - DNA, 2609 bp, Arabidopsis thaliana landsberg
  unsure (1)..(2609): unsure at all n locations
aacacaaacttaacaagaggcacgcaaggtgggtttagttttttgagacatttccgtatgtcataaaggataagaaaggtaaggataatgtcgtggccgacgcattgtctcggaggtataccttattctcaactcttgatgctaagcttttgggttttgaacaaattaaagaactctatgattctgactcggattttcaagacatatataaggcttgtgctaagtttgcttcaggtctctactataagcaagacgggttcctcttttatgggaactgcttgtgtgttcctaattgttctcttcgagatttgtttgttagggaagcacatggaagaggacttattggacattttggagtcgccaaaactcttgaggtaatgagggatcatttccattggcctcacatggtaagggacgttgaacatatatgtggaaggtgagtcacatgtaaaaaagctaagtccaaagtccaacggaacggtttgtatactcctttgcctattccttctcatccttgcactgacatttcaatggattttgtacttggtttgcctagtactaaaaccggaaaggattcaatctttgttgtagttgataggttttctaagatggctcatttcattgcctgtcataaaacctatgatgcatctcttggttctaattttttctttagggaaattgttcgtttcactacaagtaatatgagtattgatagcacattacgatagcgcagtttccgtaactgctattaaagatggtctttggattttggtaactatatcatagcatttcagaaacgttaagcccaattatagcagagcgggatgctaaaatcagtttggaccgccaatatttagcaaaaaaaattagatctacctcttcacacttaaaaaaaaagggggaaaaaaaatcttatgacctaggtcttttctaatttattttctaagtcgttgaaggtctcttcttcttcactaactaagttctctcattctatcagatccactaatctgaaccaccgcctagcctcttacgtcttattcccttgccttgtctcgtctccttcgtcttttattgctttcagcctataaaggtaccaacatcctagcttgtctcctttctcctttgtctctctctcgttaattcaatctccagctatgctttcactgtaccagctcctgctttaaccaattatcaggtctcctttggtttctccgccggttcttaaaagccccttcttttggcgattaaaggctagatctatgatgtatcatagagaaggtatacttaagaatctttattacttctaaattagggttgaatccttattatcactactaatcacattcataatttaagccaataatttcgagatttggggtttaggtccgttttaaggtttgagagaggtggcttagacggattttggggagagaggcgagttgagagggttgagatgacgagtttgggttctcgctcaggcgtcggtgaagcttttctcggtggtgtgggtgaagcgtgctgggttcttgactatattaattgctcctgaccaaattggacgaacgacttcttaaatcattcatcactaccagaagacgaagacttgttttgtttttctccgtaactgaagatgtttccataatcatcttacttttgcatcttagaatggattttttttcccaatctacaaacaagtaattttctgtttaagtttttgttggatttcttaatatctttaccttaatttatgaaattgaacaaatcttattgatttgctgatagtttagtgtaaagtctttgactttagcagtttcattgaacaagtctatatgtatttgagattggatttcggattttgttgaaagaaagtaataagttataaactttatttggcagcttgtagctcttctttgaggaacgactcgttggatgctcctctgcttctgtctaacaactcatacgtcttcactgcanacaaatgcgtaagtgtacttgtgacgctttgaagaattggacgttaaaggattgataaatctcgtgtgtttgtcccataggataagcttgttcttttttcttctttttctagattctgatggttttggttttgtatcttgtgatcagtttaagctgtcaatcatcatctgagattaagccttcgaactggcaaacctgcccaccattttcacaatgtgatggagctttgcttaacgcctcttgcagacaacctcgtgattgcgtctatgctggttactccaaccaaaccatcttcaccacagcttccccagcttgtccaggtttgtttgatccaagtttctgcgcatttggttatagtgtagtgtaattaagtgacttaataacctggttactctctgatatgaacagattctgctggtcctgataactatgcatcaacgctcagctcaagcttcaatttcgtgattgtgttgattcagtgtgctctgctttgtctctgccttctctagtaatgttttgttgtgtgtttatgagtgtgtatctaagtacagttcggattaaaataaagacattgtttcacctgaagcatcacgtccttgtaccatttttatattggaaacatttcagcttttgac

SEQ ID NO: 154471 - DNA, 1115 bp, Arabidopsis thaliana landsberg; identical to SEQ ID NO: 28438

SEQ ID NO: 154472 - DNA, 1149 bp, Arabidopsis thaliana landsberg; identical to SEQ ID NO: 9480
  unsure (1)..(1149): unsure at all n locations

SEQ ID NO: 154473 - DNA, 1294 bp, Arabidopsis thaliana landsberg
tggccgcccggatgtcggctacaatccgagtacagaggaccacgtatatacatagcgaagctgcataccgagctattcttctgtttcctgaggatgaacctaaaactccatccgatcaagtggaatgctgatgaaaatggaagcatacggtgtgcgccaaaagagctaggagattgcggggactctttgctggagcttaagcgaatcttaccagtgacttggatgtcagatttggagcaaaaggcatgaaacattcttagcctcttatagtatcaaaccgccaatgtcatattgtagatgttcttctgatatgagtagtacgaagaggaaggctgcttcgagggacggatctagtgacaattacgtttactctcctgattctcgggatgtcctgaagcaagtagaactactgcatgtccaagagcattggtcaaaaggtgatcccagtgaattgtcggatattgctcttaacatcatcagctggtttaagctgggagccaatggtaatgtagcgggctttatgtgagaatgttgattcagcaattagctctaatatgtctgatgtcaaagctatcgattgtttagctaattgtgaggtagaaactcattttcttataaagtttctatagctgtataagaggttataaagctcattttgtttcttgttatttcaggtgaagataaatactctatgtttctttgaaggatatagcaaaggaagaacatatgaaaacttctggcctgagatgctgaagctgaaggattggcctccttcagacaagtttgaaaaccttttacctcgtcactgcgatgagttcatttccgcattaccatttcaagaatacagcgatcctagatcaggaattctcaacattgctacaaaacttcctgaaggacttcttaaaccagatcttggtccaaaaacttatgttgcatatgggacttcagatgagctcggtagaggagattcagtcactaagcttcactgtgatatgtcagatgctgtaagtttcagaattgttacttagtactgttaaataataatacggtttctcaggtgtataacggttttttgtttttgtaggttaatattctgatgcatactgctgaagtaacactaagtgaggagcaaaggtctgcaattgcagatttgaaacagaaacataagcaacagaatgagaaagagcttcaggagcaaaatggtttagaggaagaagaggttgtgagtgatgagattgtggtttatgatgaaacaagtggtgccactatgggacatttttaaaggagaatttgc

SEQ ID NO: 154474 - DNA, 7061 bp, Arabidopsis thaliana landsberg
  unsure (1)..(7061): unsure at all n locations
catatactggtaacatatttagctccggcggacgcgtactatagggcgctacaggccgtggtgcggagtacaacgacggcggcatcaacctatctgtgagctcgtcgccaatcttcagcggtggcaacggattcagttaagggaggatcgatctctaaacacaagtcctccttcatgacagactcagtagccattgatgcctgagaacccaacctctccaacggatctcccatttgatctccgtatcagcttgggagaaaatccgcgggaaatggggtttagggtttttggatcggattctctatactctctccttcaaggatatgaagaagaagattggggaagaaatctgatgatagtaatttgttttgcctttctaagcgatttttattagtatattcttagtgctccgattagttgttaagtattagagtatagcacatagaatgaaattaaatatctgttaagacaaaatgaaattatagtataatttatgttttggaaaaaataaaacagtatattctgactaggcttgtaccgcgatttaataaaaatattatacttaaagacttacgtttatatgatttgttaatttgatagtggagttcttatatgaaattgaaattgatttttcggttaggtttaaattagaattgattttggtttcggtttacactggttaagagaagaaatcaaaaacaattgcacgcgatggggatttcagagaggagtgcgtagattaaaaaaggcatgatttccaaggggggtacacccacagaagtgctctcacgcgctcaacgctcactttgtgagagtgggggtgaaatacagccttctgattggttgaaaaactctaaaaaaagtgaaatagtatacatgttgctagttccatattagtttttcgtcttcttctctcaatctgatgaaagttgttgtttttaggtacaattcattctatacaaaacaattttgacgtctctcaatcccattttagatacaattgattctatttcaggttttggggttatttctcaaatcgattcctgtcaccaaaatcaaaatctgaaagcaaatggttgatgaggatcacttggaagattttgtctgtgtttgactatggagttgcacataaatggttaggggatcagaggaataagccgactcaggaagtttcttctgctttcaccgggcaagctcaacatccttgtaagttcccttctcctgctaaagacattcgtagattgactatgcttttttttattgaattttctacacattggaatcttcaccaatcttgaaattctacatatcacattagctcgtatccttgcaagtttcttatccgatagaacaatcttcgaaccattctgccacacttttatcaggtttctatatatgtttggtcttaggattgaatggtttagacttttggtggttttgcctcgaatgatcagctatctgtctattccatacatgtaatgtgaaggcttacggttttttgttgaaccatatagtgatgcttgttgatctcatgtaagttttccatctattaggcaagatctgttatatgttaacatagttaagattaccagcaccggaggaaatcgcgtcactggttgcttttctttgccttcctgcagcctcctacactacaagacaggaagagctaaaagcatgcttaaatgattgcaaatccagtggtttagtggtgtctggttcggttagagatcagagggataagttgattcagtggcaagctcaacattcttgtaagttcccttcttctgcaaaatgcttgttaaaactgactctctagttttttctcagcattgtgatcagaatcgtcattgatcttgaaatagtttattgcattagctctgcatccttataagttccttctccatcaaaacatcctcatacaaatctattagctggctacgcttttgtcaggtttcttcattaggtttgtcttagccttgaacggttgagatttgtgttggttttgccttaaatgctctgtaccttagttttatgtcgtttcatcatcatattttttttcttgcagaaatccaaggcatcggatgcaagtgaggaaactatcaatgtactaaattaattgcataaaatccgtaggccatacaatggtttgcttggtgacatatgattattcaatgactttgtgtgcagactacattcgatatcaatgtctttgggacgataactcttacaaagttggtcactcctcatatgctaaaacaaggaggcggtcattttgttgtggtacgtggagactaacgagggatagtttttgttaagtgccctaattttgtggatttgttgaaggattgagcttcatatcatagtttatggatatggatatacattgcgttttttatatgttaaatctaaggcttttaagctatgtatagatagtttaaggtttcttttgtatttttgtcttctgcttgctaaattccaaatcatgttaccgtatacacatcttgagaagtcaaactacggttagctattcttgtatgtgttaattttccatttccttgggttaaatgtcatgattaataattcacgtcagtctatagataagcagtgctgcaggaaaggtaccatcacctggacaggctatatattctgcttcaaaacatgctctgcacggctacttccacagcttgcgttctgaggtatgttaaaagttaaagaaactgtggtgcttgctaattatttggcagctaatgacttattgaaagtcacaatagaaaactcacagctacctcagagttttctgatttgattttttcttttacattccttttcactaattgctgagaatagcaccataaagtaacaattcacagttggttcacaatctgcctatggtttcagttctgtcaggagggaatcaaagtgaccgtcgttattcctggtccaatagaaacgttgaatggtacaggaacatcaacttcggaagacaagaagtctcatgaggttggttaactgattgtgattttgttgtttaagttgtcagttttttgtacttgtacctttcctttaagcaactaatcagtcttgtagacacatagaatcctcttccttttcaacattaggatcttctatctccggcttctttctctttttatttccactcaaagatcttttcttttgctacacagaagcgtgtgtcatctgaatgatatgcagaactgactataatcgccgcgtctcatagcttgaaggaagcttggatttcatatcaggtacttgtttgtcaaaatcgcatatgtttcactcagtttagatgctgatatacgatcttctttttgctatttatcagccagtactgcttgtgatgtatctagtgcagtacatgccttcccttggcttttgctatttagtttctttgcgctcaagaggttttcagatgcagctacgagataaatcggactactgtatatagtaatccaacaggcttttgagcccagtggacttgagttcctagaaaagaaaaaccgaaaagaaagttatgtgatgcgtatattgaagactaatgaaaagcttttggggattcacttgctgccagaaactcacagacaacactcctgccaaagctgtcacaaggctgatcactgttcattctttccttctctgcagatatgtgccggcagtaatttaatttttggtaactgctttctccttcttctcctttactcatttcccctatatttccttccttttatcatcattatatacaaattggtaaatatcatttttagattgtgatcttcgaaaatttattatagatgtcaatagatctaaaagtttatacaagaagaaaaggtgaactcggaaaccgaaaagatggagaaggaaagtcaggaaaactcgaccagacccgatgcttcgtctactgttttctcttcctctaaggtaatatctctctataatccaaatatccaatcctttttctcttatgtgggtgatgcgatatttatacaaattgcagagtacatgcgcaagccctagctatctcaaagaagctggagacttgatcagtaggttgcctgatgatattctccaactaattctctcctatcttccaaccagattggcgatcaaaacttccgttttatccaggcgatggaggcatgtatggtctgatacaccttctctctacattgattgccgtagtgcagacactaactcgataaacaaaaccctagctagatactcagctcccaaaatcatgagtttccatctctgtatccgcaccagggaacacaagattgatatcttgatcgatttcgccaggtctcgcaacatggagaagctatctcttgagtttcttgattatgattttttttattacttgcacatcagggaactcatggtcgatttcctccttaagaaacttgtccttgagttcttgcaaactcactgataaatcatttgctcagattctttcttgttctccactgctcgagagcttgacattgcacactgtcataaacttaagtctattgatctgaccctatcgctacggttaaagagatttgatatagataatccgggactaaagcagattgtggcaccacatatccattgtttgagattgaaacactctaagatacaatatggtttagtgaaatccacgtgtctatttcttccttgtctattaatactatgtgtatgcaatgatcaaattattataacacattatatatttatatattcttataacaaattttctaatttgttagatcaatttttatagaattagaaagaaatttttttttgtagatattcttaaaataaaattgttttatgattataagattggacccatctaaaaaatgatacatatctaaaggagagaaattacgtgtaagcttctcaaaactttttgtttataagaaactttaatatattgtattatataagattcattaactatatactgatgtttaaagatttaatattaactttagttaatattttccttaagtgcaatataatatgttagcatgtatttctcattacaaatcaagaaaatgatgtgagatatttacattatgagtgtatccacaaacaattgataataagaaagttaatatcaatataaataactcctaatcatgtatgttttaaatctcaaacctattcgtagtcgctaacatgttgttccgatttcttcaaacactggctcggttctgccgcttcttgctcatttcggttcttgggttcccgttntctcctttgcttcttcttggttacgtaaaactgcaagacgaaaataagcacaacagggagtcagcacttgcatcagggactgacgcataacaaccagaagcggcagaaaacgtgacatcttcttccattgattttgcggtaaattcagtggtgaaggtcttcaccgtctatagcatgcctagcgttttgcaaccttggcggaattggccgcagcaagaatccggcggctctggtatttgatgtttatccataattcttatcaactcttttaagagtcgcgcgcataagtattttcctaactgatccttggaactgatgtaggatttgtaatctcgggaaaaaagattcttacgaacgctcatgtagttgctgatcacatatttttgcaagttagaaaacatggctcacccacaaaatacaaagcacaagttcgagcgattggacatgaatgtgatttggccattttggagatcgataatgaagagttttgggaggatatgatacctttggaactcggagagataccatctctggatgaatctgtggccgtatttggctatcctactggtaaaatgcttacaaaaaataaacgggtcgaataaataggttaaaacttgcatggactaataatgacttatgttatgcaggtggtgatagcgtttctattactaaaggttatgtttcgagagtcgaatatacaagatatgctcacggaggcactacactactcgctatacaaacagatgcggctataaaccctggaaatagtggtggtccagcaatcataggaaataaaatggcaggtgtagcttttcaaaaagatccatctgcagataatatagggtaagttacgtttaaaccacaaatcttggataattcatctgcttaaatttgcaatattaaaagcataatggtctaggaagtaggaagaaaacgtggaaaagggttttggcttcgaaataatatatttttgtggtttaacttcacttgcagatacataatcccgactccagtaataaaacattttttaactggttttgaagaaaatggacaatatggtggtttctgcacgttagacatttcctatcaacttatggagaattctcaactccgtaatcactttaagatgggtcctgaaatgacagggattcttataaacgaaataaaccctctgtcggatgcttacaaaagattaagaaaagatgacatcattctcgcaattgatgatgttcctataggaaatgatgctaaaggtaatcctacgtttatatatattgtaaaaccattgttaaagtttctccatgtgtgatggataattgagattgtatttgttgcatgcagttgcttttcggaataaggaacgaatcaatttcaatcattttgtttcgatgaagaaattagatgaaacagttttacttaaagttttgagagatgggaaagagcatgagttccacattatggtaaaacccgtaagtcatttcttattatttagtataataattttatatatatcggtttaatttttggttcacattttttctgaacgacttcaaaactcgttttgtggtgaactattggatccaggtgccaccccttgttccagggcatcagtatgataagcttccaagttattacatcttcgcaggctttgtttttgtacctcttacacagccatacattgacagtactttgatttgcaattgtgcaattaaatctatgcctgaaaaggctggtgaacaccttggcataatttctcaggttcgttatctgaactacttacataaaaatatttggcctgcccc

SEQ ID NO: 154475 - DNA, 1143 bp, Arabidopsis thaliana landsberg; identical to SEQ ID NO: 8809

SEQ ID NO: 154476 - DNA, 565 bp, Arabidopsis thaliana landsberg
tgtttattaatcatttttggattctcaatgttcctccaatttactatagggacaattagctgaatagcctttttgataacttaatttgtctttatagcatgtcttcatttctcattcagtaacttacatgcacttttaaaaactgtaaaaccattcttacttgtgaattggcgttaatttagaatttccaataacaataatatgttccagtgaataacaaatattttagaatttttttacacaactatagaaaatttcaatatttccttaaacctgtacattgttgttcatcttccacattgacaattggtcagtttatacatacgaagaaacatggtcacagtagtaatagattcatcatttatgtagtgatgatactaatactatatgatgaccaggttacgaagaggagacgaaagagagagaagcggagatggagataggatttccaacggacgtgaagcacttgagccacatcggagttgatggaaccatgaccactttcgacaacacctcctcatcttttccattctccggtttccatctcaccggcaccgtcgtctga

SEQ ID NO: 154477 - DNA, 458 bp, Arabidopsis thaliana landsberg
  unsure (1)..(458): unsure at all n locations
tgaacaaactgagaatatatgtggagtgattttacctgacatgatnnnnnnnnnnnnnnnnnnnnnnnnattgagaaaacgatgcgaggatcacaagggaatgagagttaacgccttcttttttctgctgaacccaacagaacgtgataaagccgtcaatgaggacaaatccaaacctgagacaagtacaggcatgaaccaagagggttcgggtcttttatgtgaagctacaacaaagaatggattgccttgtacaagaagtgctcctgagggcagcaaaagatgttggcagcacaaagataaaacattgaaccacggatcatctgaaaatgttcagtcagcaactgcaagtcaagtaatttgtggctttaagctgtacaatggatcagcatgcgagaaatctccagtgaaaggaaagaagagatgtgaggagcacaaggngatgagaatcacatctt

SEQ ID NO: 154478 - DNA, 482 bp, Arabidopsis thaliana landsberg
ccaagctccaacaaaatagccaattcccatttttgcccactctcaaaaccttcactcaacttggtggtattggtttaaacttagccgccattaatggaaataatggtggaaatggtaacactagctcaagtttcttgaatgacttagggttttttcatggtggtaacacttcaggtccggtcatgggtaccaacaacgagaataacctaatgacttctcttggatcatccagccactttgctttgttcgatcgaaccatgggattatataatttccctaacgaggtaaatatgggattatcttctattggtgctactagggtttctcaaactgctcaggtgaaaatggaggacaaccatttgggtaatataagccgcccggtttccgggttgacatctccagggaatcaatccaatcaatattggaccggtcaaggtctccccggttcttcatctaacgatcatcatcaccagcatcttatg

SEQ ID NO: 154479 - DNA, 323 bp, Arabidopsis thaliana landsberg
gtgatgaatcccaaagacatagccaatgtcctgtttgtaaatctaaagtatctcattctactttggttcctttgtatggcagaggccgttgtactcttcaggatgaaggtaaaaacagtgtcccccaaagaccaataggcgcggtttatcggcttgaaatgccgaattcaccttatgcaagtactgatcttcggttatcacaacgggttcatttcaatagcccacaggaaggttactaccctgtttcaggggtgatgagttcgaacagtttatcatactctgctgttttggatcctgtgatggtgatggttggagaaaaaggt

SEQ ID NO: 154480 - DNA, 529 bp, Arabidopsis thaliana landsberg
gtttttggcagtcattcaatattttacggtatgaacttggccaaaagtatgattcccactatgatgttttcaacccaacagaatatggaccacaatcaagccaaagggtaaaatccttaaatctatcaaatttatagctttctttagaacccgagacctcatttgattttacgcagattgcctccttcctgttgtacttatctgatgttgaagaaggcggtgaaaccatgttcccatttgaggtcagtttataatatagcattgcataatttacataaagatccttctataagtttttattcctccattcaaacgctttccatttaacagaacggttctaatatgggtaccggatacgattacaagcaatgtattgggttgaaagtaaagcctcggaaaggagatggtcttcttttttattctgtgtttccaaatggaacgattgatcaggtaaacaaagtttgaacacatttcgtttcttctctcgactccaaataccctggattagttcatgctaatattaactgtt

SEQ ID NO: 154481 - DNA, 3023 bp, Arabidopsis thaliana landsberg
  unsure (1)..(3023): unsure at all n locations
gcttattttgagaaatgcagaggttaatttttgaagaacctgcaagtggtgtaagaaagtttgtcctagccactaatatcgcagaaacgagcatcacgatcaatgatgttgcttttgtcattgactgtggaaaggcaaaagagacctcctatgatgcattaaacaataccccctgtttgcttccttcttggatttccaaggtttcagctcagcaggtattgctatagtttgttagagttgttagcttttgagaatcaaactattaataagactacggagccatttccccctagattcataataggaatgaccagtagtcaattttttcaataaaagaaacgcaggaacaaggacagggattagtagtactgtttacatagacgttaatctactagctattatattttctttctttgtcttttgcgtagttgcatttcaaatacactggactactaaaaatgagtataagtattcactgccaacaatcttaactatctgactggtccgtgggcttacatttagtgatatttattgttgattctcatgctctgtttgtgattgcagagaagaggaagagccggtcgtgttcgacctggacagtgttaccatctttacccaaagtgcgtatatgatgcttttgcagaatatcagttgcctgaaattttgaggacgcctttacactcactgtgcctgcaaatcaaaagcttaaacctcggaagcatatccgagttcttgtcaagggcgctgcaatctcctgaactactagccgtacgtcatatttgtttgattctttggttaggttttctgtttttaaacattactcaagtgaaggtgtttgatttgaaccaaacttataataatcaatgatacagtaattttgtttcttcccctttgcccgcaggttcaaaaggccatcgcannnnnnnnnnnnnnnnnnnnnnnngatgagaatgaagacctcacgactctaggttagaggaaatatgctgaatcatgacagttttggtagctggactgaaatttatctcatgttgttgatattctttgcaggtcgttatttgtccaagcttcccatggagccaaagcttggaaaaatgctcatactaggagctattcttggttgccttgatcccatattgactgttgcggctggcctgagtgtgagagatcctttcttgacacctcaggacaagaaagatgtaagtccttctcccaccatgtataagataaaatgcagttcaacgtcttatctagcactttatagacttatagttataccatttattggtctcttgttatacccgtgcaagccccttcttccactaaactttaacacatcatgtctctctgttagtgaaggtgacttgaccgtccatcttcttctctgaaaatacttttattatggacgtagttttcccaaagagatcttgtcttgaaatcagatggtatgaagtgttgtgaattctcgtgtcttctgaaagaccttagaatatgatgtttcgtttttaactttcccagctcgcagaagccgcaaagtcccagttttcacgtgatcacagtgatcatcttgcacttgttcgggcatatgaggggtggaaaaaagctgaggaagagtctgctgtatatgattactgctggaaaaactttctgtcaatacagtcgctgagagctattgattctcttcgaaaagagttcttctcattactcaaagatactggacttatagatggaaacccatcgatctgcaattcagaggggaatgatgcaaatcttacccgagcagttatttgctatggcatgtatccaggaatctgctcagttgtggtgagtacttctcctgaatttatttgccctgcagtggcctctctgtattcagcagttagctttattgagcatctatatgacacatgcagcataatgagagatcattttccctgaagacgatggaggatggccaagttcttctttactcagtacgcatccatccagttaaaattaatgatggtggtatacctaacataacagtttggttggaaatttgttacattcattttttttttccccatagaattctgaaaatgcaagggagacaaaaataccatatccgtggttggttttcaacgagaagataaaagtgaactccgttttcttgagggattcgacagcctgctctgactctactcttatcctctttggcggtagcatctccaaaggagacactgtgagccttttttctctgttggacttgcttgtactcttgtttttgttatcaggattgacagcaatttcattgtcaacttttgtttttgggctttttggcaggatggccacctgaaaatgttgggaggatacttggagtttttcatgaaacctgatgttgcagagatataccaaaccttgaagaaagagcttgacgagctaatacagaacaaagtgagtttcttaaaatctcaaaagtacccacctttgttgttttcattctgtcaggtatttctactgtgatatcagatctcgttaggcaatggacatctgagttatgatactttttaaaaacattccagctacttaatcctaaagtggatatgcaagcacaccgtgaactcttatcagctatacggttgttggtctctgaggatggatgtgatggaagatttgtgtttggtcaccaaatacttaggcctttggaaatatcggcgttgtcaacaaaaccgtcattgttttcaaggaccgaaagtgggccggggggtgacaattccaaaagtcagctccaaacaatactcacgagggctggttatacagtaccgatgtataagactaagcagttgaagaacaacaagttccaaacaacagtagagtttaacgagacacagatcatgggacagccttgcagcaacaagaagagtgctgagaaggatgcggcagctgaagctatacaatggctgaagggaggggctaaggaaagtcatgagcaggtgaatcatatgtcaaagctgctgaagaaaagcaagaaagatcacctctga

SEQ ID NO: 154482 - DNA, 1547 bp, Arabidopsis thaliana landsberg
aaacaacaagacactttatttctttcggcgaaagctcttttcgaccacaaaaagacggacgacaacctagcggttctttttaccaagggtttggcacgagatcaagtgattcaatcatcaagagcaatgggtttaaagcctatgaatttaagatgtcgctttgatggataccccacctatatgactggagatctcaagaactaggttcaaaagggaaaactaaatcaaatgaaatctatttggagaattgtaagactactagtcgcagcccagtttccaggatgataaacagtgcttcttgtacatataaaggataagcaatgcttttaatgattgagtccaaagctttgatatataagtggagttttacaggagacttcttaaaccaaatgctagtgacatatcacctagtgagtgtggaatgtggccgtttctaggagaatgtgaggctatattctctaagttcactcatgaaatctaggattgttcaaggccaaaatgaaaacaatctagagaacttgtttttacgagaaaaagtagttgggttttacctgttgtctaggtttacataaaaatttgggtggtttaagacatcatgttcacctcctggccaagtaaactcgacagattaacagtgaatagtttaaggctgtaaaacgctactatctcatacacatctattttgtcgcatatactcttgaaagttgagtctgtaaagtctaagtcagtttaggttatcgagtcagtctaaagtctcaaatgtttagagtcaattctattcaagtgggagattgttggaactcaattttacacaagtggctctggccaactctccggtgacttttcttgtgatggccgtcaccggaatgaccggattatggagtctttggattccttgtaatgagccttattagatgtaaaaattgaagtttattttgaatgagaaattgagtgtttttaaatctggatttcggggtcctacatttcttcgtcttggctggctggttttcgtgtaggaaagaaggtatctgttgaaggaatttcctgaattagtttcttgtggagagaactcaaaacttttggaaattggttgtggtaatggcagtaccgtgcttccgattttacggtataattctttcgatcttcgccgtattattcttccgatttagctttttggagttaacctttatgtgttttatctttgtttttgtgtagtggaagcaagaacattactgtgtatgcttgtgattgtagcagtgacgctcttgttaggactaaagagaacattgatcgcgctatttcttcggttgataactttcattctttttgttgtgacttttcgacttctgagtttccagattgggtggcatgtgatcgttgtcgagacaagtttatgcttaaccactcaggttttggtctctctgtagcaatttatccatacacattgttctctcatacacgtcctagctaatcttgtatatcttcattaataggagggagtgagagcaaacattgcatcggtggggtggattttgtcactctggtat

SEQ ID NO: 154483 - DNA, 619 bp, Arabidopsis thaliana landsberg; identical to SEQ ID NO: 33358

SEQ ID NO: 154484 - DNA, 576 bp, Arabidopsis thaliana landsberg
  unsure (1)..(576): unsure at all n locations
tcactccattcgttgcatctcctggaaccgatcgtgtaagccggtcaacccctgggtcatggcttatattgcgtcacgaagactgtacctggagaccgtgggaaagacttgaagcatggcgggaacgcggtggagccnctaatggtctaggttcaaaattcgaactcatcccagacggatcaagcggtgcaggaatcgtgcttgcggaatcaaccataagttctcacagaggtgggaaattctcaatcgagttgggatcgtcgccttcttcatcgtcgccaacaagtgtggtgaaccgatcgagaagccgtagaggtgggagtagtggaagcggtggaggagcatcgccggcgaatagtccgagaggagggagcggagattacggttacggattgtggccgtggaacgtgtacaaagggtttgtgatgtcagcaagtgtggaaggtgaagggaaatgtagtaagccttgtgtagaggtgagtgtgcagcacgttagctgtatggaagatgcggctgcttacgtggcgctttctgcagccattgatcttagtatggatgcctgcagcctgtttaatc

SEQ ID NO: 154485 - DNA, 579 bp, Arabidopsis thaliana landsberg
atttctattgacaataccaccaagcgttggatatgaacaaaacccattgagtttatactattgctatgacttggaagggtcaagtaagcgcttaagtaaatgcattgctcaggtatatgaatcagaggtttttgttgttcctctgtttcttgcttatgtctctcatagtaatgaaaccttatggtgcattggctttattggtattagtgtctctatctattgatctgattagaggaattttgtaggttacaaatacgccgtggggggaacgagtgacatttgtatttgaccctgaatctgacttggttgctaaatcattacaagtcagtcctttcatggtatgttgttgttctttgatattattaacttctttgattgatgttttatcagttttgtgtgattggttagaggttaaataaccttttaggatatgcttgggaattggaaaatcagagctaatgaacctggagatgatttatctgtctccattgcatctcaacaatcctcatttcggtaactatttctttgcgacattaaaggcgaaaaggatacccctatcgggggtgtctgatcccgctg

SEQ ID NO: 154486 - DNA, 2006 bp, Arabidopsis thaliana landsberg
  unsure (1)..(2006): unsure at all n locations
ttcttgcttttggacgaagctgtcaatcacgttattatatatatgattatttctgttttttgtttttttacgatgggtttgagggctgcagtgtttcttggagagtatatgggttgctctcgatgcttcccatctattctttcttggaaagttaggctcacatcatgatgcacgctgttctattactttacaattagtcatttaaatgaaaactacaaaacgatcttggcatgttttatggatatgacagctgacgtttcatttctactttcttcccatgtttcctctaaggctggattgacactccttccagggctcatgactccgccctatctccattactgctactcgtcgnnnnnnnnnnnnnnnnnnnnnnnnnnnnnnnnnctgatggcagccaattaattgcgtcatgatttgaggtacaagatgttctaccgtttatcaccagatgaaagcgaggtactccttcacaacactttaaaataagtcatttatcaccattcctagtttcaattgtaaatttaaaacaataaagccatgattgacctcaatatccttccgaagctcatgcattcttggggtaaaaatgactgatcctttactttctgaatttacttgcagacggatgatttacagggtcacatcattatttgcggatttggccgcattgggcaggttggtatcgttatctataaactttgttgcgaaaacaaactcctctagaagtttagatagtttgatttagagaatagtttggtgacatatgattaaatttgtctttgaccgctgctttctaaatgttaaacgcagataatcgctcagcttctttctgaaagacttatcccatttgttgccctcgatgtcagcaggtaatgtaacatgcttgccttgtcttgcttaatgtatctaaccagctctttatttgtctcatttcgcaccaaaaatctcttattttacagtgatagagtagcaattggtcgttccttagatcttccagtttattttggagacgccggtagtatagaggtaagagtagaaagctgatgaaacaaatcaaaagtataaccacacatcatccaaaattattgagggttgttttacctatacgtgcaggtactccacaaaatcggggcagatagagcatgtgctgcggctattgctttagacacacctggagcaaattacaggtgtgtctgggctctcagcaaatatttccccaatgtcaaaacctttgtccgtgcacatgacgttgatcatggtctcaatcttgaaaaagccggcgctaccgctgtaataacttccacaacttttctattctccttctgtcattgcacaacattttcaaagtaaactgattaaaatctcgatacaaaaactcgttaggttgttcctgagacgctggaaccaagtcttcagttagcagctgctgttcttgcacaggtacaagagataattcttgtagtcattaagtcaccaacaatgttatttggggtatttgttaaacttgtcggcttctttttcaggccaaattacctacatcagaaatagcaacaacgatcaacgagttcagatctcgtcacttgtctgaactagctgaggtatatatttggtctatttaaaaaactacaattcttcttactctccggtttaatggatcctatgatggtacagctatgtgaggcaagtggaagctctctaggttacgggttctcaagaagtacgagcaaaccaaaaccaccatcaccatctgaaacatctgacgataaccagattattgaaggaacactcgctatctaaccttttttctcgcttctggtaagaccacacaatttcaacttcttttgcttaaaactgtacagaaactcaaaatccttagtttgaaaaatcgtagctggagaaaaagtaacaaactctcaaattttgatgggatgatgatgtgttcaaatttctctagtttctttcctctgggggaaaaacgaaagcaaataatatttgcatccaac

SEQ ID NO: 154487 - DNA, 403 bp, Arabidopsis thaliana landsberg
cttcttgattttcatgaagaagttgtatgtgttttaggtttgttttgttgaaatgtgtgtgtggattttggggggaatggaagaggcttcatatggagaaatttatagaggcggcgacgaaattcatggagtggaagaagaatccgaatgggagaagtagggaagagtttgagaagtttgtacaagatgattcttctccggcttcggcttgaagaagttgtttgcgttttatctatcttttatgtcttcttgtttcatatatcaaggtgctgctaataaaagggtctttactttcaaagacaaaatagaaaggctttgtttttgagtatttgagaataatgcattttatgtttggtgcattttgtcttcttaagaacaagtttgattttagtccaaaagaagt

SEQ ID NO: 154488 - DNA, 697 bp, Arabidopsis thaliana landsberg; identical to SEQ ID NO: 26846

SEQ ID NO: 154489 - DNA, 869 bp, Arabidopsis thaliana landsberg
atgaatagcttaggaggaattaggagttggccggcgaattggagaagtacgacggcgtcaatgacgacgacggagagcgttagaaaggtaccgcaagttttaacagtggcgggatcagattccggcgccggagctggaattcaagccgaccttaaagtctgcgcagctcgtggtgtgtattgcgcttccgtcataaccgcagtcactgctcagaacactcgaggagttcaatctgttcatcttcttcctccggaatttatctctgaacagctcaaatccgtcctctctgacttcgaattcgacgtcgtaagctcttatgattagtgattagtgattgattactctcttatgattgatcaattagtgagtaatgaattctcaggtgaagactgggatgcttccttctactgagatcgttgaggttcttcttcaaaatctatcagattttccagttcgtggtagagattacctcgctttgttctgtttttcagaattttgaaactttcaatgcttagtatagttttgttgtgtttaaggtagctttggttgttgatcctgtgatggtatctactagtggtcacgttttggctggttcttctattctctctatctttaggtaaagcttttatgcatttgttgtcattatgtgtttgacttcagtgatttggtgtgttatgttgttgattaactatggtttcttattgcagagagagattactaccaattgctgacataattaccccaaatgtgaaagaggcttctgctttacttgatggctttcggattgagactgttgcagaaatgcggtctgcagcaaagtctctgcatgacatgggtcctagggttctattttctgcccttactgccta

SEQ ID NO: 154490 - DNA, 1160 bp, Arabidopsis thaliana landsberg
  unsure (1)..(1160): unsure at all n locations
ctctccgatcatgtcgtcgaagaaagcgaagacgaagaacgaggcgagtagcagccgtggtggcatcggcggagagagtatagtcgctgattgtggacgaaataaatcaacttgcggttactgtaaatcttctacccgctttagtatttctcacggttcgttgcattgcctttgaaatatcgttttattagttcgtgaatcttctgtatagtttgtcgttgaattgatctgactatcgtataagtcaaataaaaagattttccgatttgggaatgtgaatgatttccattgcaggtttatggacagagagactcaccgttaatgactatcaaggtttgttacatcaatctcatggtcttattaatatgtttgattatgtgcaaacacaaagtttgaatttttgcttctttgatttgaagttcttcattcaacattttgattctcctttctgagcttagtcatcatttttgatgtatcttttttttttttttttttttaaaaagctcttcttgaccgtggatggagacgatctggctgctacctttacaaacctgagatggagaaaacttgttgcccttcttatacaatccgcttgaaagcaagtgattttgttccttctaaggagcagcagcgagtgcgtagaagactagaaaggtatatatatttctatggatgcactcttctcctcccttcttcttttaacttttttctgtgatgttgtgtacaaaggttcttggatggcgaactagatgcgaagccgagtgagcagacagaagatcaagacgtttctttctccggcgaagtttcagtgctagggagaaaatcacttggagctatagtggaaccaattatgaaagatttatctnnnnnnnnnnnnnnnnnnnnacaaagatgcatacagagtggtgagtttccttctaatgttcagattcccaatgcttcagtaaagaaagttctttctgctaaaaggaagaaactagctgaagggtcagaagaactcttatacaccagcaacattgcttttccaataggagctgctataaaacacacacagacattggagaaaggcataaacgtagaagaaaacagattatcaccagaggctgtttctgagaagttgttgagtgcaatgagtaaggtgnggagagtttactggtttt

SEQ ID NO: 154491 - DNA, 1495 bp, Arabidopsis thaliana landsberg; identical to SEQ ID NO: 50518
  unsure (1)..(1495): unsure at all n locations

SEQ ID NO: 154492 - DNA, 587 bp, Arabidopsis thaliana landsberg; identical to SEQ ID NO: 6466

SEQ ID NO: 154493 - DNA, 424 bp, Arabidopsis thaliana landsberg
ctcgaaacacacttgcgatctttatctaaaacacaaaccaacaaaaagaaaaatgggcttggtcagatcatttgctttgttcttagtcttccttagttgtctcatcgcggtgtatggccaaggtacgaggatcgggttctactcgaccacgtgccctaatgccgagacgattgttcggaccactgtagcatctcactttagttcagatccaaaggttgcaccggggttactgagaatgcacaaccatgattgctttgtccaaggttgtgatggttcggtgctattatcgggacctaactctgaaagaaccgctggcgcaaacgttaaccttcatggttttgaagtcattgacgatgccaagaggcagctcgaggcagcatgtcctggtgttgtctcttgtgctgatatattgcgcttagcggct

SEQ ID NO: 154494 - DNA, 702 bp, Arabidopsis thaliana landsberg
  unsure (1)..(702): unsure at all n locations
catcactacccaaaaccagacgcttcaacttatccccatttctccgaaaaccctaacaaatcctcctcttgttccgccactgccgccgccgctactcaacggtggtgaattttctcatacggtcagttcgatcctcttttcatcgacaatcctatacaaatccataatcatggccgccactgcttcctccgaagcttctgaaggaccagtgatgggtctcatcaacaagcgtctccgtgctctccgtaagaaatacaaccgaatcactcaaatggaagaatctatttctcaaggcaaaaccctaaacaaggagcaagaagaagtcctccgctctaaacctgccgtcgtcatcctaatcgacgagcttgaaaagatccgtgctcctctctccgccgctgtgacagaagaaatcagcctcgnnnnnnnnnnnnnnnnnnnnnnnnnnnnnnnnnccaccgcatctgagcaaaaggaagtcactgatatcccgcaggaagttagcggcggcgatgatggggctaagttggaggatctggtgaatttcctctactttggttcactcttcgacgtcaagtcacagaacgagttcacttcgataatgttgaccaggactcatgagagaagttgctgcttgtcttacgattacgttaccgatgatgccactgatctcctcggcgatcgggatttggattctatttctca

SEQ ID NO: 154495 - DNA, 624 bp, Arabidopsis thaliana landsberg; identical to SEQ ID NO: 22818
  unsure (1)..(624): unsure at all n locations

SEQ ID NO: 154496 - DNA, 2384 bp, Arabidopsis thaliana landsberg
  unsure (1)..(2384): unsure at all n locations
aattaggaggatcaattcttttcttctttttttttttttggtcggcagatcaaaatttaactatttaagtcctcgacttttagtatatttgtaaacgtctcttctttttccggataacggaatacatcatcttttatttcttgtaatttcactgattaatgcaatatacgattttgagactaagattcaagattgtgtgtgtgtgataaaatatgtgttaatatgtaagataaaagatggatgggttacacctaataaataaattaaggtgggtaaattttgaaagtagtagataaatgtaagggcctttaccgtaattatacgaaaggttcgtatcacgtttcttgtctcgtctatgaagcaacggaccaaagtaaagcgtaaatggaaaaatcagtttcatgcgaattttcgaatcgtttgctaaattatggcgtctacaatggcgacatggacaccaagctctctccagctcagaattgccctaaatcacggtatcttcaaagctccggagagagcgaagatgaccaagctcagtcgtcgtctccgtatatcatgcgtcgcgcagaacgcagagccgggtcgcgattcgggtgagagtaacgggtcggatcgttttcgtgggtgggctgattcgggagacgatgagaacaattctcgcggtggcgattggtttaaaggtacggactttggttaacttggtagatttgtattcgaatttggttataatattctgcaattttgtacctttttcatggtttgttgaaggaatttgatttttgttcaggaaccttgttatctggagttactggaatggttttgttcgttgggctaacttacgcagctttatcttccaaacgcaatgtcttaagtatgtgtttcaatcttcatttagtgatacaatgtagttgattttaataatgaagttatcaaattttggtgaatgtttaggnnnnnnnnnnnnnnnnnnnnnnnnnnnnnnnnnnnnnnnntcaattgatcaaatcagcacggatgagaatgaaggaaatattgtgactagtcaagataaccaggaaagctatagaggtataaacccgaaccgtataggttaagttctttggtgcttattttatctctcaatgtggttacctgtttaacaagcgttcccttttctggatgttagtttagattcacaagttttatctccggatgaaatagatgttgcgtcaaaatccacgtctactaggaaagacaatgaggaggcggagaaagcatcggtaagctcagcggagagatacacatcatctacagagctggatggagtagatacacatacctctcaaatcccaaacgaaaagcagaaagcccgccgttatacaggaatacctgctccttctacagttccacaagtagattctttaaaacctatctttccaacggttgtggatccagttcaaagtcaaatgtttgcagctttacaagctttaaaggttactgctttcagattattttgaccaatcttttgatgtgtgaagatactgattgcatatttataaaaccctatttaattttcaggttattgaatccgatgctctgccttacgatttatgtacacgccgtgaattcgctcgttgggtggtttctgcaagcaatactctatcgaggtaactatcaaaaaatctctttcctactcttgaaacattgtgaaatatttcactgccttacaacgtgaaagtatcttcattggttataggaactcagcatcaaaagtatatcctgccatgtatatagaaaatgttactgaacttgcatttgatgatattacacctgaagatcctgattttccattcattcaaggtgatcatcgaattttttgtacattcactctgaagtctgaatcagtgaagttatgtttaatctgctttcttcatttttcattggatagtataggtttggcagaggcaggacttatctcaagcaaactctctaacaacaatatgccttcttctgagagcagtcgggttacgttctccccagaaaggtagacgtgctatttatttcacccagccatatacattatacgctattaaaaagtagctattgttatgtgatatccactcttttcatctctttttctccctctgcagtcctctaacacgtcaagatctattgagctggaagatggctttggaatttcgacagcttccagaagctgatagcaaggttctttgtctattcctttctttttcgcttgccacatctagtcattgtagcgtcgtaaaccttacacaactcacttttcttatttcagaaattataccaactttctggttttcttgacattgataaaataaacccagaagcatggcctgcccttatagctgacctatctgctggagaac

SEQ ID NO: 154497 - DNA, 803 bp, Arabidopsis thaliana landsberg
atgttagtctttggcgtcgtggctaatggcggtgacgtgttcggtgccatcacgatagaggctgcagccgtttgggtacgtaaaagaaaacattactatatagttttcattttaatattttttatattaaaaagttatgcttttatatttatttagatcatcatatttacagttttgacattgtttcccgcatacttttcttcttcttcttctctccacccatctgctttaaggaaggaacctcaaaaagcttacaaaatagtagaagaagaacttttttttatctccgattcttacctctgcaatcttcagattctagctgattcaaggtttgatcacaaatttcccgatttgtatatatataatttagatttggttaactttatcgaatctgggatcgttgtatccaaatctgatctgggcttctctgattcaattacttgggtttgtaaaattgatgggtcaatttaaaggatgtatctttagggtttctcgatttcattctgtttgtagaacaatttgatcataaaagtaatgatgtgttttatttgattaggatcttgtttgtgatagaaattggaggagatgggagcattcatgtcgaggttttggttcatgatgtttcctgcaaaagagtataagattgttgctgttggtttggataatgctggtaaaacgacgacgctttataaacttcatttgggtgaagttgttactactcatcctactgttggtagcaatgttgaagagcttgtctacaagaatattcgctttgaggtactggactcttttttattcatttg

SEQ ID NO: 154498 - DNA, 833 bp, Arabidopsis thaliana landsberg
taccaaaatacgattaatttaatgactgttattttctctttctttttggcagtatttaaccaaaaatggcatctacgggcaagcatgtggactaaacaatgagcatgatgtcatggggccatgacgactacatgtacatggaatttacactcaaggatgtggattaaacaatatagttaagcaaagttcattttgacttgatcttcatcacgtcaacatgaactttgattttactgtataacttgtatttactgtaataacaacaatatataacaattagaggttgtagatattatgatcaattacttaatcatgtcttgatcctaataactacggtctctgaattgctgtatattattattattacagcaagtacgacttgtacagtaagagcaaagttcacgttgatgtggagaaagtcaagccttactacatgtctcttatcaagaaagtgagtatatattgcatgctcattacaaaaaacaatgaaaagtgtattaatattgaaaacattcatatatttctaaattcttcagctgactataaattctttcttctctttttcgattttgcagtatttcccggaaaacttgaggtggtgaattcggtggagaaaaaaagtgcccatggaggattagtcgttttatttacttacaaatatttttacacattttcgagttaatgtgaatctattgtaattgtgttatatatatcttatgttaatcatattcaggctgtctctgaaatgtaatcacaatcaaccctcgtgaatgctaaagagtttgtacgtcgggtgatataagatcttaaataatgaagtttatttataataa

SEQ ID NO: 154499 - DNA, 795 bp, Arabidopsis thaliana landsberg
  unsure (1)..(795): unsure at all n locations
aaactaacttgacgccgtatcctatgttccaacagttcttgttattcttaaggataattctgaccttggcctgtggtcctttgcagaattgagtcaagaagagtctgaggatgttctcttcaaggaggtacagaattacaagcccgttctcgctttctctcatgggcttttccttcatctgatccctccttcatgttcccttttgtatcgacttttgttcttctatgtatcttttggatctattagagataattttgtcagctcatcttggcctttctccattctcaaagctatgaaatttggaacatttggcaggcttggctcacnnnnnnnnnnnnnnnnnnnnnnnnccttggcatagaagtggacactgcgagagaacgtcttagattttggatcagcaggagcgcacattctccatcttcacatgacgccatggaaggtacaatttaccttaccaaattccttttagccaagaggattatccataagacaactcttacaattggttcttattttcagttgagcaaggactaacagagctaagaaagctgcggatagaacgtagattgtgggaagcctccaggtccagccagtaagtagtgaccttggggacctcgggatcccagaacagtcttgctaccacagctttaacagtactgtatatcgtacatgctttcttctcgtgtggttggggtactttgcagtcagaaaaatgtttccagttttgtaaaccgaagaattgtattacacgcactacttttgacatataatatatccacgttttcacgtcct

SEQ ID NO: 154500 - DNA, 1056 bp, Arabidopsis thaliana landsberg
taaaggcacagaagttaaatgtgttaatccaagctgtatcagtatggtagctaggcttcctgtttatttgtttaagatgttgtgctcatatgcttagagagggtgtttactggtttagattaatgtattaacttcatgtaacttctcgtttcaatgtttactgtaggaaagaggtgagaatataccaccagaagattcattcgatgtagcccgtaaagtgaaggaaatgtactgctacacttgttctgacatcgtaaaggtaatccttagtggtgaatattcaagtcagataatattaatatatactcttctgaaaatttattactggcctgtatgctgaaatcgcttgaaaagaatataggaatattgataaagaacattcatatggttgcaggagtttaataaacatgacaaagaaccagcaaagtatattaaacaatggaaaggtgtaaagccaaagactggtgcaccatacacttgcgacgtgggatatgaacgattccttggacccgaggtttgttaccatctatctgttataaaaagttgtaagttgataagataaccaaaatcggagactggatatctttactggtgcatgagtttctagtatgtcagtgagctgttcatgatttgttatcgattataagatattttcagcactctgttctgattactgaacggtactgatataaaattatgctctctcagaaactcaaattaggtaattacttagtccgattatgttaactggaagtctggaactaattcttatctagttagaattcagctgtcactactggacccataggaagctaatctcctttgtatctctataccaagagagtaactggaaagtggaacataatttcctttattgttcttgcgtttttgttctgctattaccgatgagtaatgttgagattttgtgtgttacaggtgttctttaatccagagatatacagcaatgacttcacaactactttaccagctgtgatagacaaatgtattcagtctgcaccaattgacacccgaagagctttatataaggtttgaaac

SEQ ID NO: 154501 - DNA, 3546 bp, Arabidopsis thaliana landsberg
  unsure (1)..(3546): unsure at all n locations
atgtacttaaggtaatattagcactaacctatgaaatttttgctaaatgtgcttttagaggaatgtggttttcaatatttgactgtttataccatgcacagggagaatgggtttcatctggaaagcaagtttgtgagagctcaaagctattccatttatacatgtataatgtcagatgtgtagattttggctcttcaaaagatccattcctaagcgaagtttcagagttcgcgattctttttggcaatgagctggatgcagaggttgttgtttctctctccatggatttgagtattagaatttgaagatgtaaccatggtaaactaagatttgttttactgtatcaggtattatcgatgtctatggatctttatgttgctcgggccatgatcactaaagcatctctcgctttcaagggatcacttgatattacagaaaaccaggttagactgaacaacaacctctatttttcctaacatttatgtttgcttgagaaactttttatcttatattggtggcatttcttgtgcagctatcatctctaaaaaagtttcatgtgaggttaatgagtatcgtgttggatgttgatgttgaaccctccacgacaccatgggatcctgcaaaggcctacctgtttgtccctgttactgacaatacgtctatggaacccataaaagggatcaactgggaattggttgaaaagattacgaaaaccacagcgtgggacaaccctcttcagagagctcgtcccgatgtatatctcgggactaatgagagaactcttggtggggacagaagggaatatgggtttggtaaacttcgtcacaacattgtatttgggcagaaatctcacccaacttatggtattagaggagctgttgcatccttcgatgttgtgagagcttctggattgttacctgtgagagatgcttttgagaaggaagtagaagaggatttatcaaaaggaaaattgatgatggctgatgggtgcatggttgcagaagatcttattgggaaaatagtgacagccgcacattccgggaagcggttttacgtagattcaatttgttatgacatgagtgcagaaacatctttccctaggaaagagggatatcttggtcccctagagtacaacacgtacgctgactattacaagcaaaagtaagaaaacatcttcaaataattttttgatttcttcaatcctttttctaagtttcattagatactaatacttttctaatatcacgaggacttacatggcctcaagtcacctgtggtgttgtgcaagaaggagaagcaaagtctgtctatgtattatgagatagctacttctatggctaggatatatgttgtacaagaccggcttttcttctacttcttgcacaacctgaggttattgaggctatacaagtcttcttctataatgttatttattaggtatggagttgatttgaactgtaagcaacaacctttgattaaaggacgtggtgtttcgtattgcaagaaccttctttctcctcggtttgaacagtcaggttataagaaattcttttcactttaacaatttaatgatataaccgataaattaacgcttctttgttttttcttgcaattcaaaggtgaatctgagacagtccttgataagacatattacgtgtttcttccacctgaactatgcgttgtgcatccgctttcgggttcacttatccgaggtgctcagaggttaccctctataatgagaagagttgagagcatgttactcgctgttcaactcaaaaatttgattagttatcctattcccacatcaaaggtatatatatatatattatgcttagtgtcttttttttttttgttgaaactatctaatcatatttggtatatatatgtagattcttgaagccttgactgccgcctcgtgccaggaaacgttctgctacgagagagctgagcttttaggagatgcgtatctaaaatgggttgttagtcgttttctgtttctcaagtatcctcaaaagcacgagggtcagcttacaaggatgaggcaacaaatggttagtaatatggttctttatcagtttgctctggttaaagggcttcagtcatatatccaggcggatcgattcgccccgtctaggtggtctgctcctggtgtgcctccggttttcgacgaggacacaaaagatggaggatcttcgtttttcgatgaagagcaaaaacctgtttccgaggaaaacagcgatgtgtttgaagatggggagatggaggatggtgaactagagggtgatttgagttcgtaccgagttttatctagcaaaacgttagctgatgttgttgaggctttgattggtgtttattacgtcgaagggggtaagattgcagctaatcatttgatgaaatggattgggattcacgtggaggatgatcctgatgaagtcgatggaacattgaaaaatgttaatgttccagagagtgtgctcaagagcatcgactttgttggtcttgagagagctcttaaatatgagtttaaagagaaaggtcttcttgttgaagctataacacatgcttcaagaccatcttcaggtgtttcgtgttaccagagattggaatttgttggtgacgcggtcttggatcatctcatcacaagacatctatttttcacatacacaagccttcctcctggtcggttaacagatcttcgagctgcagcggttaacaacgagaattttnnnnnnnnnnnnnnnnnnnnnaaactccacttgtaccttcgtcacggttcaagcgccctcgaaaaacaggtaaacaagattaagaaacaaagtatattgttctcaaagagtttcaaatgtttgactgtttggttactttttgtttttcagattcgggaatttgtgaaggaggttcaaaccgagtcatcgaaaccggggtttaactcttttggtttgggagactgcaaagcaccaaaagttcttggagacattgttgaatctattgcaggtgctatttttcttgatagtggaaaagatacaactgctgcttggaaggttagttagttagttatttcggttgaaaatctctaactaactcgtttttttttggaattgtaattcttagcttactaaatcgtatgattcttttccaggtttttcaacctttgcttcagcccatggtgacaccagagacacttccaatgcatccggtgcgagagctacaagagcggtgccagcaacaagcagaagggttagaatacaaagcgagtaggagtggtaacacagcgactgtggaagttttcatcgacggtgttcaagttggagtagcgcaaaacccgcagaagaaaatggctcaaaagctagctgcgaggaacgcacttgcagctttgaaagagaaagaaatagcagaatcaaaggagaagcatatcaacaacggtaatgcgggagaggatcaaggcgagaatgagaatgggaacaagaagaatgggcatcagccgtttacgagacaaacgttgaatgatatttgtttgaggaagaattggccaatgccttcttacag

SEQ ID NO: 154502 - DNA, 854 bp, Arabidopsis thaliana landsberg
tgcagaagatgcatgataatgttcaggggaaaactgaaactccggattgggaaagtttgattgcagatgcttctgagctgttaatctttgactcacatgatgcttctgaggcttttagatgctttatgatgcagagagcatcaaactctgaagcacgttttagaaatggtgtggagaagcaaacaatgcagcacgattcaaacaaggaaccggagtccgcgaatgcgattccttatgaggtaaactcaggagtaatatcacaagtagttatcttcagtgttttataaatacttactgtctctaaaagagttgtcttcttggtttttgttttgtgtgataggctgtttcactcttgcaccgcggtataagaagacgttgtcttgactttgagatgcccgggaataagcaaacatcaagtgagaataacaccgcggcttgtgaatcctcttcgagatgtgttgtaccgagtattggtcttcatctaaatgccattttaatgtcttcaaaggactgtaaaaccaatgttactcaagattactcatgttctgcgaatatacaagtgggtttacaaaggtccatctctacactgcaagattctttggaccaaacagaaaatgaaatccgggaagatgcagatcaagatgttcctgttgaaccagctttgcaagagttaaatttgagcagccctaagaagaagaggtaagattttttcctttaagagtaactcctctgtgtagagtccttttatctctgtcgcaataactgttggcatgataaacacacagggttaagttggattctggagaaggcgagtcgtgtaagcgaagcaactgcaaaaagtccaagtgtttgaa

SEQ ID NO: 154503 - DNA, 838 bp, Arabidopsis thaliana landsberg
actcagctttcttaccccaaacatatcatgaaatgttctgttctaatcctgtaacatatgctctggatagggctcgtctcattgattttcatgtttctatgttatttactcgttcttgagctgttcttttggtgaatcagcttacatgcgccaaatcagagcctcagggagaaaattgtaccaagtgccaaggcttatccgctggaagcaattatgaaggattgtcgtgattacttccaagaaacaaatagacgagtctccttcgaatatgcccttctaggtatgtgagacttgagatgaacaaattttatgttcgtctccctcattatatcatctactttaacagaagttcataaatgatgatgcagctggagtcaatgatcaagttgagcatgcggtggaacttgcagagctactccgtgaatggggtaaaacttatcacgtaaatttgataccttacaacccgatagagggatcagagtaccagcgaccttacaagaaagcggtatgttaataacaattaagcacagctgcacaggcattctgttttgggattggttttggtctacaaacttcaataaaaatacaaattgtgcaggtcctagcgtttgcagcagcgttggagtcgcgtaagataacagcaagcgtaaggcaaacaagaggacttgatgcaagtgctgcttgtggtcagctgaggaataagtttcagaaaagccctttgcttactgagacggatagtcaagagtctcagccagatgcagaagctgtcgcttgttgatgtcctggattgcacaaatttccggttttgccattggatggctctgttcaactttggttt

SEQ ID NO: 154504 - DNA, 1337 bp, Arabidopsis thaliana landsberg
acagatctagtatccctagtcgattaacagctttacgagtgatggatgagcttctttcagaaattcctgaaatcagcagtaagaccgaagaaatcaagcagttatggaatggacaacacaacaagatgatgatcgaagagccatggctgggtgaaagcactgttccaagctgtcttgaaaacattagaagagacgacatggagatagttcttttgggcactggttcctcccaaccctcaaaataccgaaatgtcacggcaatttacatcgacctattctatagaggcagtattctcttggattgtggggaaggtaccttaggccagcttaaacgaagatatggtttagaaggagctgatgaagcagtcagaaacttgagatgtatatggatctctcacatccatgctgatcaccataccggtcttgcaagaatccttgctcgcagacgtgagcttttgaaaggattggctcatgagccagcaattgtggttggaccgagatcgcttaagaactttctcgatgcatatcaaagacttgaggatttagatatggagtttctcgactgcaggaacaccacaacaacatcttgggcttctgtagaaaccagccgccctgagaaaaataccagtagcggcaatgcagagggttctttgttcagtaaaggaagtctaatgcagagtatatataaaagaccgagcagcccactgacagacaattcttcagctttaccattcttgaagaaactgaaaaaagtcctcggcgaaatggggttggagcatttgattagctttcctgttgtgcattgccctcaagcctttggggtttcgttaaaagcagcagaaagaaaaaacattgccggagatgagattccggggtggaaaatggtttactcgggagacacaaggccttgtcctgagatggttgaagcttcaaaaggagcaacagttcttatacatgaggtgcttttctatataagcaaaactgtgtaaaacatttacatctcattcttaaaatttaccatcttttcaaacttataacaggcgacgtttgaggatgcgttggtagaagaagctgtggctaaaaaccatagcacaactaaagaagcaatcaaagttggatcttcagcaggtgtataccgaaccgtactgacacattttagccagagatacccaaagatcccggtgattgacgaatcacatatgcacaatacatgcattgcctttgatatgatgagtatgaacatggcggacttacatgtgctttcaaagattttaccttacttgaaaagtgtattcagaaaccaagtgggggaagcagaagaagaagaataagagact

SEQ ID NO: 154505 - DNA, 850 bp, Arabidopsis thaliana landsberg
agatgagtaagagacctccgcctgatccagtggctgtgcttagagggcaccgtcactctgttatggatgtttccttccatccatcaaaagctctgcttttcactgggtatatattaattagtcgtctctctcacttgtgagaaattctcgagtcatttattgtttttatttatgatgatttggtgcaaaattgaagctttgtttctccagttcagctgatggagagttgaggatttgggatactattcagcaccgtgcagtttcttctgcttggtttgtgatttttgatttttttaattctttgtttttgtgatcattataaagtagctagcactcattgtatctattgggatttgtagggctcatagtagagcaaatggggttttagctgtagcagctagtccctggttaggagaggacaagattatcaggtaaaaacgtaagcaatcatgctttcataatcaatctatatacggaaaatctgagctagttactctgatggttatagccagggaagagatggaactgttaagtgttgggatattgaagatggtggtctatcaaggtgaatatgatctccccttattcgactttttatgcgtttgtttctatcgaactataagtctataaccaatgattcttgtgacatacttggcagagacccattactaatacttgagacatgcgcctatcatttttgcaagttctctcttgttaagaagcctaagaattctctgcaagaagctgaaagtcactcacggggttgtgatgagcaggatggtggagacacaagtaaagatcaacttgctgatgatagtgaacgatctgaggaggattctggtttgcgtca

SEQ ID NO: 154506 - DNA, 368 bp, Arabidopsis thaliana landsberg
  unsure (1)..(368): unsure at all n locations
actatgttttctnaagatattttgtaacatatctagtgttttactgattgatatgaattattgggggacaacagatgaatgtanccgaagcaagagaagcttgtagagattggtggatgaaagaagcattagatgttttggttgagagactttcatcaccaatgaatcaaccaaaggaagagaagactatgtcaatctctattgaaacaatgtgttgatgatgaagctgatgattgctaaattgctgattgttgatgggagtttttatgagctaatatggatctctgtaggtattaaatagatgggtttcaattagttattgagacggctaaaaaaatctatttcgaaaagccgatgcagagagcatg

SEQ ID NO: 154507 - DNA, 1121 bp, Arabidopsis thaliana landsberg
ttaagttctcaatagagagaatcaaaaatcaaaatgtcttctcctactgcgactaagtacgatgtctttctaagtttcagaggactcgacactcgccgcaacttcatcagtttcctctacagagaactgattcgaagaaacattcgaacctttaaagacgacaaggagttgaagaatggccggaggatttcgccggagctaatacgtgccatcgaagggtcgagattcgccgtcgttgtggtctccgtgaattacgctgcgtctcgttggtgtctcgaagagcttgtgaagattatggatttcgaaaacaagggttccatcaccgtgatgcctatcttctacggcgtggatccttgtcatttgaggaggcagatcggagatgtcgctgaacagtttaagaagcacgaggctagagaagaagatcatgagaaagttgcgtcgtggagacgagcattgaccagtttggctagtatctccggcgattgttcagggtgaaatttcttaacttggtgataaagattgaattgaattttaaccaagtcgccttggtccagtggtaaaaggaagataattcccgccacctggtttgatggtttccccggacactaagattagtcttccggtttaggaaaaaaaatagattgaatttttattgttagatatgatttgaagagatgctaagtttcgattattttttattttttttgtctatgtagggaagatgactcgaagctggtggacgtaatcgctgacaagatatcaaaagagctgatgatagttacaagaataagcaatgggaggaacctagttgggattgataaacacatgaacgaacttaaccgattgatggatttgaattccaacaaaggtaagagaatggttgggatttgggcaagaggaggaagttgtagatcggctctagctaaatatgtttatcagacatcctgtcaacactttgatagccattgttttcttggaaacgtgaaacggatttgtcacggtaactactttgaaagccatctacacaaagagtttctggataatattcaaggagaaaactctagcaaacaaagtctcaagaagcaaaaggttctgcttgtggcagacgacgtcgataagac

SEQ ID NO: 154508 - DNA, 1002 bp, Arabidopsis thaliana landsberg; identical to SEQ ID NO: 42305

SEQ ID NO: 154509 - DNA, 704 bp, Arabidopsis thaliana landsberg
ccttggctattttgataacatggcattctatttgttgtctctcccttttttgagcttacatcctccattcgcttctgtttgcaggcgtacatcattgactatgggcttgccaagaagaatacagatcttcaagacacacaagcatataccatacaggtacttacattgactcatcatgtcaaaagaatcttaaatgactctcactttgttaatcggggtgtttcttcttagggaaaacaagaaccttactggaacagctccatatgcaagtgttaacacccattttggaattggtgactctttttttatcgcttctcatattttccctacccaactgtcttctttgcattccatcactttgtatgctcttaagagacttggcacttcatcagtatctttataaatattgtaatataataactcttacacagagcaaagtaaaacggatgatctggaatctctaggctatctgcttatgtatattcttcgaggaaggtaaaccgataaatctgtattttgattttcttcctataattatagctgtccctgatccttaatttctgtttcagccttccttggcaaggccttcgtgcaggtcccaaaaagcagaagtatgacaagatcagtgaaaagaaaagactaacaccagtggaggtattgtttgccgctccaataaatataaacttctttggtatattgagtat

SEQ ID NO: 154510 - DNA, 731 bp, Arabidopsis thaliana landsberg
gagaccggctttagctttgtaatattgatttctcgttttccattcgattagtagttttggccagttatggactcatggttctcacgggaaaatttgtcaactagctaggtttacattatttaagtctcaggttcgttagaaatttccattgggaattgctctgttctggtcctttgaggttggacctggagtcatgtagtttgctactgtcataacacttagaaaacatatgcaagctggtgcatgagagaatcttggataagttttgcttgtaaactagtttatcgttttgttacgttcctcaagtggaatgtaccaagacatgatgattatattggatagttttagaacatatgtataccattttgttcggagaacaagctgcattctggcttatctttatgttttctttggacctctttaccctttgctgtcctctaatcgtgatgatatttcttgatttctataggacaaacatgaagagaacaaagaatgcaaggaagatgaaagccgtggctaaagctatagcgttgagcgagaagtatgaagcgaaagctacaaaggacaaaaccaaaaccctcagaactctttcggccaagaaattgtacgagtgattttggttaaaaggctacaaaagaaggaaaacagttataaatttttgatagttcgatttgtctattttggtcttgttaacgtttatgttttcttctagaaagagcttttgcaatttt

SEQ ID NO: 154511 - DNA, 799 bp, Arabidopsis thaliana landsberg
ttccagttccacgctacgtggacgaagagatgctcgtaaccatcggtcttgggctagaggcatgcgcagataacaccacgtgtccaaaattctcagcttctatgagcaatcactctttcgtgttacccaagaagctatcgatcttggaagcagtgtttcacgacgttaaagggattttcaccgcggattttccagaccagcctccggttaagtttgattacacgaacccgaacgtaacccaaacaaacccgggacttttgttcactcaaaaatcaactagcgccaagattttgaaattcaatacgacggtggaggtagtgttacagaaccatgcgcttatagcggcggagagtcatcccatgcatctacatggatttaatttccatgtattggctcaagggtttggtaattatgacccgagccgtgaccggagcaagttaaatctcgttgacccgcaatcccgtaacactttggctgtccctgttggtggatgggccgtgatccgtttcactgctaataatccaggtataaactctctatccaattccttagttatactaaaaatgtaattatatagtttagagttttacaaaggctattattgttgtttatgcatgaaacctaaatattggctacattgtttcaggtgcgtggatttttcattgtcatatcgatgttcacttaccattcggactagggatgatatttgtggttaagaacggaccgaccaagtcgaccaccttgccaccgccaccaccagatcttcccaaatgttaagcaagataaaaaaaacatattt

SEQ ID NO: 154512 - DNA, 589 bp, Arabidopsis thaliana landsberg; identical to SEQ ID NO: 72273

SEQ ID NO: 154513 - DNA, 546 bp, Arabidopsis thaliana landsberg
atgaattttaatcttttgcattattgggccttcgctcatactattattcaaggcccaaacactgaatctcctcatcttgtaaatcgcgagagaaaatcagaaaagagagagagagatctctggctctgtatcgctcgctgctcttcctcccacagatcgaaaaccatgaatcctgagtagtaagttcctttctccatcgacacatacttgggtcgaaattacctctgttatatatttgattctccgggtggttcctagggtttaattagcgttttgggatttgcagcgactatcttttcaagctcctgcttatcggggattctggcgtaggcaagtcttgtcttcttttgagattctctgtaagtgtttttttttgcctttttctttctcagagatcaaacactgcagctttctacattagtccatgtttgatggtctgctgcaggaagattcttatgtagaaagttacattagcactattggagtcgattgagcaagatgaggggtcatgtaacatgtacgagctactgatgacaatgctttgag

SEQ ID NO: 154514 - DNA, 348 bp, Arabidopsis thaliana landsberg
agctcaaggtggatgagatcgattcccatttattccaaagtctgaagaagattgcatctgcaaaatcactatgatatgggagaagcgcaacgatgatttctccgaaccaagcagctacatgcaactcctcaagagcatggttattgatatggaggaccacgtccttaaagcttaatcaacatcaccatcatccctatatgtttattaagttgttttcaattatatctaataaagtgtgtttcctttcggaatgctatattttcaataataaagtgtgtttcctttcggaatactatatacgtaccatgtagtttcttaaatcaatatataagaaaatgggtcttgtgg

SEQ ID NO: 154515 - DNA, 1887 bp, Arabidopsis thaliana landsberg
gctcagcaacagttgctactgtagtttctgtatcgtcttcaaacagttgaatttgtttaggtatatttgtctatagagatgttgagtttaccaatctacagtgtgattgaagtttccccaagtttttatctttaagttactttggagtagcctttctttatgtgcttgaatctcttctctgctcatttgattttgagttgtcagacgtataaagtttagtcttttatcactgtgaaagatagcaacactatctcataatttctgagaagagtgtggagattaacttgtgtagtggtttttaatacaattccaattctgtgaagtgattgttgttgctgctcaatatctcgtgtttttcacggatgctaatgttatacattggattttgatattgcagatttagtctcaagagaattaagcttggtgcttctttggtgagaagcaagatggatatcgggtgtaaagttctcgtctttttcacatgtttcctcactgtgacagcagagatttacattgtcactatggaaggagaaccaatcattagttacaaaggtggtgataatttttttgaagcaactgctgcggaatctgatgagaaaattgatactacaaggtacctgcgttttctcttcttcaagtacagccttattaacatctgactcaccaaaggcttttactacaatttccttagctttaattagccatatatcattgatgcgcattacaatgttttggccaaaacatcttcttagtgttgtgactaacaatatgttacctttttttggcagtgaactggtgacatcatacgcccgtcaccttgagaggaagcatgatatgcttcttggaatgctctttgtggaaggatcttacaaaaagctttacagctataaacacctcattaatggttttgcagctcatgtatcccctgatcaggtgaaatccaattcgagttagtctctacaaattacatttcagtgtttaatctgtagtcccttacagttttcccctatattagtaggcggaaatgcttcgtcgcgcgcctggtgtgaaatctgtggatagagattggaaagttaggaaacttactacacatacaccacagtttttgggattaccaactgatgtttggccaactggtggtggttatgatagagcaggggaagatattgttattggctttattgactcagggatatttccacatcaccccagttttgcctctcaccacacaacagtaccttatggccctcatcctagttacaaagggaaatgtgaagaagatcctcatactaagatcagtttctgcaatgggaagatcataggagcgcagcattttgctgaagccgctaaagcagctggtgctttcaatccggatatcgactttgcttcaccaatggatggcgatggacatggaaggtttgtcttgttaaattttttaaaaaatatctcagaactgcttattcctctgcacattttgatttgtatgcttctttttgttctaacgaaaaaattggcctttcagtcacacagcagctattgcagcggggaataatggtattccagtgaggatgcacggctatgagtttggaaaagcaagcgggatggctcctcgtgcaaggtaaatagataattgatccagaaattggtggctttaaagacatttctattcctgtctttcaaaactaaatcttgtcttgttttaggattgcttgttacaaagctctctaccgactttttggaggctttgtagctgatgtggtggctgccattgatcaggtaagccagaacttagcacactactaaattgttccaaatatatgaaataatgccttctcctgctgaaattggtctagtttcttcatagctctgcttctttgttctggtttg

SEQ ID NO: 154516 - DNA, 863 bp, Arabidopsis thaliana landsberg
  unsure (1)..(863): unsure at all n locations
tccgcatctgttttggtttctctctaatttctcgatctctccgcccaactatgtctnnnnnnnnnnnnnnnnnnnnnngtaagatctcgatctctacctctctgaagttctttattcgtgtttagattcgtgtattggattcgattcgatatccttagatttgattcttattagcgtgtttaatcgtctagaactagttgattcgtgaacttagcttgtttcgaaagctgaaatgaatctgttgatgattcctaggttaaaaactagcgtagatctgattattttctcatcggtttctatacggatctaatcagtattcacgatctggaactttttctgttgttgttctcttatagtgattgattgatttatgcgtttttccatttttaaaacttatgcagatgagttgatcgccaacgctgcctacatcggcacacctggaaaaggtattttggctgctgatgagtccactggtaccatcggaaagcgtcttgcgagcatcaacgtcgagaacgttgagaccaacagacgtaacctccgtgagcttctcttcaccgcccctggtgctcttccatgcctcagcggtgtcatccttttcgaagagactctgtaccaaaagagttccgatggtatgaacttgatcaatactaatacttaatgttttactctgtatgtggttttgtgttttgtatcttattaatgaagatgttttcgttgtccaggtaagcttttcgttgatatcttgaaggaaggaggagttcttccaggtatcaaggttgacaagggtaccgttgaactagctggaacagaaggtgagaccaccactcaaggtcttaacggtctcattcacaattcattnaaag

SEQ ID NO: 154517 - DNA, 2388 bp, Arabidopsis thaliana landsberg
  unsure (1)..(2388): unsure at all n locations
ttgtcatcttcttattaacatctctggctgttctgctcaacttgtcgaataggttacaattgttgtagtgacagtgcctgaagggcttcctttagctgttaccttgacgtaagtctattgtcttctatatacatattttaatagcaattgctttggcctttagagttggaaagaatttagttattacatggtcagagtcaaactttaaagaaaatgatggatctgctgtaaaattgaatagtctttttgtcactgatcttttctacttcttactggcagtcttgcgtattccatgagaaaaatgatggcagataaagctttggtatgtatattttaatttttgggactcaataagtttgaatgaacataaatgcaaaattcttatacgtgaatgttttttgcaacttaaacgaattttaatttcaggtgcgtaggctttcagcctgtgaaaccatggggtctgcaacaacaatttgcagtgataagactggaactttgaccttaaacgaggtgaatcttggtgctctgccttctttttgtatttgctaacacacttaacacttaccagttttggtatgtgctttcctagttatgagcttttgctattttgaattgtgtacccaacaagcgggtcccctacgactttcttttttctcagatgaccgttgttgagtgttatgctgggttacaaaagatggattctcccgacagcagctcaaaattgccatctgcttttacatccatacttgttgagggtattgctcacaatannnnnnnnnnnnnnnnncgatctgaagtaggattaaaattctttggaactttactgatttcccgtaaggtttctacttcagctgatttaatgtaataatgcctatgtctttactgatgacagagtggtgagattcaggtttctggatctcctacagaaagagcaattctcaattgggcgataaaggtttattctttagctacattttctggttcccgtatatatagccgtgagaagaactaatcttttaatttcttatacactgcagttaggtatggattttgatgctcttaagtctgagtcttctgctgtacaattttttccattcaactcagagaagaaacgaggaggtgtagcagtgaaatcagtaatgttttttcttttcatttcctcccatagtttttgtagatcttttgctttgtttttgatttttctcttatggttgtttctacttgtcaatcagcatcctaacgactttctaattcattttcagccagattcgagtgtccatgttcactggaaaggtgctgccgaaattgttttgggatcctgcacgcactatatggatgagagtgagagttttgtagatatgagtgaagataaggtcagtaactatgtttctctttatcatgatagagtttgtctgaatgttgaacttatcattgtgtcttgactcaagaccatgtcatactgcaagtccaaatcagtgccagatttggtaatgagagtcttgatagaaatacttgttttttattctgagtataagtcttgttgtttcagatgggtgggttaaaagatgctatcgatgatatggctgcaaggagtctgcgctgtgttgcaattgccttccgaacatttgaagcggataagattccaactgatgaagagcaactctctagatgggaattacctgaggatgatcttatattgttggctatcgttggtattaaggtaagcatattcctagttcccttttgccattttgaataatcttgtgatctgcctttatatggttcttcataccagatgggccattcattgaagttcttttctgccaatacattgtaggatccatgtcgcccaggtgtcaaaaattcagttttactgtgtcaacaagctggagtcaaggtccgcagatatctcatttacttcttcccctgaggatttctctcaataattagtttatttttagagacttctctgttcttcataggcctatagtcttctaattccactattggcctcaggttcgtatggtgactggtgataacattcagactgccaaatcaattgcactggagtgtggtatattagcttcagactcagatgctagtgagcctaatctgattgaaggaaaagtatttcgatcctattcagaagaagaaagagataggatttgtgaagagatatctgtaagagccttatgattttggttgtgactgaggaacattatttaatggtacctgacattgttgctaaacttgaaggtaatgggtagatcatcacccaatgacaaacttcttcttgtgcaatcgctgaagaggaggggacacgtcgtggctgtgactggtgatggaacaatgatgctctggactgcacgaagttcaatacatttacat

SEQ ID NO: 154518 - DNA, 1156 bp, Arabidopsis thaliana landsberg; identical to SEQ ID NO: 32980

SEQ ID NO: 154519 - DNA, 652 bp, Arabidopsis thaliana landsberg; identical to SEQ ID NO: 8209

SEQ ID NO: 154520 - DNA, 686 bp, Arabidopsis thaliana landsberg
tacgaatgattctgcgagtatgaccatctcggtcactagaagtaacagtgttttgggtcaccaggaaatcgaggctagtagaagaaaagatacatggtgcattacgactctacgtagacttaaagaaagctcaccgttatctttgaaggtggcattgagatctgtaagttcacaatcaactttgcttgtaaaaatcttcaaaaaattcaaatttccttttcatgactcatgcagcttctttaaaacgaatccaacagatccgggaaggaagattacaaacacttgaccaatgcttaatccgagagtacagaatgtcgctacaaggattaatcgggccaatgtccggcaatttttgtgaggtatgtgaatttccagtattaaaaagcttgccattgcaaacagagtaatgagtcactaatgcgtaatgtttcaatactgaaaagggagtacgagctcgattgatagacaaggatgaagcaccaaaggtataatgttaaatcatatttccaataaccccattactgtgtacataaggaaggcattactgataagaattggtgggtgtgcagtgggatccaccgagcttggagaaagtatcagaggacatggttgatgattacttctgtgccttgactcccacggaacctgatcttgaccttcctgtcaaactcagagaaagcatttag

SEQ ID NO: 154521 - DNA, 610 bp, Arabidopsis thaliana landsberg; identical to SEQ ID NO: 16303

SEQ ID NO: 154522 - DNA, 787 bp, Arabidopsis thaliana landsberg; identical to SEQ ID NO: 14779

SEQ ID NO: 154523 - DNA, 2229 bp, Arabidopsis thaliana landsberg
tcatggaggtgtgtaaagctaaaggttttgtatccggaattgtaccggaaaagggtaaaccaataaccggttctcacgatagcttaagacgttggtggaagaaaaatgttcagttcgaccaaaacgctccagacgctatcacagattacttagcactcgcggctgctgctgctgcagcagagctaatcgataagtcctcatcatcctcgagcttattacacatgttacaggaactgcaagacacgacactagggtcgttactatcagcgttaatgcaacattgcatgccgccacagcggcggtttccgttagagaaaggaattgctccgccatggtggccgacggggacggagctttggtggggagaacaaggagcggcacatgagcacggtgcaccgccatatcgaaagccgcacgatttgagaaaatcttggaaagttagtgttctcgcggctgtgattaaacacatgtcgccgaatttgggaagagtgagacgtctggcgagacaatctaaaagtttgcaagataaaatgatggctaaagagactgatacttggtctcgtgtcttaaaccaagaagaagctcttctcaatatcaaagacctcaagatctcggaagatcaggacgatcaagaatcgtcggggtctaagagaaaaagtgagtctatggaaccgtctaagagtgtttacacttgccaaaactcgagttgtcctaaaagtgatgtgagttttggattcggggacaagaactcgaggacgggtcatgagatccagtgtctttatgggtcgaaccaagagccgagccagagcggtgaatatacatcttccttgcttaaaacggttccaagtattgttactaattcgactagtgaagatgattattacagtgtgagctcgcgtgcactggacaagcgagatgatgatgatcatagcattaatgggaattggatggaatatttctggttagaaaagatgcagcaggagtttcattgctctaggagattcgaagatgatgagggtactggaacggactttgaccaactcacagaatctgatcgatcggacaacgtgaatttgaaccaacttacaaaatctgatcgatcggacaacgtgaaccggagtgctttttcagtttgggacatgggttgcgaggacaaagacatatacatgttcgattaatagttaagctcgttaattagttgctatgctttacatgtacccaaagtcagaacatttctctgtacttctctagttactatacaacacaataaaataacttttagatctcgtaataataagataactaaaatataaaatattgaagaactatcgtaattatacgcagcatatcaaatgatgatcctacataagtaacagaacatacaacaaattcctctttcttgccaaggacatgagatttttttttttgaaggttgcaaatactttattttatatggtttatcttagatatgtctaaatagtctcaccatctttagagactcaacaatacaataaaatagaaataaataaaaactctaaataaacttctgtgttctgtttcatcaagaacataagatgactcaaatagcccggttatcgccgtctgcgaggtagcgtttgcggagagcggcgcagccacggagcggttcgtccctgaagaaacccatggcgttggcgtagtgacgagtagaggcggctccgttggagcgcgtgaggatcacggtagcggtgcttctgccaggatcagcctcttggcagcgggacagtggactgtgaacaagctccgccagacattgctggtcctgtcggtctcctctgacggcgactttgtatttcccatcaggtcccgtcaccgccaccccaaccaactccgattttagtgtcactctgtctttgcatactattctcactcttgcccctgtttttcatataaccctcaaaattatttcagtcttaaaattgctgcttttgttttcgcatgcatttttttttttttgataaataattacatttctaaatatagacttttggatttccttaattaaataatttgtaaaatgaaaaataaaacaataacaaattattttgaactcaaacaaacaattgaagatttacctaatgggtgattttttatttacttgtgaagataaaatttgcaagtactgtatactattatgctatttacatgtaaccaatcagatccaatgaattacaatggtacaatgtgaaa

SEQ ID NO: 154524 - DNA, 1618 bp, Arabidopsis thaliana landsberg
tattttgatttgtggaattattgattgcaggagggatagtttcataactcatagagcattttgcgatgcattagcagaagagagtgcaagagccatgccaaaccctattatgatccaagcttcaaattctcctcatcatcatcatcatcaaacacaacaaaacatcggtttctcttcgtcatcccaaaacatcatcagcaacagcaatctccatggtcctatgaagcaagaagaatcacagcatcactatcaaaatatccctccttggcttatctcatcaaaccctaaccctaatggcaacaatggtaatttgttccctcctgttgcttcttctgtgaataccgggaggtccagctttccccacccatcgccggctatgtcagccacagctttgctccagaaagcagctcaaatgggttctacgaagtcaacaactccagaggaagaagagaggtcttcgaggccaagctataataacttgatcacgactacaatggctgctatgatgacttcaccaccagaacctggcttcggatttcaagactattacatgatgaatcatcaacatcacggtggaggagaagctttcaacgggggttttgtccccggagaagagaagaacgacgtcctggacgacggtggaggagagacgagagatttcttggggctaagaccgttaatgtctcataacgagattctaagttttgctggtcttggaagttgcataaatagctctgcttctgatcagcttcatccaaagccttggcagggttagttaggttttttgctcataatatataatatgtgtatatatatttatatatctagttttgcatctttctcttgttttgttcttcgttttataaatttatatgttgaatgctcatcaaaggagaatcacagaaattgttacgagtcgtcttattcatatttcttttttttggggggttatttgaagaaaaaacaaaaacaaaagcaaggtcatgattaatggtcaactgatcatgattattggtcaactcaaaattaatattcttcgttatatgatatcacgggaaagattggcacactagctaggtaggtcaggaggtattttaatcgactgtcaagtggcttgatgagttcataattttcatttattaggttcttttgatgaaataagtatctcgaccttaaatttttatccaagtcaaaatctttttacttttttcgaaaagccaagatttttactcaaacgtccgaagaaataatgaaatataagaaaatgactatgaaatgtggcacatgaaaagcagaggaggatatgcattggattcgatctaagggtggtgactcatcttttgcttataaacctatttcgaatattggtttttcttattggatctcatctcacgcaggcacgtaaatgggacccatcagaagatagggacacatcacgttttgcttggtggcatatatttatcagtcatggacataactttaaagatgttatattgttgatacacaggtttgcagcacttcatcaattaatattttagacattgtaagatatatatatatatgtctcgggattattctaaaatgaattccatgaacataattatatatatatatatat

SEQ ID NO: 154525 - DNA, 1416 bp, Arabidopsis thaliana landsberg
acaacttcaagcttttcaaagtgtatccaaattgctcgtttgtatttcgaggtttgtctttccctttcatgtacataatgcacaatagattctgtgtccttttcattagtttttaagcatgtaaatcggttatctctgtttatgagatgaatttacgcatcgcagtaatgatttatagctagtttgtcttgtttccttctgtggctgcgtgtcaatcagttacagaagttagatcttaaaagcacaaaagaaacccgttgttgaatgttgattcaatcttcaaatatttggacatttttctagagagattttatttaaagttaagtctcttgaccaaatctaagtgtcatgaaattaggaatatcgactgttaagagcattattctgcttcactacatcacttttttatttattgcttgtgagagtaaattgaggctagcagagttgtataaatacatttagttaaatttttattgttctctaatacttttgtgttttgaaattttcaggatgatgatgctgtaaatgcagaggcttttataaataaagcttctttcttagtgagcaatagtcagaatgaagttttgaatttgcagtacaaggttggaccaccttaaagtaaactaagaatttatgtgctgggtgattaaggagcattcgttttcaagttttaatatatttctgtttcaggtctgctatgctagaattttggacatgaaaagaaagtttttagaggctgcacttcggtattacggcatatctcagattgagcaacgccaaataggggatgagtaagtgaactgacttatctttctgctacatcttttcttcaaattctcctctgttggtttcttgttcggatggaataatgattaattaatcttctatccatctttggagactctgtatttaaagctagtttcctacttttcccctctctgtgattgaatagtgttcctcttttctctctccaatacctttgtgatatctcatattctgaaacggttataatgtgttttctaatcttttcagagagattgatgagaatgctttagagcaggccctatcagctgctgtcacatgtaccatattagctggagctggtcctcagcgttctcgtgttcttgcaactttatacaaagtaattcccttttggattacaaatagaatactttcctgcttgcttatttattgttttttatttctcaatatctttctattaacaggatgagcgttgctccaagctgaagatttatcctatcctgcagaaggttctatctcttattacctacaactgtttcctttagtagacaaacatacatttacatgctattgaacatatagtattgtttgaactcacatattactctaaaatataccggcatgatgtttattagatttgactccttatccaat

SEQ ID NO: 154526 - DNA, 619 bp, Arabidopsis thaliana landsberg; identical to SEQ ID NO: 14980

SEQ ID NO: 154527 - DNA, 869 bp, Arabidopsis thaliana landsberg
tgttttgttatttaggctgaagaagctaagctgatcatacaattgggtgagatggatgctatagattacggtctctttgagcagcctagtgattcatcactcgatgtaagtagatcgttgcatcactatgagatgtctagctttcttagggatcaatatgacgctgaaggcgcttgtatgattatcaaatctggatctccaggcgcaaaatctcaggtcagtttcatcattctcaaggcacttacagtttccaactctttgcttgtaacttagtttctgtttgttcttaaacatattttgaggatttgcagatatggacagagcaagttgtaagtatgtatatcaaatgggcagaaaggctaggccaaaacgcgcgggtggctgagaaatgtagtttattgagtaataaaagtggcgtaagttcagccacgatagagtttgaattcgagtttgcttatggttatctcttaggtgagcgaggtgtgcaccgccttatcataagttccacttctaatgaggtatacattataagttataactctctttctcgtaactaatcactttcgtgtccattatcatggcccgggaaagaattaaaagaggttttctttgcgccaggaatgttcagcgactgttgatatcataccactattcttgagagcatctcctgattttgaagtaaaggaaggtgatttgattgtatcgtatcctgcaaaagaggatcacaaaatagctgagaatatggtttgtatccaccatattccgagtggagtaacactacaatcttcaggtattattgagtgtgttgttagttgttacactttggtttactgcattttatgcagatatatataacatgaggtttttgc

SEQ ID NO: 154528 - DNA, 912 bp, Arabidopsis thaliana landsberg
gttactggaaaagcactgatgcttgatgaaattataaactatgtacaatcattgcaaagacaagttgaggtatgaattgtgtatttcataaatgttcttgaaagttggagtttgaatatatcttgaatctaaaactcgtggtttgtttctttagttcttgtccatgaagctggctaccgtaaatccaaggatggagtttaatgctaatgcttctttatccacagaggtaagattctgctttgtatctataatggaatggtcagattatggaatgttttgtatctataatgtgtgtatttgtatgtgtagatgattcaaccgggggagtcgttaacgcagtctctttacgcaatggcttgctcagagcaaagacttccatcagcatactattcacttggcaagaacatgccaagattctcagacacacaattcccctcaaacgatggatttgttcacactgaggtagttttagtagtagctaacgtcagattctagaaaaactcgtttgtgcgtatcgtaaactcgatccttttatgtttttgattcattatagacaccaggattctgggaaaataatgacctgcaaagcattgttcagatgggttttggagatatcctccagcaacagagcaacaacaacaacaacaactgtaagaaaaattagaagcaaattcgtctatcgaaactatagaactatctcttatgttgttaaagtctcgtatctttatgttgcaggttctgagccaacgcttcagatgaagcttgaaccatagtccatagctatgattattatctctgttgtacatacagaaaaccaagtagtgatgagtaacggagtgaatcatattggaattttaatgtttacaatcgttgcttctttgcttgtgtctctgttgatttcttctcaacctt

SEQ ID NO: 154529 - DNA, 221 bp, Arabidopsis thaliana landsberg
gattgggtttgtttgaggattttagaatataaaactgatatgtgggttttggggaatgagcagaaagcgtgggaagttgcgcaatctccatttaagaattagatgatgatgggtttcatgatgtggatgggtggaaacacagttcatctttttagtattggtattacttgctctgatgtctgtcagcctatcagtgctcttaagagtgtaggaaagagtaa

SEQ ID NO: 154530 - DNA, 821 bp, Arabidopsis thaliana landsberg; identical to SEQ ID NO: 35346

SEQ ID NO: 154531 - DNA, 1301 bp, Arabidopsis thaliana landsberg
acatttcaattatcagcgtatccgttgaataccaggtaagatgtgaaacaatagtttttatataaatttctttctccaaaatttgttgtaccgaataaagttgtggtcatatgttatagaagtaaggacctttcattgagagcggaccatctggaatcaatggtcctgtgtccttagtcggatacaaaggagagtaaacaatcgagaaggatctctcgcagcatcaatgggactacaagattggtttgaatggtttcaacaacaaacttttcagcataaaatctgctggtcaccaaaaatgggcaaacgaaaagcttcctactggtcggatgttgacatggtacaaggtcagtatcaattaaaactttctaaaaaaaaaaatatcattttgttttcgcaaatgaacggtttcttacaatgaaatgttatctcttcaggcaaagttcaaggctcctcttggtaaagagccagtgattgtggacttgaatggtctcgggaaaggtgaggcttggatcaacggtcagagtattggtcgttactggccgagctttaactctagcgatgacggttgcaaagacgaatgtgactaccgtggggagtatggtagcgacaaatgtgcttttatgtgcggcaaaccaactcaaagatggtaactaaactactaatggtttcttcattacatcacataactttgacttacaatcattaacgtttcattattctgatggccgaactcttgtaggtaccatgttccacgatcgttcttgaatgcgagcggacataacactatcacactattcgaagaaatgggcggtaacccgtcaatggtgaacttcaagacagtagtggttggaacagtttgtgccagggctcatgaacacaacaaagtggagttgtcctgccataaccggccgatttcagcggttaaattcgcaagctttggaaatccagtggggcattgtgggtcattcgcggttggtacttgccaaggagacaaggatgctgcgaagaccgtggctaaagagtgtgttggcaaactcaactgcactatcaatgtgtcttccgacacgtttggttctactttggactgtggagattcacctaaaaaattggccgtggaattggagtgctagattagatcttagctctagctagctagtgattgcaataattttcttaaataatttagattcatcaaataatgtcgtacttgtttttgatctatcaggtttttttagatgttttgggtctaggattatggaaataaatatcatgatcgaataaaattttctcctatttaa

SEQ ID NO: 154532 - DNA, 1224 bp, Arabidopsis thaliana landsberg
tgattattgaagggaaggaaagacagctggtttttcctactaaactggctacaaatttatcggtcggtctggtagattcatcagcgcgaaaagaggtcacaccttttttattcccctcttgtcccatatctacctgctaccaacaattttcttgattttgtgtatcgctgttgtttgttgttcctcatcagggatttgtcgtgatggaaacaaacttcagaatgtatgcgtactccacatctaagttacagtgtgaaattttacgactatttgcgaggtagaagctcctgaacatcgacctgaaactttactcttctgtgtcttaaaatcctttaggtctaagtagttggtgcttcattatttccaggatagagtaccaacttccaaaccttattgcttgtgccattacaaaggaaagtttgtacaatgcatttgacaatggcatcacatcagatcaggtacagttggtttcagttgaaaaacattttgaagttatcgaatacatgattttgcccggatcctcactgtccttgaaatgttgatcaaattgttgatgcgtctctttatagtttctgaataaatattttttccttttcttttgattgtcacagattataactttcctccagcagaattctcatccacgatgtgctgatcgagtcccatctattccagaaaatgtcactgatcaggtttatactctctatgcccatcaagtgtcgattatacaaaaatgtgtataggattggtttatagaattgaaagtgtatactatctctacgtcctgattcatcaggcttatgttgaataaaaatgcattgttctggcagattcggctttgggagacagatctgcagagaattgagatgacccaggctcacttctatgatgaatttccttcaaaagtaacaaacctgaaccctcttattattttctcttctccataacgcaaaaccgttatagtaaatctcattaaccaaaatcatgttagcaggatgtgtttgaggcagcttgtgactttgctcgggaatggagaggccttctttgggaagactctaagagaatgcgacttgttgtgaaatccgaagttcacaatcagatgcgtgagtttcttcatacccaaagcaagtaacaagaagaaactcacattttcttctcgtattaaaacaaaacatcatgcttcgattaaacaaacaatgtctttcgtgaggtttcagcagaaag

SEQ ID NO: 154533 - DNA, 529 bp, Arabidopsis thaliana landsberg
  unsure (1)..(529): unsure at all n locations
gaagcctgcatcaagctagaagagagctaatgagactacccctagagcacctgtgtcagcaaagaaggcgaaagtagcagttactcctcagaaaccaggtacagatactaaccattctcttacattattcattgaatttgagaatacaagtactcatttgaacctgcattgtcttctttggcacagatgagaagaagaaaggtggaaaggctgcaaaccagagcccaaagtcggccagtcaagtctcatgtggttcatgcaagaagtgagactctctctctttctcagactcttgtcttcactgctcaatatttctgtttgttataacatttcgcttgttggcttatatctctttggcaggactttcaactcagggaatgcacttgagtctcacaacaaggccaagcacgctgctgccaagtgaagtggtttctgattagagcttatgaattctatccaatttcccctgtagtctttatgnaacataaagattaaaatatattttcttttgataacaagagtcttaatg

SEQ ID NO: 154534 - DNA, 401 bp, Arabidopsis thaliana landsberg
gtatggcttgaggaggtgtgcatcatccgtctatcaataccctgacaaggaaaaccctaattttttttggcccaaagggttttatactttaatctcatactccgattcattgtcgaaaaacgatgatgcataattcaaccgaagaatcggaatgggaggtgagacctggtggtatgctcgtccaacgaagagacgacgccgcttcctccgaccacaaacctctccaggatcccgactctgttccgccgcttttgctcaaaccatcagaatcactgtttctcatggctcagcgcaccacgatcttcatatttctcgtcacgccactttcggtaacaaaactctcagctccgtttctgatccatcgcctgaaaattccaaataatcgaagcctgagagaattt

SEQ ID NO: 154535 - DNA, 1121 bp, Arabidopsis thaliana landsberg
  unsure (1)..(1121): unsure at all n locations
atgtttttactatcattgattattttntctaccatccaagaaccatgttttttttaatctgttgtgcagcgtcggtatcttggcgactacatggatttgcaagcctttaatctggttaaatgttggacatcaaaatatggtgacgtttggaacaagtcatgtttggatcagtcccagctctagacttgtgtaggtgctacaacattggatccattctttttttttcttttttttttgtctttttagaatggaatttattaaaattagggtcaaatttttattttatttctaaaaacatgagaaaaaggcatttgtttccagcttatggacctcaaatttattgagcttggcctggttagggtttagagccagagcacgttgtttcattcgaggaacttacgcttaaaaacacaaaggcattagacaagctggtctactgttggaagaccattaacttaggtttaaagagttggttccaccactttttcacaactgtaatgtctccattgccctttataccaagcggtaacgttatattagtgatgagtcatagggtctcacttataaaaaccagaaacctgtgttgtagcacgggtgctagtctaggtattattttatatgatatatcagcacaacattacaccattctttgtaaaccttaaattcaaacataggcaactaaacttcataaatcaaatatcatcattggcactcaaattcaaagttagagcttcaccacaatgggacttctcacacgatgcttcttgtctgaccaaaccaattctccaaacacatagcccttagccacatttcccttacttttcacaaggatcactttaaacgtctttagctctccaactttggtaaaattcaagctcgttggcttcaccgcgacataaacaccatgtgggttattcaccttgacggtatacatcgaaggtcgtccaacgtttttaacagtctttgaaacggtgactttgcttgatgttaagtttggaactgtgatggaaggatagttgaggttaacaagactgattttagggcttgaacaagtaaagttgttgcccgagaagacagagatttgtgatgcattgtatccaagtgagcataagaagttgagg

SEQ ID NO: 154536 - DNA, 941 bp, Arabidopsis thaliana landsberg
acccagataattcgtttgatgtcatttacagccgtgacactattctgcacatccaagtactcaacatgatctcatagttctctcttggaagtttataattgtgaatgcttactcattctctcttttcttcaggacaaaccagccttgtttaggactttcttcaaatggcttaaaccgggaggtaaagttctcatcagcgactactgtagaagccccaaaactccatctgctgagttttcagagtacatcaaacagagaggatatgatctccatgacgttcaagcttatggacaggtttgtcttgtttgtcaaagatatttttttctattctcaaacccatttctctaatcccttcaacactgatcctaaatgtagatgctaaaagacgctggcttcactgatgtgatcgcagaggaccgtactgatcaggtaaatgaatctcatatatacaacaatattgaaaccaaggactagagtccttttaacagagtttctttttgttattgttttgtatttacagtttatgcaagtcctgaaacgtgaattagacagggtggagaaagaaaaggaaaaattcatctccgacttctccaaagtaagtgtctttcaatgtcaaagaaatcaaatctttatgttgtttacattaatctgaagctgtctcttttcgaagtttcgatgtatctcacaaacttgaataaacgcaggaggattacgatgacattgttggaggatggaagtcaaagctggagaggtgtgcatcggatgagcagaaatggggacttttcatcgccaacaagaattaagcaaatcgaaatctactacttctatgttttcttctttctttgtttgttcaataaaaatgtcatttccgctaggtgatgatatatgcctgtagtgtgttatgtggacttgttgagtggtgttaaatcttgtttccctta

SEQ ID NO: 154537 - DNA, 694 bp, Arabidopsis thaliana landsberg
atggacgtaactgctatcttcgccggtgatattttggtgaaatccagagagtatcttatccctaatgatgttgtggatgttgatggtggtattaaagcggtaagaccaccaataattcagccccctccgggaataaaactacctcttattgattttccaggatcatcttgggatttccttacgtattttgctccaagtgaaacagttaagcggccgagttcctcctcttctgataatagctctgatgaagaggaagtggaaaaggaagaaacgcgaggtatgtttgtccagttgggggatacggctcatgatgcatgcccattcgctacaaacgaggctgactcctcaagtacagtatccattatttcgccgagttatgcctctgaaggatctatcgtcccttcttggctgaagaggaaatttctgggacgagtatcatttggttctgtgtatgaaggcagttcagggtaagtgctaatatctgtagcattatctcattgctatatcttttattttctatgggagattgcactacttagtcagcttcagcatcataatatcatgtcttcttctagttcctccgttggttccgagtcgacttgttccttgatgacgccttctctggagttcccagatcgcatcagtttccggaaaaaggatttcagtgaaaaaggtcctagtcgacactttcttt

SEQ ID NO: 154538 - DNA, 1146 bp, Arabidopsis thaliana landsberg; identical to SEQ ID NO: 9600

SEQ ID NO: 154539 - DNA, 779 bp, Arabidopsis thaliana landsberg
tgattatgtactatgtacttggaaattacttacttcgaaattgtactggttgttgttgttgcaggtgatggcaagtaagacgaaaatatttatcatcttggagtatgttacaggaggagaactctttgataagattgtaagttagttaccacaattataaatggttgtgattctgtgatgtcacattatagttgtgaaatctgatagtgataacttatgaatgaaggtaaatgatgggcggatgaaagaagatgaggcgcggagatatttccaacagcttatacatgctgtggactactgtcatagcagaggggtctaccatagagacctcaaggtacatacattgtttttatagatggtaggactgaaacatggtatattgatagagaagttacctatgcatatattatgtgcagtaagccagtaattgactattgtaatgtgattttgcagcctgaaaatttactattggactcctatggaaacctcaagatctcagattttggattaagtgctttgtcccaacaagtcagggtaatgaccatctgtttccataagtattttactgttccaagaagtggtttcattttttcctaagaacttacggattttgttgtcaaaaattatatacatatatctattcttaaacatggtttatatgcttggggatatcaggatgatggactcttgcatacatcgtgtggaacaccaaactacgttgactcctgaggtcggcctaaaccaagacatgagtttctgttatatctatataatattat

SEQ ID NO: 154540 - DNA, 928 bp, Arabidopsis thaliana landsberg
catgtcttgtaagagaattcgacatgtccgaataataaatatctttttaaagtattagtatatgatttaagtgtggtagagtcttagagtagaagtaattagtaaaaatagcagaatgaggaaacaatgatgagagaagtttacttgtgggctaagagtaatgattttatatacccacccactctgttgatcctctagctgtcccgtctttttctcatcgtaactcattacttactttaatattggatacttgtttgttttggtgtgtgaatagggaggaatggtcaaccatcaccgagcttaacatggtcaacgcgtataaagatcgcaaaaggagctgcgcgtgggttagcttatctacacgagtgtagtccaaggaagttggtacatggcgacgttaagccttccaacattcttcttgattcctccttcactccttacatctctgacttcggtctcacacgtctcatcaccatcactgccgcttctgcctcttctaacgaaccttcctcctcctctgctgcgggtggtttcttaggtggagctcttccttacacttccatcaaaccctcagatagatccaacggctataaagcccccgaggcccggctccctggagggaggcctactcagaaatgggacgtatactccttcggtgttgtgcttatggagcttctcaccgggaaatcgccggattcttctccgttaagctcttcctcgacgtctacggtggttgttgaggtgccggatttggtgaagtgggtgaggaaagggtttgaagaggagactccattgtcggacatggttgatccaatgttacttcaagaagttcacgccaagcaacaagtcttgtccgtttttcatctagctctcgcatgtaccgaaggtgacccagaagtccgtccacgtataagaacgtctgtataca

SEQ ID NO: 154541 - DNA, 988 bp, Arabidopsis thaliana landsberg; identical to SEQ ID NO: 12752

SEQ ID NO: 154542 - DNA, 1197 bp, Arabidopsis thaliana landsberg
ccgtggcggccaatttcggcaactctgcgccactgatgtttttgatggctagatcttttaatgttcgtccgcggccttactctccgaatccattttctgcgctctttcctttctgtttcggataaaatcatgtttcattgagctcgattatgattatatcttgactacggtcattttgacgacgacgacagtgatgatctttgccacgcgcatcgaaaattgaattttgttttccccattttaggaattgagtcatttggatgtggttcaaatgatatttggtggttctgtttttgaatctcgtattctcttggaatatctgtatacaaggtctcactggttaatgtttcttctcttacttctgttcagtgattctaaagagtgagatgttaaagcagactataagatggatttgatacttcatccagtagtagcttaagaaatattgcggttatgtcagagtctcgtcaaaggcctccttttaagggcccgagatggattatcactttggttgttctggttacggttgttgtcattaccgcattcatatatcctccgcggaattctgtggcttgctatatgttttctggtcctggatgtcctttataccagcagtttttgtttgtacctactcgggaattgactgactctgaagctgctgctcaagttgtcatgaatgaaatcatgaacctacctcaatctaagacagcaaatcccaagttagctttcatgttcttaactccagggacgctgccttttgagcctctctgggaaatgtttttccgtgtaaggatttctcattacaatgtcctttaatcagttggagtttcttagagatgtgacttttttgtcaaatgtatttcttgacgaaatagtgatggttcctttttgttgattcagggtcatgagaacaaattttcagtttatgtgcatgcctcaaagaaaagtcctgtacatacaagcagctattttgttggtcgagatattcacagtcacaaggtaaatgagtttggttacaccattcagtcggttttatgcagaaattttgattagtagtcattcctacatgtagctttattatgttaatcttgtgaaggttgcttggggtcagatatcaatggttcatgcacaaagaaggctattagctcatgctctcgttgaacctgataatcaacactttatattgctgtcagatag

SEQ ID NO: 154543 - DNA, 788 bp, Arabidopsis thaliana landsberg
ggactatagttttctctgcattcagattattgtgtccaccaaaagccccaagctaagggtatgtgtctctattatatcattttttgtttgattcattgaagatggagatctcttatagattatttgattttgtctttgatatacctcaaattgccttaagcttactccctcaaataagagatcgtcgttagcacttaagggtcactgagctcttgatgttcacacaatagacttatgatgttgtttaataacctaaatgaagtaattgaatgttaaagacaaataagcaagtaaatgagttgtaaattcaagtgatttaagcgttgggtctaaggaattgtctcgggagatagataaattgtagatctagctaatattaggattgttatcgcaccgttctcgaactcaaactatgattctagagtaaccgatggcgttccgcggaactctctatacttagataatcagagaagccgagaaatcctatgctaaagcatgcattgttaataagcttgattagttcacctagtatctaaactagagcccttctatgagcctaccagttctttcttaaatgcctaggctcatctatgatagttcaaataacaagtacgtatggcgggcatacctattatcgaatatcaagttctaggtgatcaatctaaaactagcaataagaataatgaagatgaagaactctaagaataatcttaaggggttttcgatctactaatccatctaaatccctaatgagactccctaaaccaaacaaggtgattactcagaca

SEQ ID NO: 154544 - DNA, 626 bp, Arabidopsis thaliana landsberg
  unsure (1)..(626): unsure at all n locations
tgctgataagttactaaatgagttcatcgaggagcagttgatagattatgcaaagancagcaagaaagttgttgggaattctacttcactactttctccgtatctccatttcggggaaataagcgtcagacacgttttccagtgtgcccggatgaaacaaattatatgggcaagagataagaacagtgaaggagaagaaagtgcagatctttttcttaggggaatcggtttaagagagtattctcggtatatatgtttcaacttccnnnnnnnnnnnnnnnnnnngttgttgagtcatcttcggtttttcccttgggatgctgatgttgataagttcaaggcctggagacaaggcaggaccggttatccgttggtggatgccggaatgagagagctttgggctaccggatggatgcataacagaataagagtgattgtttcaagctttgctgtgaagtttcttctccttccatggaaatggggaatgaagtatttctgggatacacttttggatgctgatttggaatgtgacatccttggctggcagtatatctctgggaggtatccccgatggccacgagcaagatcgaaaggacaatcccgcggtaaactacaaaacttgtctt

SEQ ID NO: 154545 - DNA, 785 bp, Arabidopsis thaliana landsberg
cgtcatgcattatcctcgtgttcctttttcatttttgctttttttacgtatgtttcctcctgagtcgggactatggttgtacacaatagattaaaccaaatgcaactaatataatgtctcatgtttataaaagtattacttagcatttttgaatgtgtgtatttatgtttttcaacgcacgtggaatcattgggatcacatatatatcattcaagtcttctctccaattgattgtttctccttttatgtttgaacaatgagatgattgacctgtcttgttcttgttcatggccattgtcataaagctatatgtatagtaaatattggtatagtcaattacaatatattaatattaatatgagaagagtgagaaaaaggtgctaattaaactttaacttcttgaaggttttggagattgtcactaccaaacggtgcaacaagagatcaccacatggctaacccttttggaccaacgagtcctacactcgaatcaattagcttagagccaatgttggtgattgtcggcggctcagaactcttgagagatagggccaaggaatatgcatataaattaaagaagatgggaggaaaaagggtagattacattgaattcgaaaacaaggagcatggtttctactccaactgtccatcttccgaggctgcggaacaagttctccgtatcattggagactttatgaacaacttgtcttaagtattttagcatttggcttgttgaaggtaattaagtgtttaattcaattaggattccatctcaataatattaa

SEQ ID NO: 154546 - DNA, 346 bp, Arabidopsis thaliana landsberg; identical to SEQ ID NO: 17492

SEQ ID NO: 154547 - DNA, 412 bp, Arabidopsis thaliana landsberg
ctctgtttctttctccactctctctctctctctcgttgcaagcaacttgttttctgaatccaaagaagacgataccgatgaatggagctataggaggtgaccttttgctcaattttcctgccatgtcggtcctagagcgccaaagggctcacctcaagtacctcgatcccacctttgattctcctctcgccggcttcttggccgattcttcaatgattaccggcggcgagatggacagctatctttcgactgccggtttgaatcttccgatgatgtacggtgagacgacggtggaaggtgattcaagactctcaatttcgccgcaatcgacgcttgggactgtcacctccaacagtcgtcagcttgatacagcgactaaggtttgtgtgtaaagacaacctaagcttaagtt

SEQ ID NO: 154548 - DNA, 497 bp, Arabidopsis thaliana landsberg
atgacgttgatctcatcagctcatggggtgatgtatgtatgcggagacctgattttctcatcgcacatgatattcactctagtctttgtccgtactgcccagaaatatggcactaaaaggtaaaacttcttttggcaacatcttaaaggcttctctgtaaatcacatctctgcatcattcttttgtttatcccgtatctcaggttcataaagctgtttgggtggctcgctgcaattgtgcagagcctcttgatcattgcctctcgtaaacattacagtgtcgatgtagttgttgcatggtatgttttactatcacacaaaaactgacccaataaacattttcactgaatacagagagatatattgacttgttgtgttgattcttccactgtttaggtatactgtgaatttggtggtgccctgtccacccaagaaattaccaggtttgatctaataaccatattccctgaagcttaacactatctgtcttatttttcg

SEQ ID NO: 154549 - DNA, 628 bp, Arabidopsis thaliana landsberg
ttagtgtttctcatagagatttgaggactatatgttaagttcatactaagaaaatgtttttggtatgtttttgcagcgtttctctaaagtagaatctttggtattcggaaaaatgtcgtttctgagtattgttcgtgatgttagagatactgtaggaagcttttcgagacgtagtttcgacgtgagagtatctaatgggacgactcatcagaggagtaaatctcacggtgttgaggcacatattgaagatcttattgtaatcaagaacactcgttgggctaatttaccggctgcgctattacgagatgtgatgaaaaagttggatgaaagcgagagtacttggcctgcacgtaaacaagtcgttgcttgtgctggtgtctgcaagacatggagactaatgtgcaaagatattgtgaaaagtcctgagttctaaggaaaactcacatttccagtttcgttgaaacaggttcgtggtttcgttattcgttacttccattcgacattatgtcggttattctgacaactcttttgatggtgaagcccgggcctagggatggaatcatacaatgttatatcaaaagagacaagtctaacatgacttaccacctttacctttctcttagtcctg

SEQ ID NO: 154550 - DNA, 478 bp, Arabidopsis thaliana landsberg
gtttatgttactgttcgttgaaaagtccttgtttgtgttcttggaacagttgagtacatgcccagaagagaatacagaggtggaagcattcaattcatcattggcttctcttatcacatcaggtattgtacttgtacttgtacttaactttttcattcacaagaatcaaaattgtcattaaaacattgcagtgatctctttgaaatgtggttttgattccttttttcgcagtgaacaagaacgatatagagtcatcgaagctcgctttcgtttcatcagctggtgcatttgagaaatggactactttgacaggtcttttggaacagcttaagggactgtgataggctggctacaaattctttactctttttttgtattttccaacagatttgtcaaagagggtcttttttttctccaaataatcctttgaataatcatcattcactttcttaacttctttggttattatttaccttta

SEQ ID NO: 154551 - DNA, 1443 bp, Arabidopsis thaliana landsberg
ggttttgttatggcgtcttattcttgtgctctttcattttttgtttgttacagaggaagaagcaggaagattgaggcactttatcgatcagcctgcctatgtggatctgcactgggtactacctacgtctcatttatcttctagagacaggattttgattctttgattcatgtttttttgtatctctgtctgtagggaatgtttgtgcctgctattaaggggcagggtacagaggagcagcagaagaagtggttgtcgctggcgaataagatgcagattattgggtgttatgcacagactgagcttggtcatggctcaaatgttcaaggacttgagacaactgccacatttgatcccaagactgatgagtttgtaattcacactccaactcagactgcatccaaagtgagtataccaagaatcctttgattgagtattatgcacagtctctcttagttgtttaagattttcatctgtcttgattgttgaatagtggtggcctggtgggttaggaaaagtttctactcatgctgttatttatgctcgtctaataaccaatggcaaagaccatggtgtacatggtaaggcactagaacgatttcttattcatttttttaataatcatctgtagtattgagtaacaagatttttctgtttttcaggattcatcgtgcagctgcgtagtttggatgatcattctcctcttccgggtataaccgttggtgatatcggaatgaagtttggaaacggggcatataactcaatggacaatggttttcttatgtttgatcattttcgcattcctagagatcaaatgctcatgaggtcctctctctttggccctttctatgaataaaagcattttatcatttaatatccctaagagaaacagatttatggttgtgcatttttcttcttatagactgtcaaaagttacaagagaaggaaaatatgtagcatcagatgttccaaggcaattggtgtatggtactatggtgtatgtgagacagtctattgtgtcaaatgcttccaccgcgctgtctcgagcagtttgcatagctacaaggtacagcgcagtgcggaggcagtttggcgcacataatggtggcattgagacacaggtacttattaacccatttcatgtgcatggttgtttacacctattgatgttggatcataacaaatttcaaagtatgtttgcttgtatatcttgcggttttagccaaatttgtctgtaagttcctgctgaactctttttcttcgacttggcgtttttataggttttttaaaactctcattaacgtctgctgactattatgttggctagaaaaggaaatgtaatatatatctgcatgttgttatcacaggtgattgattataaaactcagcagaacaggctatttcctctgctagcatctgcatatgcatttcgatttgttggag

SEQ ID NO: 154552 - DNA, 1536 bp, Arabidopsis thaliana landsberg; identical to SEQ ID NO: 17327

SEQ ID NO: 154553 - DNA, 575 bp, Arabidopsis thaliana landsberg
attcttacttttgtaagcatagtactggttcattgtcttataagatcaaagattgagtatgtgattttgaaaccttttttctggttttcttttggtgaatagattgatgagaacgtggcgagagagattattaaccacagatcacttcgtcatcccaatataatccggtttaaggaggtaactgcattttttctatggcttcatggtgtcatgtttaaaccgatggtgattagtctcagcggaagttggtatcctaagttcactgttgtggcatttccaggtggttttgacaccaacgcacatcgccattgctatggaatatgccgctggcggtgagctatttgagcgtatatgtagtgctggaagattcagtgaggatgaggtaagcttctcttgccatttaaagtcatggtggtgtactaaatgatcaatttcagagctgttttgtggtctgagattaattgagaggaaaggaaagaggagagcttgtagagtcagatttgtgttttgaagtatacccagccaaaggaatttctgttgtgggtaataaggatcagcttacgagattatgatag

SEQ ID NO: 154554 - DNA, 1270 bp, Arabidopsis thaliana landsberg
tgaggcagcaaggacaacagaacgatcatatctcctcatggatactgagcttatggtttctggtttatcaacagattttgggaaaaacaaatgatactcttattggaaaagtcattgctgctcaagcaaaacttccacccactagaatatcaaaggacggttccattatggaatgggcagaagactttgaggacccagaggtacatcatagacatgtttcacatctctttggcctcttcccgggtcacacaatcactgttgagaagtctccagaacttgctaaagctgtggaagcaactcttaaaaaaagaggtttgtgtgattctttcttctctcccattactatttccacaatttcatcgacgtggttggagcaatatataatgttccactgattgacgcaggagaggaaggaccaggatggtcaaccacctggaaagccgccttgtgggcaaggcttcacaatagcgagcacgcatatcggatggttacacatatttttgatcttgtggatccgttgaacgaacgtaactatgaaggaggactgtatagtaacatgttcactgcacacccgccattccagatcgatgctaattttgggtaagttgttgcaaacacttacctataagatatgtggaatgtttacattcacattccaacgcactataccatttgatgactagtctaaacttacacatgagcttttttccttggcagattcgcagcagcggtagcagaaatgttagtgcagagcactacgaaggatctatatttgctcccggcacttccagcagataaatggcctaacggcattgtgaatgggctaagggcaaggggcggtgtgacggttagtataaagtggatggaagggaaccttgtggagtttggtctttggtcggaacagattgtttccaccagaatagtgtacagaggaatctctgcggctgccgaattgttgccagggaaagtctttacttttgacaaggatttgagatgcattcggaccgacaagttatagaagtaagagactcaatctgtttttgttcatctaatagaggaagtccattgtttctcatcgttcgacgagttatatgtgcaagtgtaagtgtgtaacacaaatgtatccaaaaaggtttacagtgaaatcatgtatcttggtatcaatacttttattgttatttggcttcacattgtatcaacaacattaacatgaatcatatgaaattttttcacattcaacttccttattgtaaagattgactagccttgt

SEQ ID NO: 154555 - DNA, 1255 bp, Arabidopsis thaliana landsberg
catagatgttgatccacttgcattttatcctatctgtcaggaacaggtaaatcgtacacagtgtaaggctttgactatggtatgtgctcaagtaagttccattctccaatacatattttactgacatatgaattgaaattgctaaggtagtcttgttcatgactcttttggttgcatcaaacataattgtaggctatggtaagccatgtatccgtgacaattggtgggtcgaatggtcattttgaattgaatgtattcaagccggttatcgcaagcgctctcttacatgtacattaatctcttcacttgtgatttttttgtcatttatctactattaagatttcatcttaccgatttgatgtcatgtcttcactagtccgttagactaatagcagatgcttcagcttcatttgagaaagtctgtgttagaggcattgaggcctacatagaaaggatctcaaagctattgctcgaggtaggcttcttctcgttgattggccttaaaattattcatgtgtggaaatgatttatatataggaactaagtctttgttttatgtatttctctctagtctcttatgcttgtgacatcattgaatcctgtaagtctctaaatattaaacttctttgtcaagtcatccatattctcattatgattacaaatgaatttacctcaatgctaattcctcctttaccagaaaattggctatgacaatgctgcagcagtagccaaaagagctcacaaagaaggatgcacattaaaggtaaacaataaactattaacgttttcatcactaaataaatcggaatttaaacccatttttagcaagagaaaacatgttcatgtttgttacaatatatttgttgttctattttggatttaaaccttctccagtgaaaattatataatacaatacctttgagatccctaaatctttgctttaatttattctatagcacgcagctatgaagttaggtgttcttacttcggaagagtttgatactcttgttgttcccgagaagatgattggtccatctgattaagtactttataatggagccaaaagcttcaaatacaaagtggatgtttgggggcttttgcatcaagttgtgtttattcttttgtaataaattgctgcatgcatgtatgcttgtgttcaaaatttttggatttggtttagagtcatgtgattatagtattctaagtaaattatcataaagtttggcatatatacttaaagttaataaaaaaaaaa

SEQ ID NO: 154556 - DNA, 526 bp, Arabidopsis thaliana landsberg
atgtgtacagctggtgctaatagatccacaaggcgtcgctctgatcaaactagtgttgactcagttgagcttaacaagccggtaagagatgtgggtggggttttcttttcttttcttaaagttttgctgtttggagtttggctcaccaagtttcattttcttgttcagagaaagtccaaggctgtggctcctcctgtagaggaaccaaaatttagctgtccaatctgtctgtgtccatttactcaggaggtttcaacgaaatgtggtcatattttctgcaaaaagtgcataaagaatgcgttatccctccaagctaaatgcccgacatgtaggaaaaaaatcactgttaaggaccttatccgggtcttccttccaaccaccagatgaatgatacagaaacatcactagtagccatgtaagtctagctaatgagatttgtttttttctgatgaattctaaaaattgcgccgttcagatccttttctttctcttctcttgcagggatagtggtctagcgatgctacct

SEQ ID NO: 154557 - DNA, 473 bp, Arabidopsis thaliana landsberg
aaacgggcacctgcgctgttagacaatttactccaagcttttctcatggctcctttcttcgtgttgctcgaggtaaaagttgttggtgttatgttatgttgtgatttgtttgttatctcctgctaccttattatactgctctgtggaaactgtaaccagaatacatgaaaagctaatgtggaaatgtttgaatgaatacaggttcttcaatcggttttcgggtatgaaccatatcccggttttcaagcgcgtgtgaatgccaaggtagaaagtgacatcaaggaatatagggcaaagaagcagaagaagaataagatcacataagcttggattatatataactgaagaacttgaacccattgtcgtgtttctataaccgaaatgataataagaccaccatgatccatggattgatgtatttgtgtgtaaactatgtttcaatatattgaaaataatatgtttcagtcactcat

SEQ ID NO: 154558 - DNA, 2270 bp, Arabidopsis thaliana landsberg
tctcaaaattccggccttgttcttggaaagcttaggttaatattctatttagtgatacttttacctacgaacaattgttttatttgtcttcttatatattaattttaacaacaatggaaatgtgcagtggacgtcacgctgtgaaagatcggctgaaagaggtattccttgtgacaattgtacctacctactagattacacttcctagagataaatattagatgattcatatacttacttatgtgtatattttctattttcagttgggatatgaactcgatgatgagaaattgaacgctgtcttctcactattcagagatttaaccaagaataaaaaggttttcaatttctatatattttgtatcttctcgtgcacatgcatgcaatacggttaaactaacacatctaattttaaatttttagaaaagaaaattttaaacttttattttgaaaaaaatatctcgaacttaatttgttttcatttgtcatttttttccagagaatcacagatgctgatatgaaggcattagtaacatctagcgatggaatttctttagagaaatcaaacggcgctaacggtttaaagtctaacggctatataccagttcttcaggtttcatctaatgtgtaaacacgttgtatctcttgtatatttgtgtaccacagtaatatcaatttccatttgataatgccgttttttgttgtaatgtattaaaaacagtattaaataaaaggaactgctttatttcctaatgaataaatttatttttatgcaacatatgaaaatagtgtgttttgataatagtctcactagtatgtttttagtgtcttttaaattaggaaaaaacattttcttacaaaactcgcaatgcctctatttcaaatgagatattgttttatctacaattaaaataagcaatgttttagaatttcaatatcaattttagcatgtaatagctataccctcaaactatatagtaacattgaaagtcaccaatcaaaggacaaagtgatcccatatgaaatttgttacaaaaagaaaccaaacttgaactatcttcgagtttgggctgtaggacggtcgttagattaccccaaccaaagattaagactttgggagaaagaggtattgattgcatctttattggttatgccttacattccaaggcatataggttttatgtcatagaacctaatgattctatagcggtttacatcgtaattgagtcaagagatgcaatatttgatgagaaccgtttttcgtttatacctataccaaaggatttagttcctagttcaagtggaacagagaagggagacaacacgttcgttcctcctaatgagtcacctatgcttcgtaagagtaaatgagggagaatcgaaaaatctttcggtcccgattttcaactttatttagttgaagggtcaagagatgagattgatttccaatactcatattgttatcatattgatgatgaacctagaaattttaatgaggctatgacgtctaatgacgttgctttttggaaagaagccgtaaatgatgaaatggattccatcatgggaaataataagtggttcttaacggatcttcgacccggttgcaagcctttaggctgcaaatggatcttcaagaagaagatgaaagtcgatggaacagtcgataagtttaaggctcgattggtaactcaaggttttagacaaaaggaaggcattgattatttcgatacatatgctccggttgttaggatctcctctataaggtttttaattggtttggcatccattcatgaccttatgatccacctaatggatgtcaagacggcattcttaaacggcgtcttggaagaagaggtgtatatgaaacaacccgaaaggtttgttatgtcaggtaatgagcataaagtgtgtaagttggtaaaatcagcgtatgggttaaagcaagcacctaaacagtggcatcaaaggtttgacgaggctgtcttgtcaaatggattacaattaaatcagtcggacaagtgtttgtatagcatatttgatgattccggtaatggagtgatcatttgtttatatgttgatgacatgttgatctttggcactaaccttagacaagtagaacttacaaaagagttcttgtcatcaaattttgccatgaaagacatgggggaggcggatgtgattctcggaatttgaatcaagcgtgagagcaaaggaaaatccttaacacaatctcattacattgaaaaagtgcttaaaaggttcgattatag

SEQ ID NO: 154559 - DNA, 428 bp, Arabidopsis thaliana landsberg
cgtaagaacaaaagctcatctctcaattaccgtcacatcactatttccgatgctcttgagggctgcgaggcttgatccgggtttgcaggcaaacacaagggtcttgagttttggtctcgaagctcatcagcagcatgttgctcctatggcacctgtgatgaagctacaaggagatcaaaaggtctcaaacggagctaggaacgggtttcatgggttagcggatcaacggcttgtagctcgggtagaaaatggagatgactgctcaagcggatcctctgtgaccacctctaacaatcactcagtggatgaatcaagagcacaaagcggcagaattgttgaaccacaaatgaacaacaataacaacatgaatggttatgcttgcatcccaggtgttccatggccttacacgtggaatccagcgatgcccc

SEQ ID NO: 154560 - DNA, 677 bp, Arabidopsis thaliana landsberg
tttttcaacatactaataccaagcattttggtattttcaggaacagggttttggtatttgctttatacaaggtggaagctgaacgtctcgagcgttttcttcagcaaaggttctatcttttagcccaaatcacctcaacaaaagaggaaaaacatctttgatatttttgctcatgaaatgcaatgattctaagatttatttacacaactattttagaggttggaaagctgtatctatccacggaaacaaagcacagagcgaacgtaccaggtctttatcattgttcaaagaaggatcctgcccgttactcgtatgtgtactctcatcattccactttggctggttctgaaacagagcattgacactgttttataaattacaggtggctactgacgttgcagcaagagggcttgatatccccgacgtggaagttgtgataaactacactttccctttaacaacagaggattatgtacacagaatcgggaggacaggaagagcgggtaaaaagggcgttgcacacacgttcttcacgccactgaacaaggtaattctgaaaacactcttttaaattctttgagctgcatcctttccacagagtagttgagaattggagatgattcaaatatgaatgtgtcttcctgacagggtctggcaggagaacttgtcaatgatac

SEQ ID NO: 154561 - DNA, 514 bp, Arabidopsis thaliana landsberg
attaactaacatatcgtttctcttatccacagtactgtgtgaaaaacccagatttctcaacgaaacctacaacactaaaaatgggatttactctgaagggtgtggattaaacaatgtcatgatgtcttggggccatgacgactacatgtacctggtaattacttgattatttttacagtttagagtaatgttttttcagaaaagtttaatcaatcttgagttttgtaaaggataaagttgatgttaattaatattttttttcaggtggctaaagaaaacggaagtaccttgccgtcggctggacagtttatcataagataccattccttttaccgtaagcacttcaactaagaaatatatgattttagtaacatcataaatttgtagctatgagtaaaggttattttaataaatcaattgaatatatccagctccgcacacggctggagaatacacccatcaaatgaacaaggaagacaaggagaatctgaagtggctacacgttttcaagtaa

SEQ ID NO: 154562 - DNA, 703 bp, Arabidopsis thaliana landsberg
ctaccatgcctatcatcctccaatccgccctcgtctcaaatctttacttcatttctcaggtacagccattctttccacttcactgtatgggacgtatctccacaataacatattgttgacattgaattttcctcgtggtcaacagcttctctaccggaagttcagcggaaatttctttgtaaaccttttgggacaatggaaagaatctgagtacagtggacaatctattccagttagtggtctggcttacctcatcacagctccagcaaggtaatgcagcagtgtctttcattattcgttttaatcaattcaaaattggcatgcatcaactgagcttgatgaatatatgttactatgtggttgcagtttctctgacatggcagctcacccgttccatgcactgttctacatcgtcttcatgctcactgcttgtgctcttttctcaaagacatggattgaagtctctggatcttctgctagggatgtagctaagcagctaaaggtaataaaatcataacagcttgatgtatataacctgaatgttaacatggtgttggatctctgactctgaaaattaaatgtcacaggaacggcaaatggtgatgccaggacacagagcatcaaccttacagaaggaactgaacagatacatacaaacaacagcagcttttggaggagtttgtatcggtgcactcccgtttgg

SEQ ID NO: 154563 - DNA, 1129 bp, Arabidopsis thaliana landsberg
tctcctttaatggtgaacatggcattatcgtttgtgcaccaccacattggatctgccggggtaggaaactcacctttttgggatagaagacaggcatatgtagctgaatctccagaatcttcagggatttcacttaggttctcccggtagcatgggatttcctggctcgtctccctcacatccaatggattttggttctcataaggttttttctcatgtcggtgggaatcgcatggaggccaattcaaaaaatgctgtattacgatcatcgcgacagatgcctcacctctttactggaaggagcccaatgctttcagtgtcaggctcatttgacttgcctaatgaacgatacaggaatctctctcaccgaagaagtgaatctaactctagtaatgctgaaaagaaactgtatgagcttgatgtagatcgcatattacgtggggaagacagtagaacaacgttgatgataaagaacattcctaataagtaagtgaattcaccttttctccctattattccctgttttataacattatatgttgctcatttgttcctatttgtctttgttctggtaatggtttaggtatacttctaagatgctcctagctgctattgatgagtactgtaaaggaacatatgattttctttatttgccaattgacttcaaggtatgcaggcctcttacctgttttttcatctaatggagtctaatgcagccttatagcttagggtattttctacatcgatataaatgaaccttccttctatttgcagaataaatgcaatgtcggatatgctttcatcaaccttatcgaacctgaaaatattgttccgttttataaggtataagctttgtacctttttatgatcaatttgtgtagatgatgtatcattgttctttagaaaaaaaggaaaaaagcgtttggttacaagtttaaaaccttaacaggcattcaacggtaagaaatgggaaaagttcaacagcgagaaggtggcatcgcttgcatatggtcggattcaggggaaatcagctcttattgcccatttccagaactcaagtttgatgaacgaagacaaacgttgcaggcctattctcttccacactgctggtccaaatgctggtgatcag

SEQ ID NO: 154564 - DNA, 788 bp, Arabidopsis thaliana landsberg; identical to SEQ ID NO: 17841

SEQ ID NO: 154565 - DNA, 527 bp, Arabidopsis thaliana landsberg; identical to SEQ ID NO: 11799
  unsure (1)..(527): unsure at all n locations

SEQ ID NO: 154566 - DNA, 369 bp, Arabidopsis thaliana landsberg
  unsure (1)..(369): unsure at all n locations
cagaaacatggccgcaggtggaagaatgccggttcctacttcttccaagaaatcggaaaccgacaccacatagcgtgtgccgcgcgagaaaccgactttctcggtgggagatctgaagaaagcaatcccgccgcattgtttcaaacgctcaatccctcgctctttctactaccttatcagtgacatcattatagcctgatgcttatactacgtcgccaccaattacttctgtctcctccctcagcctctctcttacttggcttggccactctattgtgcctgtcaaggctgtgtcctaactggtatctgggtcatatgcccacgttgcggtcaccacgcattcagngactaccaatggctggatgacac

SEQ ID NO: 154567 - DNA, 714 bp, Arabidopsis thaliana landsberg; identical to SEQ ID NO: 47150
  unsure (1)..(714): unsure at all n locations

SEQ ID NO: 154568 - DNA, 659 bp, Arabidopsis thaliana landsberg; identical to SEQ ID NO: 41307

SEQ ID NO: 154569 - DNA, 1541 bp, Arabidopsis thaliana landsberg
aaataaatgtaagaatcaagaaagaacataaaaaaaaacaatgattaccatataaatttatgaagtgaaattaccagatctggaactcagactgaaaaagaagaaccctaaatgactcaaaatccactttccaaaatgaaaaacaacaacaaacaaacaaaaaacaccgacagagtcaaacaacaaatcccaaacagagagatccttctaaaacccaacactactcgaacaatgtcttaaaataaagtcggtttaaagttggagtaaccgtcggatctccgttctaaatccaagtccgattcagaccaaacaaaaacaataacaaagaaggagataatataccgtatattagaaatttagagttgtgttagttcaatgcttccatagcgtctctctctctcttcctgggagctttgatgctctctaaagaactgtttttctctttggtggtggtttcagagactttcagtgaccagacggaaagagaaaataaatattttgcgcaaaataatatttctaattttaaccaaaaagtaagcgagcatctccataactccaatcttacgccgttgatttctagccgttggatcttctctgaaatttagtatttttgtcaaacatttttagtttaactaaaattaatttttacagaaaaattcagaactcgaaagagggaaaattaaagaagagttaagagagcaatctataaagaaaaaaagctgaaaatcattaaatgcgataattaaaatagaagaaaaagggtaatttagtctaaaaatttgggtatgtcatcagaagtctagattttaaaatacaacagtaacagatatttaattgaaattgctcagattttgttatagtcgtcgagattacttcgaaaacaagtgtaagaataccgcgacgttctaatgaagcattcgaagtaaatttacaatcatacccttgcactgtcgttgaatacgaaagaccaacttttgcaccagaggcacgtgcgaaatttattaaccagtgcctagtggttcccgctccagtgaagtagtctcgttaaccgttatgggcctaagcccaatccataaaattattataaaaaaaaaaatgatcatggaagaaaaaagcttgtgattgtgagacatttcatcgaacacttggtgatcaatatttgaaaacgaagagcacagccaaaattcgataaaccctaaggaacagtgagatggagaagaagaaagcaatgcaaattgaaggttacccgatcgagggattgtcgattggtgggcacgagacgtgcatcatatttccatctcttcggatagctttcgacattggtcgttgcccacatcgcgcaatttctcaagacttcctcttcatctctcactctcacatggatcatatcgtaagtatcttgaatcttctataaaaagacttgaaatttcggattatattttgcaaagatccttcttttgactttttgttttaagaacaattttgataagcctttgttgagactgccaccatgtgtttattatcattagcatattgctctg

SEQ ID NO: 154570 - DNA, 1059 bp, Arabidopsis thaliana landsberg
acttatcaaacaagaatggccagggatctctcaatccacacttgacatcagcaagattcaattcaacagagtaatcaatcatataactttatattaaagtcacattagacatataattgtttgtcttctgttttacgaaaatcattaatttgtttttttttgcaggatatagggttagctatagtggagagttattcgagaattcttgaaagcttggctcacacggtaatgtcaagaatagaagatgttcttgaagctgatcagctaacacaaaaccctgagctcgcgatgtgtaagatccatatagtgaaggaaacagagagtccagagaaggaagaagagccaaatttttgtcttttagaagatagacctaaaaagcagaagcctaccatttcactatctgaggtaatgcaatggaatatcgaaaccaatgaaccgaggaaagaaaagagcgacaagaaacttttaaccagagtgtcaagcatgatcatgtctaacaacaagaagactacttcttatcttgaatctcttggaaccacaagaagtccaaccgcggggcgatactcttgaaaaaaaaaagatttcttttgtaaaattaggggaagaaaaaacgtttcaaatgtaacagataaacagaatatacataaaattacttaaaagggtttgcagtattgagaaatgttgatgagttttagaaggaagaagagaaaggtaacatgaatatagatcagagcttgccgcgaggaccgagcttaggcggctcctgaggacctctcttgatgggaagaacttcgccggtagaggtagcgctgacataagtaagcaaagagcctcctccaaggatcaagaacttgaggagcaatcctctctttgtgaatggggcagcgaatgtctcaaagaacttgctctacaagtaacgaaagtagaagagaatctcttctcagaatagtgtttgattgaagtagaaaagtcaagttaggttatgagatgaagaaacatgaagaggattgtaaggagaaggagcatcagagccgtatacgtcccattgacctgttgtgt

SEQ ID NO: 154571 - DNA, 796 bp, Arabidopsis thaliana landsberg
cccggatggaatcaagaactcatgctgtctgttcctgattgcttggccctgtgaaattggtaagagcagggtcattttctattgacgatttcagtcactgccaaagcttatatatatatcttacggtttcttatgtggttgcagcaagtgtatgattatgatacattttctgctgatgacataatgggagaagcagatattgatatacaacctttgataacatctgcaatggcttttggggatccagaaatgtttggggatatgcagattgggaaatggctaaaatcgcatgataatccattaatagatgacagtatcattaacattgttgatgggaaagtgaaacaggaggttcagatcaagcttcagaatgtagagtctggagaattagagctagaaatggaatggctgccacttgaccaataagtgtcatataggtctcataacctttataaatgtactgattgatttaattctttgttttttttttgtctctccatttgttggaaattttcaaaaatctctttgcatttttttcctcatttcagaggtaaatgtattttgatgtttgtataaaccaatggattactatatgatgttttgattgatggaaaaagggtgaaatatccacttatgtaacatacactttcacttgtgatcatcaatttacttgagagtcgtttcttgaaagtttcaaactttccacaacagaaactctacttaagatgatcaaggcattgtcaaatgaaatgctttggaaggaagaaactgcctctccttcgttaaaccaagctca

SEQ ID NO: 154572 - DNA, 536 bp, Arabidopsis thaliana landsberg
aaccggctgcttccgtgccgcctccaaaaaagcaaggaaaaggaatgttaaagtccatgttcaaaaggaaaacatctgactcctcttctaatatcgagaaagagtacgcagaacctgatgtagttgaagaactctttgaagagggctctgctatgctatcagagaggtgtgattctctgaatatatgtgcttaagcatataccatttttcatacttgatagcttcatttcgatctactaatcttaaccaagttttctttcgtttttttcttctgtttattgcagattagacacaaagtacccgctttgcaatatgtttaagttgttcatgtgtgctgtgtgtcaagtagaagtgaaacctggagaaggtgtctcgatccatgccgggtcggataattgccgtaagcttcgtccctgggatggtccattcctttgtgcaagttgccaagataagaaagacgcaatggaagggaaaagatcatcgggaggtacacactatacttatatatccttctttattacctccgttattttgca

SEQ ID NO: 154573 - DNA, 640 bp, Arabidopsis thaliana landsberg
ccggaaacatacttataaacgacggtaaaataacgaaacaaacattaaaacgcaccgtatttgtagcacaagacgatcttctttaccctcacttaaccgtacgtgaaaccttagttttcgtggctttgcttcgtcttcctcggagtctaacaagagacgttaaactcagagccgctgaatcggttatatcggagctaggtttaacgaaatgtgagaacacagtcgttgggaacactttcattagaggtatctctggtggagaaaggaaacgagttagtatagctcatgaattgcttataaacccgagtcttttggttcttgatgagcctacttcgggtcttgatgctacggcggcgctccggttggttcagactcttgccgggttggctcatgggaaaggaaaaacggtggttacgtcgattcatcagccgtcgagtcgtgtgtttcagatgtttgatacggtgcttcttttgagtgaaggaaagtgtttgttcgtcggaaaaggaagagacgccatggcttactttgaatccgtcggattttcgccggcttttcctatgaatccggctgattttcttcttgatcttgctaacggtacgttctcttttaaaatacagcttttaaactttcatttacgtag

SEQ ID NO: 154574 - DNA, 544 bp, Arabidopsis thaliana landsberg; identical to SEQ ID NO: 2346

SEQ ID NO: 154575 - DNA, 928 bp, Arabidopsis thaliana landsberg; identical to SEQ ID NO: 18730

SEQ ID NO: 154576 - DNA, 1031 bp, Arabidopsis thaliana landsberg
ccccacacgtcgcttgtaacagatgctcataaagaaggcttacaagttttcgcctcggagtttgccaatgattttgtaattgcttataactacagctatgatccacgggctgagtatctatctttcattgacaacggaaacttctccgttgatggtttcctatcagacttcccggtgactccatatcgagccatcagtaagtaaaaaacactctgtttttctgtttcttcatctagttttgcattgcatatagctacatttatgattcttgttttctttccaagattgcttctctcatgtggaccctaaaagagctaaggagcaaggtaatgcacaagagaaaaccataaacatatgatcactaaatcgtttagttgcattttaacagttatgtattgcagctaagataactattatctcgaagaatggagcgagtggagatttcccgggctgtactgacttggcgtatcagagagctgcaagcgacggggctgatattcttgattgcaatgtccagatgtctaaagacaagattcccttttgtatgagctcctttgatcttataaacagcactaatgtcatcgaaacaagcttcagaaatctgtcatcagtagtttcagagattaacccacggagaagtggtatctacacttttagcctgaccatgtctcagatacaaaccttgaagcgtaagagccaaaactacaaagcaaaatcaagattctatataaagacttttaatgaattgactttgtttccctctttgttgcagccactatttcgaatcttgaaaaggactctgggttattcagaaacccaagaaacaacaaggctgggaagtttcttacattatccgagtttttgtttcttccaaaccgttacagctctctcttaggcctcttgatagaagtggaggtgggagttctgtctgcaaatcctgtgtaaataagtacaacacaccacccttttcttgatatagcataattcgagaaattagaatgcagcttatttagtggaacatcaaggaatta

SEQ ID NO: 154577 - DNA, 581 bp, Arabidopsis thaliana landsberg
caaatttacaatctcttcatctttcttcattagatcacaaaacttcactataacctaacatggcaacgagtcatcctgatccaaccacctctcgccacgtggcagtaatcggagccggagccgctggactcgtagctgctcgtgagctacgtcgtgaaggccactcagtagtcgtcttagagcgcgggagccaaatcggaggcgtgtgggcttacacctctcaagtcgaaccagacccgcttagcctcgacccgacccgacccgtcgtccactcaagcctctacagatccctacgtaccaacatccctcgagaatgcatgggcttcaccgacttcccttttgcgacccgaccacacgacgggtcaagggatccgagaagacatccggctcatactgaggttcttgcttacctgcgagactttgctaaagaattcgatatcgaggaaatggttaggttcgagacggaggttgttaaggcggacgaggtggcggcagagggggaggagagagggaagtggagggttgaatcgagaagctccgatggtgttgtcgacgagatatacgacgccgttgtggtttgt

SEQ ID NO: 154578 - DNA, 544 bp, Arabidopsis thaliana landsberg
gagcatgggaggagaaggcaaaggaggagatacgtggggaggaggaggagaaggaggtggtggaggaagaagaggatggttcatgatgagagagtcgaggcaagtgatcaaatcagaaggtggagagatgagagttgtgttatcaccaagaggaaggatcattgagaagccaatgcacattgggtttctaacaatggaacctaagaccctctttgtccctcagtatcttgactcaagccttctcatctttattcgtcaaggtatctctcgctctctctcaacatgtgtgtatctctttctttcaacatgtgtcactctcactctctatacatgtgtttacttgcaggtgaagcaacccttggagtgatatgcaaagacgaattcggagagaggaaactgaaagcaggagacatctactggattccggctggttctgtcttttatttacataacacaggcctaggtcaacgccttcatgtcatttgcagcattgatccaacgcagagtctcggcttcgaaaccttccaagtacttagcactaatc

SEQ ID NO: 154579 - DNA, 806 bp, Arabidopsis thaliana landsberg
attccttcttttccctattcattagttaatactcaacaaggtgattaattaaatttttaattatcatcaggtgattacagagacactgagaatgggaaatgttataattggagtgatgagaaaggcgatgaaagatgttgaaataaaaggatatgtgataccaaaaggatggtgtttcttggcctatctcagatcagttcatcttgataagctttattatgagtctccctacaaatttaatccctggagatggcaagtacgtaagatcaccaaaatatatttaacatataatcttttacttaatacgaattatatatttaattcatttcttcacaaaataggaaagggacatgaacacgagtagtttcagtccttttggaggtggtcagagattgtgccctggtctcgatttggctcgtcttgaaacttcagtttttcttcaccatcttgtcactcgcttcaggtaactatcagttacatggatacaaaattatttaatatttgttgtaatctttaaatttcaaaacaaacaagagggtgtggtaattagtgctctacactttagacaaaatggtacgttcggaccaaataaatctaaatgtctaatctctttttgacaagttggacttaactcttaaacgatatacagagacttatttgaaaatatgttggtgattatgatatgcagatggatagcagaagaagacacaatcataaacttcccaacggtgcatatgaagaacaaattacccatttggatcaaaagaatataaatcatttttcttaagtgaaaaatggagaatcag

SEQ ID NO: 154580 - DNA, 1138 bp, Arabidopsis thaliana landsberg
agaatcaatcaatatggttatttggtatttcaatggcactaaacggtctacaagagacaaatatcgatccaacttcccaagagccttaaatagaaggcttcactctcttgcgtctttttgcagaacctgaaattagctgcaatgtcttcttcaagtacccttatagcttcttttgcttcatgtctacgcataaacccaacttcctctcttatctcagcatttctttatatagttatttaggaacaagtcgtaacttctgtagaattcaagttcttaaatttcgaagcagacaatgaggcctaaagcaaatcaaaaccacaagctgaaggttctccttgtttttcttcttgccaccttaattctcatcttcatcgtgagatcaactctgacatcttcacaggaacaccagactccacaagagacaagatcaacgcgttgctctggtgcctgcaataagctaccacgttccctcgcacaagccctgatccattactcgacctcagttatcacaccacaacaaacgctcaaagagatagcggtaagcagtagagtactcggcaagaagtcaccctgcaatttcttggtgtttggtctaggccatgacagcctcatgtggagctctctcaactatggaggccggactgtgtttcttgaagaagatgaagcatggataaaacagatcaagagacggtttccgatgctggaatcgtaccatgtaacatatgacagtaaagtcaatcaagccgataatctcatagaagtcggaaaaggacctgaatgcacagccattggagatccaaggtactcaatgtgtcaactagcactcaagggtttgcctgcagaaatttatgagaccggttgggatctaatcatggttgatgcaccgactggctactacgatgaggctcctgggagaatgacagcaatttacactgcgggaatgatggcaaggaacaggaaacagggaggagagactgatgtgtttgtgcatgatgttaacagggaaatagaagacaagttttctaaggctttcttgtgtgaagggtacatgaagaaacaggaagggagactaaggcattttattatccctagctatagagatggatcagaatcagaatcaaatagacccttttgtcca

SEQ ID NO: 154581 - DNA, 845 bp, Arabidopsis thaliana landsberg
agcaaacccagaaaccttaaaaattcagaaaaagggacgaccttttttccgatcttatcgatttttgaatgagattagaagaacctctcttctaagtttttctttgatatctttttctctttgatcgatggatgagtcgttcgctaatctacaatcaagccatttgcttggttcagttccggtaagtctatattacatctattgcttctttcatttcaccatcaataagctctttgattgagtttttctatgatccttgtttgtgtgaagggaaaattaacgttttttgttcatgccatcattttgtttgttgttctgtctcaagtgttacattaggaagtagaattttgaaacttttcagatttttttgtcatattttttcgcgtccacgaatatgcctaaagtcttcacactcataaacaatggacgatttccttatttgcatttctgggtttctatatttgttaaggcgttttatttaagttttttcaccattttaggagaggattcgtatgaaaaacaaaaactgtatttgagtttaaatgcttgcatgatagcttcattttggattgaatccgctaagataaatgttttgagtgaatggattgactatccccgtgttattatgtctgatacaaacatctgtattcttaggctgtgatcagcgacgacaagagaagcacaaatgtaccaatagcaagcgtcaatgaaggtgtgttcttttgctagtttctgcttgaattatcttttgcaaagaacttttccggtagtgaaagaattgagtgttgtatgtcttctgcattattgcaggcccttcaacaagcatgcaaatatttccaccgaat

SEQ ID NO: 154582 - DNA, 512 bp, Arabidopsis thaliana landsberg
ttctccgcaggactcggttattaagaagcttgacactatgtatcgtgaccgaacatatgcaaggttctttgttcttgagacaattgctagagtgccttattttggtaagtgcatctatttgtaattgtagtttcagttcgttataatatttgcaagaaacattgagcagagcattaagagctagtcattaggttttgtattcttcagaagacagtaagattgtgaacatcacttgagatgtgtgcagaagaagaacaatgacgaaatagttgtgtttgaggaatatgtactctttcttatctcattagaagcatagttcaactcttaacaacaaaaggcgattcagtcatcgagatattggatttgttgagaatcgaatcttgtttttttttagtgtgtttatcactaattatggatctggataccaaatgaaaagttgttccgaggctagaacataatgtttgtttcttctatatgctccttgcagcgtttatgtctgtgctacatatgta

SEQ ID NO: 154583 - DNA, 718 bp, Arabidopsis thaliana landsberg
tgggatagatatcactgagactctgcgaattcagatggaacatcagaagaaactgcatgagcagcttgaggtacaacgatgaacatataatgagtcttagctttgtggtgttatctgtttatattccttgaagttgcatacagtagggattgaaaagggggcttgttttgatgtgcttgcagagtctaagaacaatgcaacttcggatagaagagcaaggaaaggcgctgttgatgatgattgagaagcaaaatatgggtttcggcggaccagaacaaggagagaaaacaagtgcgaaaacgcctgaaaatggttcagaggagtcggaatccccgcggccaaagcgtccgagaaatgaagaatgaaggaaacctttcttcggatggtagatcataaaactgtggttttggtggagttgtagagtatgacttattaggagtagagctttcagtcttcttcaggccttttctcttttttttttctttcttaaaactctaattttctgattctcagctctctaggaagaaacaaataaagagcaattccatctttgtgatgtaattctgagtgcagagattttagatttagtgtttaggtggattttaaactagcttttatttcgagtttcttcctgtatactgcgttaatttcataattgcatgtatggaatcaactcatgtaagttagattaatcttcgaaatataaagaaagctgggc

SEQ ID NO: 154584 - DNA, 307 bp, Arabidopsis thaliana landsberg
agaaaaagagccggaagaagagaagacgaaaaagaagaaaaggaagagaggtggaaagagtaaaacagagaagaagcaggatgagcaaggcttaggagaagatgacgttgtggaggattttgtgttgagttctgatgaagaggaacaggatctgtttgatataggaggagacaaagatgaagatgatgcagtagacgaaattgcagatcctgagaccaagacatctaagaagactaagggcacttataagacctggcataaggcttacaaaaagaccaagaagaagaaggcccgagtagcttcttaa

SEQ ID NO: 154585 - DNA, 819 bp, Arabidopsis thaliana landsberg
caaacagtatagaacggtgatggagtttgaaggtcacttgagctcatacgatcacaaccataagaaggtaaacaaatactctaattcccttatccttgttttatagcttattagtttttccaaaaccgagagttaaagtactggtattatgcagcgattcaaagaaatgaaagaaatgcacggagcaagcggccgcgatgacaggaagaaacgagagcagcaacgtcaagagagggagatgactaaaatgtgctcaaaacgtttctagtctctgttaccttttacttgttcgaaagattttgtatgcattggacgtaaacccgaatttttcttttaactttctagggctgatgctcgcaaacaacatcagatgcaacagagccagcaagaagtcccagagaatgtcccggtttctgcaccggctaagaccacggttgcaccacttgctgtccaagatcagcgaaaaacattgaagtttggcttctcttctaaaagcggcattatatcaaaggtatggaaactcactattacaggccaagcctagtatagccgggcttaaagcaggccagtacgggttagcctgctttaacctaccgtactcagtcatcactgaaactagttatctctttcatctttacagagccaacccacaagcagcatcaagaagccgaaagtagcaatcgcgtccgttttcgggaacgatagcgacgaagattaactttgctacattatatgatcagaaacattgattgtactttatgtaattctacgctatggttcctttcacagattttaaaacagaatataaaaaattaacat

SEQ ID NO: 154586 - DNA, 508 bp, Arabidopsis thaliana landsberg; identical to SEQ ID NO: 19545

SEQ ID NO: 154587 - DNA, 2206 bp, Arabidopsis thaliana landsberg
actcagccgccaaaatccagtgacggttcacctggtgtgtcacaggcaccacaagttcaacgaccaccaccaccacatgtccaaccagcaccatcacctcttccgctgcagccagttgaggactctcaacaattcaatgtgcttgattttggagctaagggtgatggaatgagtgatgacactcaggtatacagactcataagattcataatccgttacaaaattcaatctagttgttcttgactaatcaagaattttaatctcgctttcatgagaattgtttctaaaaaataaccataatgtgaattacagttgagaaggtaacacgagacagaacaagaaacagagcccacaaaagttttctctctgttctgtaaagtcataaaacttttttcttttttcctctcaatgttttaaatccccaataaactaacaaacgagcatagagagaaataacaacaaaaatacccgatttaagagtggaccatatactctgtttttttccctccataattgtgttttagtcttaaactaaacaatgacgagtggtaacaaattttccaggcgtttgaagcggcatgggcatctgcctgcaaagtcgaggcctcaacgatgatcataccgcctgactacattttcctctttggcccgatttcattctcgggtccttattgtcagagcaaacattgtattccaagtgagaaaatttatcatcatttgcaagatttcaaaacaaaaatgtaaaacatgaaccttttggattgaaagacgtgagatatttattgcttgcagctggacgggatgattgtagctcctacggatactgaatcggggggaggaggtttaatgtggtggattgagttcacgaagcttaacggaattacaatacaaggtaatggtgttattgatggaagaggcactgtttggtggcaacaagattacctttccgattatcctatcgacgatgacttcaagctcattgtcccgttgaacaattcggtccaagaacgtcctccaatgccggtaaaaaacttcttcatcatctcattctataaaatctactcaagtttctttatctaacaccaaactctgtttttgtatttttgtcacataacagataagaagtgaacttaattggagaatgccaagtattaaaccaacggtgagacatacaaatgatttagtagtctctacgtgtttttaaaactcagtgtattctttgcttaccttagcttgcgttttactgtataggcgctgcggttctatggcagtatcgatgtgactgtgacgggtataaccattcagaacagtcctcaatgtcacctcaagtttgataactgtgtcaaggttttagttcatgacgtgaatgtgtcttctcccggagacagttcaaacacagatgggattcatcttcagaacaccagaaatgtcatgattcagacaaccacattagcttgcggtacaaatcaattagtcaaaaaaaacatcataaaactcataaaaatagggtcttattttcctctgtttttccaggagacgattgtatttcgattcaaacgggttgctccaatgtgtatgttcacaatgtgaattgtggaccaggacatggaatcagcattggtagccttggtaaagacagtaccaaagcctgtgtctccaacataacagtccgagatgtcgttatgcacaacacaatgaccggtgtccggatcaagacttggcaggtaatgattaacactttcataaataaaacgaatgagtgatttggtttggaagctcatgaaacttaacagcttcaatgtgaatacagggaggtatagggtcagtgaaaggaatacttttctcaaacattcaactcacagaggttcagctaccgatagtgatcgatcaattctactgtgatcacagcaaatgcatgaaccatacatcagcagtgtcagtagaaggagtcacatatgagaagatacgaggcacttacaccgtgaagcctgtgcattttgcttgcagtgacagtttcccttgcatagacgtgcaattatcaggcatagagctaaaaccagtgcaactacaataccacatgtacgatccattttgttggaaaacatttggagagctcaattccgcaaccgttccaccgattgattgcttacagatcggaaagccagcgcgaaatggagtccattcagatcatgatatatgtttatga

SEQ ID NO: 154588 - DNA, 747 bp, Arabidopsis thaliana landsberg
atgccaaaataatgactttataatagttgatcaggtctctgagaataggaaatggcttttcgcttgacgcatctgctaaaacctcttgcttattctcggtcctttgatgtctgcattccgtttttccggtcaatctcgtcctttgaagcggttgaaaaggcgataaaatgtgctgttgaaacaaaggagtatcttagaatccccgaacttgttgcttcactcatagagccttaccaaaactcaacgttgttttcttttctctctgctttccaacgtcatcatagaatcagagtcattgacgaaatcctccaaagttttgttcctgtgagacctcgttcactgcccaagattgtctactccagtcttcttacttattgccttcagagttccgatcctcttcctttgtctttcgcaatcctccaacgcactcttcgttctggctgtctacctaaccctcagactcatctccttctctctgatgcttggcttgaacggcgacgaggatcccagtctgttgcagatattattaatgagatgaaattgattggatacagtcctgatactggaacctgcaattacttagtgtcctctctctgtgctgttgataagttggatgaggcgattaaagttgttgaggaaatgagtgcagctggctgtattcctgatgtggaaagttatggggcggtgattaattcaatgtgtttggctagaaagactactgatgtggtgaagattgtcaaagagatg

SEQ ID NO: 154589 - DNA, 591 bp, Arabidopsis thaliana landsberg
tctctcgcttgctgttactcgctttttcccagaaccggcttcgatttttctaaagcagccgaaatttacgattcccagaattttccctactgacaaaatttcacttcaaatacaaatctcgtcttcatgagtcttcttcttcgtccaaattgaattttctccgcacacgagagttgaattttgattttcggctgtttatatggtctccggtcccttagggttttaattcttctgcagatctctcacgatgagcgttgcgaaatcccaagtatggcagccatgcaagaagaagaggtcctcctcctgattcaatagagatctatctatatatatataagagaccgagatatatatatagagagagagatggcttctcgaacaacgccttcacgatcgactccttcacgatcaacgccttctggtagttcttctggtggtaggacacgagttggtaagtatgagcttggacgaactttgggtgaaggaactttcgctaaggtcaaattcgctagaaatgttgagaatggtgataatgtcgctattaaggttattgataaagagaaagttctgaaaaataagatgatcgctcag

SEQ ID NO: 154590 - DNA, 337 bp, Arabidopsis thaliana landsberg
cataggatttctcggcttctccggttatcttagttgtaagtatagagtgtttcgcggaacgccagtggttactctagaatgatagtttgagtttgagaacggtgcgataacaatcctgatattagctagatctacaatttatttatctcccgagacaattccttagacctgacgctttaatcacttgaatctacaactcatttacatgcttatttgtctttaatattcaattacttcatttagcttattcaacaacatcataagtctattgtgtgaacatcgagagcttagtggaattcgacccgtaaatgctaacgacgatctcttatttgaggga

SEQ ID NO: 154591 - DNA, 765 bp, Arabidopsis thaliana landsberg
tccgatcgctcttataacataagcgtatgggataccattttctcggacaaagctgaaatccctaaagaaaaaacacttctccaaacttttcatctccgatatctctttaactaacatgtaagtataattaaacaggaggtttcagagtttaggtttcttgccttgttattctctttatttatttctttaataatttatcaatgatttgtatcgtaaaccctaatagtttactacttttttcttggcaggtcgaataatcaagctttcatggaattgggatggacaaacgacgtcggatcacttgctgtgaaagatcagggcatgatgtcagaaagagcaagaagtgatgaagatcgtctaatcaacggtctaaaatggggctacggctactttgatcatgatcaaactgataattatcttcagattgttccagagattcataaagaagtagaaaatgcgaaggaggatttattggttgttgtccctgatgaacattctgaacctcatgatcatcatcatattaaagatttttcagagagatcagatcatcgattttatctgagaagctcacatgagatccccaaaaaacgtcgtatccaggtcttaagtagtgatgtaagtccatacatagatatattttcatgttaccatatgtattataatgtttccctgtttttaattttttctttctataaatagaattaattaatttaggatgaatcggaggagtttacaagagaagttccttcagtgactcgataaggt

SEQ ID NO: 154592 - DNA, 573 bp, Arabidopsis thaliana landsberg
cgttcctatgtgcacttgggaatggtggactcgggagacttgcctcgtgttttttggattccatggcaactttgaattatccggcttggggttatggacttagatacaagtatggcttgttcaaacagagaattacaaaagatggacaggaggaagctgcagaagattggcttgaggtcttattctcttattcttttctcatacagcgtttgctattgaacagtatttcctaatttgtactctcttgtagcaatgctgagcagtggacatgtttattggcttacctgtttctttcagctaagcaatccttgggaaatagtcagaaatgatgtctcatatcctattaagttctatgggaaagtggtttttggatcagatggtaagaaacggtggattggtggagaagacattgttgctgttgcttatgatgttcctatacctggttataaaactaagacaactatcaatctgcggctctggtcaacaaaagctccttccgaagattttgatttatcttcatataactctgggaagcatactgaggcagcagaagctctattcaacgctgaaaag

SEQ ID NO: 154593 - DNA, 251 bp, Arabidopsis thaliana landsberg
ttgcacacaaccacgagactcaagagacatggccaatgaaattcctaccaaagggattctcaagagcgaagctctaaaacaggtaaaattttctctgttataaagtttgctgatctttaaaactttggttttgtctagttttaaaaaggaactttgatgtataaatctgtgttttgttttggtcgtgttcgtcacagtacatcatggaaacgtcagcgtatccaagagagcatgaattgctcaaggaactt

SEQ ID NO: 154594 - DNA, 368 bp, Arabidopsis thaliana landsberg
ctcagaagtcttctctctctctctctatcctcaaacaaagtatggccctttatcctttcttcatctcaatcttcatcttctctttgaccctcttcactacgacgacccattccctcaacgaacccgacccggattcgatttccaccgtttacgaactcctcccaaagtacggtctcccaagcggtctcttaccggacaccgtcaccgatttcaccctctccgacgatggccgattcgtcgttcacttgcccaattcctgtgagattgaatttgactacctcgttcactacgataagaccatatctggtcgtatcggttacggttcaatcaccgagctcaagggtaggggatcctctagagtcgacctg

SEQ ID NO: 154595 - DNA, 1152 bp, Arabidopsis thaliana landsberg
atgaagaatcctcatctccggcggcacgtaacggagaagaagaagatcggctaccgagagagctcgagtgccgtaactctgccattgctcgcctcggactaaaagtcgccagcttaatttctatatcctctcttccttttcttcctcttcactttctctgtagatagatacagtgcttcttcagctttactatgtggacgctgccatttgagagagagcttggagattcgaacactccacagagagagagagaaattaaagaagcttttttttttttgaaaggcttgaatgttcttcttcaaagtcaatactctctgaatcaaacagaagattagatttaaggatatttacaaaaacatccctatatctcataaaacttacataaccaccccctatattagtaaattctctggtttttatctcatttcctccatcgcctcttttttaacctagacattctccatcatcactcaaattggctctttgattctctccggcgagattccgaccggtaagtcgaattcagatcctatcactgtctctcgtcaatctcatttacgttttcagaaacatactttttcagaaaacaagtaaaagagatgaacacgatagcgaagcgagttacggggttggtgactcgtccgagtctaaaccagcagttgcagcaagagcgagggataagagtgaaggtgttctccaatgatctagacaaggcactgacgattttgcagaagaagatgcaatcgagtggaatggagaggctgatcaaagggactcagactcatcacattaagaattcggagaagaaggttctcgctaggaagaatcttgaacgcagaatcaaatccattgactttgctcgaaaactccaatcaatcctcatcaagaaagtcaggtaatgttttctgatttttctcaaaagcttcacattttttagggttttaatggtgttgtttagtttagtaagatcttgcgtttttcttattgttattctttgcagaggtttatgagagctgaggtgaagcaagagtgctgctatgttgatcagtactagtatctgtgtgtgatataacacagctttacattttgaacttttgatgagttgaatcaatgtggaattggtataattttggatttgattagttgtttact

SEQ ID NO: 154596 - DNA, 322 bp, Arabidopsis thaliana landsberg
gaaaaaaagatggacgataaaataaataaataattttttttttttgcacacccaaaaattgcagaaggaagctatatatgttaacgttagcttctctgcaaatctccttatctcactctctcgcgtccatttttttttctcaattcgtcttcaaaaattcgttagattgagaagaatctaaaagtctctctcggtcatcggaatatcttcttctcaggaattcgaggagactattcgaaatcggaaatcgcgctttgaatctgaaactcagaatttagaggacgcttactccaaagaatctagggtaaattctacgttcctt

SEQ ID NO: 154597 - DNA, 2312 bp, Arabidopsis thaliana landsberg
atggttttgataatcgggaaacttggggtacctgtgaaaggacgcaaacaagaacttatctcaactttacgacttcatatggacagcaatttacctggtatgtaactgcacaccaagaacacacacttttctatttcatataatcatatcgagaaaaaggcatgaacttgtttgcatttagtagttgtctaagcttgttccatttgaattagaataaaagtctcaaaactgctatagcttctgattatttggtgaaagcagtaaagaattttggttcggagctgcgtctgttttacattttctcttgaagtgaaaaccaagtcctttcctgtttatcaatgtcagatgaaatttctgtttcagatcaaaaggaaacttcttcgtccacccgttcggatagtgtcaccatcaaaagaaagatcagcaacagggaagagcctactgaagatgaatgcactaactctgaagcttatgacattgaacacggagaaaaaagagtaaaacagtctactgagaataacttgaattctaaagtttctgcgaaagctatcgcgaaagaacagaagtcattgatgagaacaggtttgtcgcgtgttaaaataaacgaattttatgtaataaatactggtatctacatagagtattataaaacatgcgtgtgattaatctacgtaggtaagcagcaaattcagtcaaaagaagaaacatcatcgaccatctctagtgaattactgaaaactgaagaaattatctcatccccgagtcaaagtgaaccgtggactgtacttgctcataagaagcctcagaaggactggaaagcttacaacccaaagacaatgagacctccccctctaccagagggtaccaaatgtgtgaaagttatgacttggaatgttaatggactgagaggattgttgaagtttgagagcttctctgctctgcagcttgcccaaagagaaaattttgacatcttgtgcttgcaggagactaaactccaggtcataactttagacccttcttaagttgtttctgctctatattttaaacacagccaatctagaaatctcttgtactaaagacatacgcaaacttatgacaggtgaaagatgttgaggaaattaagaaaactcttattgatggctatgatcatagtttctggtcctgcagcgtctcaaaacttggctactctggaactgcaataatctcacgggtaacagaagaatgtactcatttgttatctgatacgtcaaagtgaattgtatgtgttttgatcagtttggtcttttgacagataaaaccactctcagttagatatggtactggtctatctggtcatgacacggaagggcgtattgtaactgctgaattcgactccttctacttgataaatacttatgtccctaattccgcagatggattaaaaagactggtactcaaataatagtattgtattttattgtcacggttgacatatatactctactaatctttgtattctaacgagtggattccgtgggttttcaagtcatacaggatcgaagaatgggatcgaaccctcagcaatcacatcaaagtatgaaacgtttcttcagagtttctttattttgttgtatttgtccttgttacacgagctcaatggcccttttgcatctgcaggagctggagaagtctaagcctgtagtcttgacgggtgatctaaactgtgctcatgaagaaattgacatcttcaatcctgcggtaactataactcgaatgcttcttctcgaacagtaatctctcagttttcttagttcttcaccatatcttgtaactaggggaacaaaagaagtgctggttttacaatagaagaaaggcagtcctttggtgcaaacttgttagacaagggatttgtagatacctttagaaaacaacatcctggtgttgtcggttacacttattggggttatcgccatggtggccgcaaaaccaacaaaggtaattaagtttgtttggtacatattcagattcatatgtttggtttttaaactggtgaaatggtgtgaaacaggatggagactggactacttcttggtgtcccaatcaattgcggccaatgtccatgattcttacatcctccctgatatcaatggaagtgatcattgccccattggccttattctcaagctctgatttgttcaaaatttcaccattcccagctttttgctaaagtcttgagtagattgtagctagagagtcacatgttttgcttctagagagagcttgctcatgtaaaaatatggaataatatatctatcagtaaacaggctccaaac

SEQ ID NO: 154598 - DNA, 1388 bp, Arabidopsis thaliana landsberg; identical to SEQ ID NO: 29491

SEQ ID NO: 154599 - DNA, 358 bp, Arabidopsis thaliana landsberg
attggaacttttttcctctgtcttctcaaaaagtttccgctttttgctcgctggagaagaaagaaagaaagaagtgaaaaggaatcattaccatggctgatccggcgattaagctctttggaaagacgattcctttacctgagcttggtgttgttgattcttcttctagctataccggatttttaagcgaaactcagattcctgttcggttatcagattcgtgtaccggcgatgatgatgatgaagagatgggtgattccggtttaggacgagaagaaggtgatgatgttggtgatggtggaggagagagcgagactgataaaaaggtatagttttttttggaacttgtgaattgatt

SEQ ID NO: 154600 - DNA, 306 bp, Arabidopsis thaliana landsberg
agaagcccgacgcagaaattaaaatccctttcgcctcaaaaccctaatttcaaatctctccaagcgcaacaatggcgaaatcaatgagatgcaagagggtgaagagattgagagcaataagaagagaaattgttgagaaggaatcattcactctaacgagagaagacgccaaatccgccgctattgaagccgcactcgctgctccgaagttaccagttcgtcaagccccagtttctccgtttatggaagttgcgacgccgtcctctgagtctgcatctgcctccactacaatcgccaacgatagtg

SEQ ID NO: 154601 - DNA, 2079 bp, Arabidopsis thaliana landsberg
gactctgaggatgacctcttcccatctgtgctcgatgccttaaatgaggtataattttgcaattaagacgatgtcttccaattagatatgccccgaggttttttctgtaccaagagtcaaaatccctcttatgtttcatggattatgattcatttggcagacaaattcttatttctcaaatgattacagatagcctttcacccaaaatttctctcttctcgagttgagaaagaaaggcgggccatactttcagaacttcagatgatgaatacaattgagtatcgtgttgactgccaggtaatcaatcatgaggaatagttttctgtatgtcagcacaacagccttttgtgttgcccaatttttggtggatagccaatgacacattgtactttatttggtgagactagttgttgcaacatctacattctgagaacaagctgggtaggaggttccctattggattggaagagcagattaagaagtgggatgttgacaaaattagaaaatttcatgagcgatggtacttcccagccaatgccactctatatattgtgggagatattgacaacatacctcggatagtccacaatattgaagtaagatagtctcttacctttctctgacatttcttttgaatttctactgcgtagtctatcttgaccagactatcattcttccacaggctgtgtttggaaaaaatggtttggataatgaatcaacacccagttctcctagtcctggtgccttcggtgccatggctaattttctcgttccaaagctgccagctggtcttggtggtaccttttcaaatgagaaaacaaatactgctgatcagtctaagatgattaaaagagaaagacatgcaattcgtcccccggttgagcataattggtcgcttcctggaacaagtgttgatctaaagcctccacagatatttaagcacgagcttcttcagaattttgcaatcaacatgttttgcaaggttcttgttacaatcttttaattcttccctttttcagaaagcttcatatgatacatgcaacatagggtggtagtttatattatgaaatgttacaatttcctttgtcttcctgcagatacctgttagcaaggttcagacatttggagacctgcgaaatgttctgatgaaaagaatatttctctctgctctacattttcgaattaatacgagatacaaggtatgagggtgttaggatgtcgtctttccgaatacatttgttctcaattttactcaagaagagaaaatttgttctcattttcttgcacagtacattttgcttttatagattaatgaatctcaaatctcagtgaaattacaaaagcggctctttgatgggtttgttcaaataatataactgtgttttcaataatctcgaggtgcactatctgagtaaaaactcttttttagttcatggacgtagctatattatattgaaggttttaggaattatgtctattataactagactcaatactgtcagtgaattttgatgatgttatttttgtacctttcagagttcaaacccaccatttacgtctgttgaactggaccatagtgattcgggaagggaaggatgcactgttacgactcttactgtcaccgcagagccccaaaattggcaaaatgcagtgaaagttgctgtccaagaggtttgcttattgtttcttctcatttatcttcattgtaaatactatttttctctctttcgttggattgatcatttggacgtgatgaataatggattggttaagctaaaagactgttagagccattgacactttttctttactgctgagaatttattcagctttaacgtataattctacgtgcaggttcgaagacttaaagaatttggtgtcaccaggggtgaacttacacgttacatggatgctcttctaaaagatagtgaacatcttgcagctatgatagataatgtgtcttctgttgataacctggattttatcatggaaagtgatgcactaagccacacggttatggatcagacgcaaggacatgagaccttggttgctgtagctggaactgttactcttgaagag

SEQ ID NO: 154602 - DNA, 781 bp, Arabidopsis thaliana landsberg
agagaagctaaatctgacaagcgcccatgagtataaatatttgggacagagtaattgttattcaattaacggagttgacgatgctgaacgttttcacactgttaaggtaattctctctttcagttagatactttcttcctcctcttctctactcatttcagacctttatttttctgtttattgatttaaaagtttctgttgttgcaggaagctctggacattgtgcatgttagtaaagaagatcaagaaagtgtatttgcaatgcttgctgcagttttatggctgggaaacgtttccttcaccgttattgacaatgaaaaccatgttgaacctgtagcagatgaaagtaagcctcttcagtccctaattagtgatgcctatattgtttgagttaaatgtttcgtgtgaacgttgattctgcatgcccactaggcttttctatgttgttgcttactgatttcttttgtatattcctgatatttcttttacgattgttatcttggaaggttttttgtttcattctcttgggtcctggtgttggaaacaagaatgtttgctgcataatatgtgtatgcatttgtgggcatgcagattcaatctggcagggagattatttacgtgctgcatttgttttttttcaggtttgtcaactgttgctaaattgattgggtgcaacatcaatgagcttacgctaactttatcgaaacgtaacatgagagttaggaatgataccattgtacagaagctaacgctaccacaggtatatgcctttaacaagatt

SEQ ID NO: 154603 - DNA, 790 bp, Arabidopsis thaliana landsberg
tttgtggaaatatatgttggtgttggtgcttctcgtgtccgagcattataccaagaagctagagaaaatgtaagtctaataactttctatacctgtgttgatcgtagaacttaattctcacttttggatgcttctgagatcattcaagcagtacctcttggcttcttttctgttgattctcattgttatagtgaggatttagtctattactggatgttaattttaaggtggtctcactgcaggctccatctgtggtcttcattgatgaattggatgctgttggaagggagcgtgggttaataaagggttctggaggacaagaaagggatgccactcttaatcaggttccagacatttcagattgtgtaatagttttcttcgttatataacgggatggtaattttattcatttttttgtgtcccagctacttgtttctttagatggttttgaaggaaggggagaggtcatcaccattgcttccacaaacagaccagacattctcgatcctgcgcttgtgaggcctggacggttcgaccgcaaaatctttatccctaaacctggtcttattggacggatggaaattctgcaggtaacggcgtggtatctgtgtttatgtattcttaaacttgtaaatttgcaacaagaaaaaaagaggttaaaagtagagttttgtcctcggtccaaatttatatttttgttttggatttgctgttaaggtcaatgctcgtaaaaaccgatggtgaagatttaactatatggcagttgctacatcacagatgcatgggtgga

SEQ ID NO: 154604 - DNA, 536 bp, Arabidopsis thaliana landsberg
atggacacaacaggagactggagatctcaatttccatatgcttcacgctcgagaatcgtcaataagatgtgagtttattatgattattaaacctcgtgtttttgttacatcaaatttgcaaataaggttttttactttactttgttgatttgactgatcgctcgtgtagaatggaaacacagttgaagcaacttccatttattagaccagagggaactaacgagcttaggaaaattgcagtcagatttgaggagaaactattcaacaatgcctctaatcaggtgattctctgtttttcttctgaggcagtgactccacaatttggcaatgaactgagttttttttgctactcataaagctcattatttgttttacatcattgatcattctttggcttgagattaattacttttgtttcgatctttagactgagtaccttcgtcaaatatgtatgaagatgctgaatatggagactaaatcacaaaatgcagctggttcttcctccgctgatgataacaccccaccgttggttacag

SEQ ID NO: 154605 - DNA, 429 bp, Arabidopsis thaliana landsberg
aaaaaacatggctggttcgagaaaagtgaatgatttgttggaggaaaataagggaaatgtggacacaattacagggtctttatccactcaaaagggagaggataaggagaatgtgtcgccggagaaagtctctacctctgtggaaactcggaaactagatcgagctttgaagtctcaatcgatgaagggtaactctgggtttcccacggaagttacaaatttcaaatctttctcaactggtggtcgaacagctctgaagcagtcatcactgcaagcgtgtatgcagaagaacagtgaggttgataagagtagtttcggaatgaaaacttggactagtgttgattcagagcattcaagttcgttgaaagtgtgggagttttcggattctgaagctgcccctgcttcctcttggtctactttgcccaacag

SEQ ID NO: 154606 - DNA, 148 bp, Arabidopsis thaliana landsberg
atcatagagaacctggatgatcgagaaatcgacactgatgggatattagagcttgtgaaggatttgttacctcctctgcctacaactgcaagtcctaaagatgatgatgaagaagaaacagagaatggtgaacagtcgtgacgtgcta

SEQ ID NO: 154607 - DNA, 574 bp, Arabidopsis thaliana landsberg
aggaagcaaccgaagcagctttaagacaattaagaaaaagtttgaggtttaaagcaaacccaatgccaaaattttatcatgaagggcctcccccaaaggttgaacttaagaaggtaacacacaaggttgtctacaacattcacaaaaagaaaaattacccgtaaactttaaaacccgcttcgagttgttaatgttatattatgcttatctataatggtgtacatacacagcctcttccaactcgagcaaagtcgccaaaactagggcggaggaacccgaaagaaggaaacagagcaaaaggagcttcgaggcggcatgaaactcgaaagactctagtgatctctaaagaagaccatgatgatgaaaccacacggaatgctgaccagataaaccataaagaaatgaaccgaaatttggaaccagagactgcttttgcctgctaaagagtctttttggtcagaacaaactgagagttatgtttttgttgtaagaatgtgtgggatgcttgtgtttttaacttatgatttgaagtgtaaatgtgtgtaatttaaatgttgtttatttcgtgtttatg

SEQ ID NO: 154608 - DNA, 1165 bp, Arabidopsis thaliana landsberg
gagaaaaaggatctgaggaacaatggctacgacaagacagatcttggagcagccacaatcgccatttattcaacgtatcaagagctcggggaacattagcatgaatggcagtcctatgattgatgagaaagaagaggagctttcacagtctgcttttgctttgtttaaggcaaaggaagatgagattgagaggaggaagatggaggttaaggatagggtccagacaaagcttggactcgctgaggaagctactagaagattagccgagattcgggaagtaagtttggtttgtaacattttcaagaacttgaacaaagattttcattttgagagagttttggtttgtacattttcaggagcttgaagctcttaccgatccaatgagaaaagagatatccgcgataaggaaaagagtcgatgctattaaccgagaactcaagcctttaggacagagttgtcagagaaaggtaaactaatgtttgtgttaatgttcataactctttatctttcttgcacattcttgagaccattggttgttgttgttgtcacaggagagagaattcaaagaagcacttgaagcttacaatgaaaagaacaaagagaaagctatatttgttagcaagctagttgaggtgaaacattctgtttccatttgtaattttctttacaaaatgattattgttttctgaaatcttttggtatgaaaatgtgtttcttcagctggtcaccgaaagcgagaaactgcggatgacaaagctggaggaactcagcaaaagcattgaaatatcgctacgctaacacaaaatgataacaataaaggctgcaaaagcagccagctttggtttcttctttcttctgctctttgtaattgtttgattcgatatttgctttttggtgtgatcttatttgttttcctgattcagtaaccttagtggaagggtgataaagattcagtatgatctcacatttttttgttttcatgtgtgtgacaatgttttattcctgacccttcgagttttgtaaccggaaactttaacttctatcaaaatttcttacaaaagctttcctaatccagtgtatagtgaaacagagaaacatactcaaataggttaaagaactcagtgaatagatgaaactaaagttaaaacttaataaccaggacgca

SEQ ID NO: 154609 - DNA, 514 bp, Arabidopsis thaliana landsberg
gtacctgtcggaagggctactcttggacgtatcatgaatgttcttggagaacctattgacgaaagaggcgaaattagtaagaagtctcagccacacttaattaatgtctcacattctgcaaacttgtcatgacaatatgttcttgctgttgttcagagaccgaacattacttacctattcacagagatgcaccggctttggttgatctagctactgggcaagagatcctggccactggtattaaggtagattctgggtcctagctctgcactgttcccacaggtcacatgtgttgtctttcgtgttccgagctgatatttagtttttccttttcaggttgttgatcttcttgctccttaccaaagaggaggaaagattggtctctttggcggtgctggtgttgggaaaactgtgcttattatggagctgatcaacaatgttgccaaagctcatggtctgtttagcacaagttgttctgaccttattagtctctctgttcctatttattaaattg

SEQ ID NO: 154610 - DNA, 569 bp, Arabidopsis thaliana landsberg
actcatctgtgcgcaggcaccgaggtccgagacgcataacgttatacatgaattgaagaaggagattgcagaactcgaggctgagaatacagcaagttggagacttcttgaactaaggaagaagcagcttgcattgttgttgcatgtggtatgtcgattttacgggtttcgttgtgtttttatagctaagattctaaacaagatttcgcctttctcgtgtttctttatgtttacagctaaatcctaacctttttggttttgtgaaaacttttatgtataggtggatgagttgcaggagacaatggaggatgaacagaagagtatggtggaagaaatgcagaggaacattaccgctgatggcgctgaagccatgtccatcgattagctcctaatcttagcaactttgtcttctcttgaatgctaaagaaacaaacctttcattgataagaagaatctgttttataaatttctggtttcttctggttgcctcataaccaaaattgctatgaaaataaggatatgtatgtttcattttaactcgcagattcaaaaaaaataatggcagatct

SEQ ID NO: 154611 - DNA, 629 bp, Arabidopsis thaliana landsberg
tgtcgcaataccacaaagagaaggaccatactcgaatttccacaaaagggtaggagaattctaatcaatctcttcagaaatgaaaccaaagtcttgatatctttagatctggctatcgaaaaacacactagcttcttctaatcagaatacctatggagactgtctctgttttgctcttcttcttcctcttccttctagcggcagaagcaaggagcaccaagcggacaggttgcaaggatttcacctgcggagaacatgacttcaagttccctttctttaggacagacatgccatctcgatgcggtcttttcaagctgaactgcagtgcaaatattccagagatacagcttgaaaaagatgggaaatggtatacagtcaagagcgtctctcaagccaacacgataaccatcatcgacccgaggcttaaccaaagcttgacaaccggaggctgcagtgacttgtcaagcttctctcttccagattctccatggctcaaattgaacacgttgtacaaatgcaacaatagtagtaggaagaatggtttcagctatgcgaattgcacaggagaaagaagcagcttgtactacaatttgggagatgatcatgatgttcagggtgttcacctataa

SEQ ID NO: 154612 - DNA, 824 bp, Arabidopsis thaliana landsberg
  unsure (1)..(824): unsure at all n locations
tcttccccagatcctcctctctcttcttcactcttttaacggacacttttcactgatctattcactcactcaaatcgccgccggagctaaatcaatcaacaatgacgtcgacctacacgagattcgataccgtatttctcttttctaggttcgccggcgctaagtattcgccgttattgccgtctccgtcgtttactttatctacttccggcattcatctcagaaccaaaccgaattctcgttttcactcgattatagcatcctcctcatcttcatctgtagtcgccggaactgatagcattgaggttattttctttctctccctgcgtttctgaattttgaattttccatgatcgttgttgattcgtttttttatgcctttttgtgttatannnnnnnnnnnnnnnnncgaagcctattgaaggacaaaagactggaactagcggactccggaagaaggtactaatttactgtttctttgtatctggaatttttgaattttctcaagtattggagtaacttgattgatatctattgactccaggtgaaagttttcatggaagagaattatttacccaactggattcaggttccgattcgtaaactcctatttgattgctaatgttagaatggaagaattttttgttactgagagaggttatgtggtataggcattgtcttattcattgccacttgaggattattcgaatgcaacgttggttttaggaggagatggtcgttactgtaacaaagaaacttcgcagggtatgtactgagagctttggatgagcgaaagttatctttactcatatcactatattttt

SEQ ID NO: 154613 - DNA, 2096 bp, Arabidopsis thaliana landsberg
agctccttgttcaattcacactttttctctcccaactcttcttccgggtttcctctgctactctcaggtttctcttctccacttccctccagctttatccttttgatttcgtcctccatcttactgtatttacccaaaaatctaagcttttctcagtgttcttccatttctctactttgttttcatgtaatgctgcaaacttcgcaatacccatcttcaatttcttcaattcgtaatgggaaaaagcattttagtttaatttgggttttgtggttcctcacttgtttcattcttctaagtcttaaaccatccactgattctcaatttctgaggatttgatatctattgctggttaacaatggagcatagatgcgactgggttttgtttatgttaactttatgaatgtaaatcacactgctttgtggctactttgtggatttcgtgttttactttgtggctgaatcatataactctaaattgagagctttgggtttgaccatttagctttttatgaacaggtcttgttagggaagtaatcagtggaattggatttggtcttttggttctgaattttgtaaagtcctgcagtgattggtctcagtatggcaacttacgtttcaccgtgttttactccttcggattctcggttactaactgttcttagaaagaatgttttaccggagaatcatttaggcaggttgaactccattagaacgattgacagtaagaaaaaccgagttgttgttgccgctcagaaatctgaatcttctccaatcagaaactctccacggcattaccaaagccaagctcaagatcctttcttgaaccttcacccggaaatatctatgcttagaggtgaagggactagtacaatagtcaatccaagaaaggaaacgtcttctggacctgttgtcgaggattttgaagagccttctgctccgagtaactacaatgaggcgaggattaaggttattggtgtgggaggtggtggatcaaatgctgtgaatcgtatgatagagagtgaaatgtcaggtgtggagttctggattgtcaacactgatatccaggctatgagaatgtctcctgttttgcctgataataggttacaaattggtaaggagttgactaggggtttaggtgctggaggaaatccagaaatcggtatgaatgctgctagagagagcaaagaagttattgaagaagctctttatggctcagatatggtctttgtcacagtatgtctataactattactttcactttttcttagtaacaaacttttatttatacttatttctatataaagatatagattacaaatgagaagttttacgggtcagaatcgccgtttgcaatatcatgttggttttattgaattttggtgggttgcagtttctctttgtgtttaccagtttctcttttatctccatctggttaaagcagtgaggtttatgtcttcgatcatagaatactttcctgtttaaagtacaaccagttatgggttattgtgtgaatttgctgcctccatagattgactgtaagattagatctttaagttcagtgcctaagcttttctagccaaatgtcttgttatttttctaggctggaatgggtggtggaactggcacaggtggtgctcctataattgcaggggttgcaaaagcgatgggtatattaacggttggtattgtgacaacgcctttctcatttgagggacggagaagagcactccaggctcaggaagggattgcagccctcagagataatgttgacaccctcattgttattccaaacgacaagttactagcagcagtctctcagtctactccagttacagaagcatttaatctggcagatgatatacttcgtcaaggtgtccgtggaatatctgatattattacggtatggctttgaaagtatttattctctaagctatgacatccatgtttatagaaaatgtctgactgcaatatcgttgtgtttgcattgcagattcctggattggtcaatgtggattttgctgatgtgagggcgataatggcaaatgcaggttcttcattgatgggaataggaactgcaacaggtaagagtagag

SEQ ID NO: 154614 - DNA, 276 bp, Arabidopsis thaliana landsberg
ctcggctttgttgggtttgcggtttcagaatactgtgagaagtatgcaaaccaggggaaggttcagaagataagtctagcgatgaagaactaagtgaagaggaatacggctcagataatgaggatgatgatgatgatgatgttgcaattgctggcaaaccagatccttgaaccagctttggtaggggacttgttttatgtatatgatcatgaattatctctgcttataactcaactgtgaaatctatttctccctttgtgctttgttcacctgttt

SEQ ID NO: 154615 - DNA, 1501 bp, Arabidopsis thaliana landsberg
atgaaaaacgatactctactttttatgaatcctttaattgaacaaacggaaccaacacaacaacagattgtgaagaagaaagaaaaaacaacaatggcttcacaaaccaaactcaagaaacctaattctcattttagcctttgtactttcctcttcttcaccgtcctctttaccatcccggctctctttgtcctccgcacctcctcttgctcctcctccaccggtgcagtctcctcctcctctgacacagaccagccaccgtggtctggcgacctccaaaccgcccaatttgcctggaaccgccttgatttctccttaaccaaccctcctcccaaaacactaaaactcgctgttttctcccggaaatggcccacgggtcccaatcctggcggcatggaacgccacgccttcactctatacactgccttagctcgccgtggacatcgtgtccacgttttcacctctcccttagaccaatcccctgaaaccaacaaaattccccctgtttccgaccaaatcatttaccctataatccattctcacggagacgcggagcccggaaaatggcggtacaacaaagcgtgggagctttaccaagaagaaaacaagaaagaacctttcgatgcggttcactctgaaagtgttgctttacctcactggatcgcccgggaggttccaaacctcgctgtatcctggcacggcattgcgttagagagcttacaatcaagcatttaccaagacctgatccgtaaaccagacgaaccaagatcacaaggcttcaatgcaagtctatacggtgccgtgcttcccaagatactagacgaaatcagattcttccacaactacgctcaccacatcgctatcagcgatagctgtggagaaatgctaagagacgtttaccaaatcccggaaaaaagggttcacgtgatcctcaacggagtcgacgaaaacggattcacatcagacaagaagctacgtactctgtttaggtcaaaattagggttaccagaaaactcatcaacgattgttttaggagctgctgggagattagtcaaagacaaaggacatccattgctattcgaagctttcgcgaaactaatccaaacgtattcaaatgtctacctcgtagtagctggatcagggccatgggagcaacgatacaaagaattaggcgaaaaagtttccattttgggatctctaaacccaaacgaactcaagggtttctacaacgggatcgatttgttcgtgaatccaacgcttagaccacaaggtcttgatttaacgttaatggaagcgatgttgagtggtaaaccagtgatggcgtcgaggtacgcaagcataaagagaagtatagtggtgaatgatgagtttgggtttatgtttgcgccaaatgtggaagctctgacggcggtaatggaggttgctgtggcggaaggagcggagagattggcggagagagggaggaagtgtaaagagtatgcggcggagatgtttacggcga

SEQ ID NO: 154616 - DNA, 976 bp, Arabidopsis thaliana landsberg
tctcagatttgttgtggtctatttcaggtttcaagtcaaaaagaagcagtttttccgcaatttcgtgactattatgctttttggtgctgttgggactattatttcttgcacaatcatatctctaggtaggttacttcgctttacgattggctgaaacaccgctgaatgcggctttttggattaggtcgagatagttttgtatatctctactgattttctggtggttcttgaaacaggtgtaacacagttctttaagaagttggacattggaacctttgacttgggtgattatcttggtaaggcctgaactaatggcttctttttggatcctattgctttactttattcgggagacttgatttgcttttggtgtttgaatctcagctattggtgccatatttgctgcaacagattcagtgtgtacactgcaggtaatgtgttttctccaacatgacttaaattacttcaaaaccctgaaacatagtggaccgaaagtttctgttcctgttgtgttgtgatataggttctgaatcaagacgagacacctttgctttacagtcttgtattcggagagggtgttgtgaatgatgcaacgtcagttgtggtcttcaacgcgattcagagctttgatctcactcacctaaaccacgaagctgcttttcatcttcttggaaacttcttgtatttgtttctcctaagtaccttgcttggtgctgcagtaagtccattgttttcttccctgccattctttcttgtagctgctatatgcacgctctggtgttcacatctttgttattcatcttgcagaccggtctgataagtgcgtatgttatcaagaagctatactttggaaggtacatatttaacgtcatatatgtgacttgttttctttaagttgtttcctgtttggtctaacgtagatggcctcacattaattgtcacaggcactcaactgaccgagaggttgcccttatga

SEQ ID NO: 154617 - DNA, 382 bp, Arabidopsis thaliana landsberg
  unsure (1)..(382): unsure at all n locations
agacggagaaaataagggatgaaactgccaatgacatgtctgttcttcaaggaatatctatcgtcttggatagaaatccagaactaaggtaccaaatgcagtcacattgttttaacttaaaacttttacttctaaaatttatatatctgtaacttctgctgtttttttttgtcttatctaggcaagaagggatggcgtacgaagttttgcagtggtacttatgtaggatggaggcgtggtttgctgtagatgccaatttaatttcactaaaatgttgggatcaggatgaatgtctttcaggtggtcatggtctaatggtgcagggttatgagccagtgatcagaacaattgcaaaagatcttgatattcgcttgaccatagn

SEQ ID NO: 154618 - DNA, 672 bp, Arabidopsis thaliana landsberg
gagtttcaagaggcaaaagcaacaacagctttaccgctagaaggaaaggccaccaagaagggaaaaaagaagaaaaagagtaatcagagatttgtacaagttgaagacattccctgaatttggtgaagttaaagtggaaatagaatacgatgcaagacaaagaaattgaagaaatctgtgaagctatcaagccaaaggttagtttgggtactggtttttcatgatgaaatgtcctttgttaacacttgatcatattatccatctgcgtcagttgaattatttttgctttgtatttattctactagggtggcaaaaccatgttggatacgacgatgattagtgggttccccaaagaatcagactttgtctcactctcgcaaaagaaagataatccacccgattcgccgagaagcaagaaacttgcaacggcagcaaacaagaagaagaacagaaagggtgggctttccatgttcttgactggtgctcttgatgatgtccctaaacctgttgttgctcctccaccaaggcctaagattgaaggtcctgtgtggggtggggctaagatttctaaaggattatcttccctgcgggatattcaagatgaacaaagcaagacccgctctcatgaacctgttaggactactaaaaatcagtcaggggatgattctcctg

SEQ ID NO: 154619 - DNA, 697 bp, Arabidopsis thaliana landsberg
agagttttttgaacaaatggagagaatttggagccaggctcactaaggtaggaacttgattgaatttctgtttattagcctttgtcgtgtgcttgatgtggaagaaaaagcaataatgaatatgtgttttgtttgcttgcagctcctaagctttgaacagccgtggacattgattcttgatgatgaattagcaaattcctttattgcaccagtaacagatgatatcaaagatgaccatcagctcacatgtaagttactcgtttaccctgcctatgtagccttaagtgggatatgaatacgaactaaacaaatattcagacttatccattcctttcttgatgaattttataatgaaactgagacataaattaggactcaatcaatatgtgaattaggacaggacttgggttttgaataacaagttttgttatgtttgaactacagttgaagagtacgagaggtcatgggatcaaaacgaggagttgggtctcaacgacatagatacttcttcagctgatgctgcttatgaatccacagagacgactaaattaccttaagattagtaggtcttacatgatttaattttagatggtgatgatcagactgatggatccatatgttgttgtattgtaacaattaaagaatcaaagaacaaattcctctttttaatctattaaaaaaaaaacttttgagttaa

SEQ ID NO: 154620 - DNA, 779 bp, Arabidopsis thaliana landsberg
gcatacagaaatagttgtctatgggaatgagtacttttttggaggagggatacaacatttaccagttggaagaactccatatggaacaccaattcgaacgatagagttgggtctatcacatgtgcctaaagatgtattcgagatgtacttggaagaaatcagtcctcgttacactgctgaatcctacaatttacttactcacaactgcaacaacttcagcaacgaggtcgctcagtttttggtgggtaaagggattcctgactacattctccagcttcctaatgatgttctaaacagtcccatgggtggtcttataagtaagtcgctgataacttgcgacaccttccttgaacctcttctttctcggctacattattgttctaatttcatatccccattttgcagtgcctatgttgcaaggcctcgaaacaactctaaaggctggtgctgttcctcaagttccacagtttaggccacagccacaaccttttggagcttttagtaaagatgatggcccacaaattgtgatagctcctaagctcgaggcagcagaaacctcagctgcaactgagaaagtgccacctgttattcaaccatcagctagtaaagagaaggtcaaggacgacccgttgggtgatgctagggccaagattcaggaagagattacaagcgaatttgcagctctaatggcacaaggcacattacgagcaagcgaagcagctgctatggcgacaaaaagagtcatgcaaaagtacggacatctcaatgtaaacgcttag

SEQ ID NO: 154621 - DNA, 249 bp, Arabidopsis thaliana landsberg
gccggtcataaaagttctttatgcaaaggtttcttctttatgagataaacaaaaggtgaaggaacctcaaccaaaaaaaaaaacttcttgttgagaaaagtttttttgagatgagagcagatttgatttctatacagcaaacgctgacgccggaagcagcgacggttttaatccagtcgatagaaaaagccacacgtcgtaaccatggccactcgactccgttacacgtggcaggtgctctcttatctt

SEQ ID NO: 154622 - DNA, 1856 bp, Arabidopsis thaliana landsberg
atggatcttccagattctattctcgctgtggatggtaattcagctcttcctgttgatcttaaagaagatgtagaagctgttcagatcagtggtggtccagctggcttggaagctgaactgcagcaacttagagatttgaagagggttaatcaggaactgttggtgcacactgaagagcttttgcagaaagaagcaactgaagattctcagttcagaagtcaatttgggactcggtggactaggcctcaatctagcacactgacaaagaacttgcaggataggctaaatcggtttgcagccaatttgaaacaagctggcgaaagtgatgttaagattgagcgatcagtgagagataactccgccctcatgtctattcttgatcgacggccggtaagtacttcctatattttgtgtatgctagtatatttctcctcttgggcataaactgctatcggaagttgtctcttaacttcattttggttattcttgtacctgaaatctttgggtacaggttattcaaatcacacacttgagtcagctatagcaaacctaaatctgtatactgattcatagatgttgtggttttcggtttttcttcatcagatagagtctgctgtcccaactcttgctaggccaataatgtctctggacgcaacagaggatgctattgtgggaactttgaagcagagtctggtaatctctatcacttttggaagctgcgagtgtgtgtttggaaagtgctttcacgaaccattattctcactttttttcttccctttttgcacagaggcaactggaaaatcttggtgctcagcgggcaggtcttgaagacatgctcaaagagatgaagagaaaggtgaattttttctattgattagtcatcattttcgttcttgattattgtatgaattggagtcaaaactcattaggcttttacttgatacttggtattaggatgacatactgccaaagctgatgaccataacaggctcctatgaagatatgttcaggaaagagatatcaaagtatgaccacatttgtgaagatatttcccaaaacattgaagttcaagaacaattattgatgcaaattcaggtctacctctttttgccatccttgtagtggttttcatattttatcatggtttttatcctttggcgtatggtgattgtaatcaatcaatattcaagcaaattgagtgtgctagcttctaccggagatcgtgtttcactcctagtagaaaccaactactatctcattggtttctttccttgattataggctcaaaatgaagagttttcaactattttcaatcttgaagattataaaggtgagcaagcagcttctgtcttgcatgatggatcaaagtactttctgtattgcattctatacgatggttgaagtataatccatgatagaactgacacattcggctttgaagtagtggaatttcttatgctcccgtatttcggttcttttgctctcagacattcgttttctgtgtttctctgttgttcagcatccaaggagaagtgctacaagcagattcaagctgctataatgaagtatcgagagatcaaggagaacatcaatgagggcctgaagttctatgtcactctccaagtgagtttcttttctctatatagtagtaagctcttcactgtcaaagcttgtctagattatgccacttgtccgggtggctcttctattctgattttacactccattgaagatacgaaataactttcctgcaatttgagacattgtctttgttggtttcaaataggaatgccattcccgaacgtaagcagcagtgcagtgattttgtgatgacaaggagtatccagtgccgagat

SEQ ID NO: 154623 - DNA, 537 bp, Arabidopsis thaliana landsberg
gattgtctgtctgaagaaagaaaccgaatcgattcaatttcaacgtctcgtccttcaattttcgttttcccgagaaaatttaggaaagaaagagaaagagagggcagagacaaaaatttcttcgccgtctgagtgggaaagatggcggaggatttcgctagagcggtagacgatgggcttaaactcgcgaaacggatttatttcggcaaagaccgagccgtcgcggcgccgagaccacctgctccgatggacagatcttccactacgcagccttaccttcctacagcacctatggtttacgccgttatacccgacccgggaattgtggataacccggatttgcctagctatcagcctcacgtgcacggcaggtgcgacccaccggctttgattcctctgcagatgaattcgattgagctggatgttgattgttatctcgacacggctcttgttaccgtcaccggatcgtggcgggttcattgtgttatgggaagcaagagatgtgattgccgaattgctattcccatgggagaacag

SEQ ID NO: 154624 - DNA, 479 bp, Arabidopsis thaliana landsberg
cttcctgacttgaaccagatccttttgaaggtgagaagtgggatggtctaggtttcttcgttcagtacttgtgggctttcggaatccttttcgcggtaaatttctgtacttttcagttgctttataacaattctccaattttgaagttaaaccaatcaattcactatggttcaaaatgttgtaacagctaatctccggtggacttgcggcggggacttacaacgaaggtgcgacggatttcaaggagacgccagtgtataaagaggcgattcaatctcgtgaccttcttgatgaagcagagagttcaaactctgaagatgtgtttgagtccaacccaacagaagtggcgcctagtttggaatagtttcagttcactgtttagagaaagaactaaaaagactgaatctttttgctattggggtgttttaaaaagccatattccaagttgatcataagcttgttgtgttcataatgttata

SEQ ID NO: 154625 - DNA, 496 bp, Arabidopsis thaliana landsberg
atggttaagccttctgaagctgaaaagaatctggcccaatctaacagcactacggtggggggtacaggccctgcagataggaaactctatgtgggtaacctgcatttcaacatgtcggaactgcagcttagacaggtgatattcagttttctaggtcaattgtttaattacatatggacactccagcaactgtttttttttctttcagtatccttcatattctcacagttgtttccttttctttatcagatttttgaggcatttggtcccgttgagcttgttcagctaccacttgatcctgaaactgggcagtgcaaaggatttggatttattcaggttagtggaacgtgttttttactttgttggtactctttttcttagttattcctcactgagttttattttctcttgcatagtttgttcaacttgaacattcaaaggcagcacaaattgccttaaatggaaagctggagattgctggtaggacaatcaaggt

SEQ ID NO: 154626 - DNA, 576 bp, Arabidopsis thaliana landsberg
gctgggagaagacaaaagctgaagtagtatctctcaagaagaaacttgatgaagctttgaatgaaaaacacaggagtgaggaaaggtcgagtcacacggatgctggtctaaaagaatgtgtgcaacagcttcgttttgttcgtgaggagcaggagcgaaggatgcatgatgctttgacaaaagcatcacaggagtatgaacgtcgattgattgttataaagacggaattggcaggtactggtaagaggcttgcagaagcagaaggcgagaatgctcaactctcaaaggctttgttagcaaagaacaaaattgttgaagatttaaacagagagagggaccgtatcgaggttgatttcaattctttggtgagtagtttagagtcgaaagagaaagaaaacgtttcgctgagatatgaagttcgagtgctggagaaagagctcgagctttggaatgaagagagagagtttagcccgtcgaaccgttgaagcatcacataaactgcacttagagaatgtgaagaaagttgcaaggtagaatagagtgtcaaagttacgggttctggtcaggaaacgatta

SEQ ID NO: 154627 - DNA, 907 bp, Arabidopsis thaliana landsberg
tgtcatggttaatggagtaaagtctaaggttaaaaagtctgagagtagtaagaagatgaagagaaataagcttgaagctgaccatgaaattgtaagtatgaacgattctcttctatatcttcttctcattacagtttcaattattgtcgtcttaattgctttatagatttgagaatcagtagtctttgatttgcaataggaaagattgatttgagaatcagtagtgtttaatgcttatcggtttttgtataacagcctattgtttggaatgaccaagatgaagagaaagtggtggaggagatagtaaaaggtgaaggagaggatgatgaggttgagagatctgatgaaccaaaaactgaagaaacagctagcaatttggttctgaaaaagcttcttgtgagttgattgaattgttgctcttatctcaaaattgtgtaacttgtttgtgatgatgaccattgttggggtcttgttgttgttgttgttagcgtggagcaagatactttgaccctcctgatgctggttgggtgagttgttatagttgtggggagcaaggtcatacaagtttcaattgtccaactcctactaagcgtagaaagccttgctttatatgtgggagtttggaacatggtgcaaagcagtgttcaaaggtgcggttttaagtttgatggtagacccatggaaggtttaggactagtcttattttactgcatatggttgctgagtaaagttttcgttgttttgacagggacatgattgttatatatgcaaaaaaactggacatcgagctaaagattgtccggataagtacaaaaacgggtctaaaggagctgtatgtttaagatgtggagactttggacatgacatgattttgtgcaagtatgagtactctaaggaagatttgaag

SEQ ID NO: 154628 - DNA, 381 bp, Arabidopsis thaliana landsberg
tgcagatacttgaagcatttgggttatgatgttacttttgtccgcaatttcactgatgttgatgacaaggtattgaatatggcttattcacaactgcattgaacatttgaatgatagttacatttcttatgctaaggtagacaaacattttgttagtatctgaattttggaactctgcagattattgatcgtgctaataagaatggagaagacccgttagatttgagtaatcggttttgcgatgaatatttggtagatatgggtgctcttcagtgcctccctcccacccaccagcctcgtgtcagcgagcatatggacaacatcattaagatgatagaaatggtaagtttgtttcttggttgagaaagatcatgaatttgg

SEQ ID NO: 154629 - DNA, 842 bp, Arabidopsis thaliana landsberg
atttctctgtcatgtcgatgcagctctattcaaagcttgaggaaaagatccatgcgaaagaagaagaaaagaatcccgtacaagctaagtccaaggttgtgttctatgccctcttgtttttcttaaaatgtcctattattcatttaaagtgtctatatgctcagtcttctactgtaaatatcatctggaatacttgcaggaaactcaagaagctgagcttaagatgctaaggaagagtctgaacttcaaagccacacctatgcctaccttctatcaagaacctcagctacctaaaacagagttaaagaaggtacatctctgcaattaaagaaggtactttctcattttctctcatgtcgtaagtacatagtatcatgtgaaatgctatatacttgtagatagcgataacaagaccaaaatctccaaaactcgggcggaagaagaccaattctcgagcagattctgaagaagccattactattcaaacccctcgctttggtaggttgagcttagatgagaaaactcctaaagataacccggttgttgaaggaagtgtacccggtgagaccaagaagccaccagtgcgcaagtcacttcccaggttgccttcagaaaagacaaatctgtccaacgggaaggtggctccagcaaaagctgtaacagcctcaacaaaggcaaagtcggaaagaaagaaaccagataaagatgtggatgccctaagccagtcaagtcctgtagacgacaatgctgacccagaagattcacaagaacaagctccaagagtgaatgaagacagaaacgaatctcacatggtagtggaagtggttgcggttgagccttaa

SEQ ID NO: 154630 - DNA, 364 bp, Arabidopsis thaliana landsberg
gcatctcaactttgcttgtctccgatggatcccaccatgaatccaactccaactccaagctccgccggcaacagtgtctgcacagatgaattgactaaccttcccccggagaactcgccactcggcagcgagaaggatgatagcgttgacttcagccaggagcaaggtctgagaattatatgtacatctgattagttagttatacacacttatagtgcattgatatatgattagaaagtatatgaagtattactactgttcccatctttttcaaaatccaaattttgacccataggatcggagtcaaatgaagctattgacactgagaatggttcaagatccgtagacaagaaccaatactctg

SEQ ID NO: 154631 - DNA, 481 bp, Arabidopsis thaliana landsberg
agacgccgagatttatccttcatcggcgttgtcttctcgctggatttctcaaagccctagctgaagaatctctgaacaagtggaaatgccgttttggtggccactgatcgtcctcgccttcgcttacgcgatctgcaagttccttcttatgctcattcctcccaatgttccttccattgacgttgacgcatccgatggtatctcttttcttctctgtctgtatcagcttctagtttcgtctatgtctataccccgtggaacaagcttaatcgatgtttgatttttggaattactttttgaaacagtgttggctcatggaaaagatacggaggagaatagcttcatctatgtgagttctccgatcgcatcattttctcattttcctccacattgtgcttaaaaaatttgaagtggtaggagatttaagctgttgatttggtttaggacataggtattaataattgatctcagtgttacaaaa

SEQ ID NO: 154632 - DNA, 476 bp, Arabidopsis thaliana landsberg
gcccataaagcgagagagtaaaaaagagataaagtcgctgcgagcgaatcaagttcggataaggtccaatcacaacacagccacgtgcgaatcccaggttattgaacagtaaaacaaacggctcaagtggctcactccaaccgttctcgttaaggcaaatcaagttctgtttctttttctgacttttgataaaatttcgatatttttcctaattatatagacgccgcctgcgttaaatgaatttgttgtgatgcgagcgaaactaacgatgtacgaagcaatcaaagacaatgatgatgatgatcatcaatggcgagagaaaaaagacattgagtctgctcttcagatttctcgttcttcctctcttcctcccgacaaagaacgattagtttctcttgatgtctttcgcggtcttaccgtcgcagtaagttgttgttctaatcactttctaatacgtgatcaacaatgtaattaga

SEQ ID NO: 154633 - DNA, 1713 bp, Arabidopsis thaliana landsberg; identical to SEQ ID NO: 7973

SEQ ID NO: 154634 - DNA, 662 bp, Arabidopsis thaliana landsberg
  unsure (1)..(662): unsure at all n locations
gtcccatcagagcaagaacagctaagggcacgccaaattagcgcacagcaaataaacaagatagaggaattatggaagacaaatccggatgctactcttgaagaccttgaaaaacctggtgtagatgatgaacctcagcctgttcaacctaagtatgaagatgcgtaccaggtatagattttctcagccttttacttataaaataagtaactcaattgatatattagagaaacagtaaattcgtcatgccacttttggaagaggtcactgttagaattatgcttctatacttatcctttctggtggtttgcagtatcaaaatgtgtttgcacctctaatcaaactcgaagcagactatgacaaggtgtgtatttagtaattcattttatttggattgattttcatgtcccttttatatttgttctgttgggacttatcatcttaagtctgctgtagatgatgaaagagtctcaaagcaaggaaaacctcactgttcggtgggatattggtcttaacaagaagcagtgttgcatacttcgtctttcccaaaggtgggttgaaatctagctggtcgctattcacagccttgcacctagaacgatttcccgattntaaaaattttgataaaaggaggaaaaatgaacttgcgattgggtaccggg

SEQ ID NO: 154635 - DNA, 531 bp, Arabidopsis thaliana landsberg
tcaggataagatagacgcactgagcgttggttcttcctttagttagagaaagtaaaaggttatgagacgaagatatccagcttgagagaagagttggaactagcaagagagagtttgaaggaaatgaaagatgaaaaaaggaaaaccgaggaaaagttatcagagacaaaagcagagaaagagacacttaagaagcaacttgtgtctctggacttagtcgttcctcctcaattgataaaagggttcgacattctagagggtttgatagcagaaaagacgcaaaaaacgaattctaggtacttttttttttctttctctacctttatacatggaaatacaagtatttatcccttggttcaacagcatgaagataataattgtatgataactttcttggatcttaggttgaaaaacatgcagagtcaactgagtgatctgtcacatcagatcaatgaagtcaaggggaaagcatctacttacaagcaacggctggagaagaagtgttgcgacctcaagaaggctgatgctgag

SEQ ID NO: 154636 - DNA, 2712 bp, Arabidopsis thaliana landsberg
ctttaaaataaatacaggtcatggggtgattatatcgcaacgagagagctatcacgcagataatataatgtcgcacacgcatgtgtttcgactttggcaaatgtgaactctgtgttgcttgttggaggccgagaggtgaaagctgacatgaagattattgaagaagaaggatgcaatgtcttgattggtacacctggaagactttctgatattatggaacgaatggagattctggattttcgaaatcttgaggtacttttcttcaatcaaggatttgttttaagatagatgttgttgaatctatagcttggtgtggttatgttgtctaaacaacttaaaagtttagtttttttacttaaactgaatcgttttgcgtatgtagattcttattctagatgaggcagataggcttttggagatggggttccaaaggcaggtgaattacattatctcacgcttgccaaagcagaggaggactggcctcttttcagctacacaaacagagggcgttgaagagctcgccaaggctgggcttaggaaccctgtgagagttgaagttcgagctaagtcgaagtcggaatcatcccagcaattgacaaactcgaaaaccccttctggtcttcatcttgaggtagcataagttcaatatataattatgtaataatatgtttcagagtagttagttttcctgttgtatccttcgttatcatttagcattactgtgacctgatttacgaaggatttccttctaatttgtaagtatccagtagttatacgattctcttcgtagctctattgtattcccttctcttggtagcaagtttgttgtattgaaaatacctattgatcatatgtgttgcatatgtatatacttctttttagtagaaaccgatgttctatctttacatgtcctaccgatgcgtttcttagcggtttatttctccttgtctctacagtatatggaatgcgaagcagataaaaaatcatcacaactagttgatctcctcatcaagaacagtgataaaaagcttatagtgtaagtttaaatattccacacagacttatataaaatgaagcatccttataaatagtctaagtaacgctgcagattcttcatgacctgtgcttctgttgactactggggactcgtactttcaaaaattcctgccctgaagtccatatctttaattcctatccatgggaagatggatcagaatgctagagacaatgcattagcttcgtttacagaggcatcaagcggtgtccttctatgcacagatgtcgctgcacgtggacttgacattccaggcatcgtttacgtatctcttttctctctctctctctctctcgctctcggccacagggtggtttaataataattgctacaatgtaaaatgcagatacgttcactagccatcaaggaccgggaagtgttggagaagggattaaaggcatttgtttcctttgtccgtgcttataaggagcatcaatgctcttacattttcaggttcatttctttccttgagttgctaaaatatgttagcttttgtaactccattcttttgttccccttaaatttacagttggaaaggacttgaaatcggaaagttagccatgggatatggcatcttgtcttttccttacatatctgaagttaaacaagacagaattgacattgtcggttttacacctgtccaaggcatcacgtttgaggacataaaattcaagaacaaatctcgggagaaacaaaggcagcaaaacttattagcaaggaaagacaaactgcaacaagaaaagagagggaaacgcaagaaaagctccaaagaggcggttgatgattctaacaaagcgtcgagaaagagaaatttaacggggaggcaaagacaaactatccaaacagctcaagatgaacaagaaatgaatggagattatagcttactgaataaactgaagaaaggttcaattacagaagatgattttgctaaacttacaggagctcatgattttgtctgataaagaagcaagaaaacctttcaggcttgttggactagagcagtagagatgtgaaggttgacgactatttaatataatagagaattatactctctcatttgtcaaaatgttaaaaagcaaaatggcttcttctttttttcaaaaatctgagatcatgtttgtcttttggttctattttatgaaattaattccaaacatattggtcagataattgtggagaatttagcaaaagaaagacattagaggaactcttactggtttgaaagatagatacattactgacccataatactggctttagattcactttgaaaaatttgacttatcttacatactcttcattaaggagcgaagccagtagctagagaggataggatgtggtcgaagccgctggtaataccccctaactggagtattgaatttttggagtatgtaatctttcagaaagtcttggagtatttcctgatctcgtacatgatagattgaatggagacaagatccctgttcagagcagatccaccatctatcttcttgatgcagtctgtgagtcttgtgtaatagagcaatagttgtgtcaatgcagctctcaaaatatccataccacacaagaagttactgaacgatgttatgatatctttgtccatcaactcgattgctgttttccatctgcttccaaagtccttcaccagtggctctact

SEQ ID NO: 154637 - DNA, 3068 bp, Arabidopsis thaliana landsberg
atgaaagatgctgcgcttacaagcaaatgttgttacaagagcttctgtgacaagtgtaagttcttttaatgcattctgctgttccacaaaaaccttttctgaccgttgtcagttccagttctacattattatcctttttcactgattcaggtatcagagatcacattatttcaaagtcaatgtgtgtttgtggaagatcagatgtacttgctgacgaccttctaccaaacaagaccctcagggataccataaaccgtattttggaagctggaaacgatagcactgagaatgtgggcagcgttggccatatcccaggtccgtcattattttaaattcatgtgtttttaaactttgtttgattagtcctcactactgaattatcatggacaatatagatttggagtctgcacgctgtccacctcccaaggctctatctcctactacatctgttgcatctaaaggcgagaagaaaccagtacttagtaacaataatgatgcttcaactttaaaggcgccaatggaagttgcagagatcacaagtgcccctcgtgcatctgcagaagtgaatgtagaaaagccagttgatgcatgtgaaagcactcaagggtccgtgattgtgaaagaagcaacagtgtcaaagttgaatacgcaagcccccaaggaagaaatgcagcagcaggttgctgctggagagccaggtaaaataaagatgtactaatattagcttcactggacattgcgaatgattggtgactgatagtccagttcagatttccctactgagattaatcaagctggacctcacatgaaccttttttttttcaattactgaggaacccttgttgtcattcatcaatgtaatacgtacttattgtctctatacaggaaaaaagaagaaaaagaaaccaagagtgcctgggaatggtaaaagctttctttgctacgctgaaggcaatacattgtcagtttcgaagtctatgtgaatcgaatgggaggtctaaaagatggtttgtttatgtgatttattgcagacatgcaatggaatcctgtgccagatctagcaggccctgactatatgatgcaaatgggaccaggtccgcagtacttcaacggcatgcaacctggcttcaatggcgtacaaccaggcttcaacggtgttcaacctggcttcaatggctttcaccctggcttcaatggatttggaggcccgtttccaggcgcaatgcctccatttatgggttacggattaaacccaatggacatgggatttggtgggggtatgaatatgatgcatccagatccattcatggcacaaggatttgggttccctaatataccaccaccccataggtaaaacactcactctatcaaagaagagcaataaagctttctcaacaagtctcatgatggaactttctgtgcatgcgcagggacctagctgaaatgggaaaccgaatgaatctccaacgtgctatgatgggcagagatgaagccgaagcccgaaacgctgagatgttaagaaaacgtgaaaacgagagacgacctgaagggtaaaaagaaaacactcactctatttttactacagattcaaacaaggatatgctaaaacctaaacattggttgttgtctggttgtatatacagcgggaagatgtttagggatggagagaatagcacaacgatgatgaacaacggtacttcagcctctgcatcatccatcaaccctaataaatctgcatgtctccttttgtttgactcatcttcccctctcgctctctctttcttcttttctttgttcacctgtgcttcgctctctcccatctacttttggttatatgctaattattatatcagaaaatggctccaaattctcttccctgattccctcattttgcttattttgaaaacccaaaaaaaaaaaaaaaaaaacttgaagaaaactaggggaaaatgggttctttttgaaaaaggggaaaatatattggtttctaacgtaattttctgaaatataaaattggggtttatcagaaactaagggctgtgaataaaaaggaaaagaaatagaagggtagatggctaaaaagcctaaaatgcaaaatagtaggcgtaggaaccgaaaggtgacgacggtaactgggctattgagcccatttcctttttatttgtgggccgaattcaatacatattttattataataatttgggctaacaattgttttacagagacaagcacctccaccaccaatccacgattacgatcgccggagacgaccggagaagagactatccccagagcatccgcctccgcgtaaaaacatttccccgtctcgcgactccaagagaaaatccgagcgttatcctgatgaacgagatcggcaacgcgaccgtgagaggtcacgtcaccaagacgtagatcgtgaacacgaccgtactcgcgaccgtcgcgatgaagacagaagccgagatcatcgccaccaccgtggtgaaaccgaacgcagccaacatcaccaccgcaagagatcggaaccgccttcatcggagccaccagtccctgctactaaagcagagatcgagaataatcttaagtctagcgtattcgctcggataagttttccggaggaagaaacatcttctggtaaacgaagaaaggtgtcttcctcttcttctacttctgttacggatccatctgcttccgcctctgccgcagccgccgtgggaacatcagttcaccgacacagtagtcggaaggaaatagaagtagcagattatgaatctagtgatgaagataggcatttcaagaggaagccgtcaaggtacgcgcgatcaccaccggtggtggttagtgatgtgagtgaagataaactccgatactcaaaacgtggaaagggggagagatctcgagcttgacatggattttcaaacatgtttttttttttttttgtataatcaaaaacagagaatgagaatcttcttgttttgctgtaacgaacaaagagagagagttcttttgtcatcgaattcttttttaatttttgtagtggaattcgatttcgtaactactttattctt

SEQ ID NO: 154638 - DNA, 465 bp, Arabidopsis thaliana landsberg
aaaaccctaaatcagagaatttagcgttgtttcttcttcaatagacacaaaaaatggggaggaagagaaagcacagcgagactgttacggcggcaccggtgaaggattctgctccggagagacctcaaaggactcttttgggttggaaagataagaaggaagatgctgagaactctaaacctgcgtatgcgtctgtattcaggaataaagagaaggttctcgttacttgttcccgtcggatcaatttcaggtgaatggtgttgaaatttacattgggtttgattcggtttaatggttatgaatcatggagtaactttgttaattcgttggaaggtatcgacatttgatgttgaacatggtgtcacttttacctcactgtaagaaggatagtaaggtagaagctaagagcagtagaggtgccactcttaatgagctcatcgagcttaagggctcttcttcctgttt

SEQ ID NO: 154639 - DNA, 665 bp, Arabidopsis thaliana landsberg
tcaattatatggtgaagagatctcaagtgtattaagatgatgattcttcatcttattcttctacatgctctggtgcgtctcctctgtcttcttcttcggacgaagtttcgatcttcaaacaaacaatgcctatgatcgaagcccgagtttcagacagagatttgttgattagagtccattgtgagaagaacaaagggtgtatgattaagatcttaagttccttggagaagtttcgtcttgaagtagtcaatagcttcactttaccatttggaaattcaactctcgttataaccattctcactaaggtatgttatcaatcttctaatatttttttatttatcatattctatctttttttatatattatcatttactgttgatttttatgtattaatgtgatttttaaatctaatttgcagatggacaacaaattttctcgaccagttgaagaagtggtgaagaacataagagttgcgttagctgaataatattttaaaaaacgtttatgtgaatttcgcagtggttaaacgtgtcagatttggtctccaattttgaccagatcactcggtttagttgaataatgagtagttggataataaaaccagatatatgcacgaaatatgggattttgtcgtttgttgagtgcaaaagctggattggtgtgt

SEQ ID NO: 154640 - DNA, 440 bp, Arabidopsis thaliana landsberg; identical to SEQ ID NO: 77710

SEQ ID NO: 154641 - DNA, 808 bp, Arabidopsis thaliana landsberg; identical to SEQ ID NO: 13283

SEQ ID NO: 154642 - DNA, 2452 bp, Arabidopsis thaliana landsberg
atgaacgacgactctcgcgtttcaaaatcaaattgttttgaatctgaagttttattattatttgactttttcgttgttgttgatgatttattactagtaatggcgtcatcaacggctttgatttgtgataccgaagcgtggaaggatttgaaggtaaagtagtctttaaggattttctcttttcttagtttgtcaatggtggtttgtgtagagaagtgatttgggattgttttggtaatttggcagggacatgtagaagatattaagaagactcatttgcgtgatttgatgagtgatgctaatagatgccagtccatgatgatgtatgtcttcttttctattttggctcatatgtgctatgtacattatgtttgttgttgaactcggttgattttgtgtttgtttctagttattgtgcatttacgagtttctattgctctggtattgaacttgttaatgttattggtatgttttaattagggagtttgatgggttgctgttggattattctcgacagcgtgcaactgttgagacaatggacaagcttttgaacttggcaaaggtgagggtagatgtttattgacagatttttatagaattgcaacgaattttactcgaattttgataatttgtttctatatgcaggcttctcaattgacagagaagatcagccgcatgttcaatggggagcatgtaagtatccgcatgttaatcttactttgatttgatcttatgaaactctttatctagtattacatattagagaatagagaatgcaaatgaattgtaagcgaattattctccatcttcttcggtactgagacagaaacattttctatcatctatggcgtctgatttgtttaaatggcttcctcagattaacagttcagagaacagatcagttcttcatgttgcgctccgtgctccaaagaatgcagtaatcaaggctgatggaatgaatgtggttccagaagtgtggaacgttctagataagatcaaggaattttctgacaaaattcgctctggttcatgggtaaattctagatgccattataaaacctacctctttacgttttcatctccttgtgttgagtttttttgaactaattgacaggttggagccactggcaaaccgctgaaagatgtcattgcgattggtattggtggtagcttcttaggtccactgtttgtccacacggctctccaaacaggtgggctgcatctagtcttggtaccttgcctcttgctggtgttctttctagcttgttttgattcaaatttttgcttttatatgcattttcattcccagatcctgaagctctagagtctgctaaaggacgccagctgcgattgtaagcacagcattcctgtagttatgtagtctttttctgtgtttctgttcgcaatgctttggtagaatgaatgagctgcttgaagtttctcctgaaggtccatgaattctttctttaccattattgtcatagacactgcatactccttgtttgtctaaatttcatttaacctaggaagaggaggctgtattgaacttgttagcttctagttattccttttggattccattcatgtggatgccttgcttggaattaatttttgtttctttttgtgcagtcttgcaaatattgatcctgttgatgttgctagaaatatcagtggactaaatccagaaactactctaggttcatgctcaaacctatcaacaaattcactttcatagtttccattgacggattttcactctgactaattctgaggatacttgtaatccagggggggtggtctcgaaaacgtttacaacagctgaaacaatgcttaacgccagaacattgagggaatggataacagctgctcttgggttggtatttctggcatcttaatcttactttattagaaaattacaattatcgccagcggaaagcttttatgcttgtacatttacaattattatttttttcaaaatataatttgcgttattctaccatattttggttatcgtggatgaacatcactcatttaacatgtgataacttaacagggcttcagctgttgcaaaacatatggttgctgtcagcactaatcttgcggtatgcatttgctagagtttcttttggggactttgtttccttattatccatcttagtaaacttaaacttcgaaacacatgcactcgagtcgttctgattatgtagaacagatgacatgttgatccagtctttttagaaactgaattatcgaacagatttaatggactatggtagtctcgatgttctaggaattatgatttatttcgacctccttctacatatttcatattcagacagtacaggaaagtgtataaactatggatgttttgtttaacagttagtagagaagtttggtattgacccgaacaatgcatttgcattttgggactgggttggtggaaggtacagtg

SEQ ID NO: 154643 - DNA, 547 bp, Arabidopsis thaliana landsberg
cgagaggaataaattcacacgcgaacttcgataattgtcaattttcgttgaacacaagtgacgaatttgagagagagaaaaaaaaatcagagataaagaatttgagtttcttggaattaaaggatcgattttgttgaagtgaaattgaaattgattgtgaaaagagaaagagactgatggtagcagaagcagaggttgtgtttcaacagagtttaccggcggttctggagattgagttgtttgacggagtttcctccgccgttaaatctcccgtttcttctccgaaattgggttttactcagtcaacggcgtcggtttccggaagtttaacgacttctcctgtggtaagtcttgtttaaactttacatttttattttctgggtaccttttagagagaatttaacaagctgggttctgaaaagtaattagaaatttgttgttgtaaatatttgcaaacatatccttggatctcttaggcttagaggacctctagttcatgtgtgtttgcgtgtcgtagcaaatatagatgcttgttgtctataacttt

SEQ ID NO: 154644 - DNA, 2873 bp, Arabidopsis thaliana landsberg
acgcttcagttctggagatcagatggtcctggacggtctgcgaagcttcgaacggtggttaaatcgtcattttccgctgttccggagaagcctcttggtctttatgatccttcctatgataaagactcttgtggtgttggttttgtagcagagttgtccggcgagaccacccgcaaaacggtactgttttgaatcttctcatgtgatgtgatcattgacatatatgatttgattgatcgatgacatgttgttgctgattttaggtgactgattcgttggagatgttgatacggatgactcatagaggtgcttgtggttgtgagagcaacactggtgacggcgctgggattcttgttggtctgcctcatgatttctatgcagaggtttgttttgttctgttatctccagattaatttattgtccatgcaataagatttctgacaggatctgaacttatgtaatgttattttattgtttctggttctgttgttgttaattaagttttaaaactgttgatgtttttgtctattaggctgcgacagagcttggctttgtacttccttctgctggaaattatgctgttggtatgttcttcttgccaactgttgaaagcaggagagaagaaagcaagaatgttttcactaaggttgctgaatcacttggccactcggttcttggatggagattagtgcctaccgataattctggactgggaaactccgctttgcagactgaaccgattattgcgcaagttttccttactcctacaactaaatctaaagctgactttgagcaacaggtaattgttttgcattgaaaatttattcatgtatcattaacactgggagatgatgttaatgattacctttgtttttgatagatgtatatccttagaagggtttctatggttgctattcgagctgcgttgaaccttcaacatggtgcgatgaaggacttctacatctgttcgttgtcttctaggtatttagctatttcaattaagaatgacatgtttgtctcaagtactgaaaagttaacctaacgaattgtttttcgccatttaggcctatcgtctacaaaggacaattgaagcctgatcaactaaaggactattactttgcggatcttgggagtgaaaggtttacgagctacatggccctggtaaatattttttctattcactatctctttttttatgctgactccatgctccaccaacagcatgtgaaccaacggggtaaccgaggagatgcgaagttgaggaatgacttctgaggcctcttaagttcctccaaaaccttgataagtattttaatttggatgctggtgagttggtaacgtcaagtgagtccagaaactcgttgcccttgatatgtatgataagttatcttaggctaaatgatcacaatctggtgattaagactaaaattttgttggttaaggtagttagcaattctgcaacattagaacttgcccccaactatatgctgttgaagttgtgtctaagaccaagtggtaaagttttcagttgcatacatacacattttaatgtttgataactaatgattgactatactcggttacatgtttaatgattcaggttcattctcggttctctaccaatacatttcccagctgggatcgtgctcagccgatgcgtgttttgggccacaatggggagatcaatacactcaggggaaacgtgaactggtatgttgtcagagatagcttacattaaagctttcatgtaatttaagtaacctgtttggtgccttagcatttgtgtgataaaaatgccctttggtatgcaagtgcctaagaagtagagtctgcctcattttcattttaattactgcgttctctagtgaattttgttttgatatttcatcacaggatgagggcacgtgagggtctgctcaagtgcaatgaacttggattatcaaagaaagagttgaagaagcttctacctattgtggacgttagctcttctgactcaggtaactctcaatctcattatatgcccgtacaatgtgttgaagttgaactaactgtagatcacaactttgcctatgatattatggacctgtgacacgtttctatattgtgttgttaacatttttaggtgcttttgatggtgttcttgagcttcttgtccgagctggtagaagtcttcctgaagctgttatgatgatgatccctgaagcatggcaaaatgacaaaaacattgatccaagcaggaaagagttttatgaatacttatctgctctaatggagccatgggatggacctgccctcatatcatgtaaattatatcctgaagttaacacacaaccataactttatattttattttttagattgtaactcttttattgaatgtcttgcagtcactgatggtcgctacttgggtgccacattggaccgtaatggacttcgtcctggtaggttctacataacccacagtggaagggttatcatggctagtgaagttggggtagtggatgtaccacctgaagatgtgatgaggaaaggaagacttaacccgggtatgatgcttcttgtcgattttgagaagcatattgttgttgatgacgatgccttgaagcagcagtattcactggcaaggccttatggtgagtggcttaaaaggcaaaagattgaacttaaagacatcattgagtcagttccggaggctgaacggattgctccttcaatttctggggttgtaccggtaagctgtcgctaaagaattattgttcccctaattactcttcgttacctttattatggttagttaacctttttcttggaaactaaagcctctaatgatgatgactcaatggagagcatgggcattcatggtttattgtctc

SEQ ID NO: 154645 - DNA, 1418 bp, Arabidopsis thaliana landsberg
  unsure (1)..(1418): unsure at all n locations
atggtgtcgcataagtgtgtagaagaatttggatacgaaagctacctcttaccttccaatgctagagcacccagatccgcccgggtaatggtctttaccactcacgtttttggtttaggtttaagtagtttatatggttacttacgtttggtttcatctttttgaccagaagaggcgcagtatcgagaagaggataagtaaagaagatgataatatgtgtgcaattgatttattggccaccgtagctggacacttgtcatttgagagtgggagttctctcatgtctatcgacaaactgattgaagatcatcgtgttaaggaggaattcccggaggaagaaaaacctctaatgccagtagctttatccggtgaaaatccttatcaaggatctttgagtccctgcggtttcagttctgtgataaatggcaaagtagagaatgaggtagatggttttagttactctggtggtagcgatgcttgtcaagtcgggaactttagtgatgatataaaacccgacgcagtagttctggatgcgagacctaatgttgtagttagtttaggtagtagtagtagaaccgaagtgccgtcaattgggaactgtgtttcccatggcgttcgggatgatgtaaatttgtttagtagagatgatgatgaaaacttttccgagtacattcgcccgcgtgttacaaaaaattcacctaggactgtgccgcgtattggtgacagaagaatcaggaagatattggcttctagacattggaaaggaggttcaagacatgcaggtagtagcccatctaaggggtttttctttgtttcacatcttaaatacattgattgtgtttgttttgaggacatgtatttggtgttgcagatacgaaaccatggagaaattattacttgcaccagcagaggagctatcctatcaagaaaaggaaaaactttgaccacatatctgattccattactgatgattaccgtatgcgtactaagatgcatagaggnnnnnnnnnnnnnnnnnnnnnnnnntctgttagatcttgtagctagctttctctttgttgttttaactagatcttgtaaatttaatttgcaggtagtagaaaaggtcaaggggcatcctttgtggcaagcgactcccatggtaacaatggagtctcatctgaattctttgtcggtgttatttacaaaagcggagaagctaacatgagaatgtttatttcagtgaaactacggatcaagtcgttcagggtgcctgagcttttcatagagattccagaaactgctactgttggctcactgaaggtaacattacacagctcttccttacgcctactaattagaaagtaagttctcatggacttttgcttttgcanagaatggtgatggaagcattgagcactttactgagtgatgacacc

SEQ ID NO: 154646 - DNA, 2336 bp, Arabidopsis thaliana landsberg
  unsure (1)..(2336): unsure at all n locations
ttattatcgcgtgcctcttctcacccctcgccgtctctttgaaccggaggtttcctccaccccttgaaaattccatcatcgattgacgtatagctccgagatctgctcttcaatttgatgctcttccattagttagaaaagttgcttttgatcggagcaactatggggtcgtcttttgagaccatcgatattgctaccagtgctcggannnnnnnnnnnnnnnnnnnnnnnnnnntcaaattttacttcaggatcgctgataatatcctcaaacaggtctcttcttcatacttgactttgaattttgatttatcaaagtatctttgtttaggagattcgtgtttggcctaattattgtgaaatgatcctctccaactatttatatctctctttgatgaaattattgtttcctaaccagagttcaatttttcgagtatcatcacgtttgcaccattttgtttaagtttgattgttgttgagtgatattgattgttgtgtctgtgaaattggaatatgttcttcccttagtcttcgctatcagctgcgatttgaagtttgcagtgatcatggtggtcgcatcaaattgggtatgccgtgcaaaatcttcccaaatgtctctaacttgatatttagttgttggccttttgtttccttgaaagtgatccctttaagactaaaatcacttggttaaatttcctaatcatctgcataatgttttgtaggccaacatatttcgggcagagaagaatgttattgatttatatgtcatgcttctgcggttttcaaggtcaaaaagctgccaactcaaatactctctgtagagagaattagttagatccttttgctttttctgaaattagctttgtttttggttttctctagcttggctctcgagactataccgtcccatcgagattacagaacatctctaaaaagcaataaagagtatttgagaatggtaagtgaacataatatccttatgatcttttttttgtctgtctgtcagtcagtagtttgatgtgagcttttatctgttctagagactactagatgtcttgacggagctggagaagttgaaaccagttgtacagcaaaggattgatgaactgtatcccaagctcaaacctcgatataacgttcaagctcatccagcaaatggttccctaggctggtcttctgccgtgaaaccgtcatttaatagctatgatcatgcaaaggtgtgcctaatgcttaactcttgtttgtcccatatgccatgcgtacatatttgaaatcagtttgcattgttctccgctcttgtttcattaattggtagatgaaattatgatattactttcaagctgcagtagataagcataccctgtaccttttccatgtttttttttgttcgacataggtaagaaatcctcctggacataattctggctacatgggttccaggggtcagcaatttttgaacgctgcaccacttgaagagcgtttccgaaagatgtatgtctttagttttatttcatgaaagatcgtccattcctcaatgaaagaccttcgttgtatctttcactgtgtttcttgtcccatggtcctgcctcatagattttgttaactgcatgatttatctaggtcggtgaacttccgaccaaatgaagaaaccctttccaagcattctatcttgggtccaggtggactctctgcacagtggcagccaccaaagtatgatacaaaggtatcataggatgcttcgtttttttttgtctttattacccacttcttcacactaagctgatgctcttttcgtcatattatccaggttcaatatccaagcaatatagatttttcgcctgttgtaatcccaaggttagatcatctagctgctttgatgcaaaatgtatatttttatgctgcatctcaatattatgcgctttatttcttacatattccactctctccctccaacttcttttgctcgactatctcacgcctatgtattatatctatttatggaaaacagcttccaacaacttgtggacagcaaaccaatgataacgaatggcagtaacgatgaacctgaaaagccaattgtggaacccagtgttgcatctaatgaaaaaatccagaaaaattacactgaagagctttcttccatgatttctttcgaagagccagaaagcgttaatgagaacaatctcattaggcaaccttcaccacctccagtgctagcagaagttcaagacttggttcctgctttatgtcctgaagttagagaaccggaatgtatgatagaaaactctctgccggatgagtctctacggtcggagtctcctcttgaacttcatatt

SEQ ID NO: 154647 - DNA, 607 bp, Arabidopsis thaliana landsberg
tcaaaaggttcaaaacaaaaccacttttcaaacattggaactatctaagtattgaacacaaagatggccaaagtgttgacactacttgttcttcgactactcatgaacctcttacttatcggttggatttctctctggatcatcaaacccacgaccatatggatacaatcttggcgtcaagctgaagataccgccagacacactttcttcggctattacggtaaagtatatatgtacttaaaccacaaatctctcttattgtacttaaatataactctgatttttgcatttatgacttgtaaggtctcaactttgccgtattttcattccctcctattgctctctctatcgttggactcatttacttgagtttactgccacaacatcatcatccaacaaggtaaaaatagtttcattccctagtcaaagttgaaagtaagtaatgatcaaaactttgaagtagtgttttgtcaacttgtaaaagagggaggggtgcagcctatttctggctcaaggaccagcccattattcaattagctttcaattgggaatttggggtcattggttttcgaagaaatactttgggcttcttttctttttttttttg

SEQ ID NO: 154648 - DNA, 488 bp, Arabidopsis thaliana landsberg
ctcttctcaagtctctccttcttctccgtccttcccaattcttccgttcaaacaaatttctccaaacccaaaccctaatttcctccgtctgtgaaatcaagggttttctctgatctgggttttgatcagaaatcagatctaggtttaattttcgaaatcaaattatgaggaagagagaaagagagaacccttgttcgatttgtgggcattaccataagtacgaggaaggagaagtatgtggagtctgtggtcactgtatgcctgtttcttccgatacggtggcgccgcaacaagtccacgtcagtgcttttccgtcggagattctccctgagtttctttacctcggtagttacgacaacgcttctcgctctgagcttcttaagactcaaggaatctctcgtgttcttaatgtgagtttctttgctttgattttgaattcatgaattgcttttgttttaaacattgatgatgacccttaagaaaaagat

SEQ ID NO: 154649 - DNA, 1967 bp, Arabidopsis thaliana landsberg
aagagattgtctgagattaaggcattgttttgtgatacatcagcttaagctatatcatcatcaaaacatgaagaatgctccatgtaaagagaggacaaggttgcagatattaaagaaaagttcttggtggttcttttgggaataaaagaattagattgagtggctacatgaagaaaggagatgtgtcacacgttttggcacactttcttaagagttatgtcacagaaactcattcggatacattagaacgtgtgagtgaatcaaagaaacagtgaagagcatgcagcataactcatagaagagaagctgagcttacaaagacaaagtgacatccttttttttagtttctggtgaagctatgttcattgaggttgtcttaggtatgtagctcaatggatgagtcaaaaggctgcagaaaatgtttgataaagattcatggaagttcagtttaccaaaagaaaggaaagccaagaataactggttatgaacaagttcaaaggttataaatctgtgggtaaaaggactcttacggatttgtttgaaggtcgttgattggttaagatattcagaaacgaattgcagatctctagagaattgcaggttttcgaaactaagttgcagatcctagaataagttgcaggattctgaattattatgttttttagggctgagtaagctaagaagaggttattggagtgattcagtgggattcttcgaagaagaaatggaagagacaagtgcaagtgctgcatgaactgtctcaaggctactcacttcaataatgtgaaagtgtcatgtatctagtttgataaacgacacatctcaatgctggtggcagtggctgaaaagaagctctagaaggaagcaaatgcaagaaatttaaactgcatttagaagacagtaactaaggagtttgagttagctgtctgcatcatgagaagattacataagtaactactcaagggaaattcacttgcaggttagtcaagtgaacggtttttcaaagtatcagagaatcataaagaagacaaaggctctagtaccaatttttctgttatccacctgttttatatatagatttgaagagatgagatttttaaattgctacaaaagagagagtctacaatttcacaagcttgtaccaatttcagcaaaatgattggaaaaacttgtaccaatatatttcacatgtttagaaaatattcaactcacttagtttgatttcttcagctgcgattctttgaatcaagttttcagttataacctccaacctgtaaaaatggctgcagaacaaaatgatgaggaaattttttagtatcacaaagtccagattcaagtttttttcaattgtatctaaaacacacacaactttcagattgaataaaatctgaatttcattctcagtaggggctaatataaaaatgacaaaaagagaggaggaggataggagctatatgtctactatttttatttttttagccaatgagagagctccacttcataccccacttttaccaatcgtgccatttcacagccagtctcacccatgtcgcgttgagcgcgtgtctacgatttctaaaggggttaatccacaaaaatcattcctttttggatccacgcacctcattctcaaaaacccatcgcgtgtcttattttttttggttttcttctctaaaccaaagtaaaccgaaccgagatcaatttgaatttcaaaaccaatgtaaacccataaaaactgtgaaaacaaaaagctcggccactgtaacaacaaaaatggagacgacacaacttcgaagagaaatcaactcgaaatagccaagagaatgttcgaaaaccccctcaaatccgatgcttcctttgattccaacctccaaaagcccatctgctcaaatctccatttcgaggacgaggactcgaggagtattacaaggtacctctatagaatcaatggcttcaatggattttga

SEQ ID NO: 154650 - DNA, 1723 bp, Arabidopsis thaliana landsberg
  unsure (1)..(1723): unsure at all n locations
accgagaaaaagctatggngatttgattagactgtnnttggtcacgtgcattccattcagtttcttaggaggaatcnncaagcgtccgagaaagctctctgggagaaattaactagaagtttgaggtgattgatttgtgcttttcaggtcttttgttcttctctctgggagttttcattcttttggtttttaactttagtgattggatgttgtttctaggtcatatgatgtgaagccatcgcagaatgatttggtggatcatattggtttaatcgctgaagctgcgaaaagagatataaatttggcgaattcgaaggtttgtatggagaattttcagagtttctggtctttgggatttttgaattagaagagtccattaaatctcttataggtgttgtagcttttgtttcctgagagcttgtgatgcccatatttgttatcaagagtttagctcgctttctggcctgaatgttttctgtatatgtatcatcttcttaccctgattctctcctaattttgtgctgtttttctttcttgtgttactagtttatacttgcatttctcacaaaaaagcctaccaaaaggagattacctgacgaggttcgaatcttttatcccacttgagtactctttcctaatgtgccgtttccctttttttcacttactttcacacggtcttagtttctgatacgaacttgttattacttattaggacaatgcaaaagatgatttcatagttggagatgaggacacttatgtagcttccgatgaagatgaattggatgatgaagacgatgatttttttgagtctgtttgtgcaatatgtgacaatggtggcgagattttgtggtatgtttccttgctggatattgatcttgtagtttgattatctctgataattagtcttacaccttttactttctttattagaataaggccttgattatttgtgtgcgtttatgccagcgtttgcttttacatttagtgtgaattttctcaaatagtctacaacctttagcgtcttgaacaatttcctttgctaatttgaaactcaagcgtaccttctgtttgcgtttggcatttgcaaaaatattttatgaaacactgaaaatgttttaatactgtgaaacatgcaaacgcaaattcagcgtttgaggcaattgaggccttcaaaggttctaaagatccactgttattattccagatgcataagtcttgtgttctgctttctgcagttgtgaaggaagctgcctgagatcatttcatgctaccaaaaaagatggtgaagattcactttgtgattctcttggctttaacaagatgcaagtggaagtatgtaacatatatgattctttcattagttctgaatatttctgggcgtcttggttttcttgagtaggcatggagtctatgttaatgctgtttatggattgttttccaggcaattcagaaatacttttgcccaaactgtgagcataagatacatcaatgcttcatttgcaagaaccttggctcttctgataactcttctggagcagcagaggtatgcaattattgatctctaatgttgaatgctgttcagacatgttttgttgataatggtgactgacaagtaattggttgagctttgtgttttaaacatgttcataggttttccaatgcgtgtcagccacctgtggctacttttaccatcctcactgtgtcacaagacggctacgtttag

SEQ ID NO: 154651 - DNA, 667 bp, Arabidopsis thaliana landsberg
gaaccaagattatcttctgcgatttaagggagccatttattgaaaatttgtataagccaaatgtttctcaatcaagattggaaggattaatcgaagccctagacacggtaagaagtctccccttagacaaggcaatttttagctgagccagacattacagtttacatgaagtctgaaccgccacagtcaaggtgctggtaacatgattcagggtgtctaaaaactatggaacctagaagtcactggagcatgaaattccttgactatttttagatttatatggcgttttggcaccaatgaatattagaaaaggcatttttctttacattgataaattaaatgtccaattactttgaccaggaacttggacagctatgtagtgtcataatggagccattgagggatcggatagtcaccagcctgctccaagcatcacttgtatgtagtttaatctcagtcgggtttatttacattatagaaagctctcaagtgtttgccttttgattgataatatttcaaatttaccaggatgggttgcttcgtgtactattagatggaggcgcgtctcgtgtatttcatccaagcgagtcaaagctgttagaagaagatgtagaggtcttaaaggtaactctttctaactgtcatcttatctttatgcccgcctgaa

SEQ ID NO: 154652 - DNA, 156 bp, Arabidopsis thaliana landsberg
taccatttttagccgattgaaggaaaatctttaacagtgaagctcgattcccagaagagatctccagaagctgatgatcgtcgaaagtattcttctgtgtccgatacacatataagtttgttggatacggatcttgtcccgggtcggactcattaa

SEQ ID NO: 154653 - DNA, 1226 bp, Arabidopsis thaliana landsberg
cggactcaaactgatttcgttttctagttgaagatctttcaaatcttaatctccttcgaatgtttgttcagataggttgagagatcgagtttcattaggaagatgcccgacatttccattgacgcattggtacttcattttttttgcattcgtgatcttctagccttaatcatggatcctttatgatttcttgtctaattctctttgctcttctatctgaaattcatagggccaaactatgggggactttagtaatcatgagaaacttggatttgatttaggagcatttgttggagacttggcttttgaagaagattcaggcaggtaacgttctcatgttttgtatcttaattcgactataacatatgtttctgcttctctttgttcttctgattagaatgctctcctttgatttgtttggcagtgaggatatttcattggaagggcttcaacaagaacttgaagaatgtgaaagcgatgaggtaagttattcacttaactgagatcaaacttttaaagctagcacctcggttcttctttttcgaagtattgtttctactctcatttgagttactttggagtacatggattgatcatagaatgttagatccatggatatgatgtcctttttatcttgtttgagtgaaatgtcaggttgttgccaatatactgtctagtggtgacaaacttagagaatatgcaaaaggggttgaaaacaatctacgcaaggatgaattggattcaattgaggttgttattctctacctgtgctacattgcggcacttgttgggttctactttttatgtacttaccgctataagcacaggacattctgtgatatcgtaagtaacttacgtacatgctttacactccatgaatactcaggattacataaaggaaagtgacaacctagtctcacttcacgatcagattcgtgactgtgacatcatcctgtcacaaatggaaactcttctcagtggatttcaggtatttgaaaattagacatttatataatttgtgtgtatgtatgtgcttctttctccttattctgacttttgcttaatgggaggactttttttactttgaaatacatatattttttcctggtaatctaaatgtgcactttgcttctttctttcaggaagagattggttctataagttcagacataaagattcttcaagaaaagtcaatggacatgggtttgagattgaaaaaccgcagg

SEQ ID NO: 154654 - DNA, 1223 bp, Arabidopsis thaliana landsberg
gaaagtatctaaaattaagctttgtgtttgaaatcgaaatcgaatcgagaagaagagaatctcaatggaagctgatgacgatttctacagcggcaccgaaaactactccgattacgccgactccgacgaagatgacgccgacggcgagtacgagttcgttgacgacgctgctgatgattccgatgaccttatcttccgtcgccgccaggtttctcttctccattattctggatctacatcttaaccaaaattgaaattaatgttgtttccaatacagagattgaagttttggtttctgaattaatcgcaggacctttttgtaatgttaatgatgatttgagaaaattttatagatcacaatggctaatgaagaatttgtttttggtttgtagcaaaattatagtgtgttaagcgaagcagatatttgtaagcttcaagaagatgatatttcaaggatttctactgttttgtccatttcgaggaattcatctgcgatcctgcttcgtcactacaattggtgtgattccagattctgttattcagatattacagctattgtgtgtgtgtgtgtgcttagaggaacttttcatttgtgtaaatttttttaggtgtgtgagcagagttcatgatgaatggtttgctgatgaggaaaaggttcgagatgctgttggtttattagagaaacctgttgttgatttcccaactgatggagaagtatgtctcccattgtttatattttcatttcgattaacattgtaaattcatctaatagaattcagctgtgtcattttggcagcttgattgtggaatttgttttgagactttcctttctgacaaattgcatgctgctgcttgtggtcatccattctgcgactcatgttgggaaggtttgttttatatattgagacccatttccaaacgtgatgtttagatttaacttgcaatgtactgttttttttttttgcttgatttcagtaacttgtaccttatgtttcatttcagtcttcatttgcaagtattgcaacatataagcattacaattaatgatggttcattattgttgggttaactatctgacctttcccctcatctttaggttatatcaccacagcgattaatgatggtccagggtgtcttacattacgatgtccagatccttcttgcagagctgctgttggtcaggatatgatcaatttgctagctcctgataaagataagcaaaa

SEQ ID NO: 154655 - DNA, 651 bp, Arabidopsis thaliana landsberg
cataggacaatggattctactgcgggtttactacgattgttgccgtaagagatgtcgtctaaaatggaagaacttgtagaagaatgctacatgacgactgtaaaaccgcatcatggatggatcgcgtctgctgctttcaaagtatacaccgtgatccctctcattctagctatgtcatacttactaacatcattttcttgttatatcccagcaaacttattttttattattatgaaataggtatgaacatataaattaaacttttcttgggaacatatattacatgtgttgatatcgtgagaatatgtaataatgaaggtgtgtttgaagctggtgcctgacaacaagacgttcatggaagcgatcggtgcaagagacgagagctatgataacttaagagaagacattgataccttgagctcattgttgacacctattctcaaagaaatctactttgttctggtaattaccattaacttataatgtagtatttttgtttatatattatacagttaaagtcctttaatttatacgttttcaatttttcggtttatatatgtatatccatcaattgattagcgtgcatggtgtttcaatttctgtttcaggaacaatacgggttgagcagattaagatcgatgtaggtaatgg

SEQ ID NO: 154656 - DNA, 261 bp, Arabidopsis thaliana landsberg
gcgtacacgcgttgttatcatctgtcgctgatatttgaaccatggcgcaaccaaggtacactaggatagataacaggaggccctcatcaaattattgctctacagtgacagtagttgtgtttgtggccctatgcttagtcgggatctggatgatgacatcatcttctgttggaaaggctcagcatgctcccaggtttctctggacagcggagatgggaaaaagaaacagatgaccccacctgcaaaggagggtaatggtcc

SEQ ID NO: 154657 - DNA, 991 bp, Arabidopsis thaliana landsberg
accaaaagaagaagagaaacaacaagaagtagtaatggcttcctctatgctctcctccgccgctgtggttacatccccggctcaggccaccatggtcgctccattcaccggcttgaagtcatccgctgcattcccggtcacccgcaagaccaacaaggacatcacttccatcgcaagcaacgggggaagagttagctgcatgaaggtaatatcatcaataaaaactgtcttttgtcatgtgcaataaaacaaaacataggatatattaatttggaattggatttggggattataggtgtggccaccaattggaaagaagaagtttgagactctatcttacctccctgaccttagtgacgtcgaattggctaaggaagttgactaccttctccgcaacaagtggattccttgtgttgaattcgagttagaggtaataaacacaaaagttttcttttgtctactaatcattattatttttttcgttttcattgctagaaatattagcctataaccggattttgtagaaccgaaatagactatatcaccttgtgcatatcctccaatatcaattgtattgaatggttttcttatgtgtttatagcacggatttgtgtaccgtgagcacggaaacactcccggatactacgatggacggtactggacaatgtggaagcttccattgttcggatgcaccgactccgctcaagtgttgaaggaagttgaagaatgcaagaaggagtacccgggcgccttcattaggatcatcggattcgacaacacccgtcaagtccagtgcatcagtttcattgcctacaagcccccaagcttcactgatgcttaaatccttttctggaatattcaatgttgactatccggaacccaattttgtatggtcaatgtaaatttaagtaattattttgccaaagtgaaaaaactgaaggtttgtttttctatcgtttcctctataaaaatctctattcatatcacttca

SEQ ID NO: 154658 - DNA, 230 bp, Arabidopsis thaliana landsberg
cgagtcgctctcttttctctatctcaatctcaccttctcaatttacagttttgccatccatcaacaacgagagacgacgccttgctatcgccgctcgatctcaccgactatcacgccggaagattcgtaagagacctcctgatagagatatgtcctccatagtttcaatcccggagcttcctcgccggcgggattctgaggaaagcctgcttttagattctcgaatcagt

SEQ ID NO: 154659 - DNA, 1099 bp, Arabidopsis thaliana landsberg
tttttgctcacctttctctcgacttggtctacttttgttactctttgagttgggtgattatggcagcagcaccacaggaggaacgatctccgtcgcttgacgattgccttaagctattgaaaggggagagagacgagcagaggctcgccggtctacttctcgtcaccaaattctgtaagaacgatgacatcgtttctctcaacaaggtctacgaagccgttggtactcactttctcgaccgtcttttccgtactggtaatcaaaaccccgaattattgatctttgtctcagtaaatactaatatcaattttggggtttctacaaagtgtgaattttttagttgagatactaaagtttgttgctctgactggtttcgattttttgttttgcaggtagtggcagtggcgatggggttgataatcgtgatgtgtatctgcagatatctatcactgttcttgctgcattctgccgtgttccggagatagcttcttcagaagagatggtctccagaattccccttattctcgaagtaatgtccaaagggtatgttagatcacctgattcttgcatttgcgactttccatgaagttttttttttaatcaagctttgcttctgtgtcttcaactttttgcatattgtgattgcctaaagttaggaaattggcttttggaatttcagaataactacaaacatgctcgaagattgctatgagcttctgtatttggtgtccacggcttgtgaagctggtctcatgactttgattaactctggaggcttgagagtgatagctccccagatgtctgagttacctgatggtaatacatactctttcattgggtttacattcttttgttgtgtatatgatgcacattagattccattgaatgctatttcggattgattatatttggtgtcaaagaaaacgtgccatgttgaggtagatggatttgataatagtttttcactgggagctaatgtgagacatgttattcaggttcacatgccatggaggttgctataaagattctgcagttattggttagtaagcttgattgtgggagcatgactattgaacgcttcttagaactgtctttggtg

SEQ ID NO: 154660 - DNA, 925 bp, Arabidopsis thaliana landsberg
agtcaattttcgtttgaccaaatttgattcttcatggcttcctcagtctcctctctcgccggacgagtcgcgatagtcaccggttcttctcgcggaatcggccgagctatagccatacatctcgccgagctcggcgccaagatagtcatcaactacaccaccagatccaccgaggccgatcaagtcgccgcagaaatcaactcatccgccggcaccgttccgcaaccgatcgccgtcgtgttcctcgccgatatctcagaaccaagccaaattaagtctctcttcgacgcggcggagaaagcctttaactcgccggttcacatcctagttaactcagctggaatcctcaatcccaattaccctaccatcgccaacactcccattgaagaattcgatcgcatcttcaagtaatcgaaaaaactttatagttaatttcattgtagagattaagaattaaaattatgattatcagtgttgtttgttgttgtttagggtgaacacaagaggatcattcttatgctgtaaagaagcagcaaaaaggctaaaacgtggaggcggtggtaggattatactgctaacgtcgtcgttaaccgaggcgttaatcccggggcaaggagcttatacagcatcaaaggcagctgttgaagcaatggtgaagattcttgctaaggaacttaaaggtttaggcgtcactgcaaactgtgtatctccagggcctgttgcgacggagatgttttttgacgggaagagtgaagagacggtgatgaatatcattgagaggagtccttttggtaggcttggtgagactaaagatattgcttctgttgttggtttcttagctagtgatggtggtgagtggatcaatggacaagttattgttgctaatggtgcattcctcaaatgaatatgggttatgtttgtttat

SEQ ID NO: 154661 - DNA, 2764 bp, Arabidopsis thaliana landsberg
atgtggctggtcattcttgtgatttactcagcttggatttgtccatttgagtttgccttcatcacctacaagaaagacgcacttttcatcattgacaacattgtcaatggattctttgccattgacatcattctcaccttcttcgttgcttatctagacagccactcatatcttctagtcgacaaacctaagaaaatagctataaggtgaacaacaacaagtacataataaagacaatggtacggtttttacgtatttaaaggaagcataatttctcacttttattaatgaatatgttcttaggtacctttctacttggttcgcctttgatgtctgctcgacagctccgttccagtcactgagtcttctgttcaaatacaatggaagtgaaataggattcagagttcttagtatgctaaggctctggcgtctcagacgagttagctcgctgtttgcaaggttcatttttaaatactaaaccattttctttcaagtttagaagacttaccatatgaagaatcaacataaagcttaatctctcattattcctttgcttcaggcttgagaaagatatccgcttcaactatttctggacacgatgcacaaaactcatttcagtaagtctcaaaaacagaggaattctcatttcttttcatctataaatgctactagctaatgaactagaacttccaagttacaagttacaacgtatacttttatatatcaggtgacactgtttgcagtacattgtgctggatgcttcgcgtacctcattgcagatcaatatcatgatccaacaaaaacatggattggagctgtctacccaaatttcaaggagacaagcgtatggagtagatatgttactgctctttactggtctattacgacattaacaacaacaggttatggagacttacatgctgagaacccaagagaaatgttgttctttgtgtttttcatgctcttcaacctcggtttcacatcttacctcattggaaatatgaccaaccttgtggttcactggactagccgcaccagaaactttgtaagttcaataactttcttttgacttcacgtcaatctcttaaaactataacctgcaaaaaaaaaagagattcataggttttgaactaaacagagagatactgttagagctgcttcagagtttgcatcaagaaaccaactcccaccaaatatacaagaccaaatgttatcacacatttgcttaaagtttaaaacagagggtctgaaacaacaagaagctttaaatggtttgccgaaagcaattcgatcaagcattgcaaactatctcttcttcccaatcgttcagaacgtctacctatttcacggagtttctcgcaacttcctatttcagttggtaaaacactcatttgattaactctttctttgtccatttcttcctgttatattgttccataactttaccaactcgatataccttttgcaaccaaggtttcagatatagatgccgaatatttcccaccaagagaagatgtaatactacagaacgaagctcctactgacctatacatcctagtctcaggggcagtggtgagtgaatgaaatttaaaataaataattgtataggaatgttgaagttaccttctaacatatttactcgctcatgtaatgattgtgcaggattttactgtctacgttggcgaagaagatcaggtatgtgaacaatatatatcaccaaaataacttcactgtagaactcttagctgaaaaaagagaaatgactgtaatcctcacattcatgtaggttcaaggcaaggcggttgttggcgatgcatttggagagattggtgtgttatgctatacaccacaacctttcacagttaggacaacagaactatctcagatactacggataagcaaaaaatctctaatgagtgctatgcgagctcatgtggaagatggacgtgtcataatgaacaacctcttcatggtaagtaagaatgatataatatctggaaactaatattatttcaaagatgttttcacaatgatgtcaatcaatactaactcatttcatgatgaaatatgtagaaacttagagggcaacaatcaatatcaattgatgatccaaattcagaaccagagtcacttctccaggagtggcttggtggtggttcaaagacaggagaaggaaacgctagtgatcaaggacatggacacaaatatttacaactgcatggttcagaaaatattgatatggggtcaactgaatggagagattcaagaagatctggttatggcgaaacgaaaagagttcgagaacatacgatagagatagaagaaggagaaaaaccaaataaagagtttgatggaaaaggttgctctgatgcagatcttacctcatttgaatttcattcacaggaagcatatccatattgcagatcaaacatccaaatcaaacaacatgaagctgcaaaaccaaaagataaaagagttaccatccacttgaagtcccgggacaaagatttgtcgaagctgataatccttcctgcttccatagaagagctgctaagacttgcaggtaagctcttttacttcttaattctctaagatactactgaacataagaaggaagtaaagtaaactaagaaattatggtgcaggtgaaaaatttggatacatcttcacaaaggtcacgaatgcggaaaacgcagaaatagatgatgaagatgtgattagagatggtgatcatttgtattttctcatcaatgaaaactcttaa

SEQ ID NO: 154662 - DNA, 426 bp, Arabidopsis thaliana landsberg
gtacacctctgctgtatgcgaactcgatcaaaaggcaatcagaacctccttttcaacaacaacatcgaccgcatagctcgcgaactcagagaaaggagaaacacagtcaaccttgtacgacaaagcacacatctgggagaagaatctgccccatgactcaatcaccacctgggatgattgcaagaaggcttttctatcaaagttcttttccaatgccagaactgcaagactcagaaatgagatttgtggtttctcacagaaaactggtgaaagcttctgtgaagcatgggagcatttcaagggttacacaaaccaatgccctcatcatggcttcactaaagcctctaagatcagcactctttacagaggagtcctaccacgcatcagaatgcttctggataccgccagcaatggaaatttccagaa

SEQ ID NO: 154663 - DNA, 1200 bp, Arabidopsis thaliana landsberg
ggactttcatcttccgcttcactctacaccaagccccgactactttcttcttcttcttcttccccgtcgttcgcttcctctagcctatcctctacaaaaccctaagaaggtgatcgatcaaaactagcaatggttctctcaagatatttttctcaataactggttcctttctttgttttctcagctatgtagaaagattgagagagtaatttgcagagcggagttttcacaggacgcaccactcgtaacagcaattggtgcgtgtatcctaagttcatttgtttttccggtggcgaaacgagtcaacgatgaggaagaagaagaagaaaactcagcgattgtgtcaacagatatgagattagccgccatgggaatcatcagcttcataccttacttcaattggctggtttgtttcatttctccttaatccttagtaaatctcttataattaaatgtttaaacactaaacaaattcaaaatattgtgatgattaaatacagagttgggtgtttgcttggcttgacactggaaaatctcgttatgctatttatgctcttgtttatcttgttccttatttgaggtaattaatcttgtttaagatgcataattgttcagtctgaatttggtcatctggttgttctagtttagtgtttgagtttatattcatgttttatttggcagttcaaatctgtctatttctccagaagagagctggttaccaattacaagcattgtcttggcattattcatgttcaggttctcattattatgtctttcttctataatctgactaaaactctgatttgcaacgtactttgtgtttcatcttttttttttggttgggtagcttgaagcaagcatcgcaaatggggatgttgagacacttgcattcttcagaaacacatctgatgacgatttttcatctaagaaaagaatccattttaagaaacatttcaaggtaatctaagtgtctttagtaaaagagaaatgctttcaaattcaatttataactggacttttgatttgttttctttttctttttgcaatgtagggaaaaaacagtgacgatgaaaattaagaataattcgcaaaagacacaaagagaataaatgaatatttgtaacagactttagctattagctttgttaatgtaattgccacaaaatccgaattttaaaaggttaaatttgatgtagacga

SEQ ID NO: 154664 - DNA, 1587 bp, Arabidopsis thaliana landsberg
  unsure (1)..(1587): unsure at all n locations
atggaagataatggtgtagcttattgtgatggtatgacgaatactgtcaggaagaaacgtagcctcacttgtcgtcgtcctcgccctgagggatccagtgttttaacatcttcagatcgtttcagcaagatctcgagtgatgatatacctgcttttgatactaaccctagaaggaaagagtttagtcttagccattgtatatcgagggctgaatctatagcagaatctgaaagaggaaacaatgattttaggcggagagagattatcaatagaaataagcgttcgactgaaggtgttcttgcacctgccagctcgaaataccctagccaggaagttgaaggtaactgcatgatcaatggaaagggaactgattcgggtgaattagagggagaaacaaagagaatgaagcttaagattggtggtgtgagccggctagttcatgctaatggttcatctagaaagtcttcaaaaccagtgactgatactattcgctccaaccatgatttacaggtgaattgtcttaatgtggatatattgacaatgcttaagttgttgaattgtatcgcatccgataagatttatagtactttgtatcatcctattgcattgagtatctttttcggtaaatgctacgctcttttcgggccttacggcccataatctccccgcggttggagaccagagttaggtataattagtctatgatccaaggcttgggctcaaattagtaaatgtttactgtttatggacaggaatctgaaaatgttttcttatgcatttcgcgttggtgctccagtggagaggatttaatcgtgtcttaatttctgtggtgaagagctttcttgacagtttagattctgtcaactttgatatcttcttacattaaattttatttaattgcaggaaagttcagaagattgtaattcccctctagataagaaggctgatcttgaaggagttacttgggatgctgagatagacggatctatgacagggaggagaaaacaagaggaaccatctggcttggttcgcaagagcaaacgagccccaaagaaacgagttttcgatagcgatgacgacagcgatgatgagatccggtatttggaaaagttgaaatataagagagtctctgtgtgtaatgaggatactgagtctggaaggaannnnnnnnnnnnnnnnnnnnntacaaatggagaaaattccggcaagaagaaagctgtgtctgaacaggcgtccgaagacatggattgtgcggaggaaattgaaacggcgtctgatgaaaaagagattggtaatgataataagagggaatcaaccatgactagtcgtcagcgagcccttgcttctggcagatccagcgcgattgatttttcagatggattacctcctacatctagaagtaagattttaatcctttgctactgccacataaatctttagcaattaggggtcataatgtattgtggtaacttgtgttgacaaatagggaaaaaggagactctttcagaaatggagcagcaattgaagaaggcagaagctgctcaaaggcgaaaagttcagattgagaaagctgcaagggagtctgag

SEQ ID NO: 154665 - DNA, 8966 bp, Arabidopsis thaliana landsberg
gctttagcagtcttgattgaagctttgcattcagctaaggatatggagccggcagttgaaaatagtggtatcgttgctgctttatccctaaatttactaccttggcatagtctcttggttatcttctttcaaaacctcttacttgcttaacattctcattgtcaggaatttcaccgcttaatctagcaatatgtcactcagctgctgagatttttgaggtcatagtctctgactcaactgcatcatgcttgcatgcttggattgaacatgccccagtccttcataaggccttgcatactttgtcaccgggtggttctaatcgaaaagatgctccttcacgattacttaaatggattgatgcgggtgtggtttatcacaaacatggcgtaggtggccttttacgttatgctgctgtcttggcttctggaggggacgcccaattatcatcatcaagcatccttgcactcgatttaacaccggctgagaatggtgctggagaatcaacaaatgtctctgagatgaacgtcctagataatcttggaaaagttatctttgagaaatcttttgaaggtgttaacctttctgattcatcaatttcacagttgacaacagcacttcgaattttagcgctgatttcagataattcagtatgttatctttccccataatttttcagaaattacttttttttcctttagatgctatagtcttcttatttaagtgttctgaaatgttgttctttgtacagactgttgctgctgctttatatgacgagggtgcggttacagttgtgtatgctatcttggtcaactgcagctttatgtttgagaggtcgtcaaatatttatggtaaactactgtctattctgtgatttgattcaactcctctattgctgctaccatttgaatcttaactttagacgtgatgataagagatacttggaagagtttaaataacccagttgctggataaccgttttttatatttacccttttaataacctttttcttataggttcacgatgttttcagctacttttcctcaatcgtttgatgattataggtgacactcaactaattcttttgttttggacttagcagattatctggtggatgacgatcatggatgcagttctatttctgactttttgtctgaacgtaatcgtgagcaaagcttggtggacctgttaattccttcccttgtcctcttgatatcagtcctacaaagactacaggtctggtgctttatacattattagtttcttcatcatgtatcagcaacaaatgaaatgattatataaatttgattaaaatcttctctcaaaagccatagcttctgaaattctacctttatttactttgttgagactctataattgcggtcttatgcgtcttcattatcccctctggtcattgacattttctttgctgtctaaagggaactaaagagcagtacataaacaccaaattgatgaaggcactcctaaggctacatcgggaagtcaggtgagttactttcgttttgttcttagtagtatcaatgacatgtatgttaaatgaaaagttaagctctgagccatgatggcttgttttctttccagcccgaagctagctgcttgtgcagctgacttgtcctcccattatccagactctgctcttggctttggagcagtgtgccacctcattgtgtccgcccttgtctgctggccagtttatggatggattcctgggctattccacactcttctttcgggtgtccagacgtcctctgttcctgccttgggtccaaaggagacctgtagcttcctctgcattctagtatggaaatcttacacttccgctaattattttttacttggtgtttgtgatggcatgcactctttatatcattgtgagaaatttaacatatatttccagccgaatagatatgtctcatctgaacatttgtgatggaattttgttcatgtgtattgtagtcagttaatgtaaatggtatcaacgggaagatctccatttattgtcttaatactttattcttcatgtatttctcattgcaagagcgatattctccccgaagaaggagtctggttttggaagagtggcatgcccttattaagtggtctaagaaagttggcggttgggacattgatgggtccacagaaggagaaacagatcaactggtatctggagcctggtccacttgaaaagctgataaaccatttgacacctaatcttgacaagattgcaaagattatccaacatcatgcagtatctgtatgttcttctatatcttgttaaatccagtgtttctctgccgcttttgcttttgttatcatttattcagcatgatttggactttgtcttattttcaaacaggcattggtggtcattcaggatatgcttcgggttttcattgttcgtattgcatgtcaaagggttgaacatgcttctatccttctgaggcccatattttcatctatcagagatggaattttggatcagtcatcaacaagagacactgaagcttatatggtatttgttacgcctctctaagtcgctgtctatgttactgctgctcctaaccagtctcattactctctttcaggtctaccgatatcttaattttctggctagtttattagagcatccgcatgctaaggtcacactctttgcctagttttccttcactttttttttttttttttttttcaccttaaacgtattcacttcagggattactgttagaggagggtattgttcaactgcttgtggaagttctggaaagatgttatgatgccacttatccaagtgaaaacagggttctagagtatggaattgtgtccgcgtctagtgtgattcagtggtgtattccagctttcagatcgatctcactgctatgcgattcacaagtgcctctcttgtgctttcagaaaaaaaagctgtaagtgttttttctgcaggagtgctcaacgttaccttatctagatcacatttatatctaatcgttttttatttatttatattaacttgtacagattggccagtctgagtgcaaaagattgtgcattgatatttccctttgtgctgaagttctgccaggtattttgtcaacattgtagtaatctatgtttatcaattgttttccatatgttattatgtttgtgttctttttataaattgctgcactacggattataaattgtgattgtttatggcaatagattctgagatctcgatgagctcttctaagagatagatagatatctttgtaatatttccttacaaaaaatatgattacgaagaaattttttattttcttacaggtgttgcctgttggcaatgagctattatcttgtcttggcgctttcaaagacctgagctcatgtggtgaaggtcaagatggtctggtttcacttttgtttcatctgttttctggtaccgaagaatctgtatctgaaaggtggtgtgacactaatagtctcagtctcgatcaactagatatgaagaaaaatcccccttttctgtcttgctggatcaagttattgaactcaattaattcaaaagatggtttgtctagtcttgcaatgaaggcagtaaacgttctgagcgtgggctccatcagattatgccttgatggtaaaaggtaactcccagactcttcataatctacagttcttgcgctcccagtttaacacgagtttgataggatttttactctgataggcgacgttgtatgtccacttatattcactgtgtatgtggatagaaaaataatgttcgcgatgccacttagtttaagttggtgtatgcatacagtttagttgatattgttttgttcaggtgatataagcctaaaaattatcaagcagaagatgtgcttagttgcatctgatgctgttcacgtttaaatacttccaactagtatttcaaaccattcgtctaacatatatatatatttaacacatctgtagtctaaattttcttcatttttccagtttggactcgaagaaggttgcagcactaaaatctctttttggccttccaagtgagtttagtggtacagacacttttagagaggaaaacattggtttgattgaacagatggtgacactgttgagttcaatgacttcggggtctgatagttccgcaacagctgagatgaaaccctatttgcatgaggtacggactacctcatacctgctttttcttgcatcatcctcttcttttgttgttttcctcttaacactgactttcatattctttttgtggatttgaaggcatctcagtcgttgctgtcgttgctaaaagacgggaatattgatgatattatctcctgcaaaggtgtttttgtttctcctgggaatcttgatatggatgatttggtttctagaaacattgaagatgatctctatcaaagaggacttgaagacaagttctggtgggaatgtccagaaacattacctgagcgtctgccccagtcatctctccctgcgaaaaggaaactaccaactttggagagctctagcaggcgtgctaaaggcgaaaactcttctgttgacatacctacccaaaattcaattcaacggggaatgggttctgtatcccttcctcctgctcctacacgtagagatgcctttaggcagcgcaagccgaataccagcaggcctccctctatgcatgtagatgattatgttgctagggaaagaagtgttgatacagctggtaattctaatgcaataaccatttcacgagcaggatctagcagtggtagacctccatctattcatgttgatgagtttatggccagacagagagaacgaggccaaaatccctccaccattgtggttggagaggctgttgtgcaagtgaaaaatcctactcctgctagagatactgaaaaagttgcaggtaaacctaaacaattcaaagccgatcctgatgatgatctacaaggaatagatatagtttttgatggtgaggaatgtgaaggacctgatgacaagttgccctttcttcagcccgatgagaaccttatgcagcctgctcctgtcatggttgaacaaaactctcctcactctattgttgaagaaactgagagtgatgcaaatggaagtagtcaattctctcacatgggcacaccagtggcatctaatgttgacgaaaacgctcagagtgaattttcatcaaggatttcagtttcacgccctgagatgtcgttgattcgggaaccaagcatttcttcagacagaaaatttgttgagcaagcagacgaagcaaagaaaatggcccctctaaagagtgccggcatatctgaatctgggtttatacctgcttatcacatgccaggatcttcaggacaaaattcaattgatcctagagtgggtcctcagggtttctattcaaagagtggtcagcaacatacgggccatattcatggtggattcagtggtcggggggtttatgaacagaaagtgatgccaaaccaacctcctttacccttagtgccacctccatcagtctcacctgtgataccacattcttctgattctctttctaatcaatcctccccgtttattagtcatggaacacaatcttcaggaggacccacccggcttatgccaccgctcccttcagcaattcctcagtactcatctaacccatatgcatctttaccaccaaggacatctacagttcaatcttttggatacaaccacgcaggcgtaggtaccactgaacaacaacagagtggcccaaccattgatcatcagtctggcaatctatctgttaccggaatgacgtcttaccctcccccaaatttaatgccatcccataattttagcaggccatcatctctccctgtgccattctatggaaatccttcgcatcaaggaggtgataagccgcaaactatgttgttggttccttccattcctcaatcactcaatacacagtccatccctcagctgccatcgatgcagctttcacaattacaacgccctatgcagcctcctcagcacgttagaccacccatacagatatctcaaccatcagagcaaggagtatcaatgcaaaacccatttcagattccaatgcatcagatgcagctgatgcaacagacgcaagtccagccttactatcaccctcctcaacaacaagagatctcccaggtgcagcaacagcaacagcatcatgctgttcaaggtcagcaaggagctgggacttcccagcaacaagaatctggaatgtcattacatgattacttcaagtcccctgaagccattcaggtttgtaatccacatccttggtaatgaatgatacgctgatttgttttgtttagtagtattacgtgccacagctgaccataattcttaaaactcctcttcaggctctattaagtgaccgtgacaagctgtgtcagctactggaacaacatccaaagttaatgcagatgcttcaggttcgatttgtttacttgtttttatgtgctttttgaaagcatcatcaacctttgtgtgttaattgtagagttactgaaataggttttgttcttgttggttgtgacaggaaaaacttgggcagctattagaagagagagacttgtcagcaaatacatccctttggcttactagttgcttttcaatttctgtaatgtctaataacatgtacattgtttcagttaatatgtagacaaaagcggtaatcggtatcgctttctgttgttgtttagtcatattcatgtacattagctagaaaagaaactcaaccttcaagttctcaagtcctggtttttttttgtcaaagcaacaagccacgagcataagcttacatttataaccctgtaagtaacaaaacaataatataaggaattacagtgattaaaatcattaaactttgaagaggccttaaagccccaaaaggaacatttgaaatcgaccccactaagtgacccaacaagttgttaggcgaatgtgaattggaaaaaaacacaaaaagaagaatgattgttctcaagcccagcaaatttctgacacagttcatcaactaggcgttgaaaagatcttgtaccaacgagaatactgtagagaagagagagagagcgaaggagatcgggtggagtttggatgatatcagagttgtccgtagatgcaataggattaaagattcaacgtttagtccacttggaaggagtacaccactgagaatcttaaagattcaacatttagggtactcttctctcagataaatttagcaaaataagaaagatgatgtctttctatttctagggctgagttcgttgtatactaaccaattcgtcgtaattgaaagttgcttgctttatgtactcgttgtttagtgaacttgcatttctctactcaatcgtattcatctctgcactcacttctacttctggttttgctgagtttttgtttggttttcttggtttaggctacaaaatttatgtaaatggatctcatttcttgctctctattcaggtgctgaaagacaaaaaacctcagcttttgctctatggagcctcgagtaagtatatactaaacaagcgacaattactgatttatagttttgtgttaatggaggatttttaattgctgaaatatttctttcttttctcggttttgtttttcgacaggataatcaagccgaggcttcatatacatttggtgatcgatcaagcagtgacatagttgttagactaagaaatgaagaaggtcgtgatgattggatctattgccattccaagatccttagtgagaaaagccagtattttgctgaccgtctctctgataaatggcccacttgcaagattcttgattcacgttactgtgttgaggtcatctgtcaagaatcagactatgatcatcatatcaatctcttaagacttctctatgttgtctctgatgatgtccatgaggataacttgtgtcataatgtgaaaagtgcgttggggattctctctgtcgctaaagaacttagttgccctcagattgtcactgcttgtgtcaactacttggaagctgttccatgggaagaaggcgaagaggaagagattctgcggattgtaccgaggattggatcagaagcagagccgattcttgcccgtctccaaccagttgatcagtccgctgttcttgaaatctttgtatcggcttttaggtttgctacttcgtccccgcctttgctcttgggtgacataaaatcctctgctcaagaacagattgagtatatgataaccgaagatgacgatgcaccgttgttgattgctgatgaagaagtcaagcttgaagtaaaacaatgtgtaaagagcctgtttgttagattcttccagtgcctagaagaaatcactttgaaacccgtcgagtctgaggtaatcaacaaaaaggggtcttttaggatggtcctttcagatatgtgttgggtttttcagatattaacgaagatggaagttgttagagattttgttataacatgggctgacatatctgagaagttagttaaggtagttgagcagttggaaacaacagttgtagaggctgttgagataagagtcaaggtcatcgaggtgactgcaaaagtcatagaagcgattggttatggaacagtgatattaccaacagcgaaacggcttcagatggtaaaactatggcttccttttgtaagaaacacaaagcctcttgttgactcaccggttagagaagatgaggagaatgatactgtgagatataaaatcgacggagagatatggcaagctttagaatcttcctttgtatcgataattctggcattgccatctgcagaccaagctgagatattgactgaatggttaagcaagaatgggttgtatccggatttaacagaagctttcgaggtttggtgttacagatcgaaagtcgcgaagagaagattgggtttagtcgggggtgaagaggagaacggcatgtcttaactcat

SEQ ID NO: 154666 - DNA, 684 bp, Arabidopsis thaliana landsberg
ttaataaaaatgtttaagacaatgtatattgataacagctgtgcaataattttttatatattcaaagctggctttagaagatatggttataccttaaaaaacaccgagatccaagatcttatgtaagcggtaaaaatacatctttttgagaaatattctatttcatttcgctatatagatgactataaccatactctgtgtcttgtatcttattttaatgtgtagaatattggtaaaatagattacagcgagtttattgcagcgacgatccatctaaataaactagagagagaagagcatcttgtctctgcattttagtactttgacaaagatggaagtggttacatcaccattgatgagctgcaacaatcttgcattgaacatgggatgaccgatgtttttcttgaagacataatcaaagaagtagatcaagacaacgtaagctttgcctcttgacatgattcttccactcttcaccattggtgtttgctgatagagtttctatttttgtttcttacaggatggacggattgattacgaagaatttgttgcgatgatgcaaaagggaaatgctggtgtagggagaagaacaatgaaaaatagtctaaacatcagcatgagagaagtgtaggcacatacacacatctttaaatcgtctattcggtgaggatgcgaatgtttcca

SEQ ID NO: 154667 - DNA, 2268 bp, Arabidopsis thaliana landsberg
atggatttaaactcaaaccacaaatcctctgttcttaaagatccttcaccatcagttaacaaatcaagactcggcgtgtctagtagatttatgatgagtcaatggaagaaacctgcgaaactcgatgatgttagatccaatggttggttagatgcaatgatttcatcttctccaccgcgtaagaagcttgtcaaagattttaatgttgaagttgctcctgaagatgattttgctcaacgtgcttggatggtacttgtaataaacgctaaatttatcctaatatgtgtttcttaatctcaacaaatatattgtttggaattgtgaaaaacaggtgaaatatccttcggcgattagctcgtttgcgcatattgcagctcaagcaaagaagaaaaagatagctgtgtttctagattatgatggaacactttctccaatagtcgatgaccctgatcgcgccatcatgtctgatgcggtaaagaactaaaatctctgttttgttagttttgctctctgatctcaaaacgtaaatggctaagtttgttttctatatctctcttagatgcgtgctgctgtgaaagatgtcgccaagtacttcccaacagcaataattagtggtagaagccgtgacaaggtaagacttctgaacaattaaccataacattgtatcagtacaagccaaccaatagtcaaaacactaatacattttgagtttgttaatgcaggtttaccaattggtagggctaaccgaactctattacgcgggtagtcacgggatggacattatgactcctgtaaatccaaatggatcccctgaagaccctaattgtataaaaaccactgaccaacaggtgagagatcatgacctcattttgtcttaaaaacagtatatgaatcaacttttgtaaatgctaatcttttctttatgaatagggtgaggaggtaaacctctttcagcctgctaaagagttcatacccgtcattgaagaggtttataataacctcgttgagataactaaatgtatcaaaggtgcaaaagtagagaaccataagttttgtacttctgtacattaccgtaatgttgacgagaaggactggccacttgttgctcaacgcgttcatgaccacctgaaacgataccatcgttcccgtataacccacggtagaaaggtacttgtggaataaacatcactctggtttctcatattagatccaaatcccttaacatagttttgttgatatgatcaggttttagaggtgcgtcctgtgattgagtggaacaaaggaaaagcagtagagtttctgttagagtctctcggattaagcaacaacgatgagttcctcccaatcttcatcggagatgacaagaccgatgaagatgcattcaaggtactgagggaagggaacagaggatttggaatattggtatcgtctgtaccaaaagaaagcaatgcattttactctcttagagacccttccgaggtacaaattttatattatctaagtcatcatctatgctatgttatatatgtaaatttgtaatgtatgagtttggtcggtaacaccgtaatggtgtttcaggtgaagaagtttctcaagactttggtgaaatgggggaagatggaaagttcaaaaacaagtttttgatgattgtgtaggagaatcagaagcttcattctgcactgctttttaatttcttattttttttccttttttaaagtttgtacttctatatattatcatttttcccatattatccattaagcaaacgggaaaaacaagaatataacgattgtcttgacattttacacatcgatgttcacaattgtagacaaacgaatcagatagttttcgtttacaatatcatacattcgatttagtggtttcaaacacaaagccatgtggcttacggcatcaaactagagatactacattatatgaattattttttggccttttacgtttaaaatgtaggtatattttataaatttatttttgtttggctttttttcaccatatttcgcgagttttataaaacgttaattaagttgttcatgaattttggggtttaacaaaaaagaaagtaaacaaaatcaaaaacttgattacgagatcaaaagttgaagaacgttctaatgtatggtgtttagatttgattacaaaatcaaaaactttgctttgattaatcaggtaaacgggttagctttgctatccaataagacaattatggttgaaacactcgattacatgagaaagagggagagtgattga

SEQ ID NO: 154668 - DNA, 2712 bp, Arabidopsis thaliana landsberg
tatgtctttcactctctctctctatatccaaagaattaaaaaccataaaaaaagaaagataaaaagacgaattccagaaaaaaaaagacgcagaatcgtcgttgtcgtcgtcgtctttgcatttcgtcggaatcttttgattcttgaatcggaatatctctgtttttgttttatccggactcaagatcaattctgattcttggaatttatttgattttttgttgttgttgttgaaaaagtggattctttgatttcgatttgtaataatcttcgtagaaaaaatggattctgattcttggagtgatcgtctcgcatcggcttcaagaagatatcagctcgatttcttgtctcgatctggtgagtttgataaaaaattataacttggatttgttctttcttaatttgagatttgattggttttgtcttaaatttaatcttgattctattgcaaaaatatcaatgattttagacctcaaatttgttttcttttgaattgatcaaggatcgagattgactgtaagagattgacatttttgttactgttctggttttccgaacaaaatgggacaagacatggattgtgtcttgttctgaatatttgaaatggtgattgttcaaatgtttgttttgctgatattgaatttaaggaaaatggaggaaaaaaattctgtcttttggggcattttactaatgtaaggctttagggattgattaagcgtgtgtgttttgtttataagaagattttgtttctaggttatgatatgaacttgttcaaaagttggaatcttgatgattctcgtttgactaacaagtaaatacaaaacttcttgttggtaaaacgtttttgaaagctttagtttcatctcaaacttagacatctttgccagggaaggttttatgatctactagtatccattcgtttatttagagatcttgatgtttcttctaaaaaccatttgtattggaactgcgagaatggaacgcgtttttagtattcccattaaactttctagacttttgttttgtagttgtagcatttcagaatgttcattgggtgttgtagttttccggtgtttgactagtttctttaatttttgaaaacgcagacaatttcttgggatttgaggagatagaaggagaagatgactttagggaggagtatgcttgcccgttctgttcagactattttgatatcgtttctctatgctgtcacattgatgaagatcatcctatgaatgcaaaaaatggggtagatatttcctcaatgttacctttctctcgttttgaatcaaaatctatttattgtttcatcatatcattcttggtaagagcactgttctatgtttagtagttactggtcttggatataaagaaagtgaaagtaacctaatgaaatgcgtcgaaataggatttggaattgccacttagtgttcctcagagaataaataaactataggacacttgtttattgctacaatagcaagatttgttttcaattctgcgttttgacattgttaatcttgtaggtatgtcccgtttgtgcggtgaaagtgagctctgatatgattgctcatataaccctacaacatgcaaatatgttcaagatatcctttttgctctctctaccagttatacttttaacgatcatgtacttatctgattcttcaaatgagttgtgttaatgatacgaatacttcctgatttatgatttaggaaatagtttaggatttccattttcttatttacttttcctagagtcttttagtttatcttctattatattgagtttgtagtaattgagagctttggaggattctattgagtttatactcttgttactttattgttcaatcttttctactatcataataaaggttttggtttagaattggattcgatctctaacagttacattccttaacgaaatattacgtgacgcggaaaaggaaatcaagaagaggcggggctcaatccatgctatcgatcttgaagagagagtttcctgatggaaattttcagagcctatttgaaggaacatcacgtgctgtatcctcttcttctgccagtatagctgctgatcctttactgtcttcattcatttcaccaatggctgatgactttttcatttctgagtcaagtctatgtgcagacgcaagttctgccaagaaaacattgaatcagagtttgcctgaaaggtatacttccacattctcatttggattacacttctggatgatatcatcattgcattccccttttcttgatcattcttgttaagtgatcttacaatttcgggtactcagtcatcgcatatcactcatccttagtttttgtgagccttaatggaatttagttaatcccttgttttaccaataatctaaaagtgatctgagtgtttttttttttgttgttgtagaaagtacaaattgcagagtttgttctgatgattcttgtcttgatctttgttttacaggaatgttgagaagcagtctctttcagcagaggatcacagagaaaagttgaaacagagcgagttcgttcaagggatattgagctctatgattcttgaagacggcttataaaggagaaacatattccggtaacttgtctacggttagatgattcagcgattggaaaatgtaacggctttgttgtgttaaacgcaacaattgatttgggaaagggtttgggaataagcagaataatgtaaaa

SEQ ID NO: 154669 - DNA, 2131 bp, Arabidopsis thaliana landsberg
atgtttaggatagttttgcatgcatgttgcatatttgtgttgttttcaggtgatttggagctgttgacgagctaattggaagaagcggacctgatcatgtcaaaccactcgacctccagggcgagtagacggtggactatctcaacacaccactcgaccacctggtcgagtataggacttcaccacttgacctcatcactcgaccccctggccgagtacccccacaagagtcactcgatcaattcactcgaccgccaggtcgagtgtgttcacctccaccacctgaccatcactcgatcacaccactctacctggaagtcgagtatcaccatcaccaccactcaactacatactcaatgtcgagctttagagtcttctccattccgctctcaaccagacactcgagcacaaggaagaaaagaagattccagcttatcactcgacctctcactcgaccacctgggtcgagtacagtttttaatccgtcccaatactgcgtcgttttgtgtattagggtttcagaatattttgctataagtagcatgtactttacattttcgagaacaagttttttctaagttttattccgcacacactgtgttcttgaccttttgtaatccgaatttctctttatctattcaatatttagtattcagtatttgttcttgatttcgtttattgctgttcatcctgttttcaccttgctattactctgttgttatcatgttttcattccattcaacgtttatgttttctacaatgatgtctgagtagtgaataggtttctgaggatgggttagagtagtttagaattctcagtatgctgggtagttgagtttgattgatagatcccttctagattagttgttctaaatgtctattgctttttgatcaattagaatttgagcctagacattttggcgcccaaaaggtgtttgatgaaatgtcttaagcactaattccagagattcgtggccctctaccaaggtattggttgcagggagcgttttggctttaacttgttgattcgtaatacctgttaggttagctctcgtcaatggtgattgagtctgggactaggttaacttgagggtctctgttgcggtggcacttagatttggttaaaaaccttgttgtctagggttaatttattgagcatgtcaatcacctgtaaactaaggaaacaaaattactcaattatcccatccttaggaattctttatctgattgattttattgtttattctactgctgtgtactgcatcccgtcatccgttgcttagtttctgcaattctttactgttactcgacctgatactcgatcacccagttgtctggcaacagactgtgcagtcgagtatgcctgtttcattttctgtctgttactcgacctgtcactcgacctcaccagtgctctacaaagagctgtgttggtcgagtgttttactgtttctgtttgattttctgttttctgcatgttcacttaggattgctagaacacatcaaaatctgttatgcttggcttgacttagtgacttctgatcacatcttgattgttagcatcacacccatttggattgacaacctaaaatactacaacgacatgattggtgttttaggataattgactaaaaacctattatcaaagacccctattggcacgactcctttcaaccttctctatggaaaatccagtcacctgcctgttgagctcgagtataaagccatgtgggcagttaaactcctgaacttcgagatcaaaaccacagaagagaagcggttgatccaactgaacgatcccaacgagattagcctagaagcttatgagagttccaaaatctacaaggagcgaaccaaatcttttcatgacaaaaagataatttcaagagattttagggttggtgatcaagtgctgctgttcaactctcgcctgaggctttttccaggcaagctcaaatccagatggtctagtcctttctctgttactgcagtccgaccttatggtgctatcactctagctgggaagaatggggacttcacagtcaatgggcagcggctcaagaagtacatggtagatcaatctattccagaaggaacttttgttcctttggaggagcttgtaaatgcctaa

SEQ ID NO: 154670 - DNA, 2069 bp, Arabidopsis thaliana landsberg
  unsure (1)..(2069): unsure at all n locations
atggctacagaagcagtagacctaccaattcatgagcaccctctttttccttcagctcgatgtattgatgatgaatgtggcggctgccatgtaaatggttacatctacaacggctacttttgcaatgaacctttctgctttatttggttccataaagagtgtgctgaggccccagcggagatcagccatagttcccaccgtcaacatcctctcctgctcaccaatgactcgaatgatggccgtccttgtgatctgtgtggacagaagctattgcctccttgttataggtattccacatgtgagttcaaggtggatttgacttgtgcgatgaaaccatcaccgcctgctattgaacatccgctgtgtcatcaccattcacttgtcttcttgaagaaacgagaggagaaggtctcatgtgaattgtgcaaggattctattgcccgaccatcctattcgtgtcttgaatgcgatgtgtacttccacgtaaattgcatccagctctccaaagaggtaaatcatccttgtcattctgctcatcctctcaagttaatcccatctgagtcacttacggatgatgccgagacaacttgtcttttatgtggagatataccagctgaaaatatgctttatcattgttcggtttgcaatttcacatcgtgccttggttgtaccaaaaacccaccactccttgttattgagcatatcaagacccacaaacacccacttattctctttcctagaagaatcccaaatatctgtgacatttgtgggaagaaatgcgagtttgcggtgtatgtatgtcctcagtgtgattttgttactgcaagagggtgtatcgacttagctcgtgtcatcaatatcaatcgccatgatcatcgcatttctttaactcatcatctcggtactgggtattcgaaatgcggagtttgtcacgaaaatgtaaatcagtacaagggtgcttattcttgctctgtttgccctaactatgctgttcattctacatgtgccgtgagaaatgacgtatgggacggggtagaactggaagggacccgtgagatcacagaagacaattcaccattcaaggtggtgggtgataacttgatatgccattttagtcatgaagagcatcctttaaggctccacaaggacgaagtcttcattcatgatgagcacaaacgatgtgcagcatnnnnnnnnnnnnnnnnnnttggctccatctactgctgtgaaacgtgtccattcattctccatgaaaaatgtgctaatcttcctatgaagaaaagacttgtcttcggcaccagaccatacacattaatgaaagaaactaccaaacttacaaactgcaagttgtgtggaatattatctgacggttttgcgtacagctcccatgagtggttggatgtagatgtgcattgtggttcccttaatgagccgctcgttcatgatggccatatacatcccttaaattttgcaaaaaaagaggaacacacttgcgatggatgccaaaagagtatagaagattatatgcttcgttgtaaagcttgtgactttgatttgtgtttgtattgtgctactttaccagaaaagatttggcataggaacgatgggcaccctctcactttatgttgtggtgagaaggaagaggcgagcggtaaatattggtgcgacatttgtgagaaggaattagatccaagtatatggttctatacatgttatgattgtggagtcaccttgcatgctcagtgcgtactaggagatttctcacgtctcgtgctaggacaaatctactcctttggggaaaaagaaatcgagtttgaggcggttcctaacaatatcaacactcggccattttgcatccagtgtaactctcgatgcaaggtctccgtcatcctaaagatcctaaaggattctgaagatggttctgatgatggttctgatgatgtttctgatgatccttctaatgatgtttctgatgatacttctgatgatgattctgatgttgtttctgatggtgtttctgatgatgcttctaatgatgattctgatgatacgtcggatgatcacaatgg

SEQ ID NO: 154671 - DNA, 967 bp, Arabidopsis thaliana landsberg
tttgtcctctcgctgtgccgtctccaactccatttcgaagagagagagcgaggcccgagagatcgaagcaaaatggagaaaggaaagggaagaaaagaggaggtcgtgaccagggagtacactatcaatctccacaggcgcctccatagctggtaaaacctaaaccttcaatacttttatgttcattctctcgtttccgtttggttaagttcgttctaggtttagttgataacaattagactgaaattgcaacttctgttgattgaaattaggtttcttgatgaatgaagagtaataacttttgaattagtctttagatgagtaacgatcataaacatccccttgcatttttcagtaaattagtaaaaagacagagaaattggatcccttttattgcatagaaaggttggcttgttgcttaggtgcattttccattggagcttttttcgttgtcacaattgatcttagtggttttgattgttttctaaattgaacagcaccttcaagaagaaggcacccaatgccattaaagagatcaggaagtttgcattgaaagcaatgggaacaaaggacgttagagtggatgttaaactcaacaagcagatatggagcaaaggtatccgaggtcccccgcggagaatcagagtccgtgttgcccgtaagagaaacgatgatgaagatgccaaggaagagttcttctctctcgtcactgtcgctgagattccggctgaaggattatctggtttgggtactaaggtcattgaagaagaggagtgaaaattggtgaatgtacactcacacaatccttatctttagatgaaagacgaaaagaaaaagactttgcttgttttgatcacttacctattttggtcatttatcatatcttatgttttaagttctatagacaacagatttggtactactcatacgagtttgatctttttgtgacgcactttacttcgcaatc

SEQ ID NO: 154672 - DNA, 521 bp, Arabidopsis thaliana landsberg
tagagatcggagagaaagacgaaacgaagaagcaatcaaaggatcctgagttcttaagctgtatgatgcagccaaaaacagctgattcagatccacactacatcggaatccgccggattcttcttcatcggaaagctgattctggcgttatctctcgccgttatgtgagcatcgatttaagctttcaattacttgtttcttatagagcttgttgttgatttttgtgtttccattgaaggattggagatgcaatggaaaaggatatgttgcttatcgtaatttcattagcaaacctagaaaatgggagaatctgcgaacgcctagtctcttaagtagtccaggaaacaggttttagatccttattttacttgttttccagtatacaattctgtgtgtttttggttgcttatacaattctgacgtcaggttaatttactggttgatgcttcagtggtcgatggttaccttctccaagtcctctctcgcatcaatttgaagctgaaagctttacttctagtaga

SEQ ID NO: 154673 - DNA, 1167 bp, Arabidopsis thaliana landsberg
  unsure (1)..(1167): unsure at all n locations
atgaatcgaggaatcgccgtgtttagtcagatcaataggcgaggaggcgtaaatcagccatctctggttgttggtgagcttgtctgaccacttagtagatgagctactggacaaagatctgaccccatggctcgttgagatagtgatggagttaccggagacagagaagttataaacgggcttcctctaacgaggaaaaatctgagattagaggaagggaaatcaagagtaacgacaagatcactgaacgaaaagataatatgagttttccgggaacgcggtccgggtccgtttgacccggaaatgatgatgtctgcggtaaacacctcgtagaagaaatcagagttgtgaaacagagatgggtatgagatacagagagaggagtccacagatttgatgaggtaaggatgannnnnnnnnnnnnnnnnnnnnnnnnnnnnnnnnnngttttggaagaaagaatttgtagggagagggtttgagaggaggtctgggctaaagaaacgagaaggatctggtaaaacagaggatttagtttccgggaaaagaaaaagagcgttcgatgaagccatggctctggtttcgctctttgatttttgatgtttctgatctctgtctttggttgttttgaaaagagattagagcagcatatatggagggggaatttgaagcggcatgcatatgtaggaactaggtagacgttttttctttcgaaaagcaatatgccacgtggcacatcttgatatcctcaaaacctaattggatacatatattggaccttagtaaggctcgagtgtacaggcccaaaatgtagactaatgggcctaaagtggtagctagctgtagcttaaaccctagaacctcgggataaaccctgattaattttatctcacaggcgcgcgaacgaacacgcttgatctgattcgtacaatccccttcttttaagcttttgatgacattgtcccttgtcggatcctactctcttaacctttgaaatggctgattcgagtgctgctgaaacaacaaccggtgcttcttctccccccgcggcttctgatgagaactctaccagattcaaccgatccggatgccaaccatcgaggagatccgagctcaagaggtttggaacaactgcgccgttcgtgctgtaactagtggagtcatggg

SEQ ID NO: 154674 - DNA, 738 bp, Arabidopsis thaliana landsberg
tagagacagaatatagtggggaggctggcgaagaaaaatcagagtctgaaggaaagtcgttgaaagaaggtgaggatgatgaggaagttgtaaacaaggaagaagatttacaggaggcaaaaacagagtcgagtggggacgctgaggggaaagaagctgaacatgacgactcagatactgaagggaaacaagaaaacaatgaaatggagagagaagctgaagagaatgctgagacttctgacaatgagactcttgtatatacctagctttctcttaaatctttcaagcagcatagacaaaaagatgagtagagagttctgatatgtgtttactttcgaatgtgtgtacagggagcttggaagagtaaagtgggtaagtcaatctcgaggacagcaatataggtttgccgtatgccgtaatgtagaagaaattgcggtgattgtcctcaaaaattggtggtctctggattgctgtggtgtatatgtggtaaaaatgtgagacttgtagggttagtgatacatacttgttctaaccaccatgttggaaagaataataggcagaaagaagctcctccagaagcttttgtggtcatgtattgtagcctctgtgtgtgtttatttgtaggtttgttttacgttttttctttttctgtaatatttacaacttatattcctttacccaaagtactattctcttgttgaacttaactgctttgccaaattttttttgtaaacttct

SEQ ID NO: 154675 - DNA, 349 bp, Arabidopsis thaliana landsberg
ctcattggagattgttgaatacacttgctacaaattgtgatttctggcgtcaatcaatttgctctttacagctccatttggtgaccatcctcacttaagcttatgtatgttgatttcagatgtttggattgtcaaaggcggtcgcagagaagcaagctgaggaggcaaagggagtcgagagtcaattgcctctgcagacgacagtgtcagagtaaagactagcttctttccatctgcgtttgatgtcgtttctcttgtttaacatcaaatctaagtttctttgtaaatcaacttttccgacctagagaccagatttatattcaaacatttcaaatgttattggtttttg

SEQ ID NO: 154676 - DNA, 380 bp, Arabidopsis thaliana landsberg
aatgcaacgaagtcgtttggaaacaaactatatcttcgttttttcctctcgtgtctttatcggagttcacagtagcaaaagagaaaagaagttcacgcctaattacgactaatttttaaatccagaggagaccccattcattgattgattgaataaaataattcgtaacgaagaagcaatcattatcattctctcgatttctcatactagcgataatagatcgacgctgttgatcgcatgtggtagttcccttttggatcagtgggttttgaaatggagaaagttttgtcgcccgcttcctctttttcacggaggtctgctaatcttgaagctttccccaggaaattaaaaagaacctaacacgggttgctctttttttc

SEQ ID NO: 154677 - DNA, 1863 bp, Arabidopsis thaliana landsberg
aggtcctgtgaaaccctagacaaatcgcaggtaagttcgactgtagaattacacactgatatctcaatttatgggggattgggtgcttttgaattgagaccatcgaatcccattgtttctctgatgcttttttaatctcacaaaattgttaattttgatgatctttgagcagagatgcaagattcaaagattccacctttctctgaagcaaaaagaatgaagattcctactccaaaacaacccttgactcaactaccaccacgtatcgggaaaaaagtttcaaatcggagcaaatcgaaccaggttcatgcgatttcacatcaacttgagatgtctccaaattcagattcatctccaggaaacgagtacagagcactgagacgcaagtatttgctgctagaggaagatagtttcgcgttggagagagagttaaaggaagcagaggatgaggttaaagcacttgaagatgagaaacttgagctcttggacaaactcgttgttatggaaggtttagttgatccttgattctatagcttagcacttgttttatttgccacattcatatgtaaaaaatcgccttatctagtaacattgtttctgcttatataacttataagcttttgttgtgtgttgagagaattggagatggtaaagaaaactgttgtgttcacttgttgtgtctttcgagttaatacaatggtttgggagtaaagacttaaacttgctacagtttttactagattctagtgctaaatttaaccaaaactgtgaccaaatgtcgtttatttgcaccacgtgtccttcatccacaacagaatgatgatggattagatatttctattcaaaaactataacgtgtggctgcaaatcgattcaccgcttcagactctgttttagaccaaagtcgagtgagtgctttcatcttcttcttaagcatctatggccgcgtctctaacatctcttccgaccggtttttgtcttagccatggtgatgaatgttgcaaccgttcacctaccaaatcaccatttccaggccatcatcctctggctgggaggaggaagggtcacttgctccattacgaacgtagtacagtgaggagattggttgtgacggcggcgacggagggatctaaaaaatctaaagaaagtgaaccgtcttgggcgaatcctgactcagatgagccacctccttgggctagaaacgaaggtcgttcttctacgtcccaagagagctttgaggttcctttctttgtttatctgctagcttccgcgattactgccattgctgctgtatgcttcttcttctctctctttcactccttttgttgtttgcattgctgattctcatatcaaagatgttatcttaattatgcatcgtttggtcactgtagattggttctgttttcgagtacacaagcaagaatccagttttcgggatcttggaatctgacagcatcttttatactcctgtgcttggattctttgctcttactggaatccccacttctgtgagttccttgcctctctcttttcggatttatccatttgatctgtttcagctgaaaaaatggtttttttgcgttcaggtgttcctatggttcaaatccgttgaagctgctaataaggaagctcaagaacaagataaaagagatggctttctttaaaatccttttgtgtgattctgcaactcatacagtgatgattgttgtctccacatatactttgaatataattctgcatttacaaaggagcttgcttctgttcactgtttatcacccgctagattttgtttgtaatttcaacaatatgccatgttccaacgagtaagtgcctgaaattcgatgatcagctgtcctctctttt

SEQ ID NO: 154678 - DNA, 660 bp, Arabidopsis thaliana landsberg
cttcttcagagcacacaagctctgagatcccatcaataaatggcggtaacagagtcctctgtttatttactctaacaagtcctttaaggttttaataacccagtttcatgggggttacttacttgtatctacccctgtacgttcctcttctttcatctacttatctaatcacgacgaacactttccccaatttcccaaaaatctcatcttttacaatcgatttctctacattgtaattcttccacatagtttctctggatagtttcattaaagtttgagtttttattgtttttcaattagtttatctgtgacatttattcttcttgcgagcaacatcgactgattcttacctgtatgtttcgatttcacatagacacacgagagaacgctaatttctagtcctctgttttcgtggatcagtctgttttttctatgcaattgtgtgttcttgatgttgttgacacaatgatttcaggttatagcaaggagctcgtgatcatgagtggtacagagttagatgagcctggacagttaaaacgtgctgtcattgatgcttctgctggtggtgttgctggtgcgatttcacgcatggttacctctccccttgatgttatcaagaatagatttcaggtaagtaaagagtcctagttcattggtttg

SEQ ID NO: 154679 - DNA, 1724 bp, Arabidopsis thaliana landsberg
  unsure (1)..(1724): unsure at all n locations
caattatccccagtgttaatcaaaattacctactttgtccttcacgcgccttctccacgcgcctccactcctctactcgtaacttatgggcgccgtcatttgcctccatcaaggtcaactcttttctcatctccctctcttatcatcttctgatttatctgacccatttctccgattatctttcacagcttcagcattcttcttcctctgtttcttctaatggtggaatctctcttactcgatgcaacgctgtttcgtccaattcttccaggttcgttctttgtttttggtgggtatttgtccaagttctcaggttcttacttatatatatgtattgtttatgttgaattagtacgttggtacctgaattagccgacatagattgggataccgttggatttgnnnnnnnnnnnnnnnnntatatgtatgtgatgaaatgtaacattgatggagagttctcaaaaggtgagttgcaacgttttgggaatattgaaattagcccatctgctggtgtactcaactatggacaggtttgttttcttagttttcttcaaagtcatgtcctttactgtattgagtatgatcaaaagtctagaccaagcttagattatggttaaaagaagctttttgtggcgttaaggtttaggatttgaatgtcagattcttgacactgaaacgcaatctattatctgattttgtatcctagcttctcaaagtcatgtccttaacaagttcgataaaaggaaaagccttttggggttctaggtaaggatctgaaagtgtggagaagttggttagattcttggcaccgaaaaatgtaatctgccgtcgattttgttttctagcttctcaaagtcctgtcctttactgtaatgaattctatgaaagaaacttaatttatgctaatcaagaatctttaagggagttaggagggtttgaaagtatggagaaatttgtcaaattctggacaatgtatcacagcctgagtttgtcaataagtctagtctcctagttgttatgttagttgcatctagtgaggatttatttactgaatgtatattcatatattgcacggagaaatcttctatattgtaagtgatgatgagaaatgccaagcaatgtgttgttgtatagagtgcaatttaggctcccctgagtcttattagtgtatgttcttctagggattgtctgaagggctaaaagcttacacaaagaaagatggtaataacatcctcctctttcgtcttgaggagaatgcaaagcgtatgagaaatggtgctgagaggatgtgtatgcctgctccaaccgttgagcagtttgtagaagctgtgaccgaaactgtactagcaaacaaacgttgggtaatgaatcacgcagttttttttgtctcccgatatgcagaggaaattatctagatatttgtttgctgttatgaatttaacttgtgtttggtgtcttgtttttaggttccaccaccaggtaaaggttccttatatgttagaccattgctaatgggaacaggagctgttcttggtcttgcgcctgcaccagaaatatactttcattatctatgtttcgcctgttgggaactacttcaaggtctttcagagttacttcgatctattccaactatctaagattagatgtaagtttctctaaatgatgatacggatttataaaaagatgtcaggaaggtgtggcacctatcaatttattgtggagaa

SEQ ID NO: 154680 - DNA, 1650 bp, Arabidopsis thaliana landsberg
gcaagtcagaggtgtcgattgttgtttacaaagttggcgaatgtatgcaagaactgattaagttgtggaaagaatatgatttgtctcatcctgataaaagcggtgatttcgctaataatggccccactcttgaagttaggattccagctgagcatgttactgctacaaatcgccaagtaagtcgaatatatatccaaatttttctcataatcattttcattgtttttcttctagatgacttggtgcatatagttttagttccagtcttttgatctgtttaattcacttcgcctattaatttgagaaacacagctcccttgtttgttacttgctgagacatttggctcgtgtgcaggtaagaggtggccaactatggggaacagatatatacacagacgattccgatcttgttgctggtatgtaccctaatgaatcttatgcaattattatctttgtttggcccgaacatgacattgattctggtctacctgtcatctagttctcatgcatacaggttactgtcgtcccacagcttctcctcctccaccgacaatgcaagagctgcgcactactattagagtcttgccgtcacaagattgtaagttagcttacctctgtcttgcttttgattcctttaactgactgttgcatgtgaacttcatactatgttgagctcttctctgctttatatcaaggaagaatctttatcaaacttccaacttaactgatatatttgttagactacacctccaagctaaggaacaatgtccgttctcgagcatggggagctggaatcggatgcagttatagagttgagcggtgctatatactgaaggtgatttgacatgtgccattatgtgtctttctaatttccttgattatcttctcccactatgtgcgtaatatctagttttaagtgaatttgtgtaaaactccttatggaaattctgatgatatgattccagaaaggaggtgggactattgaactggaaccttcccttacacactcctcaactgtggagccaactcttgcaccaatggctgttgaaagatctatgaccaccagagctgcagcttcggtattttccttccactttggaaatatctgctctcttaatcttcttacaactcttggattattacacatggcggcttgcatagttttctcatatttcatatctttcgaacactgacgacttatttactgttctgtagaatgctctgcggcaacaaaggtttgtacgagaagtcacaatacaatacaatctctgcaatgaaccttggtaactctctgtcaataatctccaaatacttcaaaaattgttcacagaatttcctaaatttatcagaaatctttgtcacctaaaagttatcagacgcaagggtcagttttacttacgcatcgatctacttgtctgcaggattaaatatagcataagcattggtgctgataaaggtctcaagaagcctcttttcacctctgcccgcttgaagaaaggggaagttttgcacttagaaacctattctgcaggtatgcacatcacatgtttctttttctgacattaatgacataagacgctgaatctaatctgggtatgccaaaaggtatgagctctgtttcgcaggagagaaaccctcaaagaatccaag

SEQ ID NO: 154681 - DNA, 822 bp, Arabidopsis thaliana landsberg
atggaaaagcagaccaaagtgactgatccttccactctaggaaccttgactatgaagggtaaggcagaagatttggaaacaccttcccagcttgatccacggcaaaatattagccagaatggtaccagcaaaatgaaaatttcgggtgaacttctcagtgggaagacaccagacttttcaacacaattcaccaaaaacctgaaaagtattgctgatatggttgtcgtatcacaacaacttggcaatcccccagcaagtatgcattcggtacagcttaagacggagagagatgttaaacataatccttcaaatcccaatgcccaggatgaggatgtgtcagtttcagcagcatcagtaacggctgcagctggtcccactcgttccatgaacagttggggagatgtggaacacctatttgaaggatatgatgacattcagagagtagctattcaaagagagagagttcgtaggttagaggaacagaataaaatgtttgcatctcaaaagctctctcttgtcttggatatagaccacacccttctcaattcagctaaggttagtttatcttccttctggtttgattacttttcttatattttttctaaagtttttgtttctatcgttttcagtttaatgaggttgaatcccgccacgaggagatattaagaaagaaggaagaacaagatcgtgagaaaccatatagacatctctttcgtttcctgcacatgggaatgtggactaaactaagaccagggatttggaattttttggagaaggtgacttagttaataatattatcttactactgttcaactacgtgtg

SEQ ID NO: 154682 - DNA, 1284 bp, Arabidopsis thaliana landsberg
aaaaaaacaaggagacaattgcggcgtggaggctttctgtttacatgcagcacaagaagggccacatgacatgacatcatgtgactctgtttcccatagtcagagaaaagaaaaaatatgacgccagaaagcttgttagcgtcggcgtcgatcaacataggactcgccgtcgttgcactctggctcttctccgtcctcaagaagcagccccgtaacgccgtcgtatactatgctcgccgcctctccgatcgccaccaccaccgtcctctgtctctacactcatccctttgcctccctcgtttccttccttccgttgcttggatcccacgcgccttccgtgtccccgaggacgagatcctcagccgccacggccttgatgctctcgtcctcatcaggctcttcaaattcgggtaaggaagatttggtcttatctcgcatataaacacgattatcagattctttgaactatgtgcagaattagattcttcctgatgtgttcgttacttggagcatcactacttcttccggttgattattacaatgagtcagatttaccgacacgaagagagtattcaatggatgctttcacaatatcaaatatcacacgaggttctaacaagtaagccgtttcctttttatgtcttaattaattttgcatcatctctcttagagttgtgtttcttgatatcttgtcttaattttcctaggttatgggtgcatttctcatgcttgtggtgcatatcattctatgcattgtttttgttgcataaggtaagcttttactcttgtctatcagtgacggatttttttttgttatagaataggtttatttactggatcttctccatctaggaatataaggagattcttgtgataaggcttcaacaaatgaaagaacttagacatcgtgctgatcagttcactgttcttgtccgccaagttcctctctgccctgagcataacactcgtggctgcgccgttgatcactttttctctaagcatcatcgctttagttatcattcacatcagatgttgtatgacgggagagatcttgaataccttttggtaaggtttgaaactttgtggtggtatcatctttgcagtttttccttcaatacgtgatggtaggatcctttatgtaggggaagcagaagaagcttaagaaagagctagaagacaagagacacacagaaatactttcaaatggatcacaagaacacaagcaaatatccacatctgaagaaaaacttcgagaaattactcatatgatttaccaccttcaaa

SEQ ID NO: 154683 - DNA, 2578 bp, Arabidopsis thaliana landsberg
caagacacagtgatattttgaatgagttggtctattttgcagcttcaagctttctggggactttcttctggatgtagctcctagcggttcgtatgtctctggctgttttggcttgctacgcttaactgacggctttgtcatttatttgtgacaggtcgctgataaatcttccccgacgttattctctatccttttttttttttactttacaatgcaatataaagtatcacattcctatacttttagcaggtcatataactgaagtctatgtatgtacttgatacggctcccaaattttgacgctttatttatttgcttttttcaggtcagaaaacagaaaatcctttgcttttacttgggcagtatagtgatgatgaggtggaagaagattcggataagaaggcagatgatacctctgcagatagttccttagccaataaaaatgagcaggtaacaacaactaacttttataaatcggagtaatgatgatgtatctgttagtcttgatgagttttatttataccaggttgatggattaattcaaggaggacacaaagatacgaatatcaaatcaggtgcagtcaccaccactatgcagatggctgaccaacagcagacaggggagaattcttctgctcttgattctagagctgaagtagaaactggttataccacagtgagtaactcaacaacattggatggactaaacaagcagacagttccctcagttcaagcatctggcagtgtgtctttggagcaccaggctcccacagatgttacgtcgcagtggaagatgattctgcatgaggagagcaatcagtattattactggaatacagaaactggagaaacttcgtgggaattgcctacagttttgactcaaactacctttgcatatgggactgggtacaatgagtctgggcccatggttacagatgcttccaccttgatttcaagtgttgaaccaagctatttcgtacccgtgcaaaatagtttcacaggaactgactattctacttttccaactgttgagctggatgggagaaacaaaagtgaagatctatatgtcaaaagtttaggaactgatggtcatcaagttgaatgtcggatagactctgttgttagttgtcaggaggacctttcaaggccaggaaattcagatcatgtgcatacttattttgatgcaggagctgctactgacctcccatctcgcttgttgagtcaaatcgaaagcttactggagaagctgaggtctctgaagaggtaacatattctagtttgcgtcttcttgtttacgtatgtgatattgttaggtaaagagaccacagttccttatcttctttaaaatatgataatgtctaatttctaaaaatttataggtcgcatgggaactttcacagcaatgagcagataacaaagtacattctggaggttgaagtcagacattctgatgtaaaggcgctcatattggacacctcacctttactttctttttgggttcacactgagaaacaacttaagcggctggaagatagtgttaacgatgagatttaccagcttgcaaaatctgcagtaatggatgaaccagaaactaacaaaagccctcccaaagaaaagttggtggcagatgctaatacagagagtgagtccgaggacagtgagagagatggagagttagctcaatctggaaaatctcttcattcagatgaatcagctgatgggagcggcgatggatctcctaaacactccccaaatcatccagctgggcagtctgatattattccttcaactgagatgcttcagaaggccggctccccagatgtggaagatgttgacatggatgtggatatggaagttgaagaatcagttccagtgtcttctgttcaagtgatagacgcttctgatggtaagatgttcagtcaaacagagccatccaaccttcatacagatgttccaccacctccgggtgaggaatggattccaccaccgccgtctgagagtgaagatgttcctccaccgccaccagacagttatagcgaaccaattcctccaccacctgacaatggccatgtcgcttcatctttgtccagtgactctctcggagttccctataccgtacctcaatcatatatgcatcaatctgctgattatgcgacacaatacaacttatcctatccagagtccaattatcaatataccaatgctgttactctagctcctaatactcagttctatggccatgtggatggatctcaagtttctcttccccaatccacattttattatgaaactgttcctggtacaactgaagttgctcctgcagcagccagtgctggtgaagcttattacgatttcaatggtgcagctccactgtttcctgtcattagctcgggtgagtcatctctacatcacagtggagttggttctgctaatcaccacatcccaaacaactcttctacagctgtagtgcctagttcgagatccaatgactctactgaggttggatcttcagcaactgcttctaaatccacagatgttacaagtggatcgtctctattagcaaaaggtcaaactaaag

SEQ ID NO: 154684 - DNA, 2761 bp, Arabidopsis thaliana landsberg
gtctttcaacgagttctgaatgcctatgctacaaagctatttgttaagctccctaaaggaggcactagtatcattgccgcagccacaggcatggacggacgtataaaggtgctgagcataagctgcctgcctcatgtctcccatctgttcttttcgatttatcttttttacttctaatatgcaggtctcggagaaagatgaaaggatgatatgttacatagttaatactgctgactattgccacaaaacagtaagtttgtttcacttttgacaccttcagcatctaggggatacctttgtgtagccttacttgcaacgtggtaattagggttgttatatattatatgtttctaatctgattttaagctagtcttttagaaataccagttgtattatacagttctaagctagtttcttgatgttgttgtcatttgatcttacttcattgcatttttaagtaatgaactacatctcatctcgtttaagtcgaaatttggcttgcagttgtgaaaggttagtttgcaactcttatagatccgtcttactcttgtggtacattgtcaatgatattgtgtactgcttcgatattaaacaatttatgtttgtgtcggatataagatgtgtgccgatgtcagtaggattcgataacagaacaacaacttggcacttcacaagggttatttgcttattaatatttttcttgcagtctggtgatctggtagaagaagtctcaacaattattcacccgccttatgctaacggtgtagacatatcagaggtccaggtacggttgacgtgaaggacttgtattttttcccagatatgttacttaatttggattctttttaagatttattactgtgcaggatgcattttcatccgtcataacgagcgcattggtgacattagttcacggactggagactaaatttgacaaagaaatggcagacatgactcgtgtctcatggggcatatttaagagcgtgggtgaccagtctaataagtaagatgtaataaagctttcatctttttgtggtgcatgtatcatcaaaaagtgccatttgctcgtaaaaaaactaacaccttagcaacaagaatttgcatcttcttgtagttacgtctatggaataaatacaatcctttgcagcagcattcctgtccttggaaaccttctaacaccggtttacttccaattttttctcgacaaggtaataaagaaagtatgatttgagtgcctttatggtctgatgatttctgccttatacaagtttaggacctatcttaattgtgtcttacgggtttaagccattaccaaatcatttatttcttttgttttgtataaaacatatgataaatctttatgctactccactcttcgaacatactccattattctactacgatatttttccctgaatttcaaacagtcaaggcctaaagcgattaaaccttggctatgataggtttacgcgattaaaacttggcgaaatttataaacgatgactctagttttgaaactctattgtgcagctggcattatcccttggacaaaggttctatgttaatatcttcagatgcaagcatatatcagaaactggagctcaacaggttggcctgtgtactttatgttcctccatttgcatggatttgatcatcccactttgtagtcagctattgacggtacctaggctgtcattctgaaaattctgtttacctagtttaatttggtctaacatcgcgtcctaattccctgtattcaagtagcattaatatggtggttttagttattgttggccatcacatatttttctttcagcttttctggattcgccattgttaaagtaactatgttttattttcgatatatttacgagtaagttaatttcatgctaggattatccatctcatgctttgtagaaaaaaaacctatatagctcgttgagatctctctcccatgttatgtttctgagttctttttcagatgctatagagtatgaactatccgtcatttggtttcacagatgttgctagatgcgcatgatatgaagatgattcttttaaaagttccatctcttgccagacaggttagctcatctgtgtaaactgttgtgcctcagctggtgactctgtatttaagatttaagattgtttattgttgttaagcctgaagcatcggctttactagtcaaagttatagagtatttatgatactatttaaacccaaatctgctcagttttttctttgagttttggtttatctcaatgatatgattgcagactgcaactgcgagctatgtcaaatttgtgaaccatcaaatgaaaagagctgaagcagtcctaaaggtattcgcctgagcaccatttataaattttttcttttagagcttctctgttctcataaaactatcatataggtcatagcatccccaatcgtcacagtgatagacacttatcgtgcactgtttccagaagaaacaccaatggagtttcaacgcatcttggtacttaaggtaattttagcattcttaatccaatttagaacaaaaagatcactcgcaatccaatctgcaactagtcgtgaaacatgttctattgttgctacagggtcttacgaaagctgagcagcagagtatacttgatgatttcaacaatcatagctcaagaatcacacaactctcggttgcagcgaaaacgccagaagcacatgcactgccacttgcactcactaatgtggctccagctgtccggtttaaagcaaaca

SEQ ID NO: 154685 - DNA, 303 bp, Arabidopsis thaliana landsberg
tcatcgtgaagaagagtgctctcttggagtatatcatcgtgaggactcctactgacgtctcccagaatatgacttcggagacggtctacactgtgcagatgcctcatgatggcggcggtggagccagcagctccaagtcaaccaaaaaatagaaaactagctactgtattaagtattatgttatgtaataaactatgtcgtttgactctcttcgatcggtttgttgtgtgactttttttttctgctttgttaacttattgtgagactgttttctaatttaatatctattatgctaagttatat

SEQ ID NO: 154686 - DNA, 671 bp, Arabidopsis thaliana landsberg
gtaggaaacaaggagttcagagacgaagtaatgagtcacaagaacttaaagatcctccatgtaaggaacacgattgatctcttaactcgatacccagggggacttttagggtatgtggacataggaataaactttgtgatcgatacaaagaagtcaccgttcctaagcgattcaaggaatccaggggattggcataatcttcaggtaagaatctgtgagaagaatctttcaaatttgactcaaacgatacagagtagaaacttttacatattttttccatgtatgtgtgcaggcgatgttacatgttgtagctggatggaatgggaagaaaggagagtttaaactgatggttaagagaagtattgcattagtgaacaagtcatgcgagttcttgaaagctgagtgtttggtgccaggatcttggtgggtagagaagaacaaaggactgatcaagaacgaagatggtgaatgggttcttgctcccgttgaagaagaacctgtacctgaattctaaattgtatttctgtatttttctctaaggtcatgataaatcaacaataagcagttcaactatgtgatgaaaagacccaagttattatattgatatgagtttatgagatagagattccatcaacgaaacaaacattcaaacggttttgctttcttacaat

SEQ ID NO: 154687 - DNA, 1413 bp, Arabidopsis thaliana landsberg
ttagtattgcttgaggctatgctaacattattatatcattttcatagatttgcagcacttgctactcgtatggaacaatacatacaagggcaatctagagatttggttgatcaggcatacacaaaatttgtgagtactgctatttctatgagtttatagcatttgactagtgaagttacacaaaccatgcaagcaaagaataatgtttgccacgtcaaacagtaaacataaccaacctctgcgtctgatcttagttcacttacaaataaatagaaatgaagtatatctcagattgtttcttttctttctctcctgctttggttgacagagtctgactactgctattttataggtgagcataatgtttgtgaccctcgagaaaattgcccaacaagatcctaaatatgcagatattctcctgttagaaaactatgctgcttttcagaataggtaggtccttttcttattctctccctctcttggttgttcttcttcttcccaattgttcatacttccctaaccattttttttcttgcagcctgtttgacctggctaatgttgtgccgactttagccaagttctatcaccaggcaatggaagcatatgaacaagcttgtacgcgccacattagcatgataatttactatgtaagtggttctccccatttgcagctaatagcataactccccttttttccattcttttcgatttattgttaagggtacacccgtttgtgtttgcttcatgtgttctctcgtccctgcagcaattcgaaagacttttcctgtttgataaaaagattaaggatctcatgtatactatcacccctgaagaggctagttgttgttagttaactagttataccattgtttcactttctcattgtgtaaactatgtattggcgtgttactctaggtttctagggtaaaaacaaaataaaactgatacattatctctatatttcagataccattccagcttggtttatcaaaagtggaactccggaagatgttaaaatcaagcctgtcaggggtaagcaaatgttcattaagagtgtattaattgttcacagaccttttagtagatcattttccaattcttctctttgtgtgtaggtggacaaatcgattgcagcaatgtataaaaagttgcagaagaatttagcatcagaggagttgctaccatcgttgtgggataaatgcaaggtacccatttaaactgaaaagttgaggagagtaataaataacagtgcattattagctcagtgtttgaatcaatgcgttgttgtgtgaccttaaacagaaggagtttctggacaagtacgagagcttcgtgcagctcgtagccaaagtttacccgagtgaaaacgttcctggggtaactgaaatgagaggacttctggcttccatgtaa

SEQ ID NO: 154688 - DNA, 1030 bp, Arabidopsis thaliana landsberg
tgacgtcatcattttaccttagtggataaggtattattctctttcttcaaaactcaaatcaaagaatcgcaactatacatttctccaaaatctccgagttctacaattgtgtgatcaatcaatcttctccgatttcaagcttctcgatcaaaagaatcatcatgggaggaggaagagctatggcgacggcggcgaaggttgctggaatcggagttggtaaaggaggattcaagggatttggatttcctccggcgactgagcagtttcgtgttaaaaccgcggcggctgcggcgtcgtctaaaccggtttcggcttcgattacatcggcggttcatccttctgttgaagaagatgggatgattatgcagagaccggtttgggatgattgggaatttgctgaagaagaaccgattcctagggttgtttttagcaaacctcctagtcttgaagaagctaaagaagctactgaagatcttaaagaagcaattaatttgtaagattttatcctaatttgtgttcttgagagaatttgaggatttgtgtttgaatttgatgaattagggttcggtatgagagaaatgatcttactttgaaacacttataagtttgtgattatgtgtgtgttgatggattagggtgtatatgtcatctccaaagtcgtctgctgctatggaaggatcaaatgatggtggctctgtttccaaaatgctctctggttttcaatcttctgagaacagagctgttgaatcagctgttccacaagttgctcttcaagcatttgcttttctaagtgagaacactgctgcgcaggtatgtcggtttgctctctctttgcttggttaaaatggtctctgctcttgtttggtatatgtctcatatttgctttagtgctattctctttcacatgtttgagagtctagttgtttatctttacagactggtgttgcttccattgcgagtgacccaaaagtatgggatgctgttatggagaataaggatcccatgaaatttctgctgtccttcaggatta

SEQ ID NO: 154689 - DNA, 421 bp, Arabidopsis thaliana landsberg
aaaagctcaatttccagtaaaaggcatcaatctccgtcgacctggcacaaggtatgtttatatactcgttgaagcttgaccctccatatcttttctgttgatgctaatcgccatttttacaggttactttgtactgttgaaggaacatacttggttcaggaagcaacacaaggagggatggaggagagagatgatctaaaggagaataatgagattgattttgtcaatttttcctgtgagatgcctattgcaagtggtcgaggtttcatggaagtaagtgtactttcagtttcgtgctctgcgtttcctgttgttgcagtgatatctaaacgtgagatttttgctggccaataatctagattgaagaccaaggtgggctaagcagtagtttcttccctttcatagtatctgaagacggaga

SEQ ID NO: 154690 - DNA, 1249 bp, Arabidopsis thaliana landsberg
ttccactttgttttgaactttttgaccaaaaacacactcgtgagcttataaaaaaaatcaacaatgaagattcctctcttggggttacttttactactaagtcttgtcggctctccgacaagggctgaagaaggacctgtttgcccgaagaccgaaactcttagccgtgcaagttttccggagggctttatgtttggtaccgcaaccgcagcctttcaggtacatgtatatgtatacaaaatagataaaatatccatataaatggtgatattaaaacacttacaaaacattgggtgaagctaagaatatgttgggaaatggaacaatgaaaatgatttatgtatttatatggttaaaataggtggaaggtgcagtaaatgaaggttgcagaggtccaagcctgtgggacatctacaccaagaaatttccacgtctgtctcttttcttttctatttatttcgaccacgaagcatatatatgtccacttattaattagttgtcggtttttttaaaacatgcattcatcactcgtgtgttattatgaatttgattccaagaggtattataaagagttgttaacgaccagtattataataagtaactgtgtagcgaaccagatatctggtgataataaataacattttgtactatatttaaactgcagatagagttaagaatcacaatgctgacgaggccgtcgatttctaccatcgctacaaggtattagcttctagattctctttttaaacgtttgatcattgatagtatcagtttctcacgtgtagttcgaacaactaaaagatgattgaagtagttcaataattaatttcgggaaaacattttatcaaaactgtataaagaataatttggaacaacacaagatgattagttaaataaaaaaagaactaagttaatcttgtaaaagttggtaactatataacacttaggataaagtgcatcataaggttcagtttttatagttatttattttattaagttttatcgattagaattttcatagtgaatcgttagattcatgggctctacgaagtcatgttaattacttaattttataactaatgtttcgtatgcctatctaaatcaacaggaggatatccagttgatgaaaaagctgaacactgatggttttagactttctatttcgtggccaagaatatttcctcgtaagttaaaccattcatgagttcctcaacaaataaaaataggccacgagaattttagaattact

SEQ ID NO: 154691 - DNA, 1191 bp, Arabidopsis thaliana landsberg
cgcacgcgagtagcaattccgtcgcaaaacttgcgagggaagacttcctcgcaaatttgcgatggaagtacgatggtttcgcaagaaagatattatccgtcgcaaatcccaagcagatacgtcgcaaatctttaccctaaaccctaaaatacataaaagtgtattgcaatcttcgattctcatttatagatatgaatctaagtgaccatataatcattcaagttgattatatggtttgaacaaaaaaatattgtattggtttcaatattaacatttcattttgaaaatgttaaacattcatgattcatacttaatgaaaaccataagatcatcattgatgtatttggggaaaaaacacattcgaattatatgatgataaaataggttcaaatgtagataattaacgttctaatgattaaaaaaaatgaatccaaatgattttgaatagtgattgttgtatttttcaaaattgattatacattgcgaggaaattgcgaggtgtttgctagtacgcgtagcagttccctcgcaatatttacactaaaccctaaaatatttagaatttttagtcatgttcttattttgctgagggtcttactagaaataggagagactgaatcaaatataattattgaattttgattggtttaaaatacgattcctcgtaatttcctggcaaggtctgcgagggatttgctaggcgttctcgcagttccctcgcaatgtaagctgcattttgattggtttaaaagacggttcctcgcaatttcctagcaaggtttgcgagggatttgcgaggatatatattcttatatatactcgataacctagtttgagcggagctcaaacctgccgcatcaaaccctaaacctaattttttttcttcgattctcttcttctccgatctgttttcctcgtcgccggcttctcttcttctccgatctattttcttcgccgccgcctctcttcttcttcgatctgattacgtcgccgcctctcttcttcttctctgccgcgtctcttattctccagcagccgccgcaactcttcttctccagcttcagccgcgagtcgatctgtttcttctccaaggtaacgtcttcttctccgatataacttcttctttccattccaacttccaccgtccgatgtaacttcttcttcttctccgtcgcgtctcgtcttctccat

SEQ ID NO: 154692 - DNA, 1230 bp, Arabidopsis thaliana landsberg
aattaagccatatatcaaaattttgttaaattaaaattttaatttcattcaaaaaccatgaaaaagatcaagttagggcaccataacgaagcggctaaaccggactgcattaaagccctcattgtggaattcatcacaacctttctctttgtcttcgctggtgttggatctgccatggccactggtaatttctcaggcttctatttctagcaaaccaagtagcttaacttggttcttgacactacgatgcacttcaatttacaacttaattttattttattcattttcttagacagtttagtcggaaacacattggtgggacttttcgcggtcgcggtggctcatgcattcgttgtggcggtaatgatatctgcgggccatatctccggtggccacctcaaccccgccgtcaccctcggtctactcttgggtggccacatcagcgtattccgtgcattcctttattggattgatcaattgttggcctcctccgcagcatgcttcctcctcagttacctcaccggaggaatggtacaaaaatctaatttaatattacaaaaaaacatattattgctaatcaacaacttataacgctactaaaagtaatgccaaggacggaattataaattatgatccaatgacacacattttcacatgattctattggttcaataattaagtcaactatcaattgcttacctacattttttttgtttcgtatataattttttctgattcaataatacacaagttctattatgtactagtacagatttttttatttattgattaatctacaataattttttttctaatcgaattgttaaaacttttaattacatacacttcaaacaatgatttgattccggcctgttcgatataacacgtagtttgacattttacaattatgttttgtgattagggaactccggttcacacattggcaagtggagtgagttacacgcaagggatcatatgggagatcatcttaacattttcacttctcttcactgtctacgccactattgtggatccgaagaaaggatcccttgatgggttcggcccacttctcacaggatttgtcgttggagccaacatccttgcaggaggtgccttttctggcgcctccatgaaccccgcccggtcttttggtcccgctctaactaaagaaactggtctgaccattgggtatattgggttggaccgttgagcggtggtgaacacagccga

SEQ ID NO: 154693 - DNA, 813 bp, Arabidopsis thaliana landsberg
atttgatgtcgcttcataggcccgcaataaaccaatagagcctccaaagaaacctgaaaaggctcctcggggggggcgcgcaaggccctcgcctgccggagatatattattcaaggcaaatgactctgaagctgatggggagaatgaggaaaataataaaaaggaccagaatagcatgaagaactttgatgcattggaatctccattctcaaaacatctcaagtcttcatgggattcaaaacactgtaagtgatggtatttgtttaagttttacaggttaatcaaagcttttctcgtcaatgtacaatacgattcttagctccatgtacgttttgcagttttagattttaccaactacatgaagagtttatccccgtcagctctcgacatggagcttcggatgcttgaaatcatagatgaagatgttgaagaagagcttatcaaaagacctgagtttatattgattgggcaacttctggattacttcatcaacgaggtctcttgcaaaaacgactttgagtttatgcaggcggttgtgaaactatttctgcaggtaaatgtaaatttcatttccagtataaccaaggaatcagtttcttacagagacacctttaggttacaagaatcttgactcttaacaaaactcggtttatctgttgacagatccacggtgagaccataaggtgccacccgagtttacaagagaaggcgaagaagcttttagaaactcagagtttggtgtggcagaaaatggagaagcttttccagagcacaagatgcatagttaccttccttagcaattcacagttttga

SEQ ID NO: 154694 - DNA, 702 bp, Arabidopsis thaliana landsberg
atggtcgtcgtcaggtagagagagacgcgaagtcctgatcgctctctcaggtcttagccctaagactacgagtcgactcagccgaactgtgaatgcagttttgatttcaatcccttaggtaattttgaaactttcggtttctcactcttctcgttgtgctctctcaagaaaatgttgtgaagcttgaaatgaatccttatctgtacaagtaaaagcagaaattgatgatctttgaggaacttattagactggttttgattcgaattttatctcttgtgtatttgttgttgctataagaactctctttttgttagcaggatcttagttatggctacttgcttgcgtggaatcacgaagagagttaatcttctacagagacgagtttatccatcgtgtggtcatctaattcgtgatgatagagatgaaactaaatctggttcttcggatccaatgattcgtgaagtcttagcacgtaatgggactaataagcttagctctatgtttgcggataggcattatcagtcgtttgctactggtccgttgggtcttggattgtcttcgtgtcggcatatgagttctacaccaccagaatggtctgataaagttgatggtatcgactttgtggccacccaggttgttcccgatgaaaccattcaagctgtgaccaccacaagccaagcaaatgtacctgctataaacgag

SEQ ID NO: 154695 - DNA, 77 bp, Arabidopsis thaliana landsberg
aggaatctcctgctgtcgtacagtcctactttgacaagagaaatatcggatgccgtggtggtgaaagcggtaagtta

SEQ ID NO: 154696 - DNA, 1007 bp, Arabidopsis thaliana landsberg
  unsure (1)..(1007): unsure at all n locations
gtgttatacagaaagaacaggcctttccagagagacctggtgaaccagagtgccaatactatttgaaaacaggagattgtaagtttggaacatcttgtaagtttcatcatcctcgagatcgggttccaccaagagcgaattgcgtcctcagccccattggtcttcctctacgcccggtatgctctgtgttaatatgtcataaaggttgttgatcatagttataacatttctgtctctaaatccgttgtttatcttgggttgaaaacagggcgtgcaacggtgcactttctacgtacaaaacggcttctgtaagtttggatcaacatgtaagtttgatcatccaatgggaacgatcagatacaatccttctgcgtcctctctagctgatgcaccggtggctccttacccagtgagctctctcttgggtgctctggcagctgccccttcttcttcatcgacagagctcatagcaggcggtgcaaaagatgcttacatgaccggtgtgcctacatcaannnnnnnnnnnnnnnnnnnnnnnggtttgattttctcccagagcggtgggtcaattccattctcagagctgcaactctcgagccagagctctcttcctctaacaggtagcagaatcacaagacaagggcgtgaaattcgtcgatccttttgaatagatcacctcagaaaagggtacgcatacgcaggtcctctggatcaccttttagcaattcttaatctatatgactattattatatagaagcatgtgatgtgaatttatatatataatcttcgtaccttgagaagaagaaaaagcctatttgagtagaagaccccagtgagaatcacatatatctgagaggaaatctatatctgcatataccaaaaaagataacaagaaaaggcttcttctttttttttttggaatttgtgtataatgtttgtatagagacagacaaggtttctttgtcttgtccgtacttctacttcagacccattccggctgagacac

SEQ ID NO: 154697 - DNA, 2663 bp, Arabidopsis thaliana landsberg
ctgatgaaaaagaagcaattgccgtagaggctcatcaggtatgtaacttggagccttttgtttctagatgaatcatttgatccttagcaatattgaagagttgacaagaatctaaacttgttctcatgtaggaatctgaagcaagtaaaatatatgctgaacaaaaggaagaggaggtcaagattctagaaatttctgttgaggaacttgagcgtacgataaatatattagaaagacgggttcgtttgctttctttttcattctctatatctgataggtattgcatgaaactcttatacctactaatatgtgagctattttggcttccaggtgtatgatatggatgaagaagtaaaaaggcatcgtaccacccaagattcgttagagacagagctgcaagctctcagacagagattgtttcgatttgaaaacttcactggcactatggtcacaaccaatgaaagcacagaggaatataagagtcacatatccaggtcagccaacctaaatcctactcaaaatattagtttctcttgcatatctttcttggtgaagactgactttggtaaaaataaatgtaaaataggtcgacagggctgcaaggtgcgcatagtcagatacaagtcctacagaaggaagtagcagaacaaaccaaagaggtgtgttatattattggaatgctcggctcaatttgtccatgacatttcctgatattagcgcaaatgattattctttgtttcattacttctacctttgtctttcctcacttacagattaaacagctaaaagagtacatctccgagatcttactgcattctgaggcccaatcatctgcttaccaagagaaggtattagatgtgtagactttagcagtcctctgcacttggcttgattgttgaataaattagcaccagcagattactagtttccgcgctacacattctgctcatatttgtgtctctgttggcgttcttgctaaaaaaaagccatgtcatgatttgaaaaaagaatcaagaatagtaactatttctgatttctatcgtgatgatctgaaggaggcaaaatttgataccaatggtgtatatttcgattagcacctggaagagttgttttccttatttcgtagctcatatagtttctttgtttccaatctcaacagtataagactctggaggtcatgattcgagacttcaaactagaggattcaagttcgtcagctgcagagaccatatcacataaaactgaaaaaagctcaacaaggagtagaggttcaagttcacccttcagatgtatagttgggttggtacaacagatgaaactggagaaggatcaggaattgacaatggcaagggttcgtgttgaagaattggagtcattgctagctgttaaacagaaagaggtttagcctaccttcatttgattgttatttttgtgtggagtgctcacagatctttaaatgaatgtgttgccagcagatgattttcatttcaccttgatttcgatttaaagtgactgatcagtgaatattttctcgatggaacagatttgcacattgaacacgaggatagctgcagctgatagcatgactcatgatgtgattcgggatttacttggtgtgaaaatggatataaccagctatgctgtaagtatatcagaatatatgccatcttcaaaagacttcataggcagtttttctgaatgtatcggtttcttcattgggatatttcaggagttgattgaccagcaccaggtccaaagagtggttgaaaaggctcagcaacatgctgaagagatcctgtccaaggtgatgatactatatacttgacggcatctatttaagttacttggtattcaattttgttattgatacctttctttctctttcaattttaggagcaagaagtcatgaacctgaagagacatattgattatctatttaaggatagagagaggttaggcctattctacttatactagaactgttctgtcacgagccaaagtgcttatttttctctcgggatgttcctgcctttttttggacagttgcatgtcagagttgaacaagaaagatacagatgttctttcgacacagatatcattagaccaactacaagagcgagttcagttgctttctatgcaaaacgaaatgcttaaggtaattaggagtttaatctacctatattctcaccaccagttctatttatcatatttctattccttaactcactgattctttgtatcttccgttttgcagaatgacaagagcaatttgctgaggaagttagctgaacttgatcgaacagtccacaatgcacaggccagtaaccatcgtgttccacagacaacaaaggtatatgtataacgggctgcctttgcttactgcatgtggctgaaaccaatcataatggaaaagaactcaatggttgattctaagattctgaatttcgttttatcaaacaggatacagcgtcatttaaacttgctgatactgattataccaagagactggaaaacgctcagaagcttctttcccatgctaataacgaattggcaaagtatcgcaaaacgagcaataaccacccatccccaagaactcaaggacagagctataataaaaaatatcggtaaagagtttttctttaaaagcttctcttctccgggtt

SEQ ID NO: 154698 - DNA, 1977 bp, Arabidopsis thaliana landsberg
actctttcctcatgtggaaatggaggaaattgcttataataagttgtttcagtttcttcgactcttctcttaaacttgccataaccgtagtagtcaatgttttcacatttgatcgcacgattaaattggtattgcaagtgtagagcgctcccgactctgtagcaagtagcactttagcaaggtatgttgtctgctctgtttcgtctttttcatttctatggtaatcaatgtgattgaagagatacatgataacttttgtattagactttgcattgtatgaaaaagaacagacctttgaactcatcaactctgtctagttactgtttctgaatccaattgctgtggttttaaggttttggtatcaatgaatgctaaagatgtaatcagccgtctaccagatgaggttcttgggcgtattctgtctcttatctccacaaaagaagctgtttcaacctcagtactctctaagaggtggaagaacatgtttgttttggtttccaatcttgatattgatgatcgtcaatctgtgcctaagactaagcaaaaccggattgagattcacagaaattacatggctttcgttgacaaattgctagatacgcaacgtggttcttctataaagaagctcactctaaagagtcatgttggtgttcgaggtggcactgattcatctcgcattcaaagttggatttgcaacgttcttgaccatggtgttatggatcttgatgtgttcattactttaaaaggaaaatctccaccagtgcctgcaatgatctttaagagcaagacattggttaagctgagagtaggacgtggttttacaatcaagctttctcaagatgtttctcttcctttgcttaggacattatgtcttgactcagttaattttgttggaggtcataatgttgttggaactcttatatctcgctgtcctgttctcgaagaactggttgttgaggagcggcgatgtgtagattggacttgttccgtgtcttctccatctctaaagagactacacatccgatttgatcgcaagtttactagtatttcattagatgctcctaatcttatctactacaaacactctggttatgttttgggtaagtatcctaatgttaagttggattccctcatcgaagctagactcaatcttcggatggatgaaacaagaatggtgggagtaagaaatggatctctcggttccattcccgctgatatgagaaatctcatcaatggaatcagaaatgttagaatccttcacttatctagccacactctagaggtcagcctcctctatatattgttctttccttataaataacattcttctttttttttgcttatcgagaatgagattcacttggggcttttgatgatttatttcaacttttgtgttattgagtgacaacagactaacacattgtgttttgttgaagctgctttatttctcatgtaaagaaatgccattgttcgacagccttgttagtctatctattgggaatgacaaggcaagaggatggcaaatgctgccacttctgatcaagaactctccaaacctagaaaccctcatcttcatggtatctcatgtcacaaacacatcctaaacaccatatatatattggtaggtcgttaacattactctttttctttgttatgcttcagggtctcgatcactacataacaaacagatgtggggatgtatgtgtttgctatgataccgacgagagcataacctcttgcctatcatcatctcaagtgaaggtgctggagatattgagctatcaaggaacgacaagagagctgaatcaaatgaagcatttcttggagaagttaccgtgtcttgagctagtgaaaatttgcgtggtaaacaacagtaataacttgcaaaccaccatggaaatgaggaatcttatgatgcttccaagagcgtcatcaaagtgtaagatccaagtcaaggttttaacaaaaaataactga

SEQ ID NO: 154699 - DNA, 751 bp, Arabidopsis thaliana landsberg
gcagacgatagtgagaaaggagtaacctcgactgagagagtcaacgatttctgcaacttggactggctttctaagtccgaccgtcatcaaggagatatcttccaaaggtactgatttcttttttcttctctctgacatgtaaacatccttcagaatgcaatattgaaattctggttattattagcaaactcattactgaatgagaccctcaactattgaccaagtctgttggcaaaacattcagattttgtcgccagtgcatcaaatcacttattcagttgtttcaatttataggtatctatcgatcacatcaaccaatgaagccaatggttggtatggtggcactctcctcggtgaccaagatgaaaacagcgaaatttacagacattacgcccaattctgtcaggttcagattcttttatcttgctggaatgatatattgatagattgcagaaactaagatcaatattccgtttcttttatgatctgatttaaacagtgtccagcgatggaaccatttgagaacgatcatgagtttgaacagaactttgcggaagttctccgcatgaacacaatcgatgtaatggacattgaagaagaagaaacggagatggaaagcgatttcaatgaatacactcagatcggtagcgatctcgggatcattccaatgcaatgcaaacactttgctagtgatccttgttggctagccagatggcttgtcggagatgataaggtgccgaaggtcatttaa

SEQ ID NO: 154700 - DNA, 1278 bp, Arabidopsis thaliana landsberg
gcttgtactacagtcaatgttggctcttgcgtttgggtggaagatccagaagtggcatggatagacggtgaagttatcgaggttaaaggaagtgatattaaggtcaaatgtacttcagggaagacggtatgttttaccagtttgaatcattatttacccatcaacttctcaattttgaaattttacgtttgtttgtttgtttgtttatacgtggagtaagttcaaattaagtgactttgttacattcttggaaaatttcaggtggctattaaagtttcaaatgcttacccaaaagatgttgaagctccagcttctggagtggatgatatgacaaggctagcatatttacatgaaccaggagtcctccaaaatatgaaatcaagatttgatatcaatgagatatatgtgagtattctattgaatttcattacaaatgagttttactgatatatgtcaatttcttctgctcactggagcttcttgaacgtctatatcttctttcactttgttatgcatttgcgctaatatatctattcttccagacttatacagggaatattctgattgctgtaaacccttttagaagactaccgcatctttacaacaaccatatgatgcaacaatataaaggtgcaggctttggagaattgagcccccatccgtttgcagttgcggatgcagcttacaggtgcctgccatttttaattttggtgtttattttcttcttcttttggttctggttgtttcctgtttgacattctctggcttgtttccactggggtagacaaatgaaaaatcagggcattagtcaatcaattctggtaagtggtgaaagtggagcagggaaaactgagactactaaattgctcatgcaatatctggcagacatgggaggtcgagctgtttctgaaggaaggacagtcgaaaagaaagtcttggaggttatccatgttataccttttagtatgaccatctggattgtcaaagtcaagtttcggtgaagtcgattcttagatatgttggtgttttttttatgcagtccaaccctgttctagaagcatttggaaatgcaaagaccgtaaggaacaacaattcaaggtgtatatagtataaatgtacctatacatatgcatatgtgtgtgcgtacatattttcttctctctttgtgctgaatatccttatacctattgattcatgttcatgatcattataatgttgcagtcgatttggtaaattcgtggagattcagtttgatcaaagaggaaggatatcaggtgc

SEQ ID NO: 154701 - DNA, 671 bp, Arabidopsis thaliana landsberg
catctgttctaaggcagaagagaaggggagggatcggtctaagcagttcatggaggcgttagatattctaagttcgaacaaagaattgttcattacactcttacaagatcctcattcattttcggcgaaaaaaagcttagacttggagggatctaaggtaaaagaaccgcgtgataaatctccatcaatggctgatgatttggatagtattgttctcttgaagcctagattatcaagctcggttgatgataaagtgtacttgagattcaaacatctagccaagaagttgaaacttgttgttggatctaacaaagacagcaatcacgcagaaaacaaacccgaaggtagcggtagaggtagagaaaccgaggctgctgcttttagaacaagtgatgtttctaccagtacagttggtcatagaagcccggagtcaccagtgtttaggcgcaagaaacgggttgaatcagatgttttcaagctaagtatcgaaaacgatgttttgccaaggagattcatggtggaaaggcaacaagagagattaaattcttcaccggtttatgaagttccttatgcattgagtagcttgcagacaaagctcaaagaaagaagacagaagctagagaagaagagagagagcttcaagttgtggtctttggacaaaaacttcgagg

SEQ ID NO: 154702 - DNA, 1676 bp, Arabidopsis thaliana landsberg
atggcttatgctcatgttttcgcttcgttgactatctcgacgatttctctccgacgattcctcccccgacttcatcgaaaccacagcgtaaaacccaattcccgaatcatatgcaatctgaaactaaactactctgctggaaaatttcgcgagatgggactatcacgttccgtggagctagaccaattcatcacaagcgaggaggaagaaggagaagcagaggagataggagaaggatttttcgaagcgattgaggaactagagaggatgactagagaaccatcagatatactcgaagagatgaatcatcgattatcttctagagaattgcaattgatgcttgtttacttcgcacaagaaggtagagattcatggtgtactttagaagtgtttgaatggttgaaaaaggagaatagagttgatgaagagataatggagttaatggtttcgattatgtgtggttgggttaagaaattgattgaagatgaatgtaatgcacaccaagtgttcgacttattgattgagatggattgtgttggtttaaaacctggttttagtatgatggacaaagttattgctttgtattgtgagatggggaagaaagaaagtgcggttttgtttgtcaaggaggttttaagaaggagagatggttttggttatagtgttgttggtggtggtggttctgaaggtagaaaaggtggacctgttgggtatcttgcttggaaatttatggtaaagttttgaacttttttcatagtttttatttttttttataattttggtggatttgagatcagaaagatgtgatatgaagtggttaagatgactatagttgttataccttcttgttagttatcggtttcttggtctagctttgttgatgtggatatgtgtcttttgtttcttctaataggttgatggagattataggaaggcagttgatatggttatggagttaagactttcagggctgaagccagaagcgtacagctatcttattgcgatgacagctatagtgaaagagctgaatagtcttggaaagacattacgcgagttgaaacgctttgcacgggctggttttgttgctgagattgatgatcacgatagggtactcattgagaagtatcaatcagaaacattatctcgtggactgcagttagcaacttgggcggttgaggaaggccaagaaaatgattccattattggggtggtccatgagaggctactcgctatgtatatatgtgcgggacgtggaccagaagcagagaaacagctctggaagatgaaacttgcagggagagaacctgaagctgacctccacgacattgttatggcgatctgcgcttcacagaaagaggttaatgcagtttctcggctactgacacgagttgagttcatgggatctcagagaaagaagaagactctgtcatggttgctcagagggtatgtgaaaggagggcacttcgaagaggctgcagagacattggtatcgatgatcgactctgggttgcatccggagtatattgatcgagtggctgtgatgcaaggaatgacaaggaagatccaacggccgagagatgttgaagcatatatgagtctgtgcaagaggctctttgacgctggtttggtagggccttgtcttgtgtatatgtacatagataaatataagttgtgga

SEQ ID NO: 154703 - DNA, 663 bp, Arabidopsis thaliana landsberg
  unsure (1)..(663): unsure at all n locations
tttaaactcttttccataattttttactttaaaggacaaatgaatcatatagtaaatatcttgagcctgttggtggctatctctgccttgtggattggtcttttgcaggctgcaattattcctcgaagccatacatggttggtgagtaacaaacaattttgtcctcttttttggtttcttgcttttttgaaattaggattctgttctgatttggtattattgccggtctgtcttacagctaccgatctactttgttgtatccctcggatgctatggcctattaatggttggagtcgggctcatgcagtttcctacttgcccccaagaagcagttctgctgcagaaggtacttttgagactnnnnnnnnnnnnnnnnnnnnnnnnnnnnnncttatttttcatcctgctctatacggattcgtgttatctaatgttgacatccttcaatatttttgctaatttagtgtcttttatctgtttctttggttgcaggatattgcagaggctaaggacttcttcaagcacaaaggggtagatgttggatcgaattgacacaaaggcttttatcagaccattcatcagagatatttttcgttattgacaaaagacttaactgtactgtttggaatttttgaatttaacagtgtcactgaggtaaaacgc

SEQ ID NO: 154704 - DNA, 975 bp, Arabidopsis thaliana landsberg
acgagcaaaagaagaagagaaacaacaagaagtagtaatggcttcctctatgctctcctccgccgctgtggttacatccccggctcaggccaccatggtcgctccattcaccggcttgaagtcatccgctgcattcccggtcacccgcaagaccaacaaggacatcacttccatcgcaagcaacgggggaagagttagctgcatgaaggtaatatcatcaataaaaactgtcttttgtcatgtgcaataaaacaaaacataggatatattaatttggaattggatttggggattataggtgtggccaccaattggaaagaagaagtttgagactctatcttacctccctgaccttagtgacgtcgaattggctaaggaagttgactaccttctccgcaacaagtggattccttgtgttgaattcgagttagaggtaataaacacaaaagttttcttttgtctactaatcattattatttattcgttttcattgctagaaatattagcctataaccggattttgtagaaccgaaatagactatatcacctcgtgcatatcctccaatatcaattgtattgaatggttttcttatgtgtttatagcacggatttgtgtaccgtgagcacggaaacactcccggatactacgatggacggtactggacaatgtggaagcttccattgttcggatgcaccgactccgctcaagtgttgaaggaagttgaagaatgcaagaaggagtacccgggcgccttcattaggatcatcggattcgacaacacccgtcaagtccaatgcatcagtttcattgcctacaagcccccaagcttcaccgaagcttaatttcttttctaaaacattcttatgaattatctctgctcatttcatttcctattgtctgtgttctttttctctttatgagacaatttctatcggattgtcaaatgtctgatttatgaatatgtaatttatata

SEQ ID NO: 154705 - DNA, 1505 bp, Arabidopsis thaliana landsberg
ctcggtagaatcaaacaaagtttcgtattgtgagtacattatttttttattgtgttatggagttacagtctgctacaatagattttgatattgacattgttctcgtaactttgcagaaccaatccatgcttaccagacatgcctatcatttatgcgagtgatgcctttttgacactgaccggtaagtgtgtctaggtttgaagaaataaagttaccgttattagattttggtcacagttcttatttatatcaatgtttgtaggttacaagagacaggaagtgttgggacaaaactgtagatttctgagtggggttgatactgattcctcagtactatacgaggtagagattgcgttttaacttgttaattagtatatggcatgattgataattgtgaatgttttatttggttcagatgaaggaatgcatcttaaagggacaatcatgcacagtgcaaatactaaattacaggttgaagatttacttcttcaaaacatttttgcgatcgaatcttgtttctttgatttgttttgggctgatcatatatgttttttatcagtaacagaaaagataagagctcattttggaatcttcttcacatctcaccagttcgtaatgcttcaggcaaggtatatatcccttcatgactacatacttcctgttaccaaatccttttgtctttcattttttggccttgatacaaaacccggatatgacatgtagaactgaaagtaattagtacagttactgatttctgctttttttagacagcatattttgtgggtgttcaagtagaagcaagttgtagaaatactgaaattaaagagctgagaccagagacgagacaactgagtgttgtcggtgcggttagagttgcggttagaagctcattgatggtgacatgctaatatacgccagaaagaaaatgcgtcgacttagagaagagtctaaagtgaattggacatacatctttactatatgtataatcatttgacatactacattaatataagtctttattttaccgagtatgtgcactcaagagaacgtgaatcgagttagaaataggtcatttattgaatgcggataagtatcaagaggtaagaactagttagtttcatcaagttaatatgattagatgagtatattattaagtgttccgaatgtcgaaaatccaaatgatctcggtttcactttacagattccgtatttttcaccttcaggagaatgcaacatcgtttatagaatgtaagaaacaaggttggtatcggcaaacaagaaaaaaatattacaatcgaaatatacatatcgaaaatgttctgctcgtgattcgacaaacagaagacatctccaatctgtattccaaaaacacgaagatttataggtggagaatgcaacatagaaaagtagaagacatttccaatctgtattccaaaactgttggatacggacaccggatattgcacttatggcaaattggccgagaagcagaattgttgcgttga

SEQ ID NO: 154706 - DNA, 1120 bp, Arabidopsis thaliana landsberg
atgactacggcaattgcaattgaggatgttagaagagaagtgaagatattgcgggctttaactggtcacaagaacctagtccagttctatgacgccttcgaagatgatgaaaatgtttacattgtcatggagtaagaatacatttctcagtgagatgtcttaagatcatttgattttcaattccaggattgcaataaatatattgtaatctccttttaccagattatgcaaaggtggtggactcttggacaaaatacttcaaaggtaattgctaatcacacatggctctgtatctgattgattttctcttctgaatcgtgctttgactggttgagcttgatctaattaggggtggaaaatactccgaagatgatgctaaaaaagttatggttcagattctcagtgttgtggcttactgtcatctacaaggtgtggttcaccgtgaccttaaacccgaggtactttataatccatggtgatgtttaatttctagattgttctctcattgtttaataatgtaaatcattttggcttttgttgacacttcactttctaggtcccatcacattaagcagtctttgtacacatagaaatgagttccacttacttatgcagagtgataatgacggttatgtttctttctatttgtttgtttacctttcacagaactttcttttctctaccaaggatgagacttctcctctgaaagcaattgattttggtctttctgactatgtcaagccaggttagagatgttgaaattgactcaagatttctcatatcaaactcatcttcatgttaaatagaaaatttgagggtgttttgcaattctgcagacgagaggttgaatgatattgtagggagtgcttactatgtggccccggaagttttacaccgtacatatggaacagaagctgacatgtggagtataggagtgattgcttatattcttctctgtggcagtcgacccttttgggcccgtactgaatccggaatctttcgagctgtactaaaggcagaaccgaattttgaagaagctccttggccttctctatcacccgaagctgtagattttgtgaagagattgctaaacaaagattaccgtaaaagactaactcgg

SEQ ID NO: 154707 - DNA, 1054 bp, Arabidopsis thaliana landsberg
tctctcgtgaacgtttgtttctttggtaatatagggtgcacagctcgaaagcatatagatgccaccctagagagtgggaacttgagagaagctgtaagacttcctccaggagaggatgcaaatgaatggcttgctgtaaacagtgagtaccactctgcttgcagtctcatggttacttttttgtgtacttagtcttggggatgtaatgcaggagttgaataattactgatttctttttctttttacgatgttgaaactcatatatgtacacacacatgaggatttgctaattgttgatatatttgctttttttcttttcagctgtggatttctttaatcaggtgaatttgctatatggcacccttaccgagttctgcacacctgataactgtcctacaatgactgctggcccaaagtacagatttctcttcttcattatataagtaattttggtgctcatgattgatatagtaatttgatcactgttttctcttaagatcttgaatacaaaaaactttgaaactgctggagcaatatgggcatttgtaaagtggaaaagagtctttgtttttgagtgacaattatctcgatgatcaacaactgactcatatgtaactattccattggtgaaatgcgtcggttgcaacgtttcaggtacgaatacagatgggccgatggtgtacaaatcaagaagcctattgaggtttcagctccaaagtatgttgaatacttgatggattggatcgagacccaactcgatgatgagaccatatttcctcaaaggcttggtaaatataataatgtctatgacatctaacaagaagatcaatcaatatcaacaaacaaaatgttgtatcgacatcctcatgctaatttttggtttcttgcaggagcaccatttcctcagaacttcaaagatgtggtgaaaacgatctttaaacggctattccgagtttatgctcacatataccactctcatttccagaaaatcgttagcctaaaagaagaagctcatctcaacccttgcttcaaacacttcatcctctttactaat

SEQ ID NO: 154708 - DNA, 1390 bp, Arabidopsis thaliana landsberg; identical to SEQ ID NO: 17584

SEQ ID NO: 154709 - DNA, 466 bp, Arabidopsis thaliana landsberg
tctcgtttctgcatatcttctcatggccagttccggggattatgatggtatcatctcactctccctctatattcttcacttaccctatctgattaaatacactgacgtaccagccgtgaatggtatatgtatatgtgcatatggtcctatagatagaccattgaatgatatacatcataggaaaccaagtgtgatagttaagatttcaacctttggatgatgttgttgccctgttttgttacggatagtgtaattagattgatttccccttccacttaaaggtaaaatgtataagtaaatttgcacaaaggtaacttttgtgagaaatgcttgcagaaattataaagtctatatctgatgccccaccaacacattacatggtcaagatagagtctttctcactccttacaaagcatgctattgagagatatgaaactgagagctttgaagctggtggctacaaatg

SEQ ID NO: 154710 - DNA, 605 bp, Arabidopsis thaliana landsberg
gaagtgaggattggagaaaagagagaaaaaatggcgatggagatcggagaagatgaatggaaggtttgctgtggaagctccgaattcgcgaagcagatgtctacgtctggaccgttaacttctcaagaagcaatatatactgcaagagacatctggttcaaccaagttaatgtgacagattggcttgaagctttctctgctcatcctcagattgggaatagtccttcaccttctatcaactccgattttgctcgtcggagcgtatcagaacagtcaaccgcctttgccacaacttctgcttctgctttacaggtgatggatcttcactttttttttccttcatctcttcagtgatttcttcttctgatgatcaattgttttcaatttcttaggagcttgccgaatggaatgtactttacaaaaagaagtttagctttatcttcattatttgcgcttctggcaggactcacgctgagatgctccatgcgttaaaggtcaacttttgcatttccaaatcagtttttgttgagtgtgagtgaatgagaaagttacatattcatcaaatcgtctctttttcaggaaaggtatgaaaataggccaatagt

SEQ ID NO: 154711 - DNA, 1729 bp, Arabidopsis thaliana landsberg
taagtgaatgtgatgatgatgatggtataacgataatcaaatgcccaaaataattaaaatcctacgaataatgaagagcttctgacttggtacacatactcaaattctcttacaaccgaaaaccaaaataatttaaaaagcaaaagcgctgactccaccctggctctctaaaccaattacatcccatatataatcaaacgtcctttggtgatcaatcatatatataactctcatatctcaaaaataacaaacgcattccttgacgacggtccaatgggggacaaaaataaggacgatagctctagccaaagcaaagcagtgcgtaaggaaaaaagagcgttccttttcaggaaatggacccgggttgatgtaatgagagtttcggctgttggggctgtgcatctattgtgtctattggctccgtttaactacacatgggaagctttccggtttgctgctatggtcggtatatcgactaatctcagcattacattttcataccataggaacttgactcaccgaagctttaagcttcctaaatggcttgaatatccattcgcttactctgcccttttcgcgcttcaggtaaatatatattgttttcaccgaaaataccactataaccaatatgtatcctcaattatctttgtatttttttctcccagggtcatccaatagattgggtgagtacacataggttccatcaccagttcacagattcggaccgtgacccacatagtcctatcgaaggattttggttcagtcacgtcttttggatattcgacaccagttacatcagagaaaaggtaacaaaatgtttaaagcctttacaaacccaacatatgtgaatcgaagttatcatgagattttaatattagaagatctgtgagtaactaaagacgactatgtacgatgttgcaataatgtaacagtgtggaggacgtgacaacgtgatggacttgaagcaacaatggttctataggtttctaaaaaagacgttggttctccacatcttagcattttggatcctcgtctacttatggggtggtctaccttacctaacttggactgtggtaaactttcaatttactttttactattactttgtttatatcaaatggaaatcggattatacatgatcaattttatactactttttgaatgtacgtagcgaaatatcacgatttttcactattgaagaaaatttcattaattgataaattaaaacgttttgtgatttacactgctgctaacaaaaacttatttaattttcattttcaattatttcattattcctctatttcactacgttggaaaacagggttttggaggagtaattggttaccatgggacttggctcgtaaattcggcatgccatatttgtggttcgcaagcgtggcaaaccaatgacacctcacgtaacgtttggtattttatataccctctctattctttatagaccaataaaccttgatcgaaatagataaaccttaaccgaaactaaaattgagtgaatgtggaatggagcaggtggctagcgctattgactatgggagagagctggcacaacaaccaccatgcctttgagacgtcggctaggcacggactagaatggtatcagttagacataacttggtacctcatttggttcttccaggctctcggtttagccaccaatgtcaaattacctaccgatgctcagaaacgcaagatggctatccgtcgttaa

SEQ ID NO: 154712 - DNA, 2359 bp, Arabidopsis thaliana landsberg
  unsure (1)..(2359): unsure at all n locations
gaaatagcgggcctgctgattcaagtgatgatgacaacaacatgaaaaatggatatcacaatgcagataatgaagttgaaccagtgactgatgacgataatgaccttgcattgagtggaaaaatgagtgagagcagcggttgcacaggcagcgatctctatgaatacaaggtaatttctcctttggccagtatctctcccttcaatatactcatgcatccatccaagtttacatgaaacatttatttgtatagttgatgatataccaaaatgcctttaagttagggaagtataattcaggaatttggaatatgtttttaggtgtagctactgtatatttttccttttccggtgctatttttcgatgaaccagagtcggcaatttttggcagctaagaagaaaggttggacaaaatagttatttcatgattgctgaaaacattctttgtagggatttgttgctgatgactctgatattgaatcaccaagagacacaaatggcccaagatgtaattcaaacatacgaacagatcatcttatgagaaatccttttgtcaattccacggatcaacaagctggagagcagataggcgatgatccaacaaaatacggagtaaactcgtgtctcgcacatgttagtgagtcttatcaacaatcagggacgggtctaaatgtacccactcatgggaatactttggctgctcctggtcttgaatcaccaagcgcgaaatccgtgaataagggcacaccctcctctgttcatgcaaaacgcgcaacattctggggtcgaggcagtgtatgtgttttcttatctttatcaagtacttctgattctgtacacgcggcagatttggtccattagttcatatataattggatgcattagacaaaaccctttttctccaatttgatagaagtgtcacacctttgttgaatcatatggagataatgagccaacggaataatattttcttctctttgtttgtctcaggccagaaagatatccacagatgggtcttttgattcttcaggagaagacgagtaaggctttaactcttgggtgtattctccatctccatatatatattttcttctagctaggtattcataggcaacttcttgattttcttagcaaaactatcatttactgtgattatctatccataagttttcaagtttaaatgtttcctttgcttgaaatactttgattatctatactactacttcatctctttggtaaatgcttgaatcgaagattacactagcttggtgtttttgtactgctaattggttcattgtttgtaggcttgctatacagaggctcgagaccacaaaaaatgaactgcgacaacgaattgcaaaggaggtaatcatctactgctgaaatattattctttgccttcataaagtcattaacactggtcaccgttattgttataggccagaggtaatgcaatattacaggctagcttggagagaaggaaacaagcactgcatgaacgtcgtttgtcgcttgaacaagatgtaaagaatttctctttaaaactatcagtgtttataaatctcgtctctccactattaatcctaatgtcaaaggaatcttcttctgatttgatgaaaaatacttatttaggtgtcaagattacaagagcagctgcaagctgaaagagatctccgagcagcactggaggttggtttgagcatgtcttctggacaattcagttcacatggtgtagattcaaaagtaagtatacattttaaggaaatggtatctttctttataacaattagctcgtaaaaaatacttacaatccaagtatttgaagacaagggctgagcttgaggaaattgctcttgctgaggctgatgtggccaggctgaagcagaannnnnnnnnnnnnnnnnnnnnnnttaaccagcaacgtcagactcattttggttccttctcagatgcacgtgatactcatcagtatctccagaatcacaatcctcaaaagtgagttgtatcactatccctgtttcctcacactgaggagcttgtagtccaagttattttttgtgataacttacccttatttctgtaaatcttttatgcttgaattactggcttgtttctttagctagtgaagatgtttaacaaatatctcagattaacttatccagcattaatcttcaactcagtacagctgtgagaattatgtttgaagtaacctttgcacaacatatcttgtactatgattggttcacatctgtgtttcttctctaataccatgttatgtatttccgcagaaggtttcttcagcaagattttgattccactcttgcctatgtaaatcatgaaaggaaacaaagacacgagg

SEQ ID NO: 154713 - DNA, 586 bp, Arabidopsis thaliana landsberg
gaatgtcattcgtatgtttgaggtttgattctgatactataaagctgaattcatagttgtgttgcacgttttggttgttgttgttgttctatagatatgtgctataagctgagattcgtttgaagttatggaacatatttgtggtccctggctactcatatgtatgtaatataagggatttgattattctatgtatttttttggtatctttgtagttacagattctcttcttcttcttcttcttcttcttcttcttcttcttcttcttcttcaggtgatggctagcaaaactaagatctacttcgttttggaattcgtcactggtggggagcttttcgataaaattgtaagatttcattgaaagatgtgttttttttttcttaatactatgtggaaatgagatcttaattctttagaattgtcatgtattagtcaaccaatgggagattgaaggaagatgaggcgagcaagtatttccagcagctgattaatgcggttgattattgtcatagcagaggagtttatcatagagaccttaaggttaggaatcttactttgtgatcctcgtgcatagggtttcttgtgc

SEQ ID NO: 154714 - DNA, 678 bp, Arabidopsis thaliana landsberg
gtgaaagatgatcagttggaccgtgttcgtagaacacaacatgcaatgttcattgtcaagtctcctgatggcacatgaatgccatgtgggcataggctccctggtgccatccagactacaatgcaagttctatcaacagaagggcgggccaaaaaggtacgcatctaaatgctgaatatatcagttaggttctgtattcaagcttctctgatatatagatcctttcaatctttacatatgacgatttctaaagactgaattgtgtatttcatgtgaatagattgcagcagattattccaccaccaatcaccagaacagatttcgagaaggtacttgcaagacaaaggccatcagtgagcaagtctgtccttgatgtccacgagagattcacacaggagtttggagaagaaggttgatagatttgacattcccatcaagcatctttcacaatcatattattattagtctcttcaccatctccttatgtatgtgctgagaagcaaaacaaaatctcaaacccatgtttgatttcttcccaaaacattgaatttgctttatttctcgaattgtgtaaaaaaaaaatgttctgaacaatgttttctatttattatgtcaccaaaagtctccacatgagcaaactccatcactgctaaagtgatgaaaccgatttgaatctct

SEQ ID NO: 154715 - DNA, 652 bp, Arabidopsis thaliana landsberg
ttacatgagagcaaaagcggtgaaagcaaaacagagagcaattgattccggtaagatggagagaccaaagccggacaagaaacaaagccggagtaaaccaagaaaccagcctcgtggtgaagagatgaaagatctgttcaagagtgatatgggcgagaagaaacagggcagaggcggtgccgcggctgcagcaaaacctcggacgaagtcgaagaactcattcaagagcaaagccaggtaagaaacatttcatcataaacatgaaatttaccagtaacataaattgtaatttgttggtttaactcggtattttctacttttatcgtgcagatataagcgtaggtaaaaggaaaaagcattttgagaagatatcgaaggacaaacccacgagaagaaggacatttcattgagaagggtttaaacaatttaaattattgttgtaatatcataatttagaacaaaactggttaagatgttcgaaattttgttttctttgtcctatggtttttataatctttcataaagctttaccatgattattcgtagtatgaagaagcaaaaagtggtttaaaaaaaaattaaaaaaaaaaagaagaggtaaaaagtcacgtgagttggcgacggttgtagttgtagacgcgtgggcacgtga

SEQ ID NO: 154716 - DNA, 398 bp, Arabidopsis thaliana landsberg
agccaagccatggctcatatggttggagcagacgatattgagtcattgagagtagagcttgcagagatcggaagaagcatcagatcatcattccggagacatacttcgagtttcagaagcagctcttcaatatatgaagttgaaaatgatggtgatgttaatgatcatgaagcagaacatgctctgcaatgggctgagatccagagattgccaacttttaaacggctgagatcgtctctggtcgacaaatatggtgaaggtacggagaaagggaaaaaggttgttgatgtcaccaagcttggagccatggaacgtcatttgatgattgagaagctgatcaaacacattgagaatgataatctcaaacttctcaagaaaatcagaagaagaatggagag

SEQ ID NO: 154717 - DNA, 523 bp, Arabidopsis thaliana landsberg
atgaatacccggttgttctcaagccttcgttgaccgcaatggatatttgcattcgtgtagccaacgttgatcctcgccgaacagtaatattcttatttatttaattatttcttatgataaaactattgtatcatcattacaataagcaaactgtttttgtaaataggtatttttggatgataatatccacaatattaccgcgggtagatctgtcgggcttcgcacaatcctggtaaatttttgttacatttcacatttattaattccctattttgcgacatttgtatgtgttagtttcaagttttaaaaatttggttacaaaaaggtgggaagagcagaaaagacgaaagatgcggattatgcggtggagacggttactgagatagctacggcggtgccagagatttgggctacggcgacggcgacaggcggatttgacgttggtggtgaaagaatcaaacggagcaagagtgagctggagggtatggcttcaatagcagccgttggtgcgtgacgtgatcga

SEQ ID NO: 154718 - DNA, 2149 bp, Arabidopsis thaliana landsberg
tagggtttctaatctcttataacaacaccatccaaaagagtaaagggaagctagagagagctcgaagacgcaatgggtaagccaaactttttcctctgttaacatacaatttcgtacgttttggttatgagatttgatttaatattgtgaaatggaatctgaacagcgagaatcaaggttcatgagctgagggagaaatcaaaagctgatctttcgggtcagttgaaggaattcaaggcagagcttgctctccttcgtgtcgctaaggtcactggaggtgctcctaataagctctctaagatgtatgtgtttcctctatatacactttgtgtgatcaaatgttacatttttctgatattggttaactctttttttttttttggattctgaattctacatagctttgtttatgatcttgctggtgttagtgattaattagggttatgtagtaatcatatttagctaggtttaattatgtttatgtgttgttaaatatagacatatattattacctaagtactgcttatgttgtgcaagttgtttagtcttgctttcacttttgtaatttttgtatcctaggtcctattattatcctctatagatagataaagtagcttacttggcttagtgattttactgttggattgttcggtcactggtttttaatcacattgatctcaaatgggttatgctttatgttgatttcagcaaggtggtgaggaagtcgattgctcaggtgttgactgtgatctcacagaaacaaaagtctgctttgagagaggcatacaagaacaagaagcttttgcctcttgatcttcgtcctaagaagactagagctatcaggaggagactcactaagcaccaggtatgtgattcagattgatattgagaagtgatgaacaaatcctgtgttttattgtactgaatgaatcattgctggctgatttgtataggcatcattgaagaccgagagggagaagaagaaagaaatgtactttccaataaggaagtatgctattaaggtgtaagcttttatcttgatcacatcaattttgtgtttgaatttgagctcttgtgtgagtttttgctttgttttccttccttgttaaagatattgaaagctcatcttaatgaaagattgattcaggaaaacagtattgttatattattagatcatagcatcttaatctatattactcagttgagggttagcttgttagggtagtgatctctatacattactcttcactccaactcgatcttgccttcagttcactgcttatcaactaaacccaactggatcgcagcgacatgactctctctagcatattactcaaccagtggtctctagccaatgtgattctttcttagaaaactttgaattgcgtacatatgtttgacccgagaaaaaatcatattgaaagaaacgaaagtgatgcggtgatttgcaagataaagttgacagatatgaaacctacacaccaatagagaatcagtaggtaaaaaatctgagattttgaagaattgatatataaccattttgaccaaaaagaagaagaagaattgatacaccaaaatatgtcctcttgtgtgaatccctttgttggtcactaaaatttgttagaccaagatgaagaggtgggggctggcgatatatatccgcaatatatcagagactatcgtagttttgttaagtaatcgtgtttgaactttgaacatagctaaacatcagttgttttattatttatttgtgagaaaaagacaaaattttgagaaatttaactttatgattacttgtcttatagggcaagagttgacttttgcaaaatctcttgtgccaaattgttttcacacactctctattcatttgaatgttcccttttagttcttttggttctgtaactttgaaaacaaatgaattaattcaattcataggatgaatattcttcaaattcgtcacacagataagcatatgagccgaaatccaagtgaccaaacctttgcatttttcaaacataacaactttttctatgcacttagtttggtcaggtttggttatgaagtgtgtgttcgttgctatacgtagaatagcttattgctggtcagcgttattgcagaacttgcttacatcgatacacaattgactttg

SEQ ID NO: 154719 - DNA, 727 bp, Arabidopsis thaliana landsberg
aaaccctaatgacccgttcgcttcagaccataagatccaaaaccataaaactaggtttcacactttctctctaaacactgtctcttttctccgatacatatcccgccgcttcccctgtgtttttcttcgccgtccgtctttcttttcaactccttagctgcggtaagtctcttgatgcttaatctgttctcctttcttcttcttcgtcgtcttatcttatcggcagtggttaattaaggtctattgaattgatctcaaatttgtattcttgtttaggatcgatctttcttgttgttacttgagatgttctccgatagcttagttcttagtttgaaactcattattagctagatgtatatccacattcagtaattgttttatggcttggaatttgtagaattcaaatttggttttatacttttttgaagtcttctctagatgtgtgtaagcttctgcggtggttcttctatttcttaatcatccaatcatatctagcacattctctgactcaatttctgttggttacttgattgatatagatattaaagtctagacacaatgagaggaaggagctacacgccatcaccaccaaggggttatggaaggaggggccggagccctagccctcggggccggtttggtgggagtcgtgacagtgatcacccaaccagtcttttggttcgcaacttacgtcatgattgcaggtatattctttactactgcatgt

SEQ ID NO: 154720 - DNA, 1026 bp, Arabidopsis thaliana landsberg
atggtggtaatttcaggaaaaattggatatggaactgtgagtgaagcacttgcatacaagttacggttcatatttgtgcgaagggattacttcaatgaagaaccattcttgagaaagatgcttgaggtgagagacccacagtttgcgtaaatgtttgtttaaatgtttgccttctcctaagaatagttccactttcttggattaaagtattaccaaggaggagttgaaatgatcagaagagaccttctggctggatgttgggcaccttatctcgagcgtgcgattacattgaaaccgtgttacgatggaggcattgatggtggcgaggtagagtgtgcaaactattcatattagcagaccagtccttcttgtactataacatgacagttgctcaatttcccctgttgatgatgtcaatgccctggctgtttctatattcaggtggcagctaaaatactgcaggacacagccatggggaagaagcgtttcaaactcaatgtgagtgctacaaggaagataatgttatttgttactttagattttgtagagaaatttagatgtatggagttgtatagacaaaaataaaattagtttgtgattcatttgtaatgccaatccaatgatattcaccttgccaatgtagcttagcggagcgaggagactgcgggatgcaataatattaggtttccagctacagagagctcctggaagagatctttcagttccagaatggtatcaagtcgctggaaacgaagctgggattccttcggttgatcagactcagaaaccctccaagtgtgttttcttgtatacttgaatctctcaaaggacttaatggtactcacctcttaagctcctatgtgttttattaacaggtttgtagaaggctttgaaattcttcatggagatcaccatggcctttcagataccatcggtttcttggatagtttggcaacattagcgaaaataggaggccatcatcaagaaagggagcatttagcggctgccgcgcttttcaactgggag

SEQ ID NO: 154721 - DNA, 1890 bp, Arabidopsis thaliana landsberg
tacctctctctctctggtcatcaatcaattcaaaggtattgttgttcttcttcaaaccagtaagagtgacttgagagtctgatgattccttggggtggagttacttgctgccttagcgccgccgctctttatcttctcggccggagtagtggcaggtttgttacttatgatctcctttgatttcttcttcgcaaagtgtagattatctatcaatcaaatcctttcttatccttttgagcgcagggatgctgaagtactcaaaactgtcactagagttaatcagctcaaggaattaggtcatcttcttctcccctgattacttcatctactatcagaattatttgttgatcctttattttttggattgcattgtatttgtagctcaattgctagaattagatagcaagattctacctttcattgttgccgtatcaggaagagtcggttctgagacacctatcaaatgcgagcatagtggcattcgcggtgttattgttgaggaaacggtatgttgtagactgataattagcgcatggaacctagtttgttttcgctggtatgtgaaactctagtaattgcatgatctgcatgatcttttcaggcggaacaacattttctgaaacataatgagacgggttcttgggtgcaagatagtgcattgatgttatcaatgagcaagaaggttccttggtttctggtaagtctagtatagtagcatagtgtttgagacaactgtgattggatgttttcttaatacaatttccaaaactgtttgcgataggacgatgggacaagccgtgtccatgtaatgggagctcgtggtgcgacgggttttgccttgactgttggtagtgaagtttttgaagagtcaggacgctcgcttgtacgaggaacacttgattatcttcaaggacttaaggtttttacttttctttccggttctttgtttgttggcttctctatttgcttaagcggccattgttttgtttcagatgcttggagttaagcgcattgagcgtgttcttccaactggaataccactaacaattgttggtgaggtatgtcgtatgctcagtgtttcatgtcatctcttttgcttaagttgtaactgttgatagagatacatagcacactaactccttcaacagtctggtatttgcctcttgaaattttctcaaagttcctttaaaagcaatatttgtaggaagcgggattgatctatgtatagaggcataccaatgagtttaaatctaatttgtgttgctgccatgtataacaggctgtcaaggacgatattggagaattcaggattcaaaaacctgacaggggacctttctacgtctctcctaaatcactcgatcagctcatttctaatttgggaaaatggtcaaggtcgtgtctctctcctctctcggttcttctcctcctatactcttgtagaaaaacggcgatgagccaaactgattgataagagtataatttacaggtggtacaaatatgcctccatgggttttactgtttttggtgtgttcctaattacgaagcatgtcattgactctgttctagagagaagacggcggagacagttaaaaaaaaggtatgtaacagatttgtctgtctaaaagtgaataaccgttctcaagtatgagtactagatcggcttgtttctgtcgaaactatgtacacacaaaattaagcattcagctgtttttgcagagttgcttgacagcagagtaaagagagctgagctagacagtgaaggtcttcattggcgaattacactattctacatatagggttgacttggctctggctacaaatatgttttcaccaggttcaaacggggccccgtaggagcatttcagattctaccaaggaaaggaagacgct

SEQ ID NO: 154722 - DNA, 930 bp, Arabidopsis thaliana landsberg
atgggagatggagatgagcaaagtaaagagttaggaggagtttcgtcttcgagtcttcgttgttcttcgggtactggtgctgcaaatgcagaagcaagaatgaagtttgctgctgttgatgctataacagaattagtgtggtctcctagcaacggtctaagcttaagatgtgcagatatcagtttcacgggaaaggcaaaattactctctcctaacttctttgatataggactaaccaacatggcgattcattccaatagcacaagtattgaagacgaagaagatgctagcgtagatgtcgaattgagaaaacgagatcaagtgaaccaagcaagtaatgaaatgaatagaccattttcaggttgctatatgataagttatcttttttgataatgagagttcttgtgtgtttgcagtgattggtggttctgttgaggatatgaaacctgaaatggttgaggataaggttgaaaccaatgatgatataaagaatgaagaagcaggatgttccaaaagatcttcaggtgaaaaatggttatatcaagttaataatgtttgcgtctcttccattaatgacaactatggattttgagctggtttcttcgtcttttgtgcttgttttggttcgagtagatagtccgaaagctatggaaggagaaaccagagacttgttgaggatggaaagtgctggatctcaagaaggaccgagtaaccgtggagataaagaagaaggggataaggcgcataatagagttgatcgtttagaatcaatggatgagaacaacctcgcaactcttgctgttgtagcatgtgaaggtaaaggggaatatttgccggaggatgaggctggacctagtggttcctacaggcgtcgtgagaaagcaaaagggaaagagaaagctttatctgatgaaaactttggtggtgatg

SEQ ID NO: 154723 - DNA, 483 bp, Arabidopsis thaliana landsberg
ttaataaaaattgaaagatgtcacggccgcgagtcgttgaagcctaaaaaccaaccaaccccattgagcacttaagctctcaccaaaaccatgaatccttcttcttcttcttcttctcatcatcatcatcgtcagcgtctgggtcctcatcgccgacctcactctggattccgattctctcatcgccgttcctaggttcaccttcctcgtcgcttcttccggcgatgaaagcggctcttcataccggagacgccagagcttggaggtattagggttttcttttcggaatttctcattgattttgctatggcggaagagaatcgtaaggatcgaggtgtttcttctactgtttcgattccttctggtttgaaccggatcaaaactcggttagctctcgtcaggtcctaaacctgaagattcctccgataccgctcttaaacctccgttaatcggaatcagaagattattgttcctcgtggtcat

SEQ ID NO: 154724 - DNA, 1389 bp, Arabidopsis thaliana landsberg
cactccttccggtttcgtttcctacttcctctaatcacatcgagcgagagcaaccaggaacaagatttcgaatcaattctcgtctttcaagtattgctccatctttctatttggattctgtggattttttgctttgcttcattctatattgggtctgctgatgattatttcgatttctaagtggcgttttcaatttaatcacgtctttatttttgtgcaattatagattctgaaacttacattgtcggcgtagtttcattgtttggttgaattactgtgaatgcttaagtttttaagttttaataaaactagggtttagctatacaacttcaattattttctgttgaattcgtggtcattgttatagagacctgtaacttattaagctgaaagctaaagttctaatttttatccttctttaggtgttggcagagaatctattgggtcagataacatgggtaagctgatattttgtcttagtagtgctcttagctctatgtatgttggagctaggattttaaagagtctccttttatttgtttttgatgatcgccagggagctctcgtcatgaaaagcgaaaggaggctcgcttgcagaagaaccagaaaaaacatgaatcttggcttcagcgtcatgtaggaggcaatctttgttttattaataaggtttagttttcttgttgaattgtttgttgatgggtaatgttggtttttgctggatctcagaagtcggaaaaggagaaacgagtatcatcatctgcttcagctcagaagtctggtgatgtgatcaagtctgaagattttcaccagataagtgatagtgtaactgaacatatggaatcaagtagtcctagtggaaacaaagaccatggaaagtcttttatacctaagaaagaagaggttagagtcaaatcaaaggagaagaagatgcaaaaagtagagagaataaaggatctgaatagaccaaggaagaagacgaaatttgaagagtttcttgaaatggatacaccaactgtaatatctggagaccaggatgctgaacttgagaggaggctcgcaaagaagctcaagataaagaaaggaaaactaaggggcttggatgatggattgaatgatttgttcgaaggacttccatctgtacttgattcgatgggatctgatctcggtgattctcgaaagaaacgtaagaaaaagagatcagaagaaaaacaggaccatgaggatgtcgatgagctagcaaatgaagatttggagcatgaagaatctgaattttctgacgaggaaagcgaagaagagcctgtagcaaaaagagaccgtaaaaggcataagaagaagaagaagtctgtagatgaagaactagaaagtgatctgatgaatatcacagatatg

SEQ ID NO: 154725 - DNA, 803 bp, Arabidopsis thaliana landsberg
tggcaacgtatgtacagggacagtccgtattcgcggctgaaaataagctctgagaaatggaccgaatatgctaaaacggccttttcagtggatcctcgcattgctttatcagttgcctcaagatttccggcaaatgcttctgtgaaatctgaagtcactcagctggttcaggtatgaatttacagatactacttcttctaagactgtagaaagacagatttttgacattttgtagtttgagatggatatactgtatctctggtattaagttttaaaagagctggtgttgcaataccacacaaaaccagtgaggcataatgcaactgggaaaaaattatgttgaagaacttttggctcatggtacttttggttaaatatttattgtaagaactaaaacttatgttgagaatcagattgctaggatagtacattctctggacctcttggtataaaaaatataatttgataccatgactatatctcttaatatgtaaatgatgtaaaatgagcgttctcactgatattctttcttgcagacaaatatagtagatcttcgtacaattcctgaggcattgccgtattttgttacaccgaaaaatgttgaagagaactcagtgctgttgcagcagctaccgcactgggctgcttgttcaattacacaggctcttgagttcctcacgcctgcttataagggacatccacgtgtcatggcatatgtcctacgagttttagagtcctaccctcctgaacgagttacttttttcatgccgcagttggtgcagtctttgcgctatgatgatggg

SEQ ID NO: 154726 - DNA, 503 bp, Arabidopsis thaliana landsberg; identical to SEQ ID NO: 22697

SEQ ID NO: 154727 - DNA, 589 bp, Arabidopsis thaliana landsberg
catattgggacctatgcttaatcctgctagagtgtcttatgctgtcgttggtgtataccacaaagatctggtacatttacttattgctgaaactagttgttcatcaacaaaaacaagacatttacttaccatttgcttgtgtggtttcataggttgttaagatggcaaaggcgctgcaacgatttggaatgaaaagagcactggtggttcattcatgtggtctcgacgaaatgagtccgttaggtaagattatctcttcctaaaattgatggcttttattattgaacaattattaaccaatcatggcttaacgaaaaacaggaggaggactagtttatgatgtaactccggaaaagatcgaagaattctcattcgacccatgtaatgtttcctctagctttttatcccttctctaaaatgaatattgcagatgcagcttaatgaaattgaagcttatttctttttgacagtggactttggtattcctcgttgtactcttgaggatttgcgaggtggaggtccagactacaatgcggatgtgctaagacgtgtgctttcaggggaaagtggagcaattgcggattcattg

SEQ ID NO: 154728 - DNA, 818 bp, Arabidopsis thaliana landsberg
atgacttcatctatatcttcagttgcaccttttgactttgcctttgcaaatgcatcttggtctaatctccaatcaccaaagcaaacgcctagagccagcgaaagaaacagcaatgcttatccagcggacccacggcttagcagcagcgggtcagtaatcagtgagagaatcgagcctttccagttccagaacaacagcgacaatggttcgagtcaaacaggagttaacaatactaatcaggtagaagcagagtggatcgaacagtacgagccaggcgtgtatataacccttgttgccctccacgatggaactagagatttacgaagagtccgcttcaggttaaacattttgctcatagagattccatatttttttactataaggtttgatgatgctaaaggttgtcattgtttctttcttgcagccgaagaagattcggggaacatcaagctgagacatggtggtcggagaatcgggaaaaagtgtacgaaaaatataatgtaagagtatcggaaaaatcaacggcttctcaaacgcatagagacagagatgaagaagaagaagacattcctcactagtagtcagtctcctaataacatttgtatgattttgccccataatttcctgtgtctctctgttttgccccaaaactgttcattgttctacttaagtccttttttttttttctctatctcgattcaatctgtgggagattaattttcatgtcctctacatgtatgttgtatatatatatgaagaccatcggttctaagattactttaggaagaaaaagaaaaacttaagtattgaatttgcct

SEQ ID NO: 154729 - DNA, 1403 bp, Arabidopsis thaliana landsberg
agatgttaggatactcctatccttgtttccaaacgggattacggttaacgactggcgatggcgccggataattcacctgaaaccgaagaaccctagaattttatgccttcatggattcagaactagtggtcggattctccaagccggtataggtaaatggccggacacaattctccgagatctcgacctcgatttccttgacgctccttttccggccaccgggaaatcggacgtcgagcgtttctttgacccgccgtattacgagtggtaccaggctaacaaggttcgttgcaacaaaatcctaaatttccttgaattcagtattgatcattgacactgttaacactatcagagtaaaggttgttttttttctctagaaaacagagagatttggtctaagtttgtatacataatttgatttgtgtgtgtgtgtgttgcaggggtttaaggaatataggaattttgaagagtgtttggcttatatagaggactacatgataaagaatggaccttttgatggtcttcttggtttttctcaggtttgttttgattctttggcgagattttagtactgatcactttcatatatatcagcaggaggatcgtggaccgttgattcttgatccattcttgcagggagcttttctaactgcagctattcctggaatgcaagaacaggtacataactgcataactgatcataatcctggttctgagattgaatctgcttatgatattttcaagaatgaaacctattgttagagtagttttctattgttctgttttgagcaagtgtgtgatgttgaaaccatttatatgcaacagagaggttgaatctgaattgaagaatgaaacatgttgttttaatagtttgagtaagtctgtgatgttgtaaactgttttgtagggatcggctctaactaaggtgccaaaagtcaagtttttagttatcatttctggagcgaaaattccagggttgatgtttggggagcctaaagctgctgttaatgcattctcatctccagttcgttgcccatcactccacttcataggtaaactgttactacgttgcgcatgttcttgacttgatttctcggttatgttgtaatgccaagtttctgtctagttgtttgaagcttaccttagtagtgtgcctttagtgtagccaagattggcatgggagtgtttagactagaatctaatctgcagcactacatgttaacgttagagattctctcctacaacatttgatatgacataagagacaacttgtttgtaattctgtatcggttttgctgcaggtgagagggatttcctgaagatagaaggtgaagtgcttgtagaatcattcgtagagccagtggtgatccatcattcaggtggacacattataccaaaactcg

SEQ ID NO: 154730 - DNA, 326 bp, Arabidopsis thaliana landsberg
cattcctccttttattagcttcttctcttcccctaacacaaaaacgaccatctacattattttcatcatttcatattcaaaaagatttctaagtgttgagctaaaattctccttaataaagagaatgtcgtcgaagaaatatcgatattcttcatcttcttctttttcttcttcatcttcttctcagctaagtactccaaggtacttgctttaacgaggttaatgattggtattgagattttctcttgtttgattaatcatgtttttttttttcttaaaattatcttacagaacctttgcaaatggggtttcctcagcccatggtg

SEQ ID NO: 154731 - DNA, 831 bp, Arabidopsis thaliana landsberg
cgcgtagagataatgagagtttcgccggcggcaatactctcagtctctttgactattccactacctagtacttcaactaaagctcgtttctccggcgacccttttcgattcaaactatatgttttgaatagtcagattttttcgcgaccaagacatctcctctcagagaaacccaccagaagatggaccttctcctgcaaatgccgtaacagaggaagaaatggttacgcgaaattcgatgacgaaggagaagatttcattgttgttaacttctatcggtttgtatcaatcggagatcctgaggctgagattgagaagcacctctcattcttaaaggtccgtcttttacagaatgtgaattgtcaagttgtttgaaaaaccaaaattcatatacatgtagattctgaaatgttctctttggtttaaaatttgaatctttttcaatggtttttcgtattccaggatttgaatatacgaggtcgaatttatctcaatgaacaaggaatcaacgcgcaggttctgttaacatatttagctttggattaatctttcatcaaactatttgaggatgcctgcaaatcaagctaggacaaatcttgtgtgtttacatcttgtaatccttgttttctgcagtacagtggaccatctaaagatgctcttgcatatgttgaatggttgaaaggagatgatagattctcggatctgcttgtccagatgtctcctgctatgaataggcatgcattccctaagttgaagctacagaacaaaccctccttagtgcaggcaagctacatcccacaacaccactttacttatagtgcaatgccttga

SEQ ID NO: 154732 - DNA, 1102 bp, Arabidopsis thaliana landsberg
atgggtctttacctaagaagtggtcgtcaggggactggtaaggtaagttctatcttcgggaaaatgcttagtcttttactggtgaatgctaggttatgtctaaacttggttcaatggtgatttgtgcctcaaagttttgatcttttgtgttttacattagatgatggatatggagaaggcgagtacagttgatttgatgaggcttcttttgagttatgttgtggatgttacttcttctgaggagatcaaacaccataaccaagagattatggagtcatcggttcgaagcctcttgagtcagataacgaagatgagcttgcgtcctcctgagtcgaatgttcatggcacgatgcaaaatcagtactcagatagagatggacaagcagttaggtcctttcagaataacgttgagatgaaacgtggtgactggatttgctcgaggtatgaatttgttggattctcagtagctttttgatataaatctcctgtagcctcttgggtacaattcttctatggaaagatataagtaggcctagatatatggaaagatctgagcttgaacaagtatacttctgactagtacactagtattgtggtcgaaagatcttaatcttagagctaataagtcaataaggtgtaattgtctttgtttcatcatcttgttgtttagggaatctatatatatgatgtgggaatttgttgaaacaggtgcagtggcatgaactttgcgagaaatgtcaaatgcttccagtgtgatgaagcaagaccaaagagacagcttactggtagtgaatgggagtgtcctcagtaagaaactaattttttcttctgctactttaggaataatgcgatgaggaatgatgagtttaacctttcctttctttcttggttgtttcacttatcagatgtgatttctacaattacgggaggaatgtcgcttgcttaagatgtgactgcaagcgacccagggacgcttcactcaattcagccaactctggttattcaaatgaccctgaacttgagagcagactggtcgaaaacgaaaagaaagcacagaggtggtttagtaaagtagcacagggtggttctgatgcgggcagtg

SEQ ID NO: 154733 - DNA, 2318 bp, Arabidopsis thaliana landsberg
ctcaatttcggttccactttcctttcgtttgcaaaaacccatcccatcaaaaataaacaagagggcctaaagaagaatcctaaagactttacgggtcttgtttaggataaaagaaatgcctgccggtggattcgtcgtcggggatggccaaaaggcttatcccggcaaactcactccctttgttctcttcacttgcgttgttgctgccatgggcggtctcatcttcggatacgatatcggaatctccggttagtgtctctctatttttcagattttacatttccaccccaaaagtatctatgtagtcatcaacacacccaaatcagaaataataattgtcgtttttgatacgaaaacattagagtacccaccccatattttcactttagtcatgatgatacacaaggctcaaaattacagaatcaccaacaatattgcaagtctttaaaattacaaaatcgccgcacatgttttaaaacagagtcatgtaaaccctcatccatgtctgataaattttctctgggatatctgttaatgaatttaaaatatttacaggtggtgtgacgtcgatgccgtctttcctcaagcgattcttcccgtcggtgtatcggaaacaacaagaggacgcgtcaacgaaccagtactgtcagtacgatagcccgacgctaacgatgttcacatcgtctctatatctagcggcgctaatttcgtcgctggtggcttccacagtgacaagaaagttcggacggcggctctcgatgcttctcggtggagttctcttctgcgccggagctcttcttaacggtttcgcaactgccgtttggatgctcatcgttggtcgtttgttactcggtttcggtatcggcttcaccaatcaggtcttattttttatctaaatattacattttttacctcatacttttgttttcttcaaaacagacccaaatagctccataactcggtggaaactgttatttgattttgtacccgtaaagtttacagaaaattcaagtccaaccttatactttgctttttacatagaaacccctatggatccgttaattttgtgttgagactgttgtctaattttatgaccttaagttctaaaatattacaaattagcctcaaaactttctaaattgttttcaattttactataatttacagtctgtgccgttgtatctctcggagatggcaccgtataaatacagaggagcattgaacatcggattccagctctcaatcaccattggtatccttgtcgccaacgttttgaacttcttcttctccaaaatcagttggggttggagactcagtctcggcggcgccgtcgttccggcactcatcatcaccgtcggttctcttatcctcccggacacaccaaactccatgatcgagagaggtcaatttaggctagcggaagcgaaactccgtaagattcgtggcgtcgacgacattgatgacgagatcaacgatttgatcatcgccagtgaagcttcgaagctcgttgagcatccatggaggaatctgttgcagaggaagtatagaccacatctaacgatggcgattctgattccggcgtttcagcagcttaccggaatcaatgttataatgttctacgcgccggttctgtttcaaacgattggatttggtagcgacgcggctctgatttcggcggttgtgaccggtttggttaacgttggagccaccgtggtgtcaatctatggcgttgataaatggtgaagacgatttctattccttgaaggaggattccaaatgctaatttctcaggttttgtatttcttcatctataacccgatttctggatttcggttatggtcgataagtaatcaggttattgtgtaaacggtttaggtagctgttgcggcggcgatcggagctaagttcggtgtcgatggaaccccaggcgttttaccaaaatggtacgccattgttgtggttttgttcatatgcatctacgtggcggcgtttgcttggtcgtggggtccactaggatggttagtgccatcggagatttttccgttggaaatccgatcagcggctcagagcataacggtgtcggtgaacatgatcttcacgttcttgattgcacaagtgtttttgatgatgctttgccacttgaagttcgggttgttcatattcttcgcgtttttcgtggtggtgatgtcgattttcgtctatcttttcttaccggagacaagaggagtgccgatcgaggagatgaatcgggtctggagatcacattggtattggtcgaagttcgttgacgcgagaagaatctaacgaaagttgttatc

SEQ ID NO: 154734 - DNA, 688 bp, Arabidopsis thaliana landsberg
  unsure (1)..(688): unsure at all n locations
atgaagctccgacgatgaatcagtaccacatctacgaagctattggacatggcaaatgctcggtaatttagaatctgatttagcattctccgataacttttttctttctttcttaagtgttttgtttagtaatttcttgttcaaatcggttcgcagactgtgtataaaggaaggaagaagaagacgatcgagtattttgcctgcaagagtgtcgataagtcgcggaagaacaaggttcttcaagaggtaatttaatcagcagatctgtcttctcgttgccgaattagtgataatgcttagacactgacaaatttgggaatgataaacttccttttcaggtcaggatccttcactcgctaaatcatccaaacgtactcaagttctatgcttggtaaaacttactagctattatctaacaacaattatttggctccatatatttgtttctaattgtcgtcttcttgttgtggtcccaggtatgaaacttctgctcacatgtggttagttctggaatattgcgttggtggtgatctcaggacatnnnnnnnnnnnnnnnnnnnngtagtttggctatgtcttttgataatatatggtcacaggttttctgaaattcacttgttctgcaggactgtaaactgccagaagaatctatctatggtcttgcttatgatcttgtcatagccatgca

SEQ ID NO: 154735 - DNA, 254 bp, Arabidopsis thaliana landsberg
atgtggttagttactaaatgtgaagaaaaatattttgttttgaaaaagggatgtgatgcatcgatattgttagacaacaccacatcgtttaggacggagaaagatgcgtttgggaacgctaattccgctcgaggtttcgatgtgatcgacaaaatgaaggctgccgtggagaaagcatgtcctaaaactgtttcatgtgctgatttgctcgccatcgcggctcaagaatctgtcgttttggtatgcatctttta

SEQ ID NO: 154736 - DNA, 1073 bp, Arabidopsis thaliana landsberg
  unsure (1)..(1073): unsure at all n locations
tataaattcactatacatttggtgtgccgtttaacattgcttcttactctcttcttacttgcatgctggctcatgtgtgtgatcttgttcctggtgattttatccatgttcttggggatgctcatgtgtacaaaactcacgtgaggcctcttcaagagcaacttctgaatcctccaaaaccctttcctgtaagtatatcgccgacaatgatcatcgaggaatgcatattcacctatccttaccgtgtttttgtttgtcgtcatgggctcactactgcaggtattgaagataaacccggagaagaaacaaatcgattcttttgtggcttctgactttgacctcacaggctatgatnnnnnnnnnnnnnnnnnnnnnnnnnnnnnnnnnnnnnnnnnnnnnnnnnnnnnaggatatgaccaaaaggagactaccgacaaattgattgtgtaaaatttatgattgaatcagatgaatgaccatcaatgtatggactcatattacccttttgtgggtgataacttgccataaacatgtgtggaatcctctagttccacatggttctagagcgatttaggattttatacttcatttacatactttgaactattgaatgagaactttgatggttttggccaatttatgttctttttggttttaagtttgtctacaagatacataaataatctttgtaatgtacacgtgactgttgtcgtgttctaattggtatacaactataactgtaatttcatatgcttgtgtttaaagtaattgattgatgacacaaacaaaaggtgtggatagtgccaagtaactaacttttgtgtgatgcagaaagaatactacactatacacttgtggccttgtgttggacaaaaaccgcaggccttttatatgtgtctaaaagaaaaggctcttttgataataaatgagggtgttgccatattttaattggtatgaaactaaaaatgtaattctctatgcttgtgttagtagttgatgacacaaaagtttatacggatgaagtattctccaactttgtgaagtatgtcacaaaaacaagagctactcgctaa

SEQ ID NO: 154737 - DNA, 555 bp, Arabidopsis thaliana landsberg
ggtttgttgactgtaaattacatcggagaattgtagtgatcggagaaaatgagtggcgtggttgggtttgttggtcttgattctttcagcttcgaattagcttcttcgcttcttcgttctgggtttaaggttcaagcattcgaggtctgttgcttcttcttctttttttttttctttttttttctggggatcggcatgttctggaaatatcatattgatcggggttcaattattcggaattaaacatgtgaaatttgtgggttctgtagtaatttcgaaatactcggtctatctctcgggaattcagctgttttactggtttatttcaatcattcactacacacgtgaaattgatttgattagtagtgtggaatttttgttgattttttttgctttgtctattggaaaaaataaggagggaagctaaattgttgtatctaattcgacagataagtacagaattagtggagaagttcattgaattgggaggacacaaatgtgacagccctgcagatgttgggaaaggtatagcagcatctgagtgtgttgttagtt

SEQ ID NO: 154738 - DNA, 541 bp, Arabidopsis thaliana landsberg
tgtaggtgggcttagaaggtggtacaaccccccgtggttctctgaggttgttccttcaaccccatatgatcccctagtggtgcgcaatacttttgagaaggtaaattctggagtcttatcttccttaagatattctctgacaaatgctgatcttattttggaaatatgaatgtgggcatttctttgaactgcaggctgttataaaacgactaatgactgatgtgccttttggtgtcctcctatctggtggattagattcatcccttgttgcttcagtagcattacgccatctggaaaaatcagaagctgcttgtcagtggggttcaaagttgcacacattttgtatcggtttgaaggtcttgacccaatttctcaaaatgttttcaccaaaagctttctatgctcatcaagatttataattttcatctgttttcttttcagggatccccggatcttaaagctggcagagaagtcgccgactccttaggaactcgccaccacgagttacacttaacagttcaggtaaattttctcttttaca

SEQ ID NO: 154739 - DNA, 2957 bp, Arabidopsis thaliana landsberg
  unsure (1)..(2957): unsure at all n locations
attggtttagcgcgacaagagcatcaacgcaatggtgggaacatcaagctcctccgccggcgaccacacccacaccgtcgtgataaatgccctaactagtcggggctggtgcttcagagacgtcgaatacttgaaatccctggtcactgaaatctcttccttgatcggcggcggcaataaaacaggcgccatcgtggagtcagtggaggcggagctgcttaacatggatattaagttaatcggaggtaaatccctcccggacccgaccgagttacgcaggtgttctcatcttcaaggccccaaagttctccaggtacattgcttcaatcagctaaagtcagtaacaattggcattaggtcttcgctaattcaatgagtcactctcactgatatacttagatttaaactagtttcagaatgctcaattgttgcagttgattcaagctgttgagtgttaatttgttttcttttgtgagcatagataagttatgttagggatgttacaagaagtagcgcagaggaatttgtgggaagttccactggtaaacgagtgctaaaattcgctctgactgacgggaagaccgaaatatccgcgcttgagtactctcatataccaacgattaacaatgatgtcactcctggtactaaggtagttccatttccatatcaatctaattcaaattctcctttactatgtttctgaaagtctcatgcaaatagaatagtttggattaagatctaaatcaatagaaagctagtgcacatatgtgtttgtcatgcatcagagggtgtcttatgcaaatcataaatcattttgtattgttgatattttgtactgtctcgttggcaggtacgtctagaaaataaggctgtgatacgtgatggtctagtatgtttgactccaaaagaggtgactgtcttgggtggttatgtgcaatcactcactgaagaatggcagatgaagaaaaaatacgctagtttggctcgatctcaggaaagcaaagctggtgatggccctcctccatttgaggagttgaggattcgaacaggttcccatcaccgcggtaagcaggattttcttattctcatcattttcattcagttttcttctagtaatttgttgcatatttagttcactttgaaacggttggccaatctttgctaccaaataaaatatctaccattttctatttcatgttgatagtgtacataaatatgcattgacnnnnnnnnnnnnnnnnnccatccaaatgcactttagcataaacatattagtaatttgacccgagctccaaaatcccaatatatccgtttatgtaacctatgacgactcatgtagaggtctgatctatgttttcccttggctttgtgtccaacattggcgctgttgggtctccattgtttcaatacttaaacttgagtgaatgcattttcattgtggtaaaatttatgatctattgaattgttcttcctttgtgtgggcttacataaagtattgtgatggaagtttggccaatgcatcaaaaatttaacttgtcagcatatgtttgttggttgacagattacaacaagacgacttctagaaacaatgtacctattgctgcagaaagctctgtaaaacatgccggtggagaaaaaggtgaaagtagtgaagttgatgggaacaaaagaggcacaaataagaatatacagaggaatcctgcagattctgatccgaaaatatctgtcgaagttgaaaatcaggaaaagcgaagcagttccgatacacgacctaaacaaggtttgccatcatctttttccctcatcgtctcaaaagctcattgtacagcaaagaacattaaggagcgttaaattagtttggcattttcatctggcaattgcgttgaaaccttagatgagatatcagatatctatcgttcatccctatacgccaaataacatctcccatgttgcagtggtggaagctgttcctttacagaaccaagcggctgcgcagatacttcttgagaagatgaaacattctagttcaaatgataggcaataccaaggaagaagaggtaggggtagaggtagaggtagagggagggggagagaagaagaagactctgcagtatttacactagatgagtgggaaaagaggaatactggtgggggggctcttccaacagctaaccatccaagcgacactacccgcgatgaagatcttgcatggcagcttcagaatcagtttgatctggaagactcttatgtgagtcacaacaacctttattatccctatgacccgtcttccatatgctcattattttgattagcacactttttatctgtctttcaatggcttattacttgtgttttgggatcatccatacagaaatggttacaataagagctttgttattgtaattttctgtataggggcaggagatgcctggagccggggcagcggatatcagaatgaatatgtttgattacggaagaacagaagataacttcggccatggaaggggaagaggaggaggaagaggaaggggtagagggcgaggacatagacggggaagaggacgtgtgtagattgtaatgaaatcatccaggcttgtggtaattaaacaaaacttcatcatttccatctgtatatctttatgtatgttttagagtaaacatgtatcttattacatattttagagcattattactcatgtatgctttggttctcacaggtgtggcagctctgaatctgtacatgttggttttagggtgattcagaatttcagattttcgtgagaggttttgaatttgaacataaaggctgctaagtcatttatctttctttgttgctatagtaattctttgcgaaaagatgttgaagttcaccagtagcttcctcaacaactcatctgaagtgagacactcttaaaatgaagtttacattacaacaaagttctatctaaaacaccatt

SEQ ID NO: 154740 - DNA, 1399 bp, Arabidopsis thaliana landsberg
agccaaaacctttattgtcggaagctgactcagactcaaacaatgtctctagcgtcaattatatgctaaattcaccagccgcttagagccaatcatataatctcgattctcttcaacggtcctcaattatcctaaattcagatcataaaaaagctaacttttaatttctttctttctgagaaattggttctcatcgttggaatcgaaaaatgggacgaatcggtttagtagtgactgatctggtattgtcgttcatgtggatatgggcaggagttctggtcaacattttagtccatggagttcttggatttagccggaccgatccttccggtgagatcgttcgttatctcttctctatcatctccatgttcatcttcgcctaccttcaacaagccaccaaaggcgggctttataatcctttgaccgctttggctgctggagtctccggtggcttcagcagtttcatcttctccgtcttcgttcgaatccccgtcgaggtttgtttcgttgactttttttggtttaattgaaattgactcttcgttagagagaggtctcagggtttgtgtaatgttgtaaaatgtcaaattagagaaaaaaaaagagaatttagctgatgggttcttctttgaaaaccagatcattttggttatatgctctattgttttataaagacttcatcttgaagatcttttgctctaatgtgtaatcaaagatgatacttttgtgaaactctggttttgtgttatttcaggtaataggatcaattcttgcggttaagcatatcattcacgtattccctgagattgggaaaggacctaaactaaatgtagcaattcaccacggtgctttaacagaagggatactaacattcttcattgtactgctctcaatgggactaacaagaaaaatcccgggaagtttcttcatgaagacttggatcggtagtcttgctaagttaactcttcatattcttggctctgatcttaccggtggatgcatgaaccctgcagctgtatgtaccaaaaaaaagtcttgtgattgtgatttcagcaaatagcgatctttgttttgaatgtttgcttttgtgtgaatctttgcaggttatgggatgggcttatgcacgcggtgaacatataacgaaagagcatttacttgtgtattggcttggacctgtgaaggctacgttgcttgcagtttggttcttcaaagttgtgtttaagcctctcaccgaagaacaagagaaacctaaggccaaatctgagtgaggaatgaggaatgagctcagctttcatatttaatcctctctggataaatctctttacacaagacacagagggtaggattgtttccagggatattttcgtagattttgtaatgtgttttttttttatggtgc

SEQ ID NO: 154741 - DNA, 333 bp, Arabidopsis thaliana landsberg
taaaacaaaaagcgtttcattcatcagtcacaattttgagcagacataagtacataacaaaacaaggtcggaacataagaacaaagacagaaaccatttaaacagaccgttctctcctcattgctgctttcttgagcagacacacaaagcccggcatttacaatgaacaagaatccaataaagagaccagctctggaccttcccttcacaattcccatattccttgggaaggattgttttttgtaatccgccctggtaaaagccttaatgtcggggtttttaaggtgttgaaaagaagtacagaacaacaaatagacatgaacagcttagcag

SEQ ID NO: 154742 - DNA, 1246 bp, Arabidopsis thaliana landsberg
tatgatttgggcgttttggttcgctaatattggcttttatagggtgataatctggaatcaatggttatgttggataagcatggaaatcggtttttatgttacttaccgaaagaggaaaaagcgacgagtggatggacttctagtcagcaaaatattagtactgtgatgatggaaacacagcaactggtgaagctaaagactcctgatgaattgcttcaaccacttagtgaaaaatgtctttttagggtaagcatttcaaaaatggtttcttttgaccctatttaacaaattcttgaaactaatccctccctggatttgagcagcaagagggttggtggtcttatgagttttgtcatcagaagtatgtgcggcagctacacgttgaggatgaaaacaaggttggcttttattggttctcttttcttactcttctttaatccttcattgaatcacaatctaatggtatggcccttgtatcctgccactgcagattgttcaagagttttttttgggtacttttgacccagaggcaactgcggcgtttaatcaaactgtttctgatgcttcaactgatgcatctcagaggtataagctgaggttttacataacctttatagcagcagaaagatatatctcagctaatctgttatggtggtgtggttgcaggtatcactctcatgtatacaccaatgggaccacctgtgatcttacaggatcacctcgcgaagtcgaggtatgtaatctagtttactacattgcatttgggctcattgaattatgattcattatgctcgaaattgctctatgcaagagaggtttgtatgcgcagaaacaagggcaatggtcacttcaatcactgaattatcaacttgcaagtacgcactgactgttcaatgcccaaccttgtgcaatcatccgtaagcaaaatctcatttacttgaaaaccagttgtcaaagtgaatttactcctgctccattgaaagaccatgtcgtaacggaaacactagtgtaactatatgtttcatcttgaatgctaattaccaaacacgagtcactgctttataagtaagcttatgatccgttagtttgttaaccttgttcttgtggaaattgaaggctgttccagctagagaaaccagtgtcacacacgatccactgcaatgcgatcccagtggaagaagacgcaacaagaaacaaggaagaacaagcagtagacgaatcacctaagatgatagctgattcttga

SEQ ID NO: 154743 - DNA, 1023 bp, Arabidopsis thaliana landsberg
acttgcttgtagctgttttatgatagatgtgtagtgttattacgagaatcactatgaattagggttttagagtgtttaatttctccaatttgaatcatatattgttccagttcttgaattattacttgccttgagattggtattgtgcataatttagtttctgattttgtatagggagtcctgttacaagatgggcatcgattgctttaggtgctggaattggtattggctctgcatattcagattgttctcgtgcttttgattcaccttcttcatcttcagctaatttagcagctcccaagaataatattacagagacttctccagtatctcaggttagttggaatctcttttggtaaatgcatttgtttgggggaagcaatgcattagtttggtacaaaattgatactagggagaagatgttaaactttagaaaggttatcgtttagctgatggatataagaagttaagaaccaacttctttgcagatgattaaaagtaaattgagaaagttaagcatggcatttgttaaactttatagttcactagacatcttgagaattgtcttaagataacatatacatgtttgttagcgtcgtagtgattgctaatgaactacgaattgttaaataacgactcatagagtactagatatctatcctttctttcatagcatagttccctcttgcaacttccattgtttgtagtgttcaatataagcagagtaacacaagtaaaaagcaggaaaaagttataattgcaaatacgagtgatggttagttcatgagtgatcattgtctatgagtactaaagatatatgtcgttcgcctggtttacctctgacgaatcgatcatcttaaacccatgagaatgtaaaagaacataaggttgaatattttctttattcttcttatttttgcaggctgcagacgagtagacaatgtcgataaagtggaagttagtaacacatccaatgatcggggtgttcagaaacagagctattatcatgcaatgctttgttga

SEQ ID NO: 154744 - DNA, 919 bp, Arabidopsis thaliana landsberg
accaaactctcaaagctctcttctcttctctagccttctctctctaacacatgagagaacaaaatcatcagctcacaatctcagccgtcgattatatcgccaccgtcgtagaagaagatggagaacactcaagatttctcgccaccacacatggatgcttctcggccgtcactaggattccctcttggcacagctctgcttcttatcatcattttcagcctctccggaatattctcttgttgttaccattgggacaaacatcgttctctccgccgctctttggccaatggtcgtccctccgccgacatcgagtctaatccttacaaacccaaacccccttttccggtaactctcttctcaaatttataactttaccaaaatatgactttgttcatttcctatttctcatataaactacagctattaaacgagtatccaaaacattaaatttaatatatgtaattttgttttagaaagtatttgtattttttataaataaatagtttccaactatcaaaaaatataattttatctatagaaatttgagatgctaaatctaaacattttaagaatttgagtcgctaaataaggtttttttatctctctgtaaatatgtcacgaaagcaaattttatggaaaacaataggagataacatttgtgttactaaaatttgaagtaaaaataagggatttttttttggaatgagtaactaagaaatatggttactatgaacaggaaatgaagaaaccgcagaatctgagcgtaccggtgttaatgccaggagataatacacccaaattcatagcattgccgtgtccgtgtgcaccacctcgacctgaaaaactcaccgtagatgtccaaactccgccgcaatcaccgcctgttaagccggcgcgttttcctgttcctttgtattag

SEQ ID NO: 154745 - DNA, 1174 bp, Arabidopsis thaliana landsberg
atggcgaccacaacatcaacccaagccatagttttcgcaatcgcccttttcttggtcgccatccaagccgttcatgcagactattaccggcaccgcccacagcgacctataaccccgagccctcctccctacgttgcaaagccccagccgctcccaactcccagccccaaacctatcctttatcagcctcctcccacataccaaccacccacgggctcgttcgaacaacaatttcttgatccacataatactgtccgaggcggtctaggtactttcatatattaactataaatagaattaagacccgatgtggtcatagttataagactatgcatgaccataaacaacataaacggtcacttatgatatatctctgtaacttttgttgtcatactcatatatagacctaaacataagaaactacaagataaaaacgattaggatatatatagaatattaacaaatatatatccgtattttgatgttttctagatacaaagaaattaaaccagatatattttgttttgtttgagaccttatatattacatacatgttctaaggaaatggactacactaaagaaacgaacaattaaataacatttgttaacataattgtgatatcaaattaaattattagtaatgttgtatattgatatgaaaattttcattcccaacaggtttgcctccactggtgtgggacgtaaagatcgcaagctatgcaacatggtgggctaaccagaggagatacgactgctccttaacccactcgaccggcccatacggtgagaacttgttctggggaagtggctcagactttacatcgactttcgcagtggagtcatggactgtggaggctaagtcctacaaccacatgaccaacacgtgtgaaggagatggtatgtgtggtcactacactcagatcgtgtggcgtgaaaccaggcgcctaggttgcgctagagttgtctgcgagaacggcgcaggagttttcatcacttgcaactacgacccttcgggtaactacgttggggagaagccttactaactttgtctaacacgttagttgttttaattaacgttggtgatttttaatctatgtttttattcttcttgacttttgtttctttaaaacttatcatcctatggattttaagtgatggtgttatgaacattttg

SEQ ID NO: 154746 - DNA, 529 bp, Arabidopsis thaliana landsberg
cactatctatcctccataatatagtattcctcttttctctcctacgttctctatagtaatggcttcgttacttctcacatcttccagtatgataaccactagctgtccctccatggttctccggtcagggttacccatcggatcttcttttccctctcttcgcctgacccgtccatacgacaaggcgactctgttcgtctcatgttgctccgctgagtccaaaaaggtggcaactagtgctactgatctcaaacctatcgtggaacggaggccggagtacattccgaacaagcttccccacaagaactatgtgcgtgtattagacacaacgcttcgtgacggtgaacaatctcccggtgcagcacttactccaccgcagaagttagagattgccaggcagctagctaaactccgagtagacatcatggaagttggttttccggtgtcgtctgaggaagaattcgaagctattaaaaccatcgccaagaccgtggggaacgaggtaattactttatttccctcacttcac

SEQ ID NO: 154747 - DNA, 440 bp, Arabidopsis thaliana landsberg
aggaccaacatctacgtgaatcctcaggttgcaccacctttgatcggtggctatggatatggttacggaggttacggatggtcaccgttttccttttttgcccctggtcctgcggtggcagtaggtgttggcggtggctttgacctcctacttctcttcatgttttttggagccgcttcagctgtcgctagaaactttttccgatcaagaaatgatgaagatgacgaagacgactattagaggagaaaacggagagaggcttatgtaacaatagtcatacatacgattttgtgtaaaaaaatatgatggaagaagacggatatatgtggaaatcttgaaataagtaactaaagacccatcttaaagttaatagaggcaatttgaaaacacctccaaatactaaatttatatacaaagggatcgacgttactagagatgca

SEQ ID NO: 154748 - DNA, 216 bp, Arabidopsis thaliana landsberg
cgcagaagcaagagaaagcctttacgaggaaatgggttgtttcgatcccaacactccagcagaagttacggtggagagtagcttctctcaagccgaaccaccaccaccaccaccgcaagttctgggtgccggaagcacaagcaacagcaactgcagtgttgaggtagaagagctctctgaattccatctcagcccacaagattgtcctcaagcttc

SEQ ID NO: 154749 - DNA, 2454 bp, Arabidopsis thaliana landsberg
cctttatccaatctctcctccatagttctgaagcttcgagagagaggggccagaaggtcatccagaactgaggttctgcagacaatagaaagcagtaagcaagcatgttaccaaagttcgatccaacaaaccaaaaagcttgtctgtctcgtcttgaggatttgaccaccaacgtaaagcagattcaagattccgtattggaagcaatactttcacgtaatgctcaaactgagtatcttagaggtttacttaaagataagcagaacttcaagaaaaacgtacccgttgtgacctacgaagatattaggtcttatatcgaccgtattgctaatggagagccgtctgatctcatctgtgatcaacccatcagtgtactcttgaccaggtaccttcaaaacaatttcaaaggttgcatgttaaagttaaatgtaagatcttgacttgaagttcagaagaaacttgaaatctaggctcttacataacctaatattcgacccatttggttcaaaacttgttgacacatgagtttgtttatacatgatagtgtagattaaattaaagtataatttattataaaatctgaaaagccttaaggaagccattgtatttgcagctcgggtacttcaggaggagttccaaagttgattcctttgacaacagaggatttggaacagaggatttcgttttcttctctctatgcacctctactctacaagtaaagagttttaaaactccgagttttgtctctttgctgataccataaagagtaagtagtaaaaccccgagtccgttgttgttactgtttgcaggcacatcgatgggcttagcgaaggaaaatctctcatattttattttgtgacccgagagagcaagactgccaatgggttgatggtcaggactatggttactagttttttgaaaagcattaaacagaccaactcatttctttggttagtcaataaaacccttacttgcacgttacattacataaattcagtctttccacaagtatttaaccaaagtgcctaacaaacaagccccttggtactactagtggttctttactatgtttgttctattacttgcagggatagattgtacgtaagcccgcatgcgatttctacttgtgaagacactactcagagcatgtactgtcaattgctttgtgggcttctacaacgagataatgtagctcgcctcggtgcaccctttgcttctgtcttcatcagagtaatcaagtacttggaaggtcattggcaagagttatgctcaaacataaggactggccgtctcagtgactggatcacagaccctcaatgtgtctcagggattagtaagttcctcaccgctccaaatccggacctagcgagccttatcgagcaagaatgcagtaaaacctcatgggaggcaatagtgaagagactttggccaaaagcaaaatgcgtcgaagccgtcgttacaggctccatggcacagtacattccgttgctggaattctatggcggtggtcttccgttgatttcatcgtggtatggcagctctgaatgtttcatgggtgtcaatgttaatcctctgtgcaagcctagcgatgtgtcgtacaccatcatcccatctatggcgtacttcgagttcttagaggtcaagaaagaccaacaagaagctggtcttgatcccatagagaatcctgtggtcgtcgatcttgtcgatgttaaaatcggtcatgattatgaacctgttgtcacaacgtttgctggtaagtgttttttcttgtttactctctcaatttcaaaactaaatgacatgttaataattttcttaatgtgtatcaaaatgtctctctcaagatctccatatggtttgacaggtttgtataggtaccgtttaggggacgttttaagagtgactggtttctacaacaatgcgccacagtttcatttcgtgggaagacagaaagttgttctgagcatcgacatggacaagacctacgacgaagacctccttaaggcagtgacaaacgcaaagctcctgctcgagccacatgacctgatgctaatggagttcactagccgtgtggattcgtcctcgtttgtaggacactatgtactctattgggaactcgggagcaaagtcaaggacgccaagtttgaacctaaccgcgatgttatggaagaatgctgcttcactgttgaggagtctctcgatgctgtatacagaaaaggacgaaagaatgataagaacattggaccacttgagattaaggttgttaagcctggcgcttttgacgagctcatgaacttctttctgtctagaggctcttctgtgagtcagtacaagacaccgaggtcggtgacgaatgaagaagccttgaagatattggaggccaacgttatttccgagtttcttagccggaaaattccatcttgggagttacatgagttacactccggcagataa

SEQ ID NO: 154750 - DNA, 1442 bp, Arabidopsis thaliana landsberg
attgaaactttgattcctaacttcttggaatgattctttttgagctagatttagatctgtatgattgatatgatgggtttggttagcttatgagtaaacagcaaatgggtgatgaggcagagatcaaggaacatttaaagccacatgcttcatctgaatcactggacaagaaacatactgtgaaagggaagaggttatgacagaaagtcaagtttcaatcggtggagtttcattcattgactgcttatttaagagacaatgagtacatcattggtcattaccgatccgcatggccgatcaaacagattcttatcagcatctttaccattcataatgagactttgaatgtttggacgtaagtgttgaatcatgtttcttgatgtatccttgtttaaagttcaagagccttgagtgtgtttgtgtgtgtgtgttctttgggatttgcaggcacttgattgggtttttcctgtttttggcgctcactatatacactgcaacgaaagtaccgagtgtcgtggatcttcattcgcttcaacaccgtttacccgatttgttgaggaaaacagatctccacaaacttcattctgagctcatggctcgccttccttctagtccatctagttggcatgtgatggaccttctttataactgtttgcctgaaagattttctcatggcaactacactgacatgtgtgttctggtaagaaaagactcaatctttctctctattcctgcagattactgtttcaaaatgtggccaagttcatatctttgtaattgcattgcagcattctgtgagggaagatcttgcaaacttgatagctcctttgatcttcaggccaattactcgatggccgttttatgcatttctaggtggtgctatgttctgtctattagcaagcagcacgtgccacctcctctcatgtcactccgagcgagtctcctacataatgcttaggcttgattacgccggcatcgcagctctaatagcgacttccttctaccctccggtttattactccttcatgtgtgatcctttcttctgcaacctctacttaggattcataaccatcttaggaatcgccactgtgcttgtttctctcctcccggttttccaaagcccggagtttcgggtggtgagggcgtctctgttctttggaatgggattctctggcttagctccgattcttcacaagctgataatcttttgggaccaacctgaagcccttcacatgacaggttatgagattttgatgggtttgctttatgggttaggagctttgctttatgcaactaggatcccagagagatggatgccgggtaaattcgatatagcaggacatagccatcagttgtttcatgttctggttgttgctggtgcgttaacgcactatagagctgggctagtgtatcttaagtggagagatattgaaggatgttga

SEQ ID NO: 154751 - DNA, 1918 bp, Arabidopsis thaliana landsberg
atggcggttcgtctcgcgaggtcattggctgcgtcaccctcgtcacgtccatcgtgtttatccctcggaaatcgcttctcagcctcagatatcacttcatctgcgattaacggcggcgagttttctgatttcgttagagctttcgccttttattcgtcttcgtcctcttggtggtcgtctcccgatgatttgacggcgtcatcgaagaggaaagagaagaagactacagagcgtttctctgccgtgattgacgcagtccatgaccggaaactcccgccggagctacgtgggcggcgcgatttcgtaaggtatagtctctttccatctttctgtgctcacattactgtacgtattaggactttggaatcgatatgttatatagttagggttcataggtttcgttgagaatttaatgaaaattcaaatctctggacacgtctcttaccttgatttagcgttttcttcttcacacgtcaatttcaaggtccaagcgcaattcaaattcactgtttccatggttttgcggtggagtttttgcaaggcaattcagttcagagactaagcgagttaacaccaaagtcaatttctctctgtctgatgatgattcagatgaggaaactgaaactccggttactgaagattcaaagaagcaggagcctccacctcctccgtatgaccctttcagcaagaaaccggcgattgaggaaccagaggatcctaagaatctccaagaaatattccacaagatgagaacagagggttttactaatgaagctgtgaaaatgtttgatgcgttgtctaaagatggccgcacacatgaggcgttagagctcttctctcagattaaagataagaatcgaatgccagacgtggtggctcatactgctattgttgaggcctatgctaatgcaggccaggccaaggagactctcaaggttttcatgcgtatgctcgccagtggtgtttcgcctaatgcctatacgtattcagttttgatcaaagggcttgcagcggatggtaaaacacataaggatgcgaagaagtacttgttggaaatgatgggaaatggcatgagccctaatgctgccacttacactgcagtgtttgaagcttttgtaagagagggaaaagaagaatcagctagagaattgttgcaagaaatgaagggaaagggttttgtgcctgatgagaaagctgtgagagaggctctcgaatataaaagaggccaagtctttaggactgtcatcaaccttttatttgataagtagttgtagtgtttggtgatctttcaataggtagaacagctggcctttatgcgatgcgtctgagtatgttgctgagtcttttgttttttagatgttgacacaattgcgcagtagctttatgtttttccgtggaatatatgacattttgttgtcagagaagcttagcttgttgcttttttcttgcattgtggttttattaatctcccagatgagattcttcttcttgtgaaatatgttattgatttgacctgcttgtaacggatactaacatgggatgatgttgcaggtcagagactgatataatcaacgtggtcgagcaaaggatatggcattcaatggaagaaggccactttgagaacttacccggtaaaggcaaacccttgaacctccatacaaatcctcacgcagacccagcggaggatacattgtatcggattcttaacaagaacgggtttgctcccgaatgggtggagctcaacaaagagataagaaacaaagcaaaagaatggagagtttcactgaagaaagcatggacaatgaaactcgaggaagaccaatcgggatgggaagagagataagatttgctgaaaaacgaattgaaaaaaatcaataacatggcaagtattcaactacaaatcaagattctgtggcga

SEQ ID NO: 154752 - DNA, 449 bp, Arabidopsis thaliana landsberg
attaatcacttcatttccctgttaacaggttggtgtcagtattgctgctcgcaaatacgacttttgtgcttacacgccttttgagacgtcagatattttggatcttcggcccgtaattaagcactccgtccctgtatgctctgaggctaaagatcttgttgagatggggaaggtccaactggctgaggtaccttttgttatttcacactagctaacttttgcttgctaatttttgccaatatgtttgtactggataagatcaggagaaccttattgtgatatggattggcattcaactcttcaataagcatcttgttttagtttgcgaaagttgcattatgaatggttcttggtttagatttttatgtatgaaaatgattaaacttttgttgggcatgcttagtgaatcctacacgttcttttcagaggcattttcgatactttaacag

SEQ ID NO: 154753 - DNA, 1282 bp, Arabidopsis thaliana landsberg
tctctctctctgtctgtttcttcgacgatctctttcgcaccgctcaatcatcctcccgattccgtaagtttcggttttgaatcgtttcttctcctctgccactatcgtcttcttctcggttttctatatcgttttagtttctttcaccgtcgtttcttttctctcccacgctcatccaattttcttcccctaaagaaccggaatttaggtcagttatcatcctcgaagctttctttctttcttttggttctaattatatatagacgaactagtaaagtttcgtttttgcagtgtctgtgtgtgatggagtccagtagagtagtagtgggtggtgggctgcccttggcgaataggaggaactctagctttgccaaacccaaaatccaacaagggacttttctacctctatctcggatcaatgatgtctctgccccccaaaaatgctcccttcacaccaatccaaaccccatgttcccttttgttactcgccgcaagagccagactaaccctgattgcggtgtcgtcaagttgggggaagaagatgactcttcctcttcactggacaaactcccgtaaggctattgaggtgctgcgttatccctttgttactcttagggccatgttgcttttgcgttttcttgcctatgtaatgctttggtctccgttcttgctagggaggttaatggggttcacactggtgtagcacgtcctgtcgatatcaaacgagaactcgtgatgctctctcttccagccattgctggccaagctattgatcctttgacgctgctaatggagactgcatacatcggaaggctcggtattttcctttgcttctctagagttatttcaccatggaagatgttgttttgagagttctaaggactccccttctttccaatatgcaggatctgtagagttgggttcagctggcgtttccatggccattttcaataccatatcaaagctcttcaacattccgctcctcagcgttgccacttctttcgtcgctgaagatattgcaaagattgccgctcaagatttagcctcaggtatacgttgataatagcttttttctcttcccaatttttcccagccttatatctctttgaatggatttacagaagatagtcagagtgacataccttctcaaggtttaccagaaaggaaacagttatcttcagtgtcaacagcgctagtgttagccattggaattggcatcttcgaggcactggcattgtctttggcatctggaccctttctaaggttaatgggtatacaatct

SEQ ID NO: 154754 - DNA, 787 bp, Arabidopsis thaliana landsberg
atggcgaagcagcaagaagcagagctcatcttcatcccatttccaatccccggacacattctcgccacaatcgaactcgcgaaacgtctcatcagtcaccaacctagtcggatccacaccatcaccatcctccattggagcttaccttttcttcctcaatctgacactatcgccttcctcaaatccctaatcgaaacagagtctcgtatccgtctcattaccttacccgatgtccaaaaccctccaccaatggagctattcgtgaaagcttccgaatcttacattcttgaatacgtcaagaaaatggttcctttggttagaaacgctctctccactctcttgtcttctcgtgatgaatcggattcagttcatgtcgccggattagttcttgatttcttctgtgtccctttgatcgatgtcggaaacgagtttaatctcccttcttacatcttcttgacgtgtagcgcaagtttcttgggtatgatgaagtatcttctggagagaaaccgcgaaaccaaaccggaacttaaccggagttctgacgaggaaacaatatcagttcctggctttgttaactccgttccggttaaagttttgccaccgggtttgttcacgactgagtcttacgaagcttgggtcgaaatggcggaaaggttccctgaagccaagggtattttggttaattcatttgaatctctagaacgtaacgcttttgattatttcgatcgtcgtccggataattacccacccgaaaacccaaacgggccaattctaagctccaacgatc

SEQ ID NO: 154755 - DNA, 569 bp, Arabidopsis thaliana landsberg
cggatgttgtatccacttatgattatatttctctttggcacaaggatcttggagtaaataatttcaatccagaaaggtttaatcttctcactctttcaactaaaaggaatcatgagtgatagagcactaagtgacactattttttctgcagatatttgaagatagttaaatcagtgggactggagatatctcaaccggctttggaccacaactcgactgaaatacaccataaaatcactctccgctctaaaacaaagaaatttcataggttaaattttgttcattaggaactttttttggttttcaatgcatttggtactaatttacatcatgatgcctaaaaacacaggagagtttacatcaatagaggccataaaagatgttctaatactagctcagatcctccttgcaccgggtaatggtttggtcggcgatgaattaatttctttgaattgttggctatatatattgatacattttgttctgttttctctgtttgtagatttgttgaaggaatggctccggtgttttcgaaagctgcttggctttgcacttggaatcttatacag

SEQ ID NO: 154756 - DNA, 3050 bp, Arabidopsis thaliana landsberg
  unsure (1)..(3050): unsure at all n locations
acctcgatttcaattgaaggtgtgctgttttctacttgtatcagacaagtggggaagtacgttacatcgtgtttaaagattttaagaatcctctaatctacgaagagaaggatcttgatattgcttctgtagttaaaggtatgcctactttattatcatatattcactacaaatagtctctacaatgtcatacttattgttccatgttcaacttaagagaaaacagaaattcattatgctacttttagcttgtgaatattcgtcgcttcagccttctatctcgtgatttgtgtgcttaatacatattctggtttctttttcttgcgctttgctgcagctcttgacagcctcctcactcaagatactgagaaatccaagtctgtcagacttttcacgaacacttggtcaaaacaagcagaggctatcaaggaatcacatttcccttctttctttcaggatttgttactttactttccaggtatgtctctttaattttctttcttttttggtctttttgaaatttatcaggaattttcatttttgtctttcacgctactctctaatattttgctcacaaaaatttggaataaaattttgtttttttatttaacaattgacattctctgtgacaggttgtatctctgcagacgaagttggagaccgtctgtttctttctgataccaaccatcatcgtattattattttcgaaaacagtgggaagattgtagacagtgtaagtgaactgaatcacatttggggaattataatctttattgactttcttttctgaaatcccttagaagggcattcgtagagagaaaagtgcatttgaagctcattgtttaacaaccctaaagttcaaaacaatgtttttatttcagattggttgtttcccaggttttgaggatggagattttgaatctgcaaagatgttacgtcctacagggaccctttacgacgaagcggaggattgtctttacattgtagattctgaggtatgactcctagaagaagatacacaattatgattactggttgtgccattgaatgttttcatgttaagattgtttttcctctttgtttccttccttttccccattctttgggctaagaatcacgccattagaagagcaaatataaatagccgggtcctggaaacagtatatccaaaggttattaagaaaactggtggcttatggtcttggataatggagaaaatgggtcttggaaaagatgacgatacaacagttgatgctgataccaaatcagaagaatttgatgcacgctctcttttgtttccatggcatatactgaagcgtgacgatgagagtcttttagtcattaacaaaaggtaaaaaaactatttaaagggattgcttctttatagtagtgatagctcggtctctttttccttcttttgctgcccctttaagttcgtaaccaaataggtttctcatatctttcagcttttcgaagttatggataataaatttagcttcaggagagatcgaagaagttgtggaaggttacatatgaattgagatcttcttttaccgttttgtattatttcgtttgttgactcattgcatctaacagatatttatcaacattttaagggttttcgaagataattgagatctgcggtcaatcaatcacagagaagctatcagtgttggaacatatgcctnnnnnnnnnnnnnnnnnnnnnactgcggctatcgcctcatttaaggagcagccaagtgcttcccttttgtcttcttttactaaacttggagacgacattgtcatgacagatataggtaaacgacatctacgcaactttgtttacatctttttcatctctatgcatcaactaactcattttgcctttgtacgttaagcttgtcagagggtgttgaagctaaatagagattctggagcatgctctagcattcaattctcaaacagtgggatccttgggttgccctattggttgttcattccactggagagagtttttaatctgttagtgatttctcattcattatcttatccattaacaacacttctcttgttctgaaactttctaattgatgttgtgttactttggctaaattataacagagctaatggagttcaggaagcacatctcagtcatactcaggaactccggttattgccaggtgcgattcgctatacagaccctaatttttttgctcatttactcatttgcttatgctagtcttgatgttagcagttcatcaccccagtcccaattagctgcatcatgaagatggtttaacattggttccagccggaattggtttgatttaattgctactttttcatttaacaggtaaaattagcatacggttgaacatagagattcctccatgcacggagcttgttgaaccgatacaagaaagctgcatatggcgacagacaagaggcgcaatcagtgaattctcgagtgctggaagtgcagttgaaccttcagaaaaggttatttaagagaattgcattcccgaattgtatggtttaaatccaggtagctcagaaattttgttttcataacttgcaggttggagtttcacaacaatggtatgatgaattagacagcctcgccaaagaaatagccaaccctgaagcagctgaggaagaggaagaagaagatgttaacccctctgaggttgacagagaagaagatggacgtatccacattgattgtcctgtcaaaacaagtcctggctcaagtgaggtacgcctaaatctcctctcaagtctcttttatgtacagaagccaaactttactattagaaaaaagtataactttgtcgactccggtttgtgcagcttattgtttatgcagctttgtatttaagactagcgagaaacgaagagacagaaagtgcgacccaggaagaactggcgagaaaaatagcaaagattttaaagccagtacggaacattacaactatgaaggaagatttgtttgtgaatttgttgtccaagtcaaagagagaattgagagacattgtcttcataaagccgatgcatgtgcggataag

SEQ ID NO: 154757 - DNA, 445 bp, Arabidopsis thaliana landsberg
  unsure (1)..(445): unsure at all n locations
ctgaagaatgttttcttggcttgacactagctgtgaannnnnnnnnnnnnnnnnnnnnnnnnnnnnnnnnnnnnnnnnnnnnnnnnnnnnnnnnnnnnnnnnnnnnnnnnnnnnnnnntgagcatggtttcaaatattgtctgcagaatatctccgcaatgtatctcaggacatgagcgaggtaagctcatacgcaatgtacgtcacttatatagcattgttaaacttgtacatgagttgtaataaatctgttgtttacacaggcagaattgtctctattgccccggggtcaataatgatcgagaaccatcaggtgatgaacacttgagcatatgtcgataaactgcagatttctgttatatgtctctgtgaaaggttgttgaatatctctctgtgaacatttacagttttctggtctctgctctctcctgatgaaaacggcctc

SEQ ID NO: 154758 - DNA, 1475 bp, Arabidopsis thaliana landsberg
acctattctttggcattagggcttttttatcggtccattgatttttcctttttagtagcttctgatccttcgatttccatggcggatgggtactggaaccagcagcgacagcaacatcatcctcctggtggtcctatgaaacgtccccgttccgatttcggtaagctcctgagtcctttcacgtttcctcaacacatagatagttatgctcctagtttgcttgaaataaacaatgcttgtcgtcttgtagaagctccatcatcaacaatgactatagggcacggtggtggttattatccgccagatgaggatctcgatgttcccgatactagaactatcggttccgcttacgatcgctatctccagagcgtggtaccattctttcttgcaagtttttcagttcattcttctttttttattgacctgaaaagtttttttttttttggtgaagcaatcaggagaaggtggttctgtttccatgggaagatcaggaggagcaggaggaggaggaggaggtaacgttcaaaccatagatgattttatgttgagacgtggtggagttctccctttagaccatggtccaaatggtcacaccattggttttgatcccccagaacctgttggtaggcgtaacctaccttcagatgcatccaacactttatatgttgaaggacttccttctaattgctctaggagggaagtagctcgtatcctattttatgacacattacaagtttttttcttttacggaaactatttctctccactttccttaaccgatgtctagatatatttcgaccttttgtaggatacagagaagtgagacttgtgaccaaagactccaaacatgtaagattttccctgcttcaaagtttggatattactgaaaatcgcttgttatagaaagtaattactttgataaacctgctaatgggttcatatttatggggcaatgcagcggaacggagatcctattgttctttgctttgttgattttacaaaccctgcttgtgctgcgactgctctgagcgccttacaaggtaaatgataagcatctccaaatatcttgccactttgtttatatttttcctggcttttgattcacgtgcattctaagcttgtttacatagtttggatctatttttttctgttggattgtctttcgactaatacatactggtatacattgagtttggttttggaaaagtgcaaccttacacactatatgtgctgtagcgtgaacttgaagtcgcaaagccataaaaccattgccctaatctctaaaccataaactccatccatcatctagacacctatgctcggcatctgatgttctttaaaaactaaaacctttgacaggctatcgaatggacgaaaacgagtctgattccaagttcctgcggctccagttttctaggaaaccaggttcaagaccaggacaaagaggaagaaggtgatgactcagggacattgtg

SEQ ID NO: 154759 - DNA, 983 bp, Arabidopsis thaliana landsberg
agtagctactcgagcaccggcgagactgttttcaacgaggcagtccaagctttacagagaaggtgatgagatcacggaagacactgtgttgttcgaaggatgtgattataatcactggcttatcactatggatttctccaaagaggaaactactaagtctccagaagaaatggtctctgcttatgaagaaacttgcgcccaaggacttggcatcaggttagtagatgaatttttgtcactgcttagattcgttgcttttggctaaattgtccaaaaatcattcagtaagttacttaaatgtgagaactttaccattgctagggttccattcactgttatatagctctgctttgatttttgtgtatcttcttctggtattgatattggttaagacgattatattgattcatttttggtgtttatggttgagtcagcgtggaagaggctaagcaaaggatgtatgcttgtagcacaactacttaccaaggatttcaagcaatcatgactgaacaagaatcagaaaagttcaagggtatatagttcgaatcatttatgtttgttttcttttgaattcaacttttttcaccagatattgactctgttattggtatatgtaaacagatctacccggagtggttttcatcttgccagattcctacattgatccccagaacaaagagtatggaggtgagctggtttttcttacaaactggtcttattttggatatttgttgttgggactctatcaacaaaattatgtttcttgttttcaggagataaatacgagaatggagtgataacacacaggccaccaccgattcagagtggcagagcaagacctcgtcctagatttgaccgttcaggaggaggaagtggtggtccccaaaacttccaaagaaacacacagtatggtcagcaaccaccaatgcaaggtggtggagggagctatggtcctcaacagggctatgccactccaggacaag

SEQ ID NO: 154760 - DNA, 3122 bp, Arabidopsis thaliana landsberg
aatttcaaatttcatttctgaggcaatcgcataattcccaccggcgatcggagatgagcagcgcgagactgtgctctcttgtggcggagctaggttacgaaggcgccggaaaattggatcccgatagcttcgaatggccgtttcagtacgacgatgctcgacctatcctcgactggatctgttcctctcttcgtccttccaatgtcctctctctcgccgaactatcactgtatgttctcatttccgctctcattctcagattcacatcgaattttctcacttctcaatgttgtttcgtttctggattcggttgaatttgtcttggttttggtgaattaggttcgtattccatattccagtttgatgaagcttgaattgttgcaattagagcaatccttgtggttttactttcgattgttgttgctagctagcttattttctcattttggttttgtggaaacatattagcaatatagttagttcattaaccagtggttaatggattgttctcttatttccggatccagatatgagcaatttcaactagatgggaaactcttagaggtaattcttttggccatcctgcttgtgctttttttcttaaaatctttgagagttaatcatatctagaagcatccgtcttaagatgttacttcattgccttcttatggcgcattttgtccttttcagggcgatgatctagaccaggcctatgatagcatatcagcattttcttccaggagaaataaccaggaggccgtttttggagcagaagaaagcattaaagaagtaaggttagaccttcatatcacatatgcgaatctgtactttctgtttcatgcctattataaggctcttgaaacaagtataactgtccagttttttagtgtggattatcatgtgtgcactaagtttattgaccgatggtgcactgttaaatgtttttttttcctcgtgagaagtttattgaccgatggtgcgctgataaatgtttttttttcctcgtgagaagttggttaattttgttgagaaatttggtttcatgtcaattaccttgttaggtcatgcgtttacataagttaagtacttataggtttctttgaccttggtgttttctataaatgtattttgttattccctttgagaaatttccagggactgtgtttcacatcacttggatgttcttgtattactagattttgctgatgtagtcgtgtataccaatcattacatggcacccactgacagtttcttttaattgacagagatgcaactttggcgcataaggctgaagccttagagttgcagaggcagctaaggcggttacaaactcaatatgatttactcactggccaatcttcagctcttattcaagggagacgtgctcgagttgctgcaacttctgctgtctctggacagataacagctatagaagacagtttatctgctcgaaatttgcaggtttgatacatgtcctacacaattgtaaagtggaatgcaattattttggtttttgataagtttgtgatgtttcctttttgtattttactgtgatttagatgaatggagttctaggaagactggcttccacttctcaagagctggcgcattatcattctggcgaaggtgtccttcgtatcccttctcaatcttttggtttaactttttcatatctggtgaactattgtaaatctgttttgaagctgaaatttttaataggcttcaatgcaatataccgtcaaattagcagcatttgggggaggaactttagctctggtagttatttgaaagattgataagttagatcgaggttatatttttagcaacttttggatttcaattttatggaacttttctataagttgtatcttctgtagacatttcttttggatgatagacgaaaaagtggttttcacagctatgtcagcaaaatctaactgattatttcatggagtatgtatcatagtaaattgtcatcaaatcttttagctaactttattggctgtttcatatgtgcagaggatggaatatacttagcatactccgatttccatgcctacttggctggagattcagcctgcacaaaggagctaaatcagtggtttgctaagcagctagacacagtaagtgaatgacattagtggggaatacattgctgataatttcaatttctcttcatcgtatagaaaagtctagcaacttgagatcttattcctaataccttgtgagatatgttgtagtttgccacttttctgagaatggagagtatcaactggtattcatcttgcactctttgtaatgtaattatctgctgtcatatcaggggccataccgtttagttgcagaggaaggaaaatcgaaatgctcatgggtcagtcttgatgatacatctaacatgttgcgaggtaactttgctacagtttaattttgtatagcagatatatccctgtgcagttatgtaacttccctctgtataatataattcctatgttttgaagctattttgcatctataacttgtctatttacaatgcagcagatttggaaaagtcacagcatcaacgtgtagctgaactccaacggcttcggtccatgtatgtattatgtagtactccggtgatataactttcagctttcactttgaccattcctctggatttggataaagtcttttagttgagaaaaattgtactcagaaatatagaattgagggcattcagtatatatttagggcatagaaaattatggacttttcacgcatacaagttttctcactctccaaggcatattcctggttactcacagcttcggaacaagtgagagacaatggattgaagcccaggtggagaatgctaagcaacaagctattcttttgacactcaaatctcaagtaacatcagtggaagctcatattcattttgatctacattctctgaggtaaataagaacatgcagatctagtcgaacatcaaaggacgagacattgataaaatcatcattaagtctttaagttttcattctgtatactggggatcatgttattatctgtgcaggagaaaacatgcagatctagtcgaagaaatctctaccctttatcagaaagaagaaaaactcttatctgag

SEQ ID NO: 154761 - DNA, 1026 bp, Arabidopsis thaliana landsberg
tctgcgaatccaaataaccatcctcatcatcatcagctacaagaaaatggaagtttagttagtggccaccaccaagtactctctcaccacttcccacaaaaccctaaccctaaccaccaccatgttgagacagcagccgccaccaccgttgatccgagcagtctcaatggccaggcggctgagagagcgaggctagctaagaactctcagccgccagagggagccctaaagtgtcctcgatgtgactcagccaataccaagttctgttactacaacaactacaacttctctcagcctcgtcacttctgcaaagcttgtcgtcgttactggactcacggtggtactctccgtgacgttcctgtcggcggtggtactcgtaaaagcgcgaaacgttctcgcacttgctccaactcgtcttcctcctctgtttctggtgtcgtctctaactctaacggtgttccgttacaaacgacgcctgttctcttccctcagtcgtccatctctaacggcgttactcacacagtaactgaaagcgacggaaagggaagtgctttatctctctgtggaagtttcacctccactctgttgaaccataacgctgctgcgacggctacacatggatccggttcggttattggtatcggaggttttggaatcggactcgggtcgggttttgatgacgtcagctttggactcggaagagcgatgtggccgttttcaactgttggtactgcgacgacgacgaatgttgggagtaacggtggtcatcacgctgttccaatgccagccacgtggcagttcgagggtttagagagcaacgctggtggtggatttgtctccggtgagtactttgcgtggccggatctttccatcacgactccgggaaactcactcaaatgagaaaagcttctgtcttcatcaaagggcttcaaagtctcttcctttttttagtctctataagtgatgatgatctcttagttgtgtcttgtcaatttagaaacttgtcttcggaaactagaaaacaga

SEQ ID NO: 154762 - DNA, 550 bp, Arabidopsis thaliana landsberg
atgataacgaaaataaggtcttggagtatcaacaatgaaagttgcacaagagcgtacaaggtagatttttctctcttgaaagccaatagttcaacattatttacgtgcttaatttagcaattagatacatatatgttcacttttgtctttccacagggtggttccacccagataaggttccaaccacgtgttggaaagtatcttgcggcttcatcagcaaatcttgtcaatgtactagatgtagaaacacaagctattcgacactctttacaggtttagtgttcaaacttttcaaacacgatgtttctgatagatacttattttgtaatatgtaccagcaaaagagagcaactaaaaaaatagcaaaagagagcaactaaaaaaacggttgactaattcgtttgtgtaggggcatgctaatccgataaactcggtttgctgggatccctctggtgacttcctggcatcggttagtgaagatatggtaaaagtatggacgctggggacaggtagtgaaggagaatgtgttcatgagctcagttgcaacggg

SEQ ID NO: 154763 - DNA, 894 bp, Arabidopsis thaliana landsberg
tcatcaaaaacattgagatcttcacccttatcatttgatccaaccatggctcgactccttctcctcttcttcttcttccttattctactccattacgcttcttgttccagacacgaacaagaaaaagaccgaatctttcaccttcccggtgaaccaaacgatgtctccttctctcacttctctggttacattaccgtcaacgagtcagcaggaagagcactattctactggctcactgagtcaccaccgagtgaaaaccctgagtctaagcctcttgtcctctggctcaacggtggacctggttgttcctccgtagcttacggtgccgctgaagaaatcggaccttttagaatcaatcctgatggcaaaactctttaccacaatccttactcttggaacaaatgtacatctctctctgtttctccatttctctccaaattttgatttcacaatccttaaattaacactctttatattgggtcagtggcgaatttgctcttccttgaatctcctgctggtgttggtttctcgtattcgaatactacctccgatttgtatactgccggagatcagagaactggtaaagtcttgacctttgacttctctttctctagatttatcaaccatttgatgattttggtttgattttttctagcggaagatgcttatgtgtttcttgtgaaatggtttgagaggtttcctcaatacaaacacagagagttctacattgctggagaaagctatgcaggttattgttattactgattctattcaattggaaactttgtcttagctaagcattttcacttttcttctttaggtcattatgttcctcagttgtcacagattgtttatgagaaacgcaatccagctatcaactttaaaggcttcatt

SEQ ID NO: 154764 - DNA, 530 bp, Arabidopsis thaliana landsberg
atggaatcactcttctctcgtttgacacttaatattattggcaaggcggtgttcaattacgactttgactcccttactaatgaaaccggtgtgatcgaggttccctcatgactatccctctttgccttcagttttctttaacctttttgtgtgttggatcagtaaagatcaaatgcttcttgtgttctctttgttaggcagtgtacactgttctaagacaagctgaagacataagtgtttcacctattcctgtttgggacatacccatttggaaagatatttccccacgtcagaggaaagttgctacttccttgaaattaatcaatcacacacttgatgatttgattgcaacatgcaaggtataactcggagtttaagttcaagaattgttcatgctctttggatcttgattccattttcttgtctttatagagaatggtagaagaagaggagttgcagtttcaaaaggagtatatgaacgaaagagatcctagcatccttcactttcttttagcttcaggacatgatcg

SEQ ID NO: 154765 - DNA, 1123 bp, Arabidopsis thaliana landsberg
gatcccgtgtggatgaaaaggaatcttctgtaaaagctaattgtttaggttagttagatcgatcccgattttgatagaattttggaatgacccgacaagtcttataatggcggctttagatccatgtttgggtttttaagatctatcttttctttttcgctcattgtttctattagattgtgattttatttagctactgagatctgattgtgagtttagatttggtgatttgccttctctgctaaaattccacataaagttgatatcttgttgcgattcttagttggaacgcgactcatgagttgttgttgttgtttatcaggcttgttggatcagtatagaaattgtcagattgagaaagacaacaaatgaagaacggtatagttgagtgccctgcatgtcattcaaaattggtctctcctggtagcaaaactatttctagggcttatgacgaccacaagattagggtatcctcaaaacaacgtgtcctcaatgtccttttggtagtaggtgattgcatgcttgttggtctccaggtaaatcatctccgtttgacaaattttccatatttattatcagcgttcttctttttcctctcagctcatcatttgtttgtgtaaatcacttaaaagttacatacttttcctcttttttcagcctgtcttggtgtatatgtcgaaggtggatgggaaattcaacttcagtcctattagcgtcaacttcttgacagaaatcgcaaaagttatttttgcgattgtgatgcttttaatccaggtatgtttctgaactgacttacaatctcgattcatttagtgtgacatttaagttgtactctagtatctaggactagttgctagatgtttctaacttcataagaaggtgacaagtatgagaagttcatgatgttgataaaccagtaaagtgaatgtgaaaggatcccattatgttctgtgcgtaaagacaatttcttgatttttgaattattacctatttcttgagtctcttgcttttctgtaagaaccgtggatgctctatcaatacttacgtgtttgtgttcaaattgtaggccaggcaccaaaaagttggagagaagcctcttctatccgtttccacatttgtccag

SEQ ID NO: 154766 - DNA, 578 bp, Arabidopsis thaliana landsberg
  unsure (1)..(578): unsure at all n locations
tgtgaatgtctagttgattgaagtttttgttgacttnttaatttttttgataatgtaggttttctccagaaaaactatggtacattgatcagatgctcaaggttctgtgtgaggtatggattcaaacgcgagaatatgctctgtaacgtgttaccagttaattgcactctttgaaatcgtttgagagtttgtatctgcttaagctaatttcaaatgcattgtttgtatctgtcataacctattgtcatctattccatgttagtaggctggaaagtttgtgaaagatgatgtgtggcatgcacttattgttgtcataagcaatgcatcagagcttcatggatatacagttagggccttgtacaaagcagtcttgacttattcggaacaggtagctattttctaatgttagattgtgctcagtcctcaatcagttgtaaccctttctaatatggtttcgttgagatgataaccaggagacccttgtccgagtggcggtatggtgcattggggaatatggtgatctgttggttaacaatgtggggatgcttggtattgaagatccaataacggtgagcatc

SEQ ID NO: 154767 - DNA, 2026 bp, Arabidopsis thaliana landsberg
atgtcttctttgaataaaaacttaagaacatctcggtcaagtggttttgaagtaagcacactgtcttcagcttagactgttccgtagttttagccagtgtgtgtggttcaatgttctaagtttttactgatttcaggaagtgcgtctacatgctattaaaacacttaaaacgacagaagagatactgagttcagtagcaaagagacatcctcggtgggcacgtcttgtttctgctgttgatcatagagttgatagagctttagctatgatgagacctcaggcaattgctgattacagagcgttgctttcttctcttcgatggccacctcagctttctacactaacttcggcaagtcttgattcaaagtcagaaaatgttcaaaatccgcttttcaacatggaagggagcctcaaaagtcaatactgtggaagttttcatgccttgtgtagcctgcaggggttacagttgcaaagaaagtcgcggcagcttgggatccataagggagaaaatgttcttttccaccagccactctgggctattgaagagctggtcaaccctctgacagttgcatctcagcgacattttacaaagtggagtgaaaagccagaattcatttttgcccttgtgtataaaatcacaagggactatgtcgattctatggatgagttgttacaaccgcttgtggatgaagcaaaactagctgggtacagttgccgagaagagtgggtttcggctatggtaagctcactgtctttgtacttggtgaaagagatctttcctatatatgttggtcagctagacgaagcaaatgaaactgatcttcgttctgaggctaaggtctcgtggctccatctcattgacctgatgatctcctttgataagcgagttcagtctttggtatcacaatcaggaatactttcgcttcaagaagatgggaatcttttgagaatttcctctctctcagttttctgtgacagacctgattggcttgatttatgggcagagatagagctagacgagaggctcgtcaaattcaaggaggagattgataacgacagaaattggacagcgaaggtccaagacgaactcatctccagttccaacgtttacagaccaccaatcatttccagcatctttctacagcatttgtcatcaataatcgaacgatccaaatcagtgccggccttatatttgagggctaggttcctgagactggcagcctcaccaacaattcataagttcttggattgcctccttctcaggtgccaagacgccgacggactaactgcattaactgaaaataacgatctaatcaaggtctcgaactctattaatgctggtcactacattgaatctgtcttagaagaatggtctgaagatgtctttttccttgaaatgggaactggacagcacgatccacaggaagttccaggactggagaactttactgaaccttctgaaggtattttcggagaagaatttgaaaagttggagaagttccggctagagtggataaacaaattgtcggtggtgatcttgagaggctttgatgctcgaatccgagaatacataaaaaacagaaagcaatggcaggagaagaaagacaaagaatggacggtgtcaagggcactagttggggctctagactacttgcaaggaaaaacgtctataatagaagaaaatctaaacaaagcagactttaccgctatgtggagaactctagcctcagagatagacaagttgttcttcaacagcatcttgatggcgaacgtgaagtttaccaatgatggagtcgaaaggttaaaagaagacacggaggttctatatggggttttccggacgtggtgtgttagacccgaaggtttctttcctaaactaagtgaggggcttacgcttctgaagatggaagagaagcaagtgaaggacggtctgagtagaggcgataagtggctacgtgagaatagaattcgatatttgagtgaagccgaagccaagaaggtagcgaagagtagagtgttctcttag

SEQ ID NO: 154768 - DNA, 572 bp, Arabidopsis thaliana landsberg
ttcttaagccgagagaatcgtacaagttgcaataagctaaagccgtcagctaaacgacgccgttttcgaaaagtcctcgtcttctctctctcacacaatctctctttctcagaaatctctctctttcgcactttctgcaaatggttctcttcttcctttaagctcaatctcgccactggagtctcaatcgggaaagatctccatcttctccggagaaaaaacggatccgtaagtcgtgattttttaaacagaaaagaatcaattcaatggaggaagagaaagcttctgctgcacagagcttaatcgatgtagttaacgagattgctgcgatttctgattatcgtataacagtgaagaagctttgttataatctagcgaggagattaaagctgcttgttcctatgtttgaggaaattagagaaagtaacgaaccgatcagcgaagatacgttgaagactttgatgaatttgaaggaagctatgtgttcagcgaaggattatctcaaattttgtagccaagggagcaagatttatctggtgcgtttcttcttcgatttattagcatctatgatt

SEQ ID NO: 154769 - DNA, 379 bp, Arabidopsis thaliana landsberg
ttcacgttgagctactctaagaacaataaagattgtacctttaagagtccatatgaagctaacgtaccaaagagatcattcctctgtcgtgcaattcatatggaatctggacattcaggggaacaacaacaaccaaagaagcttaatttcgataatctgttgaggagaaccaaagatgtttgggataattctccacagccggttaaggaatttccttggaatagagctttcggaaacttcatacagctcgttcttgatctcgctatatcagtcgttaagttcttgttcgttcctatattggcggtttcttcaattagtgagatgtcttattgtgctcatgagaggaaacttgctttagtcccgtttccgttagtcatcg

SEQ ID NO: 154770 - DNA, 763 bp, Arabidopsis thaliana landsberg
atggttgatgtaggtgtcaatttcaagaaggcattgtttgtaccaaacatgtcggtgtatcataaggttggtacagcagctgatttgccagagaatgatccacaggttgacttgtcatggcagttcacacttcagaaagtgtgggaaagccttgtgcagagtgaaagaggtagtcctaaatctttatgatcatggaataaaatcaacacgtcacaatcgttatctcaacttaactcttcttgtttggtcacgcagatggagaaaaagatggtgaaagtaatggaaacagtgaggtgtttacttcactacccatggcaataaaatgtctaagggacactgtacatgagagtagctcagccacacgtttccaggtataaaacacacccgtttttctgaacgagtgttcaatccgggttttcagttttcggataatgaatagttagcaatgtaagatggctcacggccggtttgtgtgggcaggtccttgtaactggttcgttacatcttgtggccgatgtactgagattaatcggaaaatgaagagaaactcagcacaagtctcctttcacccttcaatacacgagtcgtcatccaaaaaatcacaagtacccggctgtggaagaggatggcatttcttattaaaagctattttgtattatttcggttttagtttccagcttaagtactaacaaagttgtggtgatctttttcaaattcaagagcaatagttaacaaaaagaaaaggaaacatgttggcaaacgt

SEQ ID NO: 154771 - DNA, 973 bp, Arabidopsis thaliana landsberg
caggatgaggggctagttgctggtatccgaaatatcgagtgggacgcggttgaattaccatcacagtttatggagaattggtgctaccacaggtaatttggagttcatttccaggcagaatcgatgttacctcgttgtgatttacaaagtaatgtgaaatgagcgttatgaattgctggtttcagggacactttaatgagcattgctaagcattacgaaacaggagaaacactcccagaggaagtatacaagaaactcctggccgcaagaacattccgtgcagggtcctttagtcttcgtcaggtgaatataagacaactagctgctaatgttttgttttcaggggtggtattaatgatgatttcatgttttgaattttcagttgaaatttgccagtgttgatcttgagctgcacacaaaatacgtaccaggaggaccagagtccatctatgacgtagatcaaagggtatcagtaaaaacccaagttatccctccacttcctgaggatagatttctctgtagcttcagtcacatctttgccggtaacaaccctcttaaccctgagagactatacatcgttggtgcgttttgatctgaccattcacctactaacttgttcatgaatttccagggggatatgcagctggatattacagttacaaggtaaatttgaaaatctctttatactataaccgactctgtaaattctcactcaaatatctaaaaaaactggatgtgaaaaacttgcagtgggcagaagttttgtctgctgatgcattttcagcatttgaagacgctggactagacgacatcaaggtatcagtatatcctaaaacatctgttatagacacaaatagttgagatacaaagattacgaaattttttgttgcaaacaggctgttaaagaaacaggacagagattcagaaacaccatacttgcacttggaggagggaaagcgcctcttaaggtatt

SEQ ID NO: 154772 - DNA, 556 bp, Arabidopsis thaliana landsberg
  unsure (1)..(556): unsure at all n locations
cctgagtttattcaaagtatgcactgaaatgagataataagctttggactgtttttacacaatgccgttgaatccagcggctgaatgttttgtttcggaaatgttgcaggtgtagaagctaaacttgacaaagaggcaaagatcatagtagcttgttcatccgcgggtacaatgaagccgacacaaaatcttcccgaaggccaacaatcgaggtaatgccaaaagtctacaactttgtgcgaagaaagcatttgtttcggtgctcatataattagggttcttgcaggtctctcatagctgcttatcttctggtccttaacggctataagaacgtatttcacctagaaggtggaatctacacatggggcaaggaaggtcttcctgttgaaacaattgaagaagactaaccaacttctttactctagagttgtccagttntgtatatctgtccatttcagttagttgcatttagagatttggcttttcagagagtngtttgaggtttgtaaaacttcagactttaccatgaaatcagcaaactcgaccggaatcagag

SEQ ID NO: 154773 - DNA, 521 bp, Arabidopsis thaliana landsberg
aaaaatgcatgaatggaaagagagacgggacttaacaacttatcaagtatattttggttgcagatttgactttccctgatgctcgtttgtgggaaagggtttctaaagtgcagagcacttggagttccattcttttgtgacaaaagaaaatccttcttcactaaaactaagaggggctttcacagtttacctttgggcactggggtccgtgtttatttcaacaacagtaagttatatacaccactctgcttagacttgtctgtttcatgcctggggatggtgttcttattgctctgttggcgtctttagatcttaggtactcaagcaattcaatagaagttgtggagaaagctgccattaatatgggttcaaaggaagacaaggcagataatccagctttatcttcatatgatgatgccatggaagctctgtcgactcttatttctcgtcgaaaccgtggggatcgcacacctactaaaggaaatcgtgacaagcttgaacaagtcgtcacatatctcaag

SEQ ID NO: 154774 - DNA, 115 bp, Arabidopsis thaliana landsberg
atctctttctctgctgcagcttaaactttaaaaaacactacaagaacaacttcttcaggttctataaagagattccgaagaagaatcttttccagaaacagtgtaagtcttatct

SEQ ID NO: 154775 - DNA, 1650 bp, Arabidopsis thaliana landsberg
atgttttctagatttagcactaaggaggcgcggagatgagggcgaaagctgcttcggggaaagccataatagtgctttgtctagccagctttcttgcaggctcactgttcatgagtcgaactttgagtcgctcttacatacctgaagaagaagatcaccatctcacaaagcatttgtccaaacatttagagattcaaaaggactgcgatgaacataaacgcgtaaggctacttgattaacacctgctcatgctcatcatatatattactcactaacaacaagtgttactctttgttgattcagaaattgatagaaagcaaatccagagacataataggagaagtatcgagaactcaccaagcagtaaagtaataaaatcttattctttcttgtgtttctttacataattagaacagaggaggtaacactaaaagtgtttatattattagatcattggagagaacaatgtcaacattggagatggagttagcagcagcacgtaccagcgatagaagcagtgagttctggagcgaacggtcggcgaaaaaccagagccgtctgcagaaagtgtttgcagtgataggcattaacacagcattcagcagcaagaaaagacgtgactcggtgagacaaacgtggatgccaacaggagaaaagctaaagaaaatcgagaaagagaaagggattgttgtaaggttgtgaagtaagccacaagtatcctcaatttcactactttaaaaatctaaacaaccaaacctcagtcatatgaaacagagaaagtttggatttttatttgacaggtttgtgataggacacagtgcaacaccaggaggagtattagataaagccatagatgaagaagattcagagcataaagatttcttaagactaaaacacattgaaggatatcaccaactctcgacaaagacaagactgtacttctcaacagcaactgcaatgtatgacgcagagttctacgtgaaagtggatgatgatgttcatgtcaatttaggtatgcttgttacaacacttgcgagatatcaatcaagaccaaggatttacattggatgcatgaagtctggtcctgttctttcacaaaagtaagcttctttacaaaaaatttgaaacctttggataaaaatctgaactaaagtaaggatttttggaaatgtatagaggagtgaagtaccacgagccagagttttggaaatttggagaagaaggtaacaaatactttaggcatgcaacaggtcaaatttacgcaatctctaaagacttagctacatatatctccactaaccagtaagggctttcaaattcaaggatgttatatatacgtaaaagtattcagattttgaggtttgattcggtggacatatccgcagaggaatactacaccggtacgcgaacgaggatgtgtcgttaggagcatggatgttagggttagaagtggagcatgtggacgagaggtcaatgtgttgtggaactccacctgattgtcaatggaaagcacaagctggtaacgtatgtgctgcgtcgttcgattggtcttgcagcgggatttgtaagtccgttgaccggatggctcgtgtgcatcgagcttgtgctgaaggagacactcctctagctaattttcgcttcttcgtctga

SEQ ID NO: 154776 - DNA, 757 bp, Arabidopsis thaliana landsberg
atgatagtgacggttatattcttcgtcttcttattctttcaaggtaatcaccattggaatcaagatctttggtcaaatgttctattaggtctttcttttagtttctatgtgtttgctcgcgcttgttaaatgttcaaagctttgaagatctttggtcagatgttctattaggtctttcttttaggttctatgtgtttgctcgcgcttgttaaatgatcaaagctcctgttgtttcataaagctccctgaattgtctttctcttttgcagggttcttcacaagcaatgcgagtttgaattctgacaattcacctgcaccaaataattcagctaataaccgtatggtctctgttcagttctacaatgagtttgctcctcgtgagagaatcgatcccagccctactacttctttcaggtgagataaatcttcctcctttccattacgctgcacggagcagagagaacagtttcttctatacagatataaacagagcaatttcgtcttactgatgttgttgtgtgtaaaatttcaggtataagagagtctcaggtgcagacaatgaagaaaacacaagagaagttaccagatgagtttcttctctttggattcttgtaaaatgtaaccaaaaacactacttatgtttttgtttgttcgtaaattcttgacatcactctattgttcctttgatctgtatgtgttcacatgtttgtctctgtgttactcttcttgtaaatattcttatggatgaatctgctcg

SEQ ID NO: 154777 - DNA, 1078 bp, Arabidopsis thaliana landsberg
atgcaacaaacacaaatgcacttggctgcaatcagctctccttctgtcctttgtggacttcttgatgttgcaaagagtggaaactcaggggaattcatctccttgacaagtattttagtaaaatgcatgcaatttgatggacttaacaggaagtatatttatcagcatactcgagtggctccttttgcgcatctcctgcaaagcaaagaccaagaagaaatttgcattgctcttcaatttcttcatgaggtcctgaagataccaaggtatacatatctcagcaaaaaatttctatttttaaactaccattcacacttttacttgtaatttcaggtcatcagcaatcaagattctgccacagataaagaaagaaggaagttttgacattaaggtcacattattgtactgtattaaacacttgcagggtgatcacaaactctttgcagcagatatattgcttcagttaaatgcactggttagttctaaatatcaaaatcttgttgattctatctctaagtatatatatttacgtatcgaaattctctacaggattctccacctgagaacaaaaagtacagaaatgaagctaccagagctctacttgatgcagttacatatagtgaaggttcaaatatgcagcttttatcaacgttcattcttgcgaatatcggtggaacttattcatggacaggagaaccttacactgctgcttggctaatgaaaagaggaggtctaacttctatgtcacatatgaatatgataagaaacatcaactggtcagatgaatgcttgcaggtacctttttgtaagttttatcatatagccaagccaaaaagagtgacttatgaaaacttcataacttctgcaggatacaggaatagatggatggtgttgtaagatagctagaagaattattgatacaggcaaagccacgttttgtggtttacaagaagggctaaagagtaaaaacaagagtgtttcaaaagcatgtcttatagccattgcatggctcagtatagagatttcaaaaggtccaaatagtttaaaatactcagcatgtgaagttttacttgatgag

SEQ ID NO: 154778 - DNA, 1370 bp, Arabidopsis thaliana landsberg
ctttctctttcatcacctttctcgttcacttgctcaagatctggcagcgatttcatttcttctccagtctttctctcgtctcggttctatctcctggccattggcggggaggacttctcagccgtatatttgattccgtccccggatttactcttgctgttatctgaggtcaaacatggcggctgccaacgcccccatcacgatgaaggaggtcctgacggtgagttctccttactcttcactcttatctttgaatatttagatgtgtctcctggaatcgaccgtgattttctacgattaagctctgttcagtctcttgattgattgattccagtttcctactgatctgaattctgctcgatcgttgtgttactctctagtttttccggatcgcttgtttgggaatgcatgtttctgatcagatttctctaactatgctcagatctgtgtttcgttaatatatcaatgccgaatttcaagttgttgtctgtagcaatgtgcttatgtactcggatctcataactaaataaatgaactatttgacgtaacgcttcatcttgatttttccagcttccgagcatcgggatcaatcagcaattcatcacgtttacaaatgttactatggagtctgacaagtatatctgtgtacgagagacgtcaccgcaaaacagtgttgtaattatagatatgaatatgccgatgcagcctcttaggaggcctattactgcagactctgctcttatgaacccaaactcgaagatccttgccttgaaaggtacttgattttttcctttgatctaaaacccataacggtttcctcgaattcgtagttcataatccacttatcttgatgttcactttttacttcaatatttatgtagctcaagttccaggaactactcaggatcatctacagatatttaacattgaagccaaagcaaagttgaaatcacatcagatgcctgagcaggtgagtgttgatgcaaatatatttgaactccattatcgttcctgctatacacttcgtataactctgaatttttcagtcgggttttttttttggataataatgtttcatgtttttacaggttgtcttttggaagtggattacaccaaagatgttggggctggtcacacagaattccgtctatcattggtcaattgaaggttgtatatttcagcctactgtcattttcttcatatcttgtgttttcgtttctaattttccttcgggttttataggtgattctgagccagttaagatgtttgatagaacagccaatttggccaacaatcaaattataaactataagtgctctcctaatgagaagtggttggttttaattggaattgctcctggctctcctgag

SEQ ID NO: 154779 - DNA, 1686 bp, Arabidopsis thaliana landsberg
acgagattgctttgcaacaaagctaaagcatctgatatagtcttccttgtctaaatctttctcaacatgttagattttcagtttctcaagacaaatctgtgagttatttttttcattcttggttttctctgttttgcctaagtttggaggaaaggaatctgaagaggaaacaagaatggtcgtggtcgatttgcttggtttgggattaggctctgttgctggagctttggtctcggaaggtctgaaaattttgatttcagaggcaaagaaggtgttagctttcaaatctgtgtctcatgagctcgcatcgacgatggagtctgtgcttccggtgatcaaagagatcgaatcgatgcaagatggtatggaactacaagatcttaaagatacgatcgatgaagctcttttactggttgagaagtgttcacatgtcgagaagtggaatatgatcttgaaatcgaagtacacgagaaaagttgaggaaatcaataggaagatgctcaagttctgtcaggttcaacttcagattcttctctttaggaaccaattgaagtctatgcctgccatggaagctattattaacaatcatttccaaatcatcaatgagaagctcgaccttttgagtggttctcctgctcctccgcttgtttcgaagcgttgttctgttcccaagcttaataatatggttctggttggattggattggccattggtggagctgaagaagaaactccttgacaattccgtggttgtggtgtctggtcctcctggttgtgggaagaccacgctggttactaagctttgtgacgacccagagatcaaaggtatgtatatatatgaggtgtcttaaagttttgatttttacacatgtttcttgtttctcatgtagtgtttgttacattggcaggagaattcaagaaaatcttctatagcgttgtgtcgaatactcctaatttcagggccatagtacaaaacttactccaggacaacggttgcggagcaattacatttgacgatgattctcaagcagaaactggcttaagagatcttctggaggaactcacaaaagatggtcgtatattgttggtgttggatgatgtgtggcagggatccgagttcttgcttcgaaaatttcaaattgatttaccagataataagattttggtgacttctcagtttgattttacgagatttatggcccacttaccatttggtacctttgaaatatgaatatgctaggtccgttctcattcagtgggcatctccacctcttcacacatctccagatgagtatgaagatcttctccaaaaggtattattattagtttcaacattcatgttttaagcttaaattgtcctgttagtggaaaacactagattcatcttcttttttcacatggtagatattgaaacgttgcaatggattccctctcgtaattgaagcactcggcgtttcacttaaaggacaagctctgtatttatggaaaggtcaagtggaaagctggtctgaaggggaaacaattcttggtaacgctaatcctactgtgcgacaacgtctgcagcctagcttcaatgtcctgaaacctcatcttaaagagtgtttcatggacatgggttcatttcttcaggaccaaaagatacgtgcttcgcttataattgacatatggatggaattatatggtagag

SEQ ID NO: 154780 - DNA, 946 bp, Arabidopsis thaliana landsberg
atgtgggtgggcgtaccggtagcagcagcagtaaccaccgtcggcggccgcagaataccggtgttagtggctgcatcaggcaagaggtcgatggcttcgaattcgggttcattctcgacactaaaagaatccgtatctgtggagaaagagataaagaagagcaagttcatcgcaatcgatggaccaatctcctccgagcaatcagctcaaatgttcctctctcaggtccgtgatcctcgcgcttctcacaattgctgggcttataagatcggtgatcatcaccatcgatgtagcgatgatggtgagccatctggcacagcagggaagccgattcagtctgctattctctcttctggattagacagagttatggttgttgtcattaggttagctttcttcagtcttgaaacttaaatattgaatctttacaagttttgagaatacaatctcctcataggatgatgatgatgataggtattttgggggaatcaaacttggaactggaggtcttgttagagcatatggtggtgttacatctgattgcttgaaaactgctccttcttgtctggtcaagtccaaagtaaatgtctttttctttattgtctcttttgttgttcaacttcattactcctgtttgtttcttctcccaggttcaaatgggagttgaggtcacatttgatcttttaggtgttctttacaatcaggtgacagattctttctggctgtgatattttttttttgagattttcctgagtgctcatggatcatttatatatatgtgtcatagcagcaatcgtgtcacgctgaagacatcaaggaagactatgatactggtaaagatggtactgcaatggtttctttcaaggttgagtttgaccttgttgataaattagaggatgctatcaaatcaaactgtagacgagaccttgtcttttacaaaacttag

SEQ ID NO: 154781 - DNA, 976 bp, Arabidopsis thaliana landsberg
aataaactgcatgtttgttttagtttctgttgcagactgataaatattgtttcctttttgtgtgttgtgaagaatgttggaccacattttgagacgtgggccacaggaatcgtcgggtctgtggcgcttcatggccttgacgagggtaacaaagacttgagttggcagaaatggacttatcaggtgagattcaataatgcttacaagatgaaactctcatggatagttaacaaccgaaactaaataacatttccgccttttcgggtacttcaacaggctggtctgcgaggggaatcaatgaacttggtctctcctactgaggactcctctgttgattggatcaaaggctcattggctaagcaaaacaaacaacctttgacatggtacaaggtaaataagaaactctgacttgtccaagccctttttaaccaataatctgtaatattaagtcttgagtctagttatagtagacctatagacatgacaagctgaaacatgttcacgttgacccaatgtgtatttgcttatcacatatgcaggcctattttgacgcgcctagagggaacgagccgctggctttggatctaaagagtatggggaaagggcaagcttggataaacgggcaaagcatagggagatactggatggcatttgccaaaggagactgcggaagttgtaactacgctggaacatacaggcagaacaaatgccagtctggttgtggcgagccgacacaaagatggtaacaataatgctttgttcttaactatacattttcgagctacttaagctctcttctagtattaaaatgagtcttttttgtatgtaggtatcatgttccgcgttcgtggttgaagccaaaagggaacttgttagtactttttgaagaacttggtggagatatatccaaagtctctgttgtgaagagatcagtaaactaacttaaaaaaaaaaaccaatattgtgtgtgcattct

SEQ ID NO: 154782 - DNA, 932 bp, Arabidopsis thaliana landsberg; identical to SEQ ID NO: 12985

SEQ ID NO: 154783 - DNA, 453 bp, Arabidopsis thaliana landsberg
ctccaaaatatgaatcttcagttgactctaatctccttactcttcttcacttccgccatagctgaaaccttcaaaaacctcgattctcatccacagttcccttgtaaacctcctcattttagctcttatcccttctgcaatgtctctttatccataaaacaacgagcaatttctctcgtctccctcctcacgctcccagagaagataggtcagctctcaaacacagctgcttcagtaccccgtctcggtattcctccgtacgagtggtggtcggagtctttacacggactcgccgataacggtcccggagtttccttcaacggttcgatctccgccgctactagttttcctcaggtaatcgtatctgctgcatctttcaatagaacgctatggtacgagattggatctgctgttgcggtggaaggtcgggctatgtcacggtggtcaagctgg

SEQ ID NO: 154784 - DNA, 626 bp, Arabidopsis thaliana landsberg
ctataggccttcaccctttttcatacttgatgaagtggatgctgcgcttgataatctaaacgtggcaaaagttgctaaattcattcgtagcaagtcatgccaagccgcacgtgacaatcaggatgcagaggatgggaatggcttccaaagcattgtaatatctctcaaggacagcttctatgacaaggcggaggctctggttggagtttacagagacaccgagaggaggtaaggagaatatccacataaatcttttgtacatgcgtctattttattggcataatatctgagaactcggtggtgatgtattttttgctgcagttgctccagtacaatgtcatttgaccttaggaactaccaagaatcgtgattggttcaacaaccctcgggggattagggtttaggtaagtataaaaaccctaactttgtaagtatagcaagtactgaatggtgtttgattgttagctttgtaatttttgtgtcacaatgttaaaaggtatttcacagtggtaaggtgctttatttgcgatttgatttggcataggaccttataagttctgacactgtagagaacctatggaaccttttcttatgtgatactataagaaactcgtggttttagctgc

SEQ ID NO: 154785 - DNA, 2245 bp, Arabidopsis thaliana landsberg
aaaactttcctgttgcatgatttttcttctcgggatgcacggcctccaagctcgacagtgaggatgctgtccgtcgctgcaaggagcggcgccgtcttatgaaggacgccgtctacgctcgtcaccatctcgccgccgctcactctgactactgccgctcccttcgtctcactggctctgccctctcctccttcgccgccggcgagcccctctccgtctccgagaatactcccgctgtttttctccgcccttcctccagtcaggacgcgccacgtgtcccttcttcccattccccagaaccccctcctccgcccatccgcagcaagcctaagcctactaggcctaggaggcttccacacattctctccgactcctctccttcttcctctcctgccaccagtttctatcccactgctcaccagaactctacttactctcgctctccatctcaagcttcctctgtctggaactgggagaatttctaccctccctctccccccgactccgagtacttcgaacgcaaagctcgccagaaccacaagcaccgtcctccttccgactacgacgccgaaactgaaagatccgaccacgattactgccactcacggagagatgccgccgaggaagttcactgcagcgagtggggcgacgaccacgaccgtttcactgccacctcttcgtccgacggagatggggaggtcgaaactcacgtttccagatccggtattgaagaagagcctgtgaaacaaccacatcaagacccaaatggcaaagagcactctgaccatgttaccacttcttccgactgctacaagaccaaattggtggtaaggcacaagaatttgaaggagatccttgacgccgttcaagactacttcgacaaggctgcctccgctggggaccaggtctccgccatgcttgagatcggccgggctgagctcgaccgcagcttcagcaagctgaggagtaagtctcacactctactaactagatgtagatgatgatgcattgaaacccatctcattctcttactctctctatatttgttgtctgcagagacggtgtatcattcaagcagtgtgttcagcaacttgagcgcaagctggacctcaaaacccccattggcagtcaaatacaagctcgatgcatctaccctgaatgatgaacaaggcggcctcaagagcctctgctccactctagaccgactcctcgcttgggaaaagaagctttatgaggatgtcaaggtacattccctgtttttgttttcggttttcggcttaccaacggttacgaaataaacttgtgaattcgaatttaggcaagagaaggagttaagattgagcacgagaagaagctgtctgcgctgcagagtcaggagtataagggaggtgatgaatccaagctagacaagactaaaacttccataaccagactgcaatcactcatcattgtttcttcagaagctgttttaaccacgtctaatgccattctccgcctccgggacactgaccttgtccctcagcttgttgaactctgccacgggtcagtcttttttttgtagttgtgtttgtgtttcattgttccttgagggctgctggttcggtctaggcttgtttatatgcttctgcaaactcatgtgaacccgaattaggcatatgtaataccaaacccattgctgttctgccagtgggggattttataggtaagttcgaaataaaagtagggaggatttgtatgtgtctctaaccaccttgaaatgcagattaatgtacatgtggaagtcaatgcacgagtatcacgaaatccagaacaacatcgtgcaacaagtccgtggcctgatcaaccaaacagagagaggtgagtcaacatcagaggtacaccggcaggtgacgcgggacctagagtcagctgtgtccttgtggcattcgagcttctgtcgcatcattaaattccagagggagttcatatgctctctccacgcatggttcaagctgagcctggttcccctgagcaacggagacccaaagaaacagcggccagactcatttgccttgtgcgaggagtggaagcagagcctggaacgggtgcctgacacagtggcgtcagaagccataaagagctttgtaaacgtggtacatgtgatatcaataaagcaggcggaagaggtgaagatgaagaaacgcacggagagtgcaggaaaggagctggagaagaaagcatcctcactgaggagcatagagaggaa

SEQ ID NO: 154786 - DNA, 404 bp, Arabidopsis thaliana landsberg
aataatttttctcctaggctcgaagctcaaaggagtggctgatgcagcaaaaaataaccatgttgtctttgaagaaaatcgaacactgtacaatgaagtccaagaattgaaaggtaaaactcttttagtcaatgtcatttactaatttctatgtattgaaccattcaagaaatgacttcagttctttctcttcctatctaggaaagatcagagtctattgccggattagaccatttctttcagggcaaaacagtagccaaacatctatagaatacattggtgagactggtgaattggtggttgcgaatccctttaagcaagggaaagatacgcctcggttatttaagttcaccaaagttttcgatcaagcagcaacacaaggtttaaacctctttccctcttaa

SEQ ID NO: 154787 - DNA, 1093 bp, Arabidopsis thaliana landsberg
  unsure (1)..(1093): unsure at all n locations
atggccggagctgtttctgccgtctatcaaccgttgaaaatcatcaccggagctgatgactttggagcgagcctcaaggacgcgatggtaacacacctccgctctctcggcatagacgtggaggataccggagtgtcctcttactactctgctggatctgaagtcggtcgccgcgnnnnnnnnnnnnnnnnnnnnnnnnnnnnnnnnnnnnnnnnnnncggcaccggcgtcggagttgcgatgttcgccaacaagttcccgggcgtctacgcagccacttgtctctccgtcgaagacgccgtcaacgctcgatcaataagcacttgcaatgtcctcgcattctccggtatcaaaacatccccggaaaccgccgtggaaatcttcgacgcttgtatcaaaactccttttaaatctccttgtcctgcgtccggatccgaaccctggagctcagttatctcttccttcctcgacaattctctctccgagatgtctcagattggaaagtcaaccgccggcgattcaacaaccaagaagatcgatgaaacaaccgcgtcttgcgtaatttgctgcttggcgaagaacagagagttcactccagtggacatcatgccgggaggctcgatgaagatcgttagagagacgccgacgtcggcgattgtaagattcaaagcgggaagtgtggaaccggcgcatcaccacacattcggccatgaccttgtagtcataaagggaaagaaaagtgtgtggaatctgagcaagaaggagagagctgatctcgttgacggcgattacctattcactcccgccggtgatgttcaccgagtcaaatatcacgaagacactgagttcttcatcacttgggatggccattgggacatatnnnnnnnnnnnnnnnnnnnnnctgcaaagaaagccatcgaagaagaagcttgaaggtgtaaactttgtgtagtactctcttcttttgaatgttgtaagttctgagagtaaactttcttaaattgatgtactttgtaagaatctttgatttcaaaagatggtgtaatattacaaatactttctcttatgaacactatataaagggtttctacat

SEQ ID NO: 154788 - DNA, 894 bp, Arabidopsis thaliana landsberg
accttaagataaggaggctcatagtcggcgtcgcatacttcttcctcaccttcttcttcatgataccaatagcatttgtacagtcactcgccaacatcgaaggcatagagaaggcttttcctttcttgaagccccttatagaagtgtatgtctctgtctatctcaacatgttctgtcccgctgcctagtagataaagtctcttaccatttttggtctttgtgaacaggaaattgttaaagtcgatcatccaaggtttccttcccggaatcgccttgaagatcttcctccttttcctcccaagaatactcatgcagatgtccaaatttgaaggttttgtcagcacatcctcattagaaagaagagctgcaactagattctacatgttccaattcatcaatgttttccttggaagcatagtcaccgggactgcgtttcaacagctcaacagtttccttaaccagtctgcaaacgagtatgttctttagacctttctttgtctgcatttcactgagagatatcatatctttctgactttttcatttctgcagtattccaaaaacaattggtgtctcgattccaatgaaagcgaccttctttataacatacataatggtggatggatgggctggtgttgctggtgagatattgaggttgaagccactcataatctatcatctaaagaactccttcctcgtgagaaccgaaaaagatagggaagaagcaactgatcctggaaccataggattcaacactggtgagcctcaaatacaactctacttccttcttggtcttgtttacgcagcagttagccccatccttctcccttttatcctcgtcttattcggcctggcttttgtagtgtaccgtcatcaggtgaaataactaaacggtcc

SEQ ID NO: 154789 - DNA, 1805 bp, Arabidopsis thaliana landsberg
atggatcatccagaagatgaatcccacagcgagaaacaagacgacgaggtttgatttcgagattacggatttgtcttactcgatgaaattgaaactatgatctcattcttcaattcgaaaattgttttctctggttatcgcaggaagctcttgctcgtcttgaagagattaagaagtcaattgaagctaaactgactcttcgtcaaaacaatctcaatcctgaacgacctggttagtttttgttttcatggaattgactatgtaggatttccacaatgcttctgttagtaatcgagtacctataatagccattcaggacttgagagcacacgattttacaataattcttttctagtttagaatgtgtagttttgagttgttactgatagtgagtccttccacgttacagattcagcatatcttaggactctagattctagtatcaagcggaatacagcagttattaagaagttaaagcagatcaatgaagagcagcgagaagggttgatggatgatctgcgaggtgttaaccttagcaaattcgttagtgaagctgttactgccatttgtgaggctaagctcaaaagctcagatatacaagcagctgttcaggttatgtttccctgttttgttcttttgtatctgtatttacaccttgtttcttatgtttttcatgcgactctcgtcatcaacttgtcacattgagattttcagtagttgttatctttatatttagatagtttcttaatgctttccaccacttggtatggcaaatcctctaccacagtttaggtttctgttgaacgatatcttttcctcttagtttagatgatatttgggtctcttttctgtttgtatttcttatggggcatagaaagtagcatacgacaatactctctgttcagaatttgtttctatgctgatatccatgtattttgacagatttgctcgctacttcatcagaggtataaagaattttctgccagtctaacacaagggctcttgaaagtcttctttcctggaaaatctgccgaagatttagaagctgataaaaactcaaaggccatgaaaaagcgcagtaccctaaaacttcttctggagctctactatgttggagtaatagaagatagtaacatctttatcaatattattaaggatcttaccagtgttgaacaactgaaagacagagatacgacccaaacaaatctgacacttctcaccagttttgctcggcaaggaagaatttttctggggcttcctatctctggacaagacgaagatgtaagtaggtttcaagatcaactgaagttttacttccatatttgatgagctcttgtctgtgccttccccatattttccggtacgtagctaaatgtgactaaggttttctctagtttttcaagggtctcgacgtcactgcagatcagaaaaagagttttaagaaagctttcaacacatattatgatgctcttgcagatctccttcagtctgagcacaaggttagatccttaattgtttacccatgagcttatgtgcaggaattttgatttttcttgcctgaaaaatgaaacatttcctctcccttttcttttcttttcattttgctagttttccctttctgtagtatcttcgtaatagtttttttctacagttacttctccaaatggagaaagaaaatgcaaagctggtaaatgctaaaggagagcttagtgaagacagtgcatcttcttatgaaaagctgaggaaatcatacgaccatctctatcaaaatatctcatcgtaagttgaccattcctataactcaa

SEQ ID NO: 154790 - DNA, 775 bp, Arabidopsis thaliana landsberg
atgtattattgcactctctaacaaacacataatataaatatatttacctacatcagattcttcatacacattgtaatcaatagaccatagagatttacatggcgacttctaccttctcttctcgtggggcacaaaccatgaacaccatgttcgtcaagtaagtttaccttaaatttagtgttgagcatatgcattatttgtttcgtgcatgtcaatctttacgcaaaaaccatgctaattttctctctattcatattgattcttagatcatacacttttggttgttatgatcgtttaattatgtatcatgttatatatcattaacacatgcaatttgcatatatataggccgatgcttaggaaatcaattcacaagaagagtgcctcgcatgatatagtgagggatacggtgaagactgagggctctagctccggagaggaggtgaagacgatgagaggcttctacggcgccggagaaacgtcgtcgccggcgagtagttgggtgccacatgaaggtacgggaatatactatccaaagggacaagagaaagtgatgcaagatgtgcctcctcctccagctggcagccacgcggacgagctcgttaattggttctcttgatccattagtctcgagtgactctcttgtcatctcgatctcgtcgaagtctctatattattgtctattgttctaatgggaaaccataaaatatatgtgtaattaagtggaaatatattgtcatataaccaatgataatgaataattaatgatgattac

SEQ ID NO: 154791 - DNA, 684 bp, Arabidopsis thaliana landsberg
accggattgtcttttgttgctgcagggtttgaatgataaagtggtagtcttcatgtacaagcctaagtagttgtaccgtagaaatatcggtcacagacaggtattgctgaaagtcctcttccttatatttgaactatatgtagagttacaatcaacagactactatcagttacttgttgtaatttgctatggctgatgaaactgaaatctctttgaagtaatgacacttatgttgtgacttatgtgttgatattgtagccgaatacgaggattcggattaccggaatcacagggtatgaagagtatccagcctcgcccaatgttgcagttggagaagtaaatctttgacacaaaatgtttcttgaatgttaaaatttttctgatcttctctatgtaattttgtaaggaccctggtcatttcatttctgctgagattccttttattaatatgtacctgcttttgccattctttgatcacaaattctaagttagtgtaagaaaacttcattattgctcatcaatcaatctaggcgtactaatgaattttatagaataaaacaacttctaccacatttgtcgctgtttttttcacttcagtggcacaaaacagaaattgttattgagattttgaaaatggacaggaccgtccataacatttatccgtccacaaagacattatggtga

SEQ ID NO: 154792 - DNA, 1916 bp, Arabidopsis thaliana landsberg
atggcgtccatggcgaccggcgtcagtttttcgatgactagcggcataggagaaggaggatacgatgttcatcgagtagcgacggctgcacggacaactctgaagctgaatcagaagaactcactgagcgagagtacatgcatgcttttggggatgaataagtatcggggatccggagctatacgaaccgtctcgaaggctgtcggttacggacaagagatgagtaagagtctgagggtgggactcatttgcggaggtccgtcggcggagcgcgggatttctctcaactctgctagatcagttctcgatcatattcaggttattttccgttttcccatgatcaattgagctttggatttgtgtattttctggctccatttaatccgtctggtttgaaattgagtttcaattgtgttggatggtttttcatcagggtgatggtataaacgtgagctgctattatatagatcctgatctcaaagcctttgcaatttcatccgctcaggtttgcagcgttgtattaggcattttgaacaattctgctttatgtatctcttactcattctttcttttattgtttgtgaaaaatttcaggtgtactcgaatactccttcagatttcgattttaagctggagaggtgaggtgtatgatatgaacggtttgaaaaattggttatgggacaatagcagtgaccaaattagctgagtggctagtttgtttcatactgtagtcttgcacagggattctcgtcattatccgaattggccgagcatcttgtttctgctgtggacattgtttttccagtaattcatggtcgatttggtgaagatgggggcattcaggtttttttgtttggacaagtccttataaattttattttctattggaagtacttatgttacgagaccttaaatatcattgattattggctatgtaggagctgttggaaagtcacaacattccatttgtggggactggatcccgtgaatgttttcgagcatttgacaaggtaaatagaaagagtctgtggatgaactggtgtatcagatattcattacattttaattagctagctctcattgtgttgtttgatattcttcttcatctgtcttagtatagttctgattatttttagtgaacttattccagtatgaagcctctttggagctcaaggaacttggtttcatgacagtaccaaactacttggtgcatgtagtatattgtattattgtctatgcaggcatgtctctttattgcattcaattccctcttcattgtatatgaaaatcttatctatacatgcactcaaatttcgagctagtgatatatttcctaaacacaaatccttgctcagggaactggagtggacaaaagtgaaatagcactgtggtttacagataaccagctggatctcgagatggaaaaagttgtggtaaggcatctccccatttctcagcctggtcatagaaatgttgcctagagatccctcctcatttatttcactttttttttttctctcttcacgtttgtctgtttcaggtaaaaccagctaaagcaggttcaagcattggtgtcaaggttgcttttggcgtaaatgattcaattaaaaaggctactgaacttattctagaggtattatttgttttgagacttggacaatataactagacacttggaaatgaggaatggagatctctatttctcgaaactagaaaatctgtatttttggaggattgcaaactatttctttacaggcagtaagttttctttccttctttttttttggatagggaattgatgatagagttgttgttgaggtgtttattgaagatgcatatgagttcactgccatcgtcctagatgtgggttctggttctgtttgccatcctgttgttttgatgcctactgaggtaat

SEQ ID NO: 154793 - DNA, 515 bp, Arabidopsis thaliana landsberg
  unsure (1)..(515): unsure at all n locations
gtatcaactcttcaagtttttcctagcgtataaaggatctcttatggtagctgatgacctactcctacaaggacttaaaagatgcaaatccctcggtgccttggccatggttcatgctgaaaatggagatgcagtattcgaaggacagaaaagaatgattgaactgggcattacaggtccagagggtcatgctctttcaaggcctcctgtggtaatttgcgtcaagcattttccattttattatgctgcctcctagattttttcttttctcctatatctgctcttgcctctgtaaagctttgttgaagctactaaaacaagatccttgtttgacaatgtcagctcgagggagaggccactgctagagcaattcgtttggctcgttttattaacacgcctctctatgttgttcatgtgatgagtgctcacccaatggacgagattgctaaagctcgaaaatcaggttttctgttacaactcatgtaggtcttaaccnatttgctgtttctgattgt

SEQ ID NO: 154794 - DNA, 958 bp, Arabidopsis thaliana landsberg
atgagaatgttagttcttcgcactcccaccggacctgtctccgccgtcagattcatcaccaaatccaaaccttctcctttctcttcacccgattcatggctcgtccctgcaccaaacactctccggagacgaaacgtcgtcctcgctctctctaaccccgacggaagcgtcaagtcaaaaccctcaacctcagcttctcaaatcccttcttcaggagatgaaacagttttcgtgggtcaagataatgttcctctcgagggcgtgattcaattcgataaaccgtcatctacttcatcttctaacattaccaaatgggggtaattaaaaactctaactttactttgttttagtctctctagaggaaggattgcttttgtattgttatctcaaatgttttgtgtagtttcttcagtcgtgtggctttacttgctggtggtgatgttttagctctgcttatcttctctgccatgggagatttagccatggtttccctgttttttctattgatactctccacacagctgaccctttcattgctggtattgattcggtttcgttactctcttatctatcttgcgtttgagaagctttgtttcaagtaaaaatggaaactttatgtggcaggatggtttctgagtgcttatttcttggggggttatgcggaggaaggacgaggaatgaagggaaagtctaaagctgtggttgcagctgcaaaatcttggattgtcggaactccggtaaggcgacatttaccaatctttttgacattgtaggtttagggtgttggtatctctactaaactgtttaaagcttgttcctttcgttacagcttggaattatcattaggtcagcttcatcaggtcacattccggcatatagctttgtgttggtgacaatgggcagtactgctgttttacttataggaaaaaaaaaattgttattcagtgtgcttcctaca

SEQ ID NO: 154795 - DNA, 6308 bp, Arabidopsis thaliana landsberg
  unsure (1)..(6308): unsure at all n locations
atgcggtcgaagacacagatgatggtaaaaataaagaaccttgcgggcaagatagccgtcaagccagtctgtaatggctgctgcaatgaaaatgcttgttgtagcagttgttccccaccaactatcaacgtaaaaggctatgagcaaaaacaaacgaatgaacaattttacataagatacaatccaaaaaaactagattagaacttaaagtaatggaaactagacgttcgataaaacgaacagaaaagcttagaatccacattagccaaagattaagtgtatctgtgtttaatgttgttttcaagcaaaaccaaaaagttgagctcaggaaacccagaatggatcatgataacttattagttcaaatactgtgacacattcgaatccaaaacaattggaggtaacaaagtaacgtacttgcgacgagaagcgggacggcggcgacacgaccaagtgttaatacggtaggcaatgtaagaactttggaagannnnnnnnnnnnnnnnnnnnnnnnnnnntcatcactatcaagctgaccgtgaccactgaaactgtttcgggaagaggaagttggtctgctttgctccgacgaagaggatgaagaaaagtaggatagacggtgttggtggcgagatatttgaatcggaaaccttagagatgtacgggaggagtaacgggaagtgataatgcaacggctaagatgcgccggaaaagaaaaggttggggatggacgtaacgtgcgccgcaaattgacatcgacgattaacgaagccagaccggatataagcataagcgagcttactaatttggatcgcttcgatttctgattgcaaattgaaaaaaatggtaaaaatcgaagaagatgaagtttaagggtacctgaaaagttcaaagaaattgggaaagacagtggcgactttggtggattctaaagggcaaaagtgacttttcaccgtaaaaactaaacaagtggatttatagttcagttaggcccaaaacaaattaatccacgattaacgacgacggtgtgacgtggactcaatagggtatataaatcccttttaatcaaacatgaaacaaatgggctctagttgatttaggcccaaaattattaatttccagtataagtttatttcaaaagaaggacaaaggtttggagtatttgatgataagtatataaattaagtaaagcatgcaataacgtcctcgacaatctcggaccttattgttcgtctctctctccaacactgtagcaacttttcatcttttttttcaacttcagtcgcgtgttgtaatgatgttcaattagtagtattgcttcttgctccaccggatcttcttcttatgcgctcagccatctctttcaactatcaccgcctctattcggagagatctcgttctccgactaaggaattatgatcgccgacgccgtttctaagtctggccaccaaaggtatcgcctttcgagcttctccattgctacaatgcttatctcggtgtgtttttggtttttatttactacatttgatggaatttgttttttgaaattgcggtttctcagttaatctctctgctctcgatttgctgagcaaaatgttgtctttttagatcactagttgagaatctagtgatcattgatcttgattttttctatattcttagtacttagggaagtgaatgaggttggttttatgaacagggatgcatatggattttctgtgaggcctcagcatgtgcaaagataccgagaatatgttaatatctacaaggttctttctatctccataacttttattttctactcggaaaattcttttacatgattgagtgcacactggcattcttaggaaaaaaggaaggtttgtctaaaatttggtgatccattaaagtagctttgttacagctgtgtgaaagatttcagaagtggacttaacttagaagtttacttagtggtcttggtttaatcaatatcgaaaggcttcatatatcataagtcattttttggttcttatatggttgacgcagtcactgtcactcgatgtttcaccttaacattctaatgctgttttttactgataaactgcaggaggaagaagtggagaggtcggcaaggtggagcaatttcctggaatttcatgcagaatctggcgtgtcacctacgaatggatcgtctgaatatactcatgtcaatccaagtgaaagtgacaagaaaaaagaaaaggaattaaacaagggtgctgaaagaaaagatctgaatgctgacaagccaggttctgatttaactcctgggaatgcgagagaggaagatgaagttcccaatagagagaagaatgtgcacaaagttcagttatgggctgagatcaggccatctcttcaagcaattgaggacttgatgagtgtccgtgtcaaaatgaagggggattccacaaatggcgagcaagaagctcagaaattgaattccttagcctcaactgatgagaccgagtcttcaaagggagtatgtgagaatgattcggaaaacgagttctatgatgcggagagatcagatccaattcaggatggttcttcagatggcacaagtgtctccagcatgtctgctgctgctgatgcagcttccctagtatctgcatgcccctggaaagacgaacttgaagttcttattcatggcggtgcacctatggctctgaggggtgaggtaatacatcctgtcattctcttttctagcattctcctgctattgatagttagttcttattatccttattttctgctcaataatctgaaaatatatatacaaatattcagctctggcaagcatttgcgggagtcaagaaacgtcgggtcaagaattattaccaaaatctattagctgcagatagtctaggaaacgacatagagcaggagctcatgcagcatacagatgagaaaggttcaagtacagaccccctctctgttgtggaaaaatggaaaggtcagatagaaaaggttagcaactgtacattacttggcatccagcattttctaactaatggtgcagtactggactcctgttgatcttggtcatttttcttagcttttgcttatttcaattacaggatttaccccggacggtttccaggtcatcctgccctagatgatgatttcagaaatgctctgaggcgattgctaactgcttatgccaggcataatccctctgttggatactgtcaggtattcggttatttaatactgtcacttctgtgtcctagtatggttacatgctcacaaaaatgaacatctcaggtatttgttatcttgtatcaataaatcatgtgcaggcaatgaatttcttcgctgcacttttattacttctgatgcccgaagagaatgctttttggtatgttcggaaactactctctaactcctaatattgtattattgtttgtcaatgaaaatccaactctttggttctgtgtgaagttcgtgtatctatgacttccttttcttttggttgaatattaactactgttagcccattcctcaaatctcttcttaacaaacatgtaagttaactaaatattacttcggattttaaggtcgcttacaggaatcattgatgactacttccatgattattattcagaagagatgctcgagtcccaggtaaaatagtaatctttttgttacagtattttcctatcctttatggccgactagtaatctcatcataaaacattttactttccccaggttgaccaacgagttctggaggagttacttcgagagagatttcctaaattgggttagttttttcacagtcttgtttcatcttaccaaaaatttggagttggtgctaacactacttgtgatttctgtccatctgcagttcatcatctagattatcttggagtgcaggtggcttgcgttacagggccatggtttcttaccatcttcattaatatgcttccatgggaaagtggtcaggtttttagaaattggaattttaaactttacttttagaggaaaattgtttatatactcttacgttttctgaatgtcagtctcaaatatcttctttggtataacagttctcagagtgtgggatgtgcttctatttgaaggaaatcgtgttatgcttttcagaacagcactcgcattgatggaattttatggtactcggttgaacctaagtatccatatgatttaagtaataatcaatggaattgctctaaactttttatgcttgccatatcaggtcctgcattggttacaaccaaggacactggagatgctgttactttgctacaatcaatgactggttcaacatttgatagcagccagctcgttttcactgcttgcatgggttaccaaaatgtacatgaaagtaaattgcaggaactaagaagcaaacacaggccagcagtaatagctgcatttgaggaaagattaaagggtcttcaagcttggagggattcaaaagacactgcaaccaaattacataattccaagcaagacccaaattctgttttagctagcaaagcctcattgtcaaatgggagtttatctcgttctgaatcgggatccagttatgcagacgacatctttattagcctgactggggattgtgagatagatagttttcaagatcttcaaggacaggtaatttgtgtcatcctttctgttgggttggagatgttgcccctaggaacttgaaagataaatatgatgggtagtaacaattaagaaagtttcttacatgaaatttatctggaccaactaataccactactatgaatataattacgcattagtgccagtaattgcaatgtcaacttataataacaacatttgcccacaacgactccaggttctctggttgaagggtgaactccacaagttgcttcaggagaaaagatctgctttactaaggttaatctcgtatcttagtatatgactttggatattgaaatcactggtgaacttttttatatatctccttatgatccctccatcactccctgtgttattatagagctgaagagttggaggtagctctcatggagatggtcaaacaagacaatcggcgtcaacttaaggctaaggtattcccatttgttatttgaaactctgtttcctaatttagcatgtgggtgtacgttcagttgtttcttgatctatgctatcatgaataaggatgatgcttgctcctttgagatagcctgacttgttttatgctactgaacaaagtttttgggtagattgagcagttagagcaaggggtgacagagcttcgaagacttgtttctgataagagggagcaagaaagtgctatgatacagggttgcatttgcactcttctattggaattcaaagtaaggtaattctaagaccacttgaaatttatgaaggtcttgatgcggatggagcaagaacataaagtaacagaagatgcacggagacttgctgagcaggatgcagcaacgcagagatatgctgctgaagtgcttcaggttagaaagtttgcattgactaatgactacaactattgatgaaagtgtgttgcctatctgtttaacctctattttgtgtgtgtggtcaactaagtgtctaatttatcgactgacttatctacttgctacagaaatagttatgcctattgattccttcctagaaatttggagcttactggttcttctttagtatgataccttgtggcatgtttatattatgaggatgtcatcttgttagagtttctttgtctcagtatacacttattcgaggcgacacaaaaagttatcctcagtatgataatgctaatggtgtaggaaaagtatgaagaggctgttgcagctctcgcggagatggaggagagggcagttatggcagagtccatgttggaggcgacttttcagtatcaatctggccaagttaaagcacaaccttcaccacggtctgtttctttggcatatatcaagtgaacttggtgtagaaaactagattttccattgggtgcattaagtcaccattatttttctgaaacttttcaggcaactgaagcaagatttgccggtcatggtcagtccctagaatcttatccaagtcagtcttcttctttctctcactctcatatacagtatagtcaagagttcagtgcatgtaacaattggagtttcttttcaaaaccaattgtgaatattacatctgaatctggtgctgagcattaacaaggtctctctgatctgcgattgcagaagactacatatgaaagacctaaggagcaagttaacgacgagaagtcatcaacagaaggacaaacacaaacttcatag

SEQ ID NO: 154796 - DNA, 3012 bp, Arabidopsis thaliana landsberg
acagatacgttatcttttcgaataacacacaaactcaacgttgccagtgaagttcgccgtcgccggagctcatggatcgaccaccgtcgtttacaccctatcaaaattctaatccgaaattcttcaaccacgcttctccttttcaaaatcctaacaattttactccatcgctccggcgccgattcacgagctctccggtatactctcttcttctgttgtcagaattttcttagattccctatcgaaaaatctagcttttagatcactcttctattctcaggacaagcggttagtcattggttttgaaattaaaattgatttttaggttcggtatacattggtattgaaattagaattgatttgcggtttggtttacactggtttagagaagaaaacaaacaaattttcacgcgatgggaatttttgagactagtgcgtcgattgaaaaaggcatgatttcgaaaggggtatacccacagaattgctctcacgcgctcaacgctcactttgtgcgagtgggtgtgaaatagagccttctgattggcttagaaactctaaaaaaagtgaaatagtatacatgttgctagctcatgttgttatttgataaagttttgtactgacatctttttttcagtcaccggaagttggaagttcgtttgtgataggatctaaacaagtatcaaagtctacaaattctggattaagcaagttaaagacttgtgattcccctgtatcttcaacaacctcgtcttccaaaactttatccaaagacatctctagatagccatagcaagccgcagttacattatacaggaaaggtaccacttaaggctttgcattccaaagaaaatgtcactgtcactttgtttgatatgtttgttctgtggattgttaacatttgtttatgcttgagtgaggtcccagacaggaaatcaaactcatactatgcatgtagctagtgttgttctgttgaccctataaagcctttacttttactctagtcagcttatagttgcattctttagcttagttctctgctttacacactttgcaacctagtagaacttttctcttatgacacccatgatcaatacattggttgacaataatgaaagtggagttgtacacctctcgcagctgctataacatcttttctttttatcaagtgatttttatgttcggtaatagcttactgtttcattaactctgacaaactgtttattattgcactgtctgaacacttaaagatgaacaactgaccataatttcgcatatatctgcagaacctcatttacctggcaggttctgagagctcaaatgctgaaaccagtggtttaaggcgcaaggaaaggtcttatataaataaagctttgctgactttagggactgtgagttcttggttatcattgttttcccccaagcgacaatagtttttcgaatttaagaaccttttttgcaagttggatcgttcttttgcaaatttgtaggtacttgttatagtatttgatactcttatttactttctgttggtgacatgcatagtgctgatttcactgtctcttatatttttatgatccaaacatgaaacacatacataatccatcctcaaccaatggaagagtctatcaatcaaaatcctgaagctatggaagcacttatctccaatctctttggaaacatctcgtctttgaaatctgcttatatcgagcttcaaagtgctcatactccttacgatcccgagaagattcaggcagcggacaaagttgtcatttctgaactcaagaatctttccgaaatgaagcatttttacagagagaataaccccaagcctgtatgtgtctctccacaagactctcgtttagctgcagagattcaagagcagcagagtttgttgaagacttatgaggtcatggtgaagaagtttcagtctgagattcagaacaaggattccgagatcacgcagatgctgcagaagattgaggaagcaaaccagaaacggcttaagcttgagaagaatcttaagttaagaggaatgtctacaaaccaaggttctggtggagatggaaatttacagtttcctgacttgactactgaactctttgtatctacttacgaagctgctgctaaagttgtgcatgatttctccaagccgctaatcaacatgatgaaagcaaaaagatgggatcttgatactgcagccaattctattgagcctgatgttgtttacgccaagaggcctcacaaggaatatgcatttgaatcatacatatgccaaaggatgttcagtgggtttcagcagaagaacttctcagtaaactcagagagtgctacggttatggccgatgatgacacagacgcctttttctgccagtttcttgctctcacggacatggatccactagatgctctaggtacaaaccctgattccaactttggtatattctgcaggagcaagtagctcctcttagtccacccaaagatggaagcttttttctttggaaatctagaccagcgtgactacgtgacaggaggtggccacccgaggactgcattttaccaggccttcttaaaacttgcaaagtcgatatggatcttgcacaagcttgcttactcttttgatccagctgcaaagatcttccaagtgaaaaagggtagtgagttctctgattcatacatggaaagtgttgtgaagaacatacattaatatggattcaatctgtgtacaaaacgaaattagagatatggtgtaatccagcttcctcataacatttagcaatatggtttaaagattcggaccaagttccttcgatagaagccaaatccaagagaaaagccgcaacatccaacgcaacttggattggagctttgcctttatgcaaatcttcaaaacgaccttcatcactcactttttcccttatgaattcgatctgctcgtcttcccattgtgctatactagcaacctcctgcatgttttcaagataccatgaccatgaatatgtctctatgctttaa

SEQ ID NO: 154797 - DNA, 568 bp, Arabidopsis thaliana landsberg
gttatttcctctctaagctcattggtagacctttactcttctcgctttggcctgacaagctcgtattcttccaagatcaggtttgaaaaactaatcaaatcaatcttattgcgctttcttcgatataagtttccgaggaaattttgaaagagtttttgcgggttttgtttctttaggttgcgagaagaaaagatcggttgatgaattatatgctgttcttgaggctaacaccaacattgcctaacactttcattaatgttgcttctccaattgttgatgttccttatcatatcttcttcctagctacattcatcggtctgattcctgctgcatttgtcactgtccgggtatgagaattttcatgcatcttcctggtttttgtcttatggtttcaatgagtttgaatattatctaacgaaaatgtgtttgactttgtgaccaggctgggcttgctcttggagagctaaaatcattgggagatctctatgacttcagctccatggcgactctgtgtctcattggtgtgctctctgtgactccaaccctaattggcaagaaacaagcatag

SEQ ID NO: 154798 - DNA, 519 bp, Arabidopsis thaliana landsberg
tccaaagcttcgcgatcgatcttcagtgatcatcaaatcgtaaccagtaaaaaatcgatcatgtcgatgctcgattccttcttcaataagggtttcaaagctgcaaaatggtattatcctctctgattttcatctcttatgattttgcctaaattatcaatctagaaactttgaagaagattctgattatcaatcatgtgttgtgtggtttttatacacagcaaaaccttgctcaagttaacgatccctaggattaagctaatcaggaatagaagagaagcacagattaaacaaatgcgtcgtgaaattgcgaagcttctcgagactggtcaagaagctactgctcgaattagggtttgtttctatccatggtcttattagtttaattggaacattgtttgactctttggttatctttactaggttgagcatattataagggaagagaagatgatggctgctcaagagatccttgagctcttctgtgaacttatagctgttcgtcttccgattatttga

SEQ ID NO: 154799 - DNA, 2136 bp, Arabidopsis thaliana landsberg
atggttggtaaaggctcaagggcagagtttttccaagaggatatttatgaggagctagaccatgtggtggagcgattagagcagcttacagacttgcatgcaatatctcaaagtcctcctgaaattatcaccgaagaggcagacgagataaaagagattgatgaaggattgttgtctgaacttgactcgattggagacttcaatgttaaggaagttgtgacagattctgaacctgggccatcttcgatagaaaatgctatgaaccaggctgttgtagagagcatggaaaagcaaccaaagtcaccacaatcagatagtaggtctggagaaatcatgtgtgcagttgaaaccaaaccataggagtcttcagttgacgaaagttctattgatgaaacaaacgttgtaacaacatccgatgttttacctgtcgtagctcgatcactggaagaatttccgcaaccttctgaaccaaaagaggggatttcaatggaagtaatctctgaaagcgtgatgattcccacagaagctactggtcctggtaatgtaacagtaattgatgaagttgtgaccgaggaaacgaaagctgagaccaccgagaaagaagaagaaggagaagaggaggaggaaagtaaaccaaaagagataacgaaatctgatgttttacttgtcgaaactcgagcactggaagaatttccccaaccttctgaactaaaaaaagggatggcaatggaagtaatctctgaaggagtggtaatccccacagaagctgctagtcctagtaatgtaacactaagtgatgaggttgttaccgagaaagcgaaagctgagaccactgcaagcaacactgatgcaaatgtccagagtcccgtgtccgaagaaactccagagaattcggtggaaaccattgcagagcaaaaaggaaagtaggagaagaagacgaagtccaactcttcaagctcaagctctagttcgagtgactcagattgagaattaaagggtaatacataatctcaaactcaagtaaatatatctttgttaaatggtaatgataggcacttctgggttttgctttttcatctgtgtcctctgttttaaaaggggcaagaagtagccgctaatcatatttttataccaagttttcctttgtattggttttcttgtgtgtttgtgtttccttttctcttctttcttcagctttcatatttatcgatttgattgatttgtatttctcgaaaccagagaggttttttcagggttttggattgtgtctttaaatacttttttttggggggtttgttatttgtatttggacttgagaaatgggaaaggtactgccgtttggatttttctatgaaacattgtaaaataatggactcgatccaagccggtaacaccgttaagcttacaaatagaaaataaaggttcatatttagttgtaattctcgtattaacataaagcattgcctctcttttttttggtaaaagataaagcattgccttgtgtttgagattatatgtaataaagtatccaagtgtattcatataaatcaccaacttttgattcaaagcataatgtgtgtgtatagagttttattgtttcacatgtctaaaagcatgcctttccatagtttaatcataaagttttataagccagcaataagaatacttttggatcttgtgattcgtgtatcatatgattaccaaactcaagatgccaaaaaaggttggtaaacaagtattttattgatccaataatttgttatactaatacacatacgatttagttcaataattcctaaagaaaagttttttgtttgtttttcgtttaattggattgataaaagtattcaattctttatgtcgtacaacaagtaaatagaaagaaaaaaagagagtgcgagtttcactttcaataaatgcttgtgtgattatctttatttgtgtacatactagatctacatccaccgacaaaccagtgtcgaggaagcatatgcaactgtcctgcagatttaaagtctcatgtaattaaatgttgttcaatttgtttgttgtgtgattaccagtttggtgtatagttaaagttaccaagtaattatacaaatcatcaaacatatagtactattttttctgtttatc

SEQ ID NO: 154800 - DNA, 451 bp, Arabidopsis thaliana landsberg
ctacatctccccgaacttcaacttctggtcaatggtgaaaacgacttatggagaagatggtgacgaagagctttgtgatgaggtcatagtgaatggagatgcagacagtgcggaggaacctgacgatgacgttgaacttgatagtgagatgaacacgatgtctacaactccgaaacactctttcatgcgagaaacagagaggctcttgaagatgccttcaagaatcagaccatccactagtcctcctgaatccttcttaatctaatagtcatagagagagggaatgcaattttgcaatgtaggtttcttattacaatctcttagctagtgcgtaaactctaaaaaaaagaagttgacatgagttttgtgcgagtctgtggtattatctgatcgcatgtggttttgtagcaaaattttgaagaacatctatgaagtaaaatttagtcagttg

SEQ ID NO: 154801 - DNA, 676 bp, Arabidopsis thaliana landsberg
atcttatcaaacgactttgataatctcattcttctgcttctctccggtatgttttcggttgatttggtgtggtcatcgtcgactcgccataagagagaagaagatgaagtgagattggcaaaaaaaaaggtactgtgaaaatttgcttttgaaatgaataaagaacaagataaacgatgatattttgtgttgttgtaaaattgcaatgaattgatggacaattttttttttctccccttgatattttcagtttgtcgataaagtgataggggaaagagagaggggaaagagataggaaaaataaaaaaagctaagaattagatagttaaagggtaaattggtcaaataacttattcaaagtgattaaaactttttaagtgccttaatcggcattaagttttcaaaaagtgtctaattacgtaatattctcataagataggtgtgtcatctctcataaaactctgtaaagacaaagacgaaagacaattcccctttattagaagcaaacaaacaacacctaacaaaagcgacgacataaaaacacggcaacggaaagccatgtctacgacataaaacacggcaatgaaaaaattatgttgacggcaagaacacggcaacggaatagccctgttaacgacgatgaaagataaaagcattctttctctagacagaaaag

SEQ ID NO: 154802 - DNA, 453 bp, Arabidopsis thaliana landsberg
agtacctatgatctcgccgtcaatggagccgcttacggtgagttacatacattcaaatacattaaaaatatattagtctaattgtttttaaaatgtcttctaattgtttacattgatcctacaggatttgaggttgtggacaaaggttgttgtggggtggggaggaacaatggtcagataacatgtttgccgctgcagaccccgtgccctgaccgaaccaagtatctcttttgggacgcgtttcatccgacggagactgctaacatactgctggcgaaatctaatttttactcccgagcttacacttacccaatcaacatccaagaactagccaatctttgaagaaataatatcttgatctcccatatgaatgcatatatgtcatgtaatatggctatttataaaatgtttctatttcctatgtgttaaccttatgtttctttgaaataacta

SEQ ID NO: 154803 - DNA, 2301 bp, Arabidopsis thaliana landsberg
atggacaaaatactcctgaggaaactttactggtgggtccagaaccagttactataccaatcggggaatcactattatctaatcgtgccagatctcctgaagatgggaatggagatattgcagataatcaaagatgaccttatagataaggaagaagctgtttctgttgctgaaacatctggatcctcgttttctggcttctcctcctccccccgtaatgactctggcgacgagatttctcgttgtgagagcttcagttcatctgaatccgagagatcagagtccctacttgatgctcatgtctctgtagagccagaagacacctgtttcagcaccattgaagatgctccatccaaactgttgtctccaaaatttgtgcacttggttgaatctgtagataatctcgctaatctgcctaaattaagtgtacataaacctgaggatgatgctgggcagaaccagagccaatcaaggagcttacactcattagttacggataggcatccagtatcagctgacccatctctgaagtcatctgatttttggggtacggctcttggatcagccgaacgtgtgagtgattcttgtgttaaatctaaatctggtagacctggtaactcctctctgcatttctcctttggctctggctcctctagagacacctcagctgctaaagtttctgagcagaggagtagcattttaaaagaagctcctagggggactggttatatatctgatggagtaaacttaagagaaagaaatgctaaaagatttgatgaagctgaaattgcattaccaatttcctcttctactgatgcgctgagtcctttggactcttctaatttgtcccatgtgacccttccgaagtcaaagagcgctagtagtgaaaatggctctatgttggcccctttgaaggttggggaagtccaacttttggcatccaaggcctcgaataccaagaagtgtgctgatcttatgaagcattctcctttaggtgcaaaatcggtaagagttcttgatcatcagaaacagaatggtgctgtcgttcagcatataaattctctacatggaagaagtggtttaaaggcatcagtactgaaagttgtagaccagtggaccagaccgaagtctgaaaatgagatggcaggaagacatggtcataaggtaatcactgagttctaggatgttatcatcattatgcaatacttagttcctacattaacaaatcagcaaagctatttttcttatcaatcttttggtgacatgcaggggctctttccatatgaagtctttgctaaactgtatacatataaaattgagttccagccttgtggcctcatcaacgttggcaataggtaattccagtttcctctttttctagtcgtttttagctgttataatcttcagcttgtggtgtaaaaaatgtaaagtaaatgtgtagcttacactcgctgatgcaagaatatactctgtttcttgcagctgctttgctaatgttgtctttcaatgccttatgttcactcctcctctgacgacatacttcctccagcaatttcattccagagcatgtgcgtcactggttctaagtcttttttctttttgctgcttattttggaaggttattttttattatcatcaatatatcaagcctttaataagtcgtttaactataggtacaaaaaaagaacagtgcttcacctgtgggtttgagaagctggtcgtaaaggcaaaagaagagaagtctccactgtcccctaatggcttgctatctcagctgcagaatattggaatctttcttgggaatggcaaggaagaagatgcacatgaattccttaggtgaactgacatttctgaaattgagcaaactttgttgcatatatctttattataactggaagatctgtgttaatttcattttccttgcaatttgcaggtttgttgtcgatacaatgcagtctgtgtgcattaaggcatctgaatatgatatgaccaagagtagcaaattagaagatacaactcttattggtttgacatttgggggatacctccggtcaaaggtatcattacctacaacatttgtactttactcattttactttgttttggagggagttgtaatcctggtacttatgatctctgccagattaaatgcatgaaatgtcaagtaaaatctgagctgcgtgagaaaatgatggatctaacggttgagattgatggagatattagcaccctggatgatgctttgcgtcgatttacaaggactgagatattggatggagagaacaaatacagatgtggcag

SEQ ID NO: 154804 - DNA, 915 bp, Arabidopsis thaliana landsberg; identical to SEQ ID NO: 13014

SEQ ID NO: 154805 - DNA, 416 bp, Arabidopsis thaliana landsberg
tcagaagctagccgtcaaggtcttgtccaccgtccaccacagccactctcctcgtcatacctctccctccccgtctccggtccatcaggagttgtcttcgccggggccttctccaggagtggaaccatcatctgattcaaactctcgtgttccagctccaggaccggctacagctcccaattcggccggtttggttggtccggggatggtggttcttgtgattatgataagttctctgttttgaggggtttatatattgtcgctagtcattaaatttgtgagggtattaattactctaccattgagtttcatatttatgtgcctttttatttgtatgtttgaagcatcttgtaacccatttttaatgtttccgctgtctcgtttttgttcttactaaagaaaatatttaagatatt

SEQ ID NO: 154806 - DNA, 731 bp, Arabidopsis thaliana landsberg
gtggtggtgagactaactagggacttggttgagacgtacaaaatatgtgacccacagttcaaatatagaggagagttgaatcccaagcggtacttgactactccatcagttggtgtgaacaatgatggctttgataatgtcaactacgatctaattctggctgtaaatgatgatttttgcagttcagattcacggcagaggtttgctattgtcttatttattttcaatttttattataccaataatgatcctccttttgttgtgctgtcagacgcataaaatttgaaccacttttctatccacaatagacgtctatttgattaagctaataagcttcactcgttctcttagatacattgtcaaagatcttcttggccatgggacttttggtcaggttgctaaatgctgggttcctgagacaaacagctctgctgctgcaaaaggaataaaaaaccagcttgcatactatcagcaggcattggctgaagtatctattgggacaacggcatgtaattattcaagatttgaacgatcttttgtattcatattctaggcggagaaaatcgctagtggggtctgtctctgactcttcgcttgggtgtggagctaaacaagatgcatgatcctgaggataagaaccatatcgttcggatatacgactacttcttacatcaaagtcatttgtgcatatgctttgaacttgtagacatgaatctgaaagtctatgactg

SEQ ID NO: 154807 - DNA, 417 bp, Arabidopsis thaliana landsberg
attttttaaaaactacttctttctagagacaacaacaggctaatcaagagactagatatatggccatggagctcgagcttgatgatgatgtcttctttgctgacataagcaagcaactcaatctcttaatcacagatgaagatgaacaaaaccctatttcactttcctcttctgtctctttccaggtttgtccaaatttaaactcttttctttttctctatcttatatatctcttgattagtgattaaccgcgatgttgataacaaaacagggtttgttcagaggaaactaccaaacatcagcaacaccatatatgatgtacaatgagcagatcaattacaacgtaatccgagagagcaaaggaacaggagtgtttatcccaagatcttctcagccaagaaggaaacataatcatca

SEQ ID NO: 154808 - DNA, 771 bp, Arabidopsis thaliana landsberg
atggtaagagcttctcaaacatacatataccaaaaacaaacaacggatacggtgaactgtatttcgacggttccgagatcgatctaatcggaggtttttggcttaatttaaaacagatccaacaacaactaggcgaaaagaccaaagaacaaacttccaacttaactaagagattccaaattcaaaatcggagcgacacagagagagatgatgatgaatctgatcggagcgtcgaaagttataatttattccacgttccgttgactgattttgacttaaatatcaaatggagggttatttttgtaaatgactatattgtaggaattaatcaagtacgtaaataatattttagtttgtggggtgcaaatctgattttatagatagggaagttgctagcatgcgttctccacaaacgagatatcttttttttttttttttaaaaaaaaaggtccagtcccaattgggcttaggcccggaattacaatcgtccacagttacaaaacaggaaaaatccggtcaccggaaaaagagaaccagaggtggatttgggcagtggaacggaggcagcaaatagatctattagtaccgtcgtatacaaggcccactactttgcaacacaaccaccggaacgagatcattggccgaagtatacgagtcctgccgcaaatctcttaccaatgagctggccggacctgcaacaaacctaacggaaaaaacccagtttccgacactccgccacccaatttggtcgagtccccaacctcgcaaaac

SEQ ID NO: 154809 - DNA, 266 bp, Arabidopsis thaliana landsberg
cttctcttcatgaattaagccaaaccaacaaaaaaagtcatttaattttcgcggagagatggagaaattctcgtacaactcttatccagattcaaccgactcgtcaccgagatctcgtgagatcgaattcgataacccgccgcctccatgggatgatcagaaccagaaccagcagcaacatagctacaaggtgaagtttatgtgcagctatggcggcaagattcagccacggcctcacgataatcagctcacttacgtaaacggag

SEQ ID NO: 154810 - DNA, 141 bp, Arabidopsis thaliana landsberg
gaagaaaaagctgttcctgtgctttagcagaccttttggtagttgtcttggtcgctgatcatccctttccgacaactttgttgctctttctctcacgtttgagctctctctctgtcttaatcttcgattgtccttggtcat

SEQ ID NO: 154811 - DNA, 3573 bp, Arabidopsis thaliana landsberg
atggcaaacaagtatttttcctctgttctgaagtcgttgcttctgcttcttcaccttgtattcttgagtaagcaacatgttagttctgccacaattatcaagtctcttcctggttttgaaggccctcttccctttgagctcgaaaccgggtttgctttggatgtcttcgttttattaaatccgtgttctcaatctgagtttggagataatgtaaaaaaattaggttaatgtttcttgtgaatgaaggtatattggtgttggtgaggaagaggaagtgcaactattctactacttcataaagtctgagaggaacccaaaagaagaccctcttcttctctggctaagtggaggacctggctgctcttccatctctggccttctttttgagaatggtgaaatcgaaaacattgataaactccttcttctgcgtctttgattagtcaattctatatatctatataaacagggcctctggctatgaagcttgacgtttacaatggaactctcccttctttggtctctactacatattcttggacaaaggtaatacaaaaaaaagtgtgtattcttgatatatatgccgatcagcaaaacccaataatcaatatattcttgatcatcattttcctcagacttcaagcataatattcttggatcagcctgttggaactggcttttcctattcaagaactcaactttttaataaacccagtgattcaggagaagccaaacggatccatgagtttcttcaaaaagtaaaataatgacaaacttaattgtctcttgaagccaaacggttcttagtaggagcctttttctatttttcttgttgttgttgtggtgcagtggctaggcaagcatcaagagttttcctccaaccctttctatgttggcggagattcctattccggtctggttgttccagctaccgttcaagaaatttcaaaaggtatatatatgttttatgatatcaatcccctaagcccttttctcaaataccattattgtaacagaagaaacatgatggtgatgcaggaaattgtcaatgctgcaatcgtccaataaatcttcagggctatgtgctcggtaacccgttaacagactgtgtatatgattgtaactaccgcattccatttgctcataaaatggcactgatctctgatgaactcttcgaggtatgaagtatgacatttgcttttgtttcgtgtcaccccaatgaaaagcggttcaaaacaaaactttttgtccgcagtcattgaagaaaacctgcaaaggagactatagaaatgttcatccacgtaatacagaatgcttgaaattcattgaagaatttaataaggttacacactcaaagctgatgttgtttgtgccgtacgtaaataaatattcatccctaaattcatacctttttgtgattatctttatttagtgtacaaacagcatatgtcaacgacgtataatagatccattttgtgaaactgaaactccaaattgctatgtaagtaattcatacaacttattcttgccctctgttaaaccatttgagaaaaatatatgtatacaaggttgcttttgcagatttaccgttttttgctagctgcctattgggccaatgacgaaaccgtacgcaaagctcttcaaatcaagaaggtaacaatttattttaattttcttggtaagggaacaatgttgcttggtaagagaacaatgtcattcttataggacgatctatgattgcaggagactataggggaatgggtacgatgtcattatggtattccatacaaaagcgacattagaagcagcataccttaccatatgaataacagcatcaatggctaccgatctcttatcttcaggttagaattaaatttacttttaaaagaactgatcgtatacccctatacaaactacgatatgggtgcacaaagaaacaattacaacaaaggaaaaaaaaaaagagaaaaaaaaatattcataaccagagatatctgaccaagaatacaatgaaaccagtaaagttttacaaaactatcgttaaaaacataaaacaaagacggaaacagattttagtgtacttgagctaaactaaagcgaatgaaccaaattttatattacgtaaacataaatttacaaaaacctttatagatttgtaaactacgatcaaaccaagtccaaactgaaaaccaaacccaaagttatatgcgttgcatcaaaccgaactgaaaccaaatcaaagtataaatgttttttttttttttttggttttagttttgtatagaactaatttgtacggtttatggtgaacagtggtgatcatgacatcacaatgcctttccaagcaactcaagcctggataaaatctctaaattactccatcattgatgactggaggccttggatgataaaaggtcaaatcgctgggtaatatatttatatatacacactttttgttgtagatctctcttgttcgaacaaacctcgcaaactcacataagaatcattttcttgcagatacacgagaacttattccaataagatgacatttgctactgtcaaagcaagtcttcttaattgtttcagcttaacatttttattttcattgcatttccatttgaaaaattgtattataattttgttttgattacagggaggtggacacacggcagagtatctaccacaagagagttttatcatgttccaaaggtggataagtgggcagcctttgtaataataagagatgatgatgccctatgccaatgaaaaagaaatttttgtagcatcaacttttttatatatatatatatatatatatatatatatatgtttacaatttaatctactacaatattgtaaaagaagatcatctttaagaaataaaaatatttttaaaatgggctctcaacaaaacaaaactgtgtaagtccaaacgtctcataaataattaatcataatattcatgtctccaatcaaataaacctgagggagatggaagagatcgatgtttccaaaggcatactcgacaactatgctttcgattttatcaaaaaaaaactatatttttgtggatattataagtttctttcagatcataatcattgagttcttgggcacatttgcaagcaccacacctcttacaatagtccaatgtttcttgagcattttcgttggcttcttgggcatgccgatcgctgcgggctagaagaaaatacccatgtgatggaagacacaatgctgataccaatctttctcttatataacagaagttcctattgacacattgcaaatttttcacaaagcttgcatttttgcaattttttcctttttgatattgttgactaagtctgagttaaataggctaaggagaattaatagactcatccatgttttctatgtttatatgttcttgaaatgaatccatcttgtctaaaaatcaaaatcaaaaacttggactagtacgagaattgcaaagatacatgattgaagtgatcattaaagaacatagaagaaagtggaccatgctgtatttataatccttagagtgatcatgtggcttttcctggaagagcctta

SEQ ID NO: 154812 - DNA, 1707 bp, Arabidopsis thaliana landsberg
  unsure (1)..(1707): unsure at all n locations
atgttgttgactctctctcctaaaaccctatcttcttcttccttcttcactgtgcacaaatcgcaaaaccctaaatgtaaatctccagattcatgtcgattcaagagcttgaaatgtagttttgatcgaattttagtgaaatccgaggttcaaattgagaggaatctcgaatttgaaacgggagagacatttttccgccatgaaagcgctagaggacgagacctcggtgttttgtcagcgacgctacacaagagatctaatggaagcttacgggtactcgacgcaatgtgcggatgtggaattaggtcgcttcgttatcttgtggaagctgaagctgatttcgtgatggcgaacgacgcaaatgatgataatcggagagtgattacggataatttgagtaaagtagagagaggtactggagatgagaggagatgggttgtgactcatatgttggctaataaagcgatgattgagagatatatggttgcggatttcttcgatatgattgatattgattcgtttggaagtgattcttcgtttttgagagatgcgtttaatgcattgagattgggtggtttgctttacttgacgtcgactgatggttactcttctggtggtcacagaccttataagtgagtgaaagcaataccattagtctttgtggtattttaggaatcatgatatgatttagggactaggagattgaaagttgaaaaatttcttggtttgttttggtgtagttctttagcagcttatggagcatttattcgaccaatgccgtttgggaatgagattgggctgcggatgcttataggtggagcagtgagagaagctgctctgcttggttatcatgttacgcctcttttctcgtactattcttatcacggacctgtgtttagagtcatgctgagggttcaccgtgggaagctacatgaggacaggttgtttctacatttagaatttgactcgaaaggaattgagttttggttatgttgcgtttctaattggagttgttttgtgtcttttaactgtaggaactatggttttgtcacgcactgtaatctatgtggccattctcatacattgagattcgatgaacttggtttgatgggatgtccctgcagtgatacaaaggcttcttcttcactggttgtgtcaggaccaatgtggctcggaccgcttcatgatgcatcctatgttacggaaatgctggaattggcaaaggaatggggatgggnnnnnnnnnnnnnnnnnnnnnnnnnnnnnnngcttctcagtataatgattgaagaaagtgatcccagactaccacctggatacacaaaaatggatgaggtcctctaaaaccatgattttaatttcattgataagatagacgcatttcattcacattacatgataaaagatttgtttttgtgattagatggcgagccgtgcgaagatgaactcacctccgttgaagaagatgatgagtgcactagttaaggtaaatagtagttagattctcacagctttgatctctgaagaaactgatctgaaggtacaaagttaaaaagctctgctccttggatttttgcaggagggttacgctgctagcagatctcacattattcccaatgctcttaaaacagattgtcccatgtcccattttgttaggattgccaaggaaaatttgcatagttaactttttgttataatcaagtttag

SEQ ID NO: 154813 - DNA, 212 bp, Arabidopsis thaliana landsberg
atgggtaaagagaatcagttggagacaacaaattgtggagtcaatgatcacgattgtccacccgtcaagaacgaggaactagcagctgaggcgcgttatagtacagacagtgactcgggtttgccaacctgtcgtgtatgccattcaacagaatccgacagacgaggagataccgccttaagtgaatggggattaccccaacggaaccagaa

SEQ ID NO: 154814 - DNA, 527 bp, Arabidopsis thaliana landsberg
taggcttttcatagctagtgtctgatctcagacaaacacagacatgtctgtgtctctaagctacacttgtcttcttagattacccaccttttcagttccaacgaaacccattagtttcaatggacctctccctttttatttaccaagatctcatatttcctcatcttgttttggtttcaaatcaaacccattcataagaactcagaccccaagattcttcaagtgtttgcctcagagagtgtctgatgaacgcagagaaacacaagtaacaacagaagaagaagaagaagatgaggaagaaaagattgtcgtatttgagaggctcttctctaacctgaatcaatcaacattgaagcgagaatccggtacaaagactgttaccattttgcatgtgaatacccaaatttggatagaaatttttggtttttaagttttagaaattttcaggaagtttgtccagtgcaattttcttggttgctggcactaccgtaagtgtgtctactttctcataactctctccatattct

SEQ ID NO: 154815 - DNA, 913 bp, Arabidopsis thaliana landsberg
cttttgaagcaaatttatggaaggaattcaagcatcctataccttgcactgtcgaaaaggtttttagcaacttttgtggtcgtagagcggttttcatcaaggctctctctactggtcagctcgatctctctttctctatttattctgtttcatttgatcgattcttaaatgatttctgtagatttgcgagttttttttatatgtttagtgctcgtttcttcaattgggttttcttaatttcctgagaaaaaaacccccaaaagattttggctttcttcttcctgttttgggtttattcatgttcttttgttgtgtgttttgttttgcagatgtacagaagttttaccatcagtgtgaccctggtgagttatttcgttacccatttaaagtcttgtatatagcttcctaacgcattggttcttatcttgtttataggaagatgtgttttttttttttttgctaaagttaagatttttcagtgcaagagttcctttcgggtctgaattagggaagagattgtaattggacatgcgttttttttgcttcatgagtttgttcacggattctttttgttcccagcttttgtttttctaaattctgttagattgttttagttagcttcttcctgattacatctaatctgcagtagacttgttgttatgatcctttttctagttgactcctctgttaggtgttatatctttgattatcttcctgtcagagttgttgtctgtttgaacagtttttttggttcatgatgtttgaacagattatagactttttaagtgtttgtgagatttgtacctaagatgaagttagttctctttgtggtttctcttctcgacttcttagtgaattacgtttaatgctaaagcagagaaggaaaacttgtgtctttatggacttccgaatt

SEQ ID NO: 154816 - DNA, 1271 bp, Arabidopsis thaliana landsberg
atggagttgggaaaatcgattgagaacaaaaacgacgttgtggataagactaacgaagcatgtcatcgctaccgtcgccaatggctccaatcttgtcttctcaccgatatcaatcaacgttttgctcagcctcatcgcggcaggttgatgttcagtcaccaaagaacaaatcctctcattcctcatgttaccgtcaacggatcacctcaacctcgtcttggctcagatcatctacggcggcaccgagaaaagtgatttgcgcttgtctatagccaatggtgtttggatagacaagtttttctccttgaagctttcctttaaagaccttttggagaattcttacaaggcaacttgtagtcaagttgacttcgcaagcaaggtaacgttttttctttcttgatggacaaattttgaatttcttgaatttatataacatccaatttgtggaatgatttgtcaaattttatgattgcttatcatgaagccttctgaagtgattgatgaggtgaatacatgggctgaagtccacaccaatggactcatcaagcagattctttcacgcgattctatcgatactatccgtagcagcacactcgttcttgcaaatgctgtatatttcaaaggcccgtggccccctaaatttgatgcaaacatgacaaaaaaaaacgattttcatctggttgggggtacctcggtgaaagtcccctttatgaccaattacgaggaccagtacctaagaagctatgatggtttcaaagttttgcgcctcccttatatagaggatcaacgtcgattctccatgtacatttatcttcctaatgataaagaaggattagctcctctgcttgagaagataggctccgaaccaagtttcttcgataaccatattccgctccactgtagatcagatggtgcttttagaatgccaaagtttaaattctctttcgagtttagtgcatcaaatgttctgaaagatatggggctgacttcaccatttaataatggaggtggtttaactgagatggttgattcaccttccaatggggaagaatctatgcgtatcgaacattttccataaagcgtgtatcgaagtgaatgaagagggaacagaagctgcagctgcatcagctggagttataaagctaagaggattgcttatggaggaagatgaaatagattttgttgcagaccatccgtttctattggtggtcacagagaacataacaggagtggttctgttcattggccaagttgttgatccgttgcattaa

SEQ ID NO: 154817 - DNA, 795 bp, Arabidopsis thaliana landsberg
atagagaaataacccaaaaatcctttgatatcagagagactccgatcaaatttcgaatcgaggggacaacgccatcattccctggatctgttttcgcccttctccacgattcaggtttgtatctatttgctttcacttcttcatatgaaaagcttgcacctttaattaattcagcatcaaaaaacaaaaaagcttcaaccttttgttttctatacggtctttgaagtttcctttttttttcctctctgaattctccttaattccgcttagcatgctcatatctatatacttgcgaaaagtggatgttattgtttttgtggactgtggatcttctctgatactctctgccatctttagcatcctcattcaattttttgtgcttgttgcagtctggtaacccagaggttgaaactattcgagcgtgaaagcacgaccctttaatccataccaaaaaaagcttgaacctttagtttctttgctgtctttggccattattgaattattgtttcctgctacaatgtcaattccgctgcatcatgtagttgattgctcaaatctttgtgattaatccagcagtttcaggcacttttatctctatggatgccaaaaagtttgacacaatctgctcgagagatgcaatcagctggctccctgacgaggttctgggtaaaatattgtctttaatccccaccaaacaggctgtttcaacatctctccttgctaaaaagtggaggactatctttagattggtggatcatctcgagttagatgactcaaactaaatgcaagccgtaa

SEQ ID NO: 154818 - DNA, 3261 bp, Arabidopsis thaliana landsberg
  unsure (1)..(3261): unsure at all n locations
gggaacagctgtctgctccggtaaagctcatccagatcaaatcgtttcacgggaggaatgcctgagggctgataaaaggagatattactcgaatttagagaaatatcatcaagagtatgtgctgttttctctatttgaattataggagtacttgaaatgtttgtccacatgattgtaactcctctttccattgtttctggtagtattatagattatttgcagacattgaaggagaaatgggaaagctgcaaagatccagagaaggatattgtcaaaatgatgtgggggtcagtcctttacaattttctatttaaaaggagaactgttgaagtgtaatgtaaccaagcagatttattgcaaagttatgtagtttggtgaagaaagaatagtcaagctataaccgttgttgattatagtatgagccttacaggaaatggatttatattgagcttgagtctagtgatgcctttatcaagatcttagttcattatttgtaactagtatcaatgaatcacctattgcttacatttatttttcaggagatcaagagggggcaatgcacaagtgaacggtagctgccagggtctgactgctgcctcggggtcgagttcctggaatgaagatgataaaccagacagtagtgataatatgatttctcctgttgtgaggtgtggagaggttcagagaaggtgctgaacacttactcttcacatgtgtacgcaatttctgttagtattcttttccttgccccagacctgcatactaattcttcctatccaacttaggtccaagcgctattggtttaaagaaagaaaaaactcaaaataatggggtaacggtgggtggaaaagttagaaagaagaacgtgtgccaaaagatagattcagcaaactgatggtgctaaatacatgtcctatcttaaggttagttattctttggcgtttcttactgtattttagttcatccgaatgctgtcaatcatcaagcagcagtaaactggctatctaaattaattagcttgaaaattattagaatgtcctgattccattagacagctgcgtgcattgtatttggaagtaggaccttatcttggagctgtttggaaaacaaacgattgctatcctctgtggcttttgttgtgttgaatgtgcagttgccgttcatgtaattgatgtgcctattgatcaagcttttaattgcattttatatattcagataagcaagaagcagcatcaaattgtcacaagcatgaagcagtctggtaaaagcattcagtcgagagcacttaatcgaatcttcggtaacatcgatagtttagatgttcaaccatacggagtttttgtggaagaagaacagaagaaactgaacgctcactggtcagtgttctggtgaaacaacctaaatcttcactaaattccttcaataagccattaagtctgatttcctgaaactttggttgtttcatgcaggctgcatcttgttaaagatctccctgcagcatatgcaatatggaaaaggctacagttacagaaacgagatgtaatcagctctatgggaagggaactgaaggaaaaatgcaatccgtggatggaggtttgtcttctctattaacatgtattatttattgtttcggtgtacccatgttattaatgactttcttgggtacaggataaacaacaacagtatgctgcagaaaaccctctgcagaagcatgatgttcaatacaataatggagaaagtttgaatcctaatcagagtggtgatatggcaccagatggtgaagattctggaattttcagtcaaatttctggcaagaatcactccccttcaaaggattcttcgtcttatggtgaccaaatcacagattcaggtcgctgcttgctagttggtacacactcctcacaggtttcatcaccagattgtggaaataacatcaatcacgaggatagagaagagaaacaatattcttctccttgttctcccagcaggtgtcacagctttaaccgaacagatgttgaagtaaataattattccagctctatacaaggtcagtctctcccacaggcttcatttcctaatgagccccatgcttcagatctcgaagatgcagatcatgtaggcaagcactgtgcaccagaactagagaatgcttcgttagacgagaggattccgtgtattgctacaagccttggagaagggtcgcagttttgttctggtggagatgtgtggcagccagtgggagggattaggcagtcctacattagccgtcaagcttacacccccagtggtggattgtcaatcatacaccatcctgaaggtgatgaagtagctaaaaactgtttcatagacctggaatcgaacatgcctgaagaagttgataggaggannnnnnnnnnnnnnnnnnnnnnnnnnnnnnnnggttctttccctaacaacaaccaaaatgaaatactacagtctttgtttaatggccagggtatggtatctcgcaccactgagcagcttcatcctcttctcaaagtcccacttaacgaggagcataaacaaattatgggcattggttttcagcaggaaggaaacaacaatatgatggtgggcaatcaattttctggtcagttccaggatcagattcctgcatctcatgcatttccccaggaccagcagagacaggttgacgcctttggccaaggaagcatgtcagacaacatttaccgtggattcttgatgcagcggccagactggaaccccaattgtactcagataggagttaccgcacagcccctgttgagcaccgggcctttgttaaatcagaattggcaatttaggagcatgtgggcaaacacaaacggtgtcggatgtacaagccaaggcagtcaaaccgggaccgagagagatccgagccttctcagagttgctaataacgcagagcaaataattcataggggaagtagttcagatcaaagcttattctctgttctctctcaatgcagtcaactgcgcccatccagatctgctttcgagccagaaagttcaagtcatcaaatggttgcgtctggtaactacggaatgctgatggggggaggttcaactcaagtaagcagcaatttggttcagcctgcgaacccgcttgattacttgagcggtagcaaccctacaacatctttgatgccagatgatgtagtgtggatgaaccagagccgccagaactctggtctccatgacccactaggcaagttgtatccaaggtcatggaatccgtaa

SEQ ID NO: 154819 - DNA, 347 bp, Arabidopsis thaliana landsberg
ggagaaaggtcggtatcgctatgctggtcaatggaagcacagtcgaatgcatgggtgtggtgtctatgaagttaacgaacgcatcctatatgtgagtagtaagaaatattggtcgtttacatcataattctatctaatctgatcatcataaaatagcttagatatatggcatctttgtacttcatgaaagatttacattagtgaatattcatgtttctgacactagttcacatcttaatggtaacgcagggtagattctactttggggagctattggaggaggagcatggctggcccgtaaatatttgtgccggtagttacccattcttgctctctatgataccata

SEQ ID NO: 154820 - DNA, 1036 bp, Arabidopsis thaliana landsberg
atgacggatcatcaacttatctttgctggacgagtggggaaagagcgtttacaattcttaggctgcacgaagagttgcctgaagaagccgttgatgtggtacagtggactagaagatacagcaactggggcaccacagcttaccatcttgaccaaattgttcgggttcacaagagaatagtgatgaagtgcaatggatcacagattgacgcactctttcaagacatcaccattgctgttacttcagatcaacttctcaccaaatcagaggataagtttctcaagtggttgatcctaaatgccattagcggccccatatgggtatatgccccaacctcttttatcatctcttaagtttattggacttttattattccagaacattaaacggtcctacctgaagaattaaccgagagaacttactgatggttctctcaggtctcagattgtcttactgtgtgagaatagatagaaaacagaggatatgttgctacgtgttattaattttagtaggctatttagcgggtggacaggactggaatcgagtagactaatcattttaatgagaggataagactattacaacagttgtctcgcgcatcaaaataaggcggcatgcttttctaaacccaatgactatgtcttgtcagtttaatatttcattagttgcacaactgggtgttttaataccaagttagtagtactcggtttccacttgtgatcttggaattgatcttcattgttttggtttaagcaggaagttgccgcgagctcaatgaacatgaaaatgattgagcatttggagagggaacagtgtgtggagatggagacatcaagatataatctgcagagtgtttggggtaatgaagtatgccaagtggatccgttggtccgagcttggagcttactccaaggtttgctaaatagctgatcatgtagtactcaaaaacattcatccaccagtcggcgattcttcatgtccatacatcaggagagaacgacaatttgtcgaccctaagaaggatgcgctgagatga

SEQ ID NO: 154821 - DNA, 369 bp, Arabidopsis thaliana landsberg
atgatttcattgaaaaccgcagatgattcacaatcaccaaaagcttacacatccgaggattactcaaagatcactgaggagcagctaaaagttttgtctcccgatgatagccaaacagaggatctaattcagactcaagaaccgccgcaacctacaactgtacaaacacctaccggagaaagccagcccaatggttagccttgattctgatcagcaaattaagaactctctcatcatcttcaaagttgtctaaaactcggttgttgcaggtacagcgagagaaacaacagctgcatctcctccaaggcaagattgaaagcaccacaataagacttgtagtgttaaaaagcataagcctctctatactgg

SEQ ID NO: 154822 - DNA, 2559 bp, Arabidopsis thaliana landsberg
agctgattagaacactgacgtttgggaatagattattttgagccgttgggtcattattgttgagtttgatttctctctatggactacagagaaaaggtgggttcgtgctggcaagcactgtgagcttgagagggagagaagtttagtgtctgatgctctttctttagagaggaaagagagcaaaagtatgaaacttgcgatgcttgctagtggtttaggaggtattgtttgttactactctcttctcacctccttcattctgttattgttctgtggcatgtatcaaatctttgagtcttgaagtaaaagcttagtttatgaggatatgtgttttaagaagctagccgattatcgttaattatgtttccaaacatctgatcatgaacacttagactttatcttggttttcccagtggcgaacttggtaactcttttctcagcaaaagccgcagacttgaagatgattgtcttggtaaggtttaatcatagattttgatattattgtttatatacttgtgtgctttcttcttttgtttctgttactgtaggctagttcaattatgttccacatcttaacctgaatagtttattgagattatgtcaataagtttttttttttccttttctccttagaccttggttagggattatatctcaatatttttgtttggaacgaatttgtgcctatgcttttctgccttgagatacgtctgattgcttgtaaaatcagaaactaatttccccttaagacaggatcaagccatttccatttacatcttggctgaaggaagccttggagattcggtcgggaacttcttgtattcagctaaccaacaggctaacgaagctgttcaagatcaactatcagctctcagtgtaacaaggtatgtttctcgggttctctctcaatgaacgcgtttctgagaccttgaccatcaggttatcctgctaatttatccctgttgtagtttggcagtaatatttggggcaggccttgtgacaagtctgtctccatgtacacttagtgttttgccgttgacacttggttatattggtatgataacttatctcaagattttacatttctcacaagttatatagaatcttagtttgatgttctaattctttcctcacctgtccttcatatggctgtaacatataggtgcatttgggtctggcaaaagcagaggtcaggttagtggctcttcagaacagatttttagataatagctgtcgccttaggagttggttggatcattgtcgttgcagattgacaaaatttaaaagaagttaaagttgagttcttgtaaacaaatcaaagctccgttaaaggaacaatagacccagtccaatcaaatgcatcatgttttcattcacaagtatagtagtttttagtgacctttcagttcttcatgcatttaggttattggagatacagttgctttcgcactgggattagcaactaccttagcccttcttgggatagtagcttcttttgccggaaaagcctatggacaaataggacaaggattaccagtagctgcatccggtctggctattgtaatgggtctcaatctccttgaggtaatttttgctacaatcactcttttttcatattgcatcaatcagaatgggaaaacaatggccatgtctaacatgacgtatttcctacagataattgaacttcagcttccttctttctttaacaactttgatcctcgtgctgcagcagcaaacttcccatctagtaaacctcctagcacacaaaactttcatggttttttggtcattaaatcttgtttcttatacttggtaacaaaatgttctgtcaggtgtacaagcatatctagccggtctcacattcgcacttgctgcctcaccttgtagtactccagttctagccactcttcttggttacgtggctacttccagggtaactccatttcgtctccttccatttgaaatgtcattatctcaaatatgaacatgaaagctagttaactttccggctttgttttcaagattttaagaaacggtttaagtttagcaaaaagctgatatggataatatgtgaaaaacaggatccagtaattggtggaagcttactcttaacctatacaacaggttacgtcgctccacttatcgtcgctgcttcttttgccggagctttacaggtagtttcttttaaaaccaaatagcgaaatgcaaatttcttagttaagtttcttacagtaatgaaactgcatgcgtatttactcgtcttaaaatttcttcagagcttactttcgttgcgaaaggtctctgcatggatcaatcccataaggtatgttaaagataaatgattataggctattgctttttcatattggtgatttactaaatctcggttccattttttcctatgttttggttcagtggtgctcttctacttggaggaggtttatatactttcttggataggctttttcctgctgctactatggtcatgtaaaaacttaacttacaaacttattttcggccaaaaacaaagtggttgttataggaaaataaattatattt

SEQ ID NO: 154823 - DNA, 229 bp, Arabidopsis thaliana landsberg
gaaagtatatccaggttatagtggttgacatagtgtttccagatatcattgacagttgatagagtgcgctgaaaaactgcaagcttataataatattaatcagatagcaaagaaagagaagataattatgcagatcaatgacaatgaaacctccatgtcaaggaacaaacgaaagtccttaagggccagcaaagctaagtcagaaatagagacaatatcaaaaagataa

SEQ ID NO: 154824 - DNA, 5937 bp, Arabidopsis thaliana landsberg
gtgatttggagctgttgtcgagcaaattggaagaggtggacctgatcatgtcaaaaccactcgaccacgaggtcgagtaccgtcatcctgaagttcctgaagtacttgaccacaatttctacaacaaatcactcgaccgcgacattcggtccacggctcgactacaaggtcgagtagacgacttccccacttcacaacaccactcgaccccttggtcgagtagctgccttcaccatcatcattcactcgacctatcactctaccaacatggcagagtatcaccatcatcattgactcgaccaatcacactaccaacatggccgagtatcaccatcatcattcactcgaccaatcactctaccaccaagtcgagtactacagccaccatccactcgaccaatcactctaccacatggtggagtcccttatcatcattcactcgacgtccttactcgactgccagcttcagagtcttctccattccgcactcaaccagacaatcgagcacaaggaagagaagaagactccatctattcactcgaccattcactggacaacctgggtcgagtgcagttcttaatccatcccaatactgcgtcgttttgagtattagggtttcggaatattttgctataagtagcatgtactttacattttcaagaagaagtttttttctaagttttattccgcagacattgtgttcattacattttgtaatccggatttctctaatctattcagtattcagcattttgttcttgattttgtttactgttgttcatcctgttatcatcatgctgttacattgttgttatcatgttttcatcctgttcaacgtttatgttctctacaatgatgtctaagtagtgaataaatttctgaggatgggttagagtagtgtacaattctcagtatgctaggtggttgagtttgattgatagatcccttctgcattagttgtttttaatgcctattgctttctgatcaactggaatttcagcccagacatttccgcgcccaaaagttgttcgataaaatgtctgaaccactaattccagagattcgtggctctgtaccaaggtattggttgcagggagcgttttggctttaactcgttgattcgtaatcgctctgttaggttagctctcgtcaatggtgattgagtatgggactaggttaacttgagggtttttgttgcggtggcacttagatttggttaatgaacttgttgtctagggataatttattgagcatgtcaatcacttgtaaactgaggaacgaaaactactcaattaccccatcctcgggaattctttatctaattgaattctttgtttactctactgttgtttactgcatcttgtcatctgttgcttaatttctgcaattctttcttgttactcgacctcatactcgaccacccagttgtctggcaacagactgtgcagtcgagtatctgtgttatactttctgtctgttactcgacctgtcactcgacctcacccagtgctctgcaaagtgctgtgttggtcgagtaaattattgtttctgcttgaatttctgttttctgcatgttcacttagaactgctagaacacaccaaaacctgttatgcttggcttcacttagtgacgtctgatcacatcgtgattgttagcatcacacccatttggattgacaaccttcagtagtacaacgacatgatagtgctttaggattaattgatctaaaaaacctattatcaatttggcggcgtttccaattgggtgtttgtttgttacatttgagatttcagacttgcttagataaagttctttttcaattttcaattcggttgctaactgtgtgtttttcttgttgtcttcttgatccaggtatacctctgctgtatgcgaactcgatcaacaggcaatcagaacctccttttcaacgacaacatcgaccgcatagctcgcgaactcagagaaaggagaaacacagtcaaccttgtaccccatcaaccactcgaaatggctgacaaacagaatcaacaaaatggccctgccaacattggtgctggagatgcaccacgtgatcaccgtcagaggaaaggaattgcacctcctgctatgcagaacaacaacttcgagattaagagtggtctcatctcgatgaatcaggggaacaaattccatggtcggccaatggaggatccactcgaccacttggatgaatttcataggctctgcaacctaacaaaaatcaatggtgtcagtgaagacgggttcaagctccggttgttttcattctccttgggcgacaaagcacacatatgggagaacaatctgccccatgactcaatcaccacctgggatgattgcaagaagccttttctctcaaagttcttctccaatgccagaactgcaagactcagaaatgagatttctggtttctcacagaagactggtgaaagcttctgtgaagcatgggagcgtttcaagggttacaccaaccaatgccctcatcatggcttcaagaaagcctctctgctcagcactctttacagaggagtcctaccacgcattagaatgcttctggataccgccagcaatgggaatttccagaacaaagatgttgaagaaggctgagaattggttgagaaccttgctcaatcagatggtaattacaacgaggactgcgacagaactatcagaggcacaactgactctaatgacaaacacagaaaggagatcaaagcgctgaatgacaagctggacaagattcttcgtagccagcaaaagcatgtgaaatcccttgtagaggtcgagcagtatgaagtccaaaatgagaagagtaaccagttgaaagaagtcagagaaaccaacaacaaccagggtggcgacaaaggatacaacaacttcaaaaccaacaatcctaacctctcctaccgcagcacaaacgttgctaatcctcaggattaggtgtaccctccacagcaacaacaaggtcagaacaaaccttttgttccctacaaccaaggtttcgttcctaagcagcaattccaggggaactaccagcaaccaccaccacctgggtttgcacctcagcaaaaccaaggtcctgctgctcctgacgctgatatgaaacaaatgctacaacagctacttcacgggcaagcctcttgctccatggagatggcaaagaagatatcagagttacataacaagctggactgtagctacaatgatctcaatgtcaagatggaaacactgaataccaaagtccgatacttagagggacattctgcatcttcttcagctccaaaacagacaagccaactaccaggcaaagcagttcagaatccaaaagaatatgctcatgctatcacactgcgtagtggaaaagcacttccaactagggaggaaccaaagacggtcactgaggacagtgaagatcaagatggggaggatttaagtctcgagtaagatcaagctgacaaaccactcgagcaatcactcgaccagtcactcaagcaaccactcgacctatcactcgagcaaccactcgatctgccactcgacaacgttactcgaccaacaactcgacctatcttcccagcagcatcaccaactactccaaaaccagttgctgtcaaaaacaaagaaaaagtctttatccctcctccctacaaaccgcagctttcatttcctggccgtcacaagaaagcgttggcagaaaaatatagagctatgtttgccaagaatattaaggaggctgagttgcgaatacctcttgttgacgctctagcgctaatcccagactctcacaagtttttgaaagacttgatcgtggagagaattcaagaagtgtaagggatggtggtattgagtcatgaatgcagtgctatcatacaaaagaagatcattcctaagaagcttagtgatcctggttcattcactctaccatgctctttaggtccattggctttcaacagatgcctatgtgatttaggagcatcagtcagtctcatgccgctctctttcaccaaaagattggggttcactcaatacaaatcctgcaatatatccctaattcttactaataggtcaataaggatccctcatggtttactcgaaaacctaccaatcgggattggagccgtagagataccaactgactttgtagtcctggagatagatgaagagcctaaggaccctttgattctggggagacctttcttagcaactgcaggagctatgattgacgtcaagaaagagaagattcatctaaaccttggcaacgactttagaatgacctttgatgtcaaagacgcgataaagaagcctacaatagaagggcaactcttttggatcgaagaaatggatcagttagctgatgagttactggaagagcttgtagaagaagatcatcttaacagtgctttaaccaaaagtggtggagatgggtttctgcaattggaaacattgggataccaaaagctgttagactcccataaagcgatggaagaatcagaaccctttgaggaattgaatggaccagcaaaagaggtaatggtaatgagcgaagaagggtcaacacgagttcaacctgcacactcgagagcatactcgaccaatgactcgacctcgaatgccagcgactctggagagctaatcattctaacttcagatgactggtctgaactcaaggcaccgaaggttgatctcaaaccattccctaaaggtctaaggtacgcattccttggtccaaactctacttaccctgtgatcattaatgctgagttaaatgatgatgaagtgaacctgctattagctgaacttagaaagtacaggaaagcaaatggttattcattatctgacattaaggggatttcacctagtttatgtaaccttaggatccaccttgaaaacgaatcctactttagcattgaaccacataggaggttaaatcccaacttgaaagaagttctgaaaaaagaaattttgaaactgcttgatgctggtgtcatcaaccctatatctgatagtacttggggttctctagttcattgcgtctctaaaaagggcggtatgactgtttttaaaaatgaaaaggatgaattgatccctactagaactaaaactggtcatagaatgtgtatcgattataaaaagttaaatgctgcatctaggaaagatcattttcctttaccattcattgatcaaatgcttgaacgcttagctaatcacccatactattgctttcttgatggatatagtgttttttttcaaataccaattcaccctaatgatcaggagaaaaccactttcacatgtccttatggaacttttgcttaaaagagaatgccatttggtttatacaatgctcctgcaacatttcagaggtgcatgacctctatattttcagatttaatcgaggagatggtggaggttttcatggacgattttccggtctattgcccctctttctcctcatgtttgttgaatcttggcagggtattgaccaggtgcgaggaaacgaatcttgttctcaatagggaaaagtgtcatttcatggtgaaggaagacatagtgttgggtcacaagatgtcagaaaagggtatagagtttgacaaagggaaaattgaagtgatgatgcagttgcagccaccaaaaacggtgaaggacatcagaagtttccttggtagtgctgggttctacagaagatttattaaagacttctccaagatagccaagtcgttaaccacactattgcgcaaggagaccgaatttgaatttgatgaggactacctcaaatcctttcacaccatcaaggatgctttggtatctgctcctgttgttcgagcgcctaattgggactatccatttgagattatgtgtgatgcatcagattcaacaaaaggagctgtttaggccaaaaaataaacaagaagcttcat

SEQ ID NO: 154825 - DNA, 1090 bp, Arabidopsis thaliana landsberg
caataggtgctcctcttcttgtggtttcggtttttccaaaatttagttttttctaaagaaattactaaatgttttcaaacaatgacccattcttttgaacattttcataatcttcttcacctttatccttttttttcaactccataataaccaaagtcaagctcaagtaaaaccaaattctttctcaaaatgtttctcacctaaccatgcacacccaattaatgtttccgggctggaatagatcccctaaaacgaaaatgcaaatatagatggatggaccaacgttataataaaatttaatgatatcaataattggtgcagcatgaaggagcggtgaaggcagaaggcagaggtcctacgatatgggacacattttcccacacttttggtaaaatcaccgattttagcaatgctgatgtcgctgttgatcagtatcatcgttacgaggtaaaccccaatttctataataaattaacaaaatggtcaataagtatacatttcgaaaatttaattaatgaagttttgattggaattatggtgatggcaggaagatgtacaacttatgaagaatatgggaatggacgcttacagattttccatttcttggacccgcatctttccaagtatgtaactttttaacatgtttacctttaatcttgtttactttagattaagttttaattataatactactacaacaaatggcttttgatggattattgatgataatatcatgcatgggtgtacagatggtgttggacatataaatgaagccggaatcgatcactacaacaaactcataaatgctttacttgctaaaggtattttatcgagttttgttgcattattttaagagtactaatgatctcaaattcaacagtagttataatgcatctacaatcatcggatctgtcttttttcttcttctttaaagattaattaaagaatggttggtcaagtttcacatgtataaacagacaaaaattgattgtagggatcgagccgtacgtgacactgtaccactgggatcttccacaagcacttcatgatcgatacctcggttggctaaacccacaaatcatgtaatagt

SEQ ID NO: 154826 - DNA, 605 bp, Arabidopsis thaliana landsberg
taactgccgctgttaacctccgactcaccactctcctcactccataccacctcaatattctttatcaacgcaacaccttcttcgacacacccaggaacgacctctatcttcgccgcgccgtcctcggtctccgcttccttcaaaacgccgccgtttccgcggcttctccttctccgccgcgttgtatcgtatctcttaaagcgaagccaactctagctaatgggattagtcgtgtggaggaagatgaagaggagattgagtattggattggtaaagaatgtgttgagtcaccggctaagctctcagatattggatctagggttttgaaaagggttaaagaggaatatgggtttaatgactttttagggtttgtttgtttaggtggctttgagaatgttaggaatgtttatgagtggagaggtgttaaacttgaggttgatgagactaagtatgattttgggaattgttatgagattgaatgtgagacagaggaaccagagcgtgttaagacaatgattgaggagtttcttacagaggagaagattgagttttcgaattccgacatgacaaagtttgctgttttccggtcaggaaaacttccttga

SEQ ID NO: 154827 - DNA, 1475 bp, Arabidopsis thaliana landsberg
ctactagcgattaccgccagtctttgcagttccgtgatttggataaagagaagaagaagatcactgttcaggtgacaaggaacgggtttagacagaaactgtcgatttacgacttgcttcctggtgacattgttcatctggcgattggagatcaggttcctgctgatggtcttttcctctcgggattctctgtggtgatagatgaatcgagtttgactggtgaaagtgagcctgtgatggtgaatgcgcagaatcctttccttatgtctggaaccaaagtgcaagatggatcttgtaagatgatgattactacagttgggatgaggactcaatggggaaagctaatggcgactttgaccgaaggaggggatgatgaaactccactgcaggtgaaactcaatggagttgctaccatcattggcaaaattggtcttttctttgcggtggatactttcgcggttctggtgcaaggaatgtttatgaggaagctttcaacgggaactcactgggtctggtctggtgatgaagcattggagctcttggaatactttgctattgctgtgacaatcgttgtggttgcggttcctgaaggattgcctttagctgtgactctaagtcttgcgtttgccatgaagaaaatgatgaacgataaagctcttgtgaggcatttagcagcatgtgagactatgggatctgcaacgacgatttgcagtgacaagactggtacactcacaaccaatcacatgaccgttgtgaagtcttgcatttgcatgaatgtgcaagatgtagcaaataaaggttctagcttgcaatcagaaatcccggaatctgcggtgaagttgttgattcaatcgattttcaataacacaggaggcgaagttgttgtcaacaaacatgggaaaaccgagcttttggggacgccaacagagactgctatattagagttggggttatctcttggaggtaagttccaagaagagaggaagtcttacaaagtgatcaaagttgagcctttcaactccacaaagaagcgaatgggagttgtaatcgagcttcctgagggaggacgtatgcgtgctcacacgaaaggagcttccgagattgttttagctgcttgtgacaaagttgtaaactcgagcggtgaggttgttccacttgatgaagaatcaatcaagtatctgaatgttacaatcaacgagtttgctaatgaagctcttcgaactctttgccttgcttatatggatattgaaggcgggttttcgccggatgatgcaatcccggcttctggatttacttgcgtagggattgtgggaatcaaagatcccgtacgtcctggagttaaagaatctgttgagctttgtcgccgtgctgggatcgctgtgaggatggttacaggagataccattcccaccgcgaaagcaattgctagagaatgaggaaaatactgatgacggtatagccatcgaaggtccgtt

SEQ ID NO: 154828 - DNA, 1664 bp, Arabidopsis thaliana landsberg
atgatccccaaagaagaagttgagcggccgcagaaaaaaacgaagcttccgtcgttaccatgtgagacgtcgttgttcttgcaacttcccgacgagatcctggtgaactgcttggcacgtctctttaaatcgtcttaccgttcactctccctcgtctgcaaaacctttcgttctctcctccactctaaacccctctacttcgcgcgatatcaactcggaaccacggagatctgctgcctttatctctgtctacggtttgttaccgctacggaaccagtctcacgctggtttactctcagtaggagaagtggaagtgttttggttccttctgatcattctctcccatattcaaattcaaccgtaacgatgggttcgaaaatatatggtgaacatatgggtgacgcttttggtccgtcttcagctatatggatatatgactgttttactcgctcgtggggcgatgtccccaacatgaagatgaagagggaaaacgcctccgcatgtgttttggatgacaagatttatgtaatgggaggatgtgactctgggggcatcaattggttcgaaatgttcgatgtaaagactcagtgttggagacctctaccggcgaatcctgacgttaaggtgatgacggaagataatgttcgaaaaatcgatgtggtgggaggaaagatttacgtaaagactggggctgagtttatggattggatttatgatgtgaagcgaggtaagtggagtgctgcagatgagtatatgagtttactatggtcgaactcttggtgcgtgatagagaatgtgatgtattgttactcttgctctagatataggtggtatgatttagaggctagaatgtggagagaagtgaaaggtttgaaatatttgaaaagatacagtagtgctagtaatgataatcgtaatcgtatggttgaattagttaactttggtgggaaacttgctattctttgggataggttcgagcggcctggtcgtagtgagaacaagaatatttggtgtgcgatggttgcgctcaacagagactttgaaggtgaaatttgggggacggttgagtggcttaatgttgttcttacagtccccaagtcatataatttcttgcgtcctatagccgtttcggtttgatgatctcttagtcacctgtaagagtcatccttttgcttttaccaaacttaaatgctttgtcttgtgtttgttgtgagtctttttttcttttttctttctacaatttgttgtgagtctgtaaaatcctaaatgaattcatctgatttctagactttgtattgtttcaatttgcattctgcattatgaccatctcctatcgttttgttggtttaattctggttacagtaaacactaagtccttgtgaggcaaatctctttgttctttctaggtcttcatctaaataatgccagtagaagaatttgagtaccttttgatttcactttaaagtgaagtgagattctcctaaacttaacatataattttatatatgccttggtgagatttacattcaagattagatggtttaacatttcagtgttccactttaatttgcttttcctctcttcctctgtttctaagaagaaagagtcatctcgtattcggtcaagttcaaaaccctttagtggctacaaacatttgctatatt

SEQ ID NO: 154829 - DNA, 734 bp, Arabidopsis thaliana landsberg
atctgttaattttttattttgatacactgaaattatgcctgcaattttcgaagtcttgcataggcaaaagccttatgatagacccggttacagaggaggaaggatgtgaagatggcagctttatgatgacgtgcatgccatctcgttatgaaatcactcagctaaccatcactggtgaatggacaacacctaatatcaacgaggtatgcctttcaataatatctcttgtccttaatttgccgatgacggttagagacaaaaggtctttcttttcttagtgttgaatattgatgttattcaactgctttgtttgtctaaatcacatggatattggttaattagactgttcttcattttctttttaagctgttcataccatagggtctatgttgttaacatataattgtgacataggagctgtgcagacatgttaccaaacatttgtatttcaaatattgcaggcaatgcagctttgcttggatgctagttcaaagcttgaagagatcatgcgtgattgtctgaaacagtctgcctcagcttccgatgaatgagcataaataactatgattttggattgtagctcagtcttggtatgaaaccggttttagctgttataggtaaacggatttagtctaaacctgtgtgtagtttaaaccgatgtatgttttcacataagatttgatggaactagatctttagctatgaaatggatcccaattgcgagtggtatcaaa

SEQ ID NO: 154830 - DNA, 1265 bp, Arabidopsis thaliana landsberg
ccaggtcttgaccgtcgtttcagcgtctgtgaccgtgtcttcttcagccacaggccaagtgatttcgacccgagtttccgtggtagcagcagcagtcataggcctagtgattactctagaaggcctagtgattattctagaaggcctagtgactattccagaaggcctagtgattattccagaagacccagtgattcaagaccgagtgactactctagaccaagtgattactactctagaccgagtgattattcacggccaagtgacttctcaaggtcttcagatgatgataatggtcttggggttctccaagcactgtcttgtactcaccaggttctgcagcaaacgagaatggatataggatcccatggaactcttcgcagtattgtttagttgctagcaaacaaatggtgggtgtcttcttaaccatttgggtgaaaagtgagctaagagaacacgtcaagaacatgaaagtatcttgtgttggcaggggactgatgggttatcttggaaataaggttagactttgttcttcattatataatgttctgtcctatgagttagagccactttgttattataatgcttttgcctctattgttatttgtagggatcaatctcaataagcatgttgctccatcaaacaagcttttgcttcgtttgtacgcacttgacttcgggacaaaaagaaggcgatgagctaaagagaaactctgatgtcatggagatactgaagaaaacgaggtttccgcgcgttaagagttctgcggaagaaaagtcccctgagaacatccttcagcatgagtaagaccgaacatcaagaaatgacaagaatcgaatcatttgcttaagattcatgatttgttacatttctcatttgtctttgtttccatttgatttagtcgggtaatatggctcggggatctgaactaccgaatagcactctcttaccgatccgcaaaagcacttgtcgagatgcaaaactggagggcattactagagaacgatcaggtatacgtagtagacaaataaagcaatagagactatagagtttcacattacttttactttatagaatggtctaatccaaaacatttgaaaacgttttcactgcagttacggatagagcagaaacgaggacatgtgtttaaaggatggaacgaaggaaagatatacttcccaccaacttacaaatactcaaataactcggatagatatgcaggaggtgatttgcatccaaaggagaaacgtcgtactcctgcttg

SEQ ID NO: 154831 - DNA, 2238 bp, Arabidopsis thaliana landsberg
atggggaaacagcagcaatcagtaagtgacgctacaagtccaagaccgcctcttgctccatctgagaagaacaatgtaggttctgtcacgcgccgtgctagaacaatggaggttagttcaagatatagatcaccgactcctactaaaactaggagatgtccttcacctattgtcaccaggactgcgccttcttcatcacctgaatcgttcttgaaaagagcggtttcagcggagaggaaccgtggtccttcgacaccaactacgccggttagtgatgtattggtagatttaccggtttcttctaggagactatctactggtcgtttacctgaaagcttatggccttctactatgagaagcctcagtgtttcttttcagtctgattcagtgtcagttcctgttagtaagaaggagaaaccgcttgttacttcttcgactgatcggacattgagaccgtcttcttcgaatatagcgcataagcagcagagtgagacaacctctgtaacaaggaaacaaacgcccgagaggaaaagaagtccattgaagggaaagaatgtgtctcctggtcaatcagagaattcaaaacctatggatggttctcatagtatgttaataccaccacagcatcgatggtctggtcgaattagggggaacagaagctttgatcttggggataaagcggtcaggagagtgtcattgcctttgtccaataaaagctctagacataagaagtcttctagtgacataacaaggttgttttcatgttatgataatggtagactagaagtttcgtcatcaacaacttcagaagatagtagtagcactgagtctctcaagcatttttctacaagttcattacctaggttgcatccaatgtctgctcctggatcacgtactgcttctcctagcagatcctcattttcatcatcatcatcttctaattctcgaggcatgagtccttcaagaggagtgagtcctatgagaggattgagtcctgtgggaaaccgctctttggtgagatcgtctacaccgccatcaagaggtgtaagtccttcccggataagacaaaccgcgcaatccagtagtaccaacacctcggttctcagcttcattgcggatgtcaagaaaggaaaaaaagcgacttacatagaagatgttcatcaactacgcttgctctataatcgatattcgcagtggcagtttgcaaatgctcgagctgagggagtgagctatgttcaaagcttgattgctgaggtaatatactcaaaacagaaaaaatgtgacattgtattaagtgtatcttcctctgtttttaacaatcttgaggttacaggaaactctatacaatgtttggcatgcaatatcagacctaagggatctagtgacaactcaaagaatttgtctccaacagttgaagctagaaatcaagttaagatccatcttaaatgatcaggtatgtcttcactcgcacgcatttgtgtatttgtgttcatcgaagtatcatcctcatgatctaaatgtatttatttgcgcagatggtttgccttgaggattgggcaatggttgagagagaacacattagttctttagctggagccattggagacttagaagcaaatacactccggcttccactagccggaggaacaaaggtacggtttacgttttcccagaaaactagaaaacaagtcgaagagcaagaaccgagttctgattttgtaaaagctcttgtgatcacaggcagacataggatctctgaagttagctatgtcctcagctcttgatgtaatgcagagtatgggatcatccatctggtctttacattcgcagatggaggagatgaacaaacttgttcgggatctcgctgttatagctaaaacagagaattttttgcttgacaaatgtgaaaatctcttggcatcaactgcagtcatggaggtaacaaatcaaaaatacaaatccaagaatctaatgactaatatagttcaacacgttaaaccgagtttttcgtcgtgaaaatacagatagaagagcgtagcctcaagactcatctgatacaaaagaagcaagaagaagaagtaagagatgatgcagagtcttctccattgttgccattaagcaagtttcaatggccttaacaacaacacacttacaaaatgacttgtaaattgctctttttggctcgcattttcttctgccttcttctacttataggaaaaggatgtgaagatcacttag

SEQ ID NO: 154832 - DNA, 776 bp, Arabidopsis thaliana landsberg
tccgggaaaagaaaaaagagctctcggagattcaatcactcatggcgaacgaagacgacgacggtgagaaatccagaagtctgcaccaacagattgctagaaaacccaaaacccagatcgtgattggtgtgccatcgtaccaggaagtttcggaaagctcacagacgaagtccacgcttccatctctcttcaagccttcccagagtttctctgacggtatcgctttcgtcaaatcgtccgacgtctactctcctcctcctccttcctccgcagccgcctcttcttctcagccgtcgggcgcttctcaggtgccccacagttcaaggtgttatatatatgtttgacttacctttggaattacaaagtctagattagtttgatgaaattagtgctgcaattccgaacatttctactgatttttaccatttttctgcagtgatggtacgaaagtcgaattagaattgatatctctatgaaaaatgtgattttggttttgtttatttcctgagaaagaatgaggttttacacttgcaccttatgtagcttgatcatgtctctaaagattgagggtgaaaagtcggaaacttaatgtctcttacttcatcttcttgtgccaacagctagattcagctttctgattagagtgatacatacatactatatatccacttatttttgatgggagtatggttctttcgtcgcagcctaacgcatcaaactgatggaggctaatcttcttctactcctagagccactgtctctgtaccatcgaacac

SEQ ID NO: 154833 - DNA, 563 bp, Arabidopsis thaliana landsberg
atggaaacaagtgaaaatgcaaggtggagacccatgtgcttgtattacacccacggaaagtgtacaaaggtaaacactttgctactcgtcgttctttttaaatttagtttttgctacagcggaatgcggaattaaattccatttctttattgattggttcctgctccgtatgcttgttcgaaaacaagtgatgcgaaatttgaatcaactatgcaatgtctgcgacctgttcgatggaatgtctgaacgagattggaacttgtttattgtttgtgtctcgatcgttacattgttattctttactagttttttatacctaaataatcgtgaatgatgggtaataaagtttatgttgatgatatcagatggatgatcctgcccatttggagatttttaaccacgattgttcaaaggaacttcgagtggctgctgctgatcttgagagaaagaagtcacaagaattcaattttttctccgttattgacttggaaggaaaagttgagattctaaagtttcctattttgatcgtagatgccaaaaccatggaagtcgtagagttattc

SEQ ID NO: 154834 - DNA, 240 bp, Arabidopsis thaliana landsberg
ccttttgaatcttctactttacatttcccttccttgacattaatgattaaaccagtgatacccgaacccgacaccgaatccgattcaaaatccgccggggacgcagctactccctccgccaaatagctttcaacggtaaattttcacggcgccggttgtcttccttctttgttcttctcaggaatcgctaattgataacttcaattggaagatacaagacaaaaaaagaagatcaatatg

SEQ ID NO: 154835 - DNA, 805 bp, Arabidopsis thaliana landsberg
atggattcaataaacaatttgccagatgagatacttgctaagatcttgtcctatcttcccacaaaacgagctgcttgcacatctcttatctccaaaaggtggaggaatctgttccattttgtagacagctttgatttggaagactcaacacctatcagaaatgctgatagcttctctgatttcatgaaagatacagtggctctgttaagcaattgtcccatcaagagactcactctcaattcccactatgaaaaatctagtgttaaccgttggattcgcagtgccctcaaacgcggctgcttggaacttaacttgcagtcccaatatgatcattatctggatatagggattttcttccgcaataatacattggttaaactcacattatctagttatcgaacttttcttcgaggcaatgttccacctgagggcagagtgtttttccctgcgctcaagacactttccctcggtgctgttgttgctaagccagctctgtataactggctcatctctggatgccctgtgctcgaggaattattcatacttgatgttggtagtggtgatgaccagccaacttggacgaggtctgtggttagtgcatccatcaagcgactcacgattgttttccactttcctcataacacatatccttatgaagacgatgttgagatcaagacaccgaatcttgagtttcttgactattctgctcttcgctccgatggttctgatgttgattatcttgattcgcttgccgaagctagactggatcttagattgtgggagttaactaacacttttgattttg

SEQ ID NO: 154836 - DNA, 743 bp, Arabidopsis thaliana landsberg
aaatctttactcatctgggtatggaagaataccagcatgacaacagcttcactcctcaaagagtaagactcttggactatacaatctcttcttccaacaaaaacgataacacaagtgataccaacaacaacaacaacaataataatagtagcaattatggtcctggatacaataatactaacaacaacaatcatcaccaccaacacatgttgtttccacatatgagctctcttctccctcaaacaaccgataattgcttccgatctgatcatgatcaatccaacaacaacaacaacaacccatctgttaaatctgaagctagctccttaagaatcaatcattactccatgttaatgagagccatccacaatactcaagaagctaacaacaacaacaacaatgacaacgtaagcgatgttgaagccatgaaggctaaaatcattgctcatcctcactactctaccctcctacaagcttacttggactgccaaaaggtttggttttattcttattgttatgttataatatatactcttttttttaagatataatatatacttatgtgtgacatatatatgtatgttcatgggtcatggtttatatagattggagctccacctgatgtggttgatagaattacggcggcacggcaagactttgaggctcgacaacagcggtcaacaccgtctgtctctgcctcctctagagacccggagttagatcaattcatggttcattactaa

SEQ ID NO: 154837 - DNA, 236 bp, Arabidopsis thaliana landsberg
ggatatgatgtgcatgtgatagatgtaaaaaaagtttgtaaggtcacaaaggtatagttgtttgacattctctcttttgtatctcttaattcacttgctcggctataataaaagacatgtatttttagggtggcagggttgaaaggtacactgcattgatggtttgcggaaactatgaaggtatcattgggtatgcaaaagcaaaagctgagactggccaatctgcaatgcagaag

SEQ ID NO: 154838 - DNA, 503 bp, Arabidopsis thaliana landsberg
ttcagagagtgaaagtctatcatttgaatgaagatggtaaatgggatgatcgaggaactgggcacgtaagcatcgactttgtggaggtctgttgtgattctaattgacttcctgaattccatctgctgcgggtattctgcagcacttattatgtaaaacatatttccagaatttgtagctaaatggaaatactatatgatgcagcgatctgaagaactcagtctatgtgtaattgatgaagaagataacgagacgttacttgttcatcccatcaaccctgaggatatttacaggaaacaagaaggtagttcttttgcgtcgtggtttaattagctaagatattttggggttttctggttttttggataattggtatctgtttcaatgtacagacacaataatctcatggagagacccagagcgctcaacagaattggctttaagctttcaagagactgcagggtgctcttatgtatggtgagtgatgacaatttttctattac

SEQ ID NO: 154839 - DNA, 1114 bp, Arabidopsis thaliana landsberg
atgaacgaagctatactgccatgcttatggcgagcacctacagacaatgataaaggtggaggtgactctagttatttttcgaggtggaaagcggcacagttagataatgtggagttccttgttgaaagctgttcagtaaagagcatcactgataaatccgtagagatagagttcatttaccttggttcttcagcttctggctcttcaaagtcagatgccttattcaaagtcaatgtgacatatctgatctatggaaaaggagatatcatcaccaattggtttgtagaaccaaactctgatcttccaccgctaccacgtgtaggtatagaattccacattgaaaaaacactggaccgtgtagaatggtatggcaaaggtccatttgagtgttacccagaccgaaaagcagcagcccatgtggcgatatatgaacacaatgttggagacatgcatgtcccttatattgttccaggagaaaatggaggtagaacagatgttaggtgggtaacattccgaaacaaagatggtgtaggaatatatgcttcaacatatggtagctcttctctaatgcaaatgaatgctagttattatacaaccggtgagcttcaccgtgcaacgcatgaagaggatcttatcaaaggacaaaacatcgaggtagtaatctattgtcttttcctcaatctcttgatcctcttgaccagatatatttgaattcaagaatggaaacgacttatcaaacacctgagcatcagttgtcattttgttagttaagtctttgtcatttgaatggtgatcattgtgcaggtgcatctggaccacaaacacatgggtcttgggggagatgatagctggactccatgtgtgcacgataagtttctgattccgcctgcacagtattcgttttctctcaggctatgcccaattactgcatccacctcgggtttgaacatctacaaggatcaactcccctgctagaaatctgttcttgcatataagttgaatgctataaacaactagacttagtgagtcttgcaatgtttctaagtttgatttctcaaatgaaaaaaaaaaaacctaataaactaaaacattcgattcaaaatcttcttgtgat

SEQ ID NO: 154840 - DNA, 997 bp, Arabidopsis thaliana landsberg
attacagcaaagatattgtcattggcagtgggatgcaaggaccttttgaccatttttttggtcttaagaaggatcctcaaagttctcgatgcagcatattcaatccagatgacctgtttctatatgctgttacagattctagaatgaacaaaaaatggaaccgttccattgtggatgccttgaaagctgctatagagggaggggccaccatcatacaactgaggtttgatcatgtttgctataactggaagcttcaactcttttttgtatctctctcttatgaaagcccaaatgacatctcagtgcttttgcagggagaaagaagccgaaacacgggagtttcttgaagaagcaaaagcatgcattgatatatgccggtcccatggagttagtttgctgataaacgacaggatcgacattgcccttgcttgtgatgctgatggagtccatgttggtcaatccgacatgccggttgatctagttcggtctcttcttggcccggacaagatcataggggtctcatgtaagacaccagaacaagctcatcaagcatggaaagatggtgcggactacattgggtcaggaggagtttttccaacgaacactaaggccaacaatcgtaccataggacttgatgggctaaaagaagtatgtgaagcatcaaaattaccggttgttgcaatcggaggcatagggatctcaaatgctgggtctgttatgcagatcgatgcaccgaacctaaaaggtgtagcagttgtgtcagctttgttcgaccaagattgtgttttgactcaagctaagaagttgcataaaacgcttaaagagagcaaaaggggaatttgaaccaaaaggtgtttttagttttgttttaggtgcttacaaaatgttgtaaaccttttacttcttaacttgatgtatttttttttttttttgaaaaaaccagaaaagataaatagtaatgattgcaacaaacattttacttccgaaaacttccaac

SEQ ID NO: 154841 - DNA, 255 bp, Arabidopsis thaliana landsberg
atgagagctcctaggatgcgatggaccaccactcttcatgcccggttcgttcacgccgttgaattactcggaggccatgaaagtatgtccctttaaccttaaagcttatctcttttttccatttcttaattaccctttttaactaaacatgactttgctttattcacttgctaattaggagcaacacctaaatcagttcttgagctcatggacgtcaaagatctaaccttggctcatgttaagtcccatttacag

SEQ ID NO: 154842 - DNA, 656 bp, Arabidopsis thaliana landsberg
gatacttttcgtggaagagtatgcgagtgtcctacagttgatggtgtgcaattcaaaggggatggttacagtcactgtgaacgtaagtgttcatgtcatctttgattagctcttataaatttatcagacttgtattattcagtagcaatctaagtatggaaagataatagtttagatacttatagaccgacattctgatcttcttctagcagctctcatataacccattgtcagtacattgtaaagaaaattttcggtttaccctcttagatttttgagagcgcacatcttcctggtgaaattcaagatataattgttatttcatgctcactaaaactttgaacacttatatgccatcatttcccattagagattgataattttatgttgtctctttgctgtgctttcgtttgatgtcaaaattccatactgaactggtgtttgcattgcagcaagcgggccagggagatgcacaatcaacaatggaggttgttggcatgaagagcgagatggacatgcgttctctgcttgtgtggttagtggtgtcttctgcgcttaagtgtataatctcacagtttagtaagatacttctgtctcaacttgtaatgccttcaggacaaggacagtgttaagtgcgagtgtccacaggatttaaa

SEQ ID NO: 154843 - DNA, 459 bp, Arabidopsis thaliana landsberg
cttataaaaccatcaaaccttatggaattctttagcacatatatgatacaattgaatgtaaaactataatcccatattttatcgtggaagatgataagcttaatgaggttcgagtaacggagacggacaagagacttaacttactttggtttggtctccgatttgagaagactacgaacacaatactacactgggattagaggtaccatatcctttcagtcggatcccctggctcatcttcgttttcaacccttcaatagatatatgacccaactgattatatacggtcctaaaaggctccatatacaaaataatacatgtaataaaactagcgttttgaaatttatatattcataactgtttcaatcactctcgtaactatggatgtaagattgctggttatatggatttgtatagataatagttatatcaaaagcttaaaaaagagacaataaagca

SEQ ID NO: 154844 - DNA, 840 bp, Arabidopsis thaliana landsberg
gttagattggggtggcacgatgctggtacttataacaagaatattgaggagtggccactgagaggtggagctaatggaagtcttaggtttgaggctgagcttaagcatgctgcaaatgctggtactggtttcatcatttcacatgcattgtggcttaagacttttatttggtgtcttgatattctacttttgacatttacaggtctgcttaatgctttaaagctcattcagcctctcaaagacaagtatcctaacatctcttatgcggacttattccagttagctagtgccacagcaatagaggtctttcttcacttttcttgggcttggcctattaggaaactattttggtcttaaggctttactgataactctagaaataaataaaacttcaggaggctggtggtcctgatatcccgatgaaatatgggagagttgatgttgtagcacctgaacagtgtccagaagaaggaagactccctggttaactaatctttccattgtctgtttcatgtcttctatgagtttgtttcagattttgtttatggactaattgaaataacgaggtgaaatatgctatgtttagatgctggacctccttcaccagctgatcatttgagagatgttttctacagaatgggacttgatgacaaggttattttgattttgttctcttttgtgttattcatgtcaaacgtgaatatttttgttattctgaatattctttttgacaaacaggaaatagttgccttgtctggtgcacataccttagggagagccagaccagaccgtagtggttggggaaaacctgagacaaagtacacggtattaataaacgac

SEQ ID NO: 154845 - DNA, 731 bp, Arabidopsis thaliana landsberg
ctccagcgttcaaacgcgagaatacctccaaggtcgaagcgtaaaacatcgcaagcattacgggttaaaagcgagtcagttggtttacacggacttgttgctttcaatttcctctaccatttccacgggtaagctttcttaaaaagctttttgtacgtagggtcgtttgcttttcatttggacgccacatgctcgatgaaattccccaaagggattgtcagtggtaattaacgttttttctcttttgcttttccgcggcagtcgaatttctggtttactcgtgggttgagaatcaggatgctgccccagaggttgaagaaggctataacggataatccaaagaagcttgggaatttgattgacctcgtgaatcttccatctactctacgggactttgttggtcaatctcagatttcccgtctgggttgtttcatgcgtgtctggtcctatatcaagaccaacaatcttcaggtttgatcattaagttatttaagctaaagatgttttttttaaaaatgttttgtctcattgactgattggttttgtttcttacaggatcctaagaacaagaatgtggtgatttgtgatgagaagctcaagagcattttgctcgggaagcagcgagtggagctagtcgatcttccttctcttatcaagttgcattttcccaaagaacaaaagaagaattctcagaaaatttaacttttgcttatttggggtcgttttgttct

SEQ ID NO: 154846 - DNA, 2390 bp, Arabidopsis thaliana landsberg
atgctgaaattgttttatcttgaaggtatcattgatgaaaaggcttagacatccaaacgttctgctgtttatgggagctgtggcatcacctcagcgtctttgtatagtgacagagtttctaccacggttcggcctcttctcttttgctaatcctacatttcgagatttttgttctctggggtaaaaactctgactcacatcttaagtctaaatgtttcgaaataacatttgcagtggaagtctctttcgtttgctgcagaggaacaagtcaaaactagatttgaggcgacgtatccatatggcatcagacattgtgagtattaaacgtgattttccagttgttgtccaagtttttctaaagtataagctgctctattttggttctttgttgcatttttttgcatatccttcttttccgctctttgattcagtctttcatacaggctcgtggcatgaattatcttcaccactgtagtcctcccatcattcaccgtgatctgaagtcgtcaaatctactggttgatcggaactggactgtgaaggtattgttttcattgttgaaatagtttccactttctggactaccaataaccttatgacgttggtaattctgatggagctaagaagaaaataattatttacctacaaaataccgtccactttcatcagatttcgcagatgacatgagtttggtgggtgaactagaaatggatgtccccagtttaaaaaatattgcttgattgatttctttgtgacacaaatggaaaaatattattctaggtcaacaaaataatgttattaggtctagtatttcccctgtgtcaggactcaagagttgtatcttgtatgagaaaaaaatcgtttgataattaagttactacgacttagactctaaagcaaaaggggaaatcatatacactatattaatgaagctttagataacgattcgtcttttgtgtctatatcagaaaagaatcatagattttaatttcaggacaaactattattgaagtaaaaagggtgtttgtcatggttaacttactttgtcagctcacaggttgctgattttggtctttctcgcatcaagcatgagacgtacctcactacaaacggaaggggaacggtactttacatagactcttactgaattgattcctccttttttttttcttttttttaatgaaatcagatatctcaggatgaatttcattgcttttttatgttctgtagcctcaatggatggcaccagaagttcttcgaaatgaggctgctgatgaaaagtattttctcactctctacttattggttattggttgttgtagctttcatctataacgatgctcttcctactctttaaatggcaggtctgacgtttacagttttggagtagtactatgggagcttgtgacagagaagatcccatgggaaaatctaaatgctatgcaggtatagtttccgctttaatggaaaaaatgcaattggtctccaaatgaaaaatagactagggaatatgaaagtgaccatatcttacttaaagatatacaaggccatattagtcctagtaagaatctcaacgttactaactactgtagctaattggtcgctactcgctattaatatgcatctagtttccatctatcctataaagtagatgtaatcagtttagtatgttggaaactatactacccatttggctattttgggtcaaattaaaaagttatgttttgcgacatttataccaattagaggacttgtttccattgcaaaacatctgttctgtttaagaaagtttgccttttctgtctcctcttaattcctgtatgtaaattatatgcccacacagtaaaacaaatatgaagagaagtctatttataaacttgcaggtgattggagccgtggggttcatgaaccagaggctggaagtcccaaaagacgttgaccctcagtggattgctttaatggaaagctgctggcacaggtacattaacgttctgaacattgcacaatcattgaatataaccttttattgtaatggttctccttgctttaggtgttctacatgtttcacagctgatgctgacattaatttttgtttctattttggtttgtctcacctgcagggatgcaaagctgagacccacattccaagaactgatggagagactaagagacctgcaaagaaagtatacaatacagttccaagcgactcgtgctgcgttatctgacaagtgacaactctcttctcaaggacaactaaaccaaacaaaagttgacccttttcacttatggcttcttgttcctcaacgccgcatcgcttcaagatccaactattgttcacagaaacaaagaaagagagaaagagagaaagagagagttggtctttttgaaca

SEQ ID NO: 154847 - DNA, 494 bp, Arabidopsis thaliana landsberg
  unsure (1)..(494): unsure at all n locations
atggctgtgagtgctgtcgagggctgggctgaataagacactgagcttctacgtaagatccaatcagacaaggtaggtggtctttgatagtcactttttctctatttttccctaatagtctcattttatgacctttttgggggtctcctttatttgaaacagcctatgattctggtgatgaacaaaattgactgtgctcctcctggtagctgtgatcaactagaagatcagaggaaaaaggaagaagttttccataagtctgtcttcacttctgctgtaactggtcaaggaattgaagagcttgaagatgcaatattggagattcttggtcttgatcgtgtccccactggaggacatcaatggactgtgaatcaggtctgtctcaattctacctgttattctgtttctgcccattaactattgactgttgcatttatatcctctctgngtcgttatcagagacaatgcgagcaattggtgcggacgaaagaagc

SEQ ID NO: 154848 - DNA, 382 bp, Arabidopsis thaliana landsberg
ctttgcctctgcattacttctaactactctatttatcggcgttaatgcatccaggtaaccacttatcatcatcattattgtacattggttttagacattagacatccattgcaggtttttaagctcagtgtagcttaattttacgttttctagttcatgcaaccaagccattgagcttaaatagttcatcatataacctacttaagaggtgtttttgggtttcgataattgggttttctaaaaacgaaattttgatcaatcaggttataaatgagacaataattgttagatcgtataattaatgtttttcaggtccaatgaaacatggcatgaacatgcagttgagaacccagatgaagtagctgccatggtggacatgtga

SEQ ID NO: 154849 - DNA, 492 bp, Arabidopsis thaliana landsberg; identical to SEQ ID NO: 74417

SEQ ID NO: 154850 - DNA, 1720 bp, Arabidopsis thaliana landsberg
gtcggcttctttgcacttgacacaatttccctgacaaatccgcagctgtcggaacagccaactaacgaatcaaactccaagcgacctggaaagaaacaagatacaatctacgcgacagcggaaagctttgagttttatagagacctatctcatctctataggtgaattctttcgatgaatatcgctgattttctactgataagcctctaggtcagagattcagttgtcaaaacggttgacttggaagagagtttcccggcgagttaaagagagataggagtcaatctacgtgtcgatttgaagccctgagctttatctttccaacgaatctaatcttgatccaatcgaagcaatcttccaagcgatattggcgtttctttcaagcgcagattcgtctctatccgaccagccgaactcaggctcaatttcccagtgatcttgagagactcaggagacgatctacagatcaatttaaagccctgaggctcctctttttaacaagcccgatctcacttcgttagggtgtgttttctcggagatactgccgtttatctgcagaagacactgacaaaatacagatcgatctgtatccgatctgttgacctcggaatcaaatgcccggcgatctaaagggcatcacgaggcgatctaagtatcaactgaaagccccgaggcttatctttcaatagagaccgacctcatccaattccgagctgtttactaagcgttatcactgtttcaatgaaacatatgacacctgtcaaatcgcagattcaaactgtgggagcaactggattagaaagcaaactcccaacgattcagaaaacatcaagagcccatcttaatatcatcatgaagctctgaggcttatctttccaacaagatcgattttgctccatttggtgctgtcttccgagagttataggcgtttctctcgagcatgcgcttgtttatcgagacacagatccgtctacacccgatctatctgctttcagatcgatttcccgacgatctaaaaggaaccaggagccgatctgcacatcattttgaagctacaaggcttatctttctaacagattcgtccttgcctcaattgcctacgtctaacaagagttattactgtttttctgcgacaagcacgtcctgactgtaccccaaagatgcatgtctgcggctatcagatcagccacctttgtgaccaattttacgtccatcgcagagtagctcgtcagctcgtccgtctcacgaaggtcgacagctcgtccgtctcacgaaagtcgacagctcgtccgtctcaagtagctcgtcagttcgtccgtgtcaagtagctcgccattctcaagtagcacgtccgctcgtccgtctcaagaagctcgttagctcgctcctcttcgtcaaacttctcaactcgtttcccttcaccaagtccctcagctcgtcttcaagctattcagatcgcctttaagctcttcaagctccttagctcgttctcaagctcctctgctcgtcctctagctcctctgctcgtcctcaagcttctcagctcgtcctcaagctcctcagctcgtcctcaagttccccagctcgtcctcaagctcctgagctcgtcctcaagctcctcagctcgtctttaagctctccagctcgtcttcaagctccacatcactcaacgaccatctcctcgcctagctataaaactaataaactatgtttatcgtaa

SEQ ID NO: 154851 - DNA, 2875 bp, Arabidopsis thaliana landsberg
atggcatcttttcctcatcccggttccgtcaccgtctgcgagatcaacagagacttgagtatgttaaagcttttcccttccattgaaaaatgtagggatttcgaaacttctgagctaatggttagattttcgtagcgcagttacggctcagaacttatctgatgagcgagctcaggagacttatggaaaagttcttgtacgtgggcgtttctctttcgtttctgatttcttataagcttaaaaaccatatttgtaagtagcaaatgttttctttttgacaaatttccatcggatttgggggttttgcgtttgatcacagggaatggtgtttagccctgtttcgttcgactctactcctagctctcttcaggaaaatgaaggacaagagaatggagataaggcaagtggtgagagtaaaggactggttgcaacactgcagatgaaggttgcagactctcttaaacagattttacaacccaccgatgtaagagtttcaactatcagtctgtttctttgtttggttgactaaagaaagcttagcattttgtgattgatggttacaatacttatctttatgtatctaggggaattgataggagggatgttctttgcaatttcaaaatggcattatcatagctgttattaataaagccacagccttgctcaccttttcttttctaggtaactctactctcagagattgatcttcaaggagtgagttggcatcaagggaagcatattattgcctttatatccggtgcaaatcaagttacaattcgtgattatgaggacaaaggtttgttttatttattcaattcaggattcctagttcacacttgccggtgtgtgcatacagtttcatattcttcttttgaacagatgagaaagaaccttgcattttgacaagtgattcacaaagaaatgttaaagcccttgagtggagaccaaatggtggaaaatccctatccattgcctgtcggtgtgtattattggtcttctgatcctgtctactttctagagtagccagtttcatagataactaagtttgattctactgtaataactgttccattgaaacaggggaggaatatgcatatgggctgcttcatatccgggtaacatggcattggttagatctggtggttccgcattgaggggaagtctctctcgaggatctggaactcgttggattttggtggactttcttcggtgtcaaaatgatgagcaaattagtgctctctcatggagcccctgtggaagatatcctaaacaaaatttctgctataactgttttgcttaacttcattttggagttgttacttaactacatacgtttccatgatcatttcaattaccatagttgtttatcaagccgcatcgcatgataggcatttgttgggaaagtatttggatttgttcgatcttttctgtctttgcatcacatggatccctaactttgtccatcctgttactccttgacctattttcacgtatttagcatcagcctcatatgacagttcatctttcaccatatgggatgtttctcaaggtaactagaacgacaattaagaacactttcttaatgcacaacatcatgcaaatgtttgaacattaatccagcttcctcttatttaacatcctatctgttgcgttgagatgcgaaaatgcatcttgcaattccttgtttctgaaagtgatatgtatacatcttccaggggcagggacacctattagacggggactaggtggaatatcaatgcttaaatggtcacctacaggagactacttctttgcagcaagattgtaggacatcaactctctttcttttttacagatgtggaaagtagcttcctgtttgatatgattgctaataaaatgtttttctgtcacagtgatgggactttttgtctttgggaaacaaacacatggacatctgaaccctggtctttgtctagtggatctggatctgtcacggtaagatcgtgagcctataatagtgagatatgcaatagagtattgttaaaagcgttttgttggagaggttaacgtcactagtgtggtatgcatagcttatgtacatgactccattgtactaaagcattcatttccttcttttatgtatgaaattgcaactgtgttccatcttcgtaaatggaccaagcaataatactatactcccttctatgatagggagcgatatgggatcccgaaggacggtttatcttgatttcgttttcgaaatcttcaacactgggctctgttcatttctcatccaagccaccatccttgggtatgcagaaactttgaagtcgttttgcctatactactagaaatacttaccagttagcacactaaatctctgttttggtttactttcagatgcccatctattaccagttgaattgccagagattgcttctctaactggcaggtaaattatttgattgttttgttcaataaacccttgcaaaggccttccgttaatcacttcttgatattgtctttcataactgaaataaccagtgagggcatcgagaagatagcatgggatgcatctggagaacgattggctgtgtcgtacaaaggaggcgatgaaaattacaaaggattgattgccatctacgacacacgaaggacacctattgtatcagcatcactagtgtaagtaactcttactgttatccattccatcggtcttgacctccttttgtatatctttgcattgtctaaatggatagacaaaatctgatgcttttatgattacagcggtttcatcagaggacctggagaaaacccgaaagctctctccttttcattccatgacaagttcaagcaaggtccactcctttctgtggtaaggcatatgcttgattaa

SEQ ID NO: 154852 - DNA, 1076 bp, Arabidopsis thaliana landsberg
tctcacaaaaacatcgtgaagaatggaggagtcacgagaatcgccggcggaacacggctactacatgccggcggaatgggattctcatgctcaaacttggatcggttggcctgtaattctctatctctcttcctcttttctttttttttcatgttttattcattaacatgagataaagtaaaaattgacggcgattctggagaactcaatctcgctgttcaaaaatcaaacttcgatttcgattttgtccttttgttttttttatatggatcctgctcgtagtttatcattgttcgaattgctgttttctgtttatttgatgatttctctgcttcctggttcgtttttgtagagtttccgataaattttgtatagcttctgtatgtcaagttagcatctagatgtgatatgagatgagatcttttacattgcaatctatcatggttacagattctgcaaccaaatcagaatttaaagcattttcagttaggttgtttgtttcgatttgtttcatcactgaatacatgaatcaaacctcaaaccacttttgtgattttgaaatctggattataattctgtcataatatggctgcaggaacggcaagataactggcggcacaacgctttacccgcacaacgagtgtttgcagatgttgcaaaggccatctcaaagttcgagcctgtcactgtctgtgctagccctgctcaggtttgtttacaatcatacctgaaataagaaaacatctttgagtttctacatacagataccaagtagtctctcagtttactttctgtttttggcttacatgattgtgcttgcattagtgggaaaatgcaaggaaacagcttccagaggatataagagttgttgagatgagcatgaatgattcttggttccgcgactctggaccaactgtgagtttacttctttagcttctcccttttctcaccatcttacaaagctttctaacaatttgttgctaccgctctcttttatacagttcattgtacggaaaagaccagtaaagctcagttcttttaaccgaaacattgatgggatcgactggcatttcaat

SEQ ID NO: 154853 - DNA, 503 bp, Arabidopsis thaliana landsberg
aggctatgttacaaccaggaggcactcccgccaagattgtctgtttgactcaagtggttacagctgatgaccttagagacgatgcagaatatgcagacataatggaggacatgagccaagaaggtggtaaattcggtaagcaattcgtttttttttttactattgtatgttctgacattataccattagcacatagccatatactcaggcttttacatagtccaatatgaacttttgataatttgttgttgtgtcatgtgtgtgcaggtaacttggtgaacattgtgatcccgaggcctaatccaaatcatgatcctacaccaggagttggaaaggtttgattttcaattctcagatacaaatgtctaccaaaattcatatataaattgcatactctaatgataatatttaatgcaggttttcttagagtatgcggatgtggatggctcatcaaacgccagatcagggatgaatggaagaaaatttggaggaaaccaagtagt

SEQ ID NO: 154854 - DNA, 578 bp, Arabidopsis thaliana landsberg
tgtaatcacattctcagcttcttgtttcaatctcttttctgacccgtgttccgaaatttgcaggcgttcttaatttcgagccttgtaatatccggttagtttgacataactaatgttacaagttcctttgagtccgcagaatcactaatgttaccagcactttcttttatatgtttctttgcagtgatattaatggtgtgtgttacaaaggtggcgaaagacgctctaagaaaagctttagcagagcacggaggagacataaacgaagcggttgcagccttaccggagctgaccgttactgatgatacttcgacggatttaagtgagcctctattgataaagatagatcctcaacaacctcaggatcaagtaaaccatagtcattaaaattaagatgatgaatacttactttgtataatctttattttaacatacaaagcttagttttcttggtttgtatgataataacatagattaaaaattatttttaaaaagttatttttcttagtaactttgagatgtaattattagttcacagggatttaaaatattgacatgaataaaaagttcttccatgg

SEQ ID NO: 154855 - DNA, 655 bp, Arabidopsis thaliana landsberg
ctttattctctccacgattgacgattaatggagatgaagaagtggagttatgcgaatttaataaccttagctttgttgtttctcttctttattattcttcttttggcatttcaaggttcggcttcgatcctcttgttattttttcttccatatctataatcatttacttgatagtgatggatccatatgatctatatatgcatttaggtggatcaagagacgacgatcatcagcatgttcatgtggccatcagaactaaggatatctccatgggacgaaaggtatatacaactcatacaaataatggctaaaccgaattaagacacaccaaccgcatattttgttcttaataatgatgtgtatacatacatacaagtaatttcatggaaagtgatatcgtgatatcttcactttcagttaaaaagtttgaaaccgatcaatcaacaaagaaaaacgggtttgagtatccggatcaaggatctcatgatgtacaagaaagagaagtatatgttgagctaagggactacgggcaacgaaagtacaaaccccccgtccataattaacggttgcgcgtagtacgtagtcattgataccgggcaaattatggttaatttactgtttaactttgtaaaataaacaaatgaataagtcatgt

SEQ ID NO: 154856 - DNA, 559 bp, Arabidopsis thaliana landsberg
atgaagaagagtcagaaagcagctagcaacttgattcaagggaatgttaaagaaagatctacagattttcatgccacgggaaactcagtttctgcaaaacaagaatccaagctcatggcccagtggaggtcgctctttcttagcatgggcgatatcctcagtgaagagagtagccaccttgtaagtgcttttagaagcttttaatatgatctcatagcataatgctaattgtactgttaaccatttgcttctgagttttgaatgtgggaaatccaacttttgcagcaaaacagctttgtgagaatgaaaaaattgcgagacgattgcaatttggatttttagagagcaatgaaaaaacctgaacaactgaacacccagtaagtactcttacacatactgttatgaatccaacttctctttctggaaatttttataagtatctggatgcaatgtatagatgcttaaaatcgtaaatgattatggatgtgtgcaactattgttggggttgttaagttcttctatcaaactccttgtgttcttcaagaaaacagttactact

SEQ ID NO: 154857 - DNA, 254 bp, Arabidopsis thaliana landsberg
tccggtggctgccggtgtagtcgccgccggagtattccctgtgtacccattaaccgtcgccatcctttttcgcctcttctaattgaacaaagcaacaatcgtagtcgaaatttctgaaattgaaacgcttttttctcgagaagaatcagattcaagaatgatcgaaactgaagaagaaggagaagagagatagagatagagatagagagagagttcttcttctcttctttgagagagagagacgtgggtctggg

SEQ ID NO: 154858 - DNA, 604 bp, Arabidopsis thaliana landsberg
acattgagtcttacatgttacattggttggttacatctgcagtgtttagtgttgttaacttttcttagaaatcgctctttgttaaatctatagtatctcttatgttcttatacctcctgggttatctttggttagctgggaagggtgagataccctttctatataaatccattttttcccatctcggcgtttccaggttgcacgagcgtttacaacagtgtgacggtgatgaggctcctcaaagcagaagctggtgctaaagttcaaaagtttactgaatgggcactcaaatgtgtaggttttcactcccgatgccagggccctagagataaagctaaccaagactcatctgctgagatccaactccagctttctgctttcaagatgttcttagatcttgcaggacaccatctatcaggaaaggatttcacagaagcctttgatgcagcttgcttgccgcttacgctgttctctacctcgtttaatcctggctgggcttctggaatttcagctactgtcatacatggattgctcagcatgctggtggaaggaggcgcagataatgtaaatcagtgcttccttgaagcttctcgttatgggagca

SEQ ID NO: 154859 - DNA, 518 bp, Arabidopsis thaliana landsberg
ccagccttctcctgcaaccacatcgagaatcttaccctttttttgccctttacaaccttccagaagcagcagatcatccttagcagcaacttccggtattgacagaattatggcagcagccttggaaagccgcagctaccagcggcctcagcagagatttgcaaatccgccttatgttcctatgaggcaatttagatcgcaatgccatgggatggctccacctgtcacaatcagaaccgctgtaccggtcttctctgcacctccaatgcctcctccaccatgtacaaacaacactcagctaccttcttctgtgtatgtcccatcgctgatgcgaactgcaccacctgtgaggatcgcgccgcctgtcacaatcagaaccgcggtgcccgtatttgcttctgcgccaccggttagaattagaaccgctgtgaagcccacagttgaggcaggagaaacccgcatatcatcagtccaagaaaaggagagtataccagtcttgcctgatagtcttgaaattg

SEQ ID NO: 154860 - DNA, 494 bp, Arabidopsis thaliana landsberg
agctgagtgaaacattagctaacgcattgagttcaaatggaagaatcattaatctccaagggagagagaggattcctgtcgagtttttacctggtaggagaactgaacaaaccgatgtcaaagcggaaatcccaaaagctgaaccgatcaagaggaagactcatggtcaagagtcgaaagaagagaagaaagagcggaaaaatgctgtaaaagccgaaaagcgagaagcaaggataattaagaaacagacgaagatgctgtattgcggtgaaacgcagcgtgctcaaagagctgttgctacctctggtccatcgtcgagacctctaaaataatatgttactaaggtaaaacaaaacaattctcagactgtttaaaaccagtttttccagccatttcgtgtaatatttgctgtttgtttttttctttttcatcaagatttgaaaatcttgaatcttgttttggatgtggacgttttgaatattatttattacttt

SEQ ID NO: 154861 - DNA, 2056 bp, Arabidopsis thaliana landsberg
ccccttggaagtctcaagaagatgaatttttcgtgttccaagaatttgaaagaaattccagatctttctttagccataaacctcgaggaattagatcttgctggatgcaaatctttggtgacacttccttcctcgattcagaatgccattaaactgatcaatttagatatgagtgattgcaaaaagctagagagttttccaaccgatctcaacttggaatctctcgagtacctcgatctcactggatgcccgaatttgagaaattccccagcaatcaaaatgggttgttctcaagagagaaatgagatcgaggtagaagattgtttctggaacaagaatctccctggactagattatctcgactgccttacgagatgtatgccttgtgaatttcgcccagaacaactcgcttttctcaatgtgaggggctacaagcatgagaagctatgggaagacatccaggtacattgttaatgctatgctgatttttgtttaccttctgttatataactaattataagtatacccaaaattgttattatggcttgtgatccacggttatgtcttacatgcatacataataatattaaattataattttaaacatatacagtataaaattaaaatgattatcatcgataatgattgaagcataccaatgtttttttcagtcgcttggaagtctcgaagaaatggatctgtcagaatctgaaaacctgacagaaattccagatctttcaaaggccaccaagctcgagtctttgatactcaacaactgcaaaagtttggtgacacttccttctacaattgggaatcttcatagattggtgaggtttgaaatgaaagaatgcacagggctggaggttcttccgaccgatgtcaacttgtcatctcttatgatcctcgatctcagtggttgctcaagtctgagaacttttcctctgatttcgactagaatcgaatgtctctatctggaaaacaccgccattgaagaagttccctgctgcattgaggatttcacgaggctcactgtactactgatgtattgttgccagaggttgaaaaccatctccccaaacattttcagacttacaagacttaagctcgccgactttacagactgtagaggtgtcatcaaggcgttgagtgatgcaactgtggtagcgacaatggaagaccacgtttcttgtgtaccattatctgaaaacattgaatatacatgtgaacgtttctgggataagttgtatcgtgttgcatacctccaggaacattttagcttccgtaattgcttcaaattggatagagatgcgcgagagctcatcctacgatcatgcttcaagcctgtggccttaccaggtgaagaaatccctaagtatttcacgtatcgagcttatggagattccctaactgtcattgtacctcagagctctctttctcaatacgtattgcgatttaaggcttgcgtcgtggttgaacctctctccaagggcaagggtttttatccattcttgaaggtaaacgttggcttcaatggcaaacagtatcagaaatcattttctaaagatgcagacctgcagttttgtaagacggatcatctgtttttctgttccttcaagttcgagtctgaaatgactttcaacgatgtggagtttaagttttgttgctccaataggatcaaagaatgcggtgtacgactcatgtatgtctctcaagaagagaacaaccaacagactacgagaagcgagaagcggatgcgggtatcttttgacttttgatttgattttccaggatcgaaataccatagagacagactatttaatagaatcgatcgtttgatttataatgcagatgacatcgggaacatctgaagaatatatcaacttagccggtgaccaaattgtagccgacacaggattggccgctctaaatttggagctttcgttagggcagggagaaccatcatcatcaacatctctagagggggaagctttgtgtgttgattacatgataactgaagaacaagctgaagaaattcctgtcttgtatcctgtttctg

SEQ ID NO: 154862 - DNA, 2987 bp, Arabidopsis thaliana landsberg
atggctactgtttctcaggcattctcagagagaacagagtctattgattcggatttaggctcgctcgttgtagtttcattctacaaattcgctgattttcctgagcatgctgatttcaggaagcctctcaaggatctctgcgaaaaattggtatggcgtttcttctatctcattcaaaagtgtagatttttagtgtctgtctacgaaaggttaagtctttacttacgagtgtttgtattgatcatgaaaatttggtttagattttgaggcactaatcactaatgtagattggattgtcttgtttcaccagcgtgtttcaggtggaatcattcttgcaccagaagggataaatggaagtatctgtgggattcgtgaatcagtggaggaagtgttggcatttatacagagagatgtccggttaaatggtttgaggcaagtggagacacctgtgagtcctgagcaagaagcaattcaccatggacatagtagtagctctcctcttgcagctggtgaagatgctccatttagatgggatcatgttagggtcaaacttaagaaagaggtacactttttagtctttgaagttgagactggaggagttttgtggattgtcaagagttgttttcttttgcaatgtctgtgcagattgttacgcttggaattcctagtgtctcgccaattgaaagagttggaacatatgtgagtcccgaagaatggaacgaactgatcagtgatccagaaactgtgagtcctctttttaccatcttgtagcaagtttagtcaagaactcagtgaaatttgaataaagacttgataactgtttatacacttaggactcattttctctgctctctcttgattaaatgttctggtagatagatcgatgatatcagatctttaagtactattgtgtttcaggtagtgattgatgtgcgtaatacctatgagactagaattgggaagtttaaaggagctgtggatccatgtaccacagctttcagaaatttcccatcttgggtggagaatcaatttgcattgaagcaagaaggcaatgaaacgcaagcaaaggtggagaaagaggatttttctgaaatcacccataaagaagacaaagctgaaaaaccgaagacgctgccacgaattgctatgtattgcactggaggaatcaggtgtgagaaagcttcaagcctccttcttagccaaggtttcgaagaggtaacctaacacaacatctaaccattgttctgttggtttcaaaggtacttaaaagatcaaagcatttttgttatcaggtatatcatctgaaaggtgggatattaaagtaccttgaagaagtccctaaaaccgagagcttatgggaaggggaatgctttgtgttcgacaaacgtgtatctgtggaacatggtctagctcaaggaacacataaactctgctatggatgcaagcaacctataagtgatgaagacatggaagctccagagtacgagtatggagtttcttgcccttactgttactccaagaaatcagaagaggagaaagaaagggcaagagcaaggcagacacagtttgaggaatggggtgtaattggtggtccggacaaaggtcgtcgacccgccactaaacctgatagtccaaggaagaagatcaatgcaaagcttggttcttcaatatagaatgatgttgttttgttcttcttcttgaaatcatttgcattgttacatacttacattaaagagtttaaacgctaatcaatgaggcaatgatcttgaatttttttaagcatatcggaaacaacgactagaaacaacgactagaaacggcgcgttgttcaagtgttaataagtagaacggcaggaagtgtaaaattgacgtttgactaggtcaagaagctcttttaatgtcaaaaattccgcagaattgattatcgtcatttcgttaaggatctctgtggggtttgatcgaatttcatagcgaaggagagagtgagagagagattgaagcagtaatggcaggaacatctggattgctcaacgcagtgaagccaaagatccaaacgattgatattcaggccgccgctggatggggaatcgccgccgcagccggtgccatctgggtcgtccaagtaagctatctcgatctcttgttttccggccatagattggttttcacggattatggtcctgatctgggatctctatctctagctaatgttatgtttctggtgaaattgttggctttatctggttgaaagatgaaaatttcataattgatcaccatttatcaaatttacttgctttgatctcattagattatctataaaggtggttacttttatgagcatcgttgcatataattacgtttcatgaaaggcttgattcgttttggtgctagtctattcttgaattggtgatcaaatcttcttcatttcgttttccttgtactattggtttcacttacattctgatttagtcttctacagaaaatgcctagcttctattgatccttgcttcacgccattaacatcttaaggaggatagagttgcacttatttcagactgatacatgagcttgtttcttcatgaattagtttcatcacttacagacacaatttgctcttggtttggtgttatgtagagattaggcgccttaagctgctagtgaccctattttactaagcttcttttcaaactcataatgtattgtatctgacacattctttatcatcacagccatttggttggataaagaagacattcattgacccacccccaactgaagagaagtgagatatcaccaagattcaagactaagtgaagagttttccagtttctaagtttgttaccgcctctttggcgtggagctgaataaattttggttcttttctggggctttctggtttcatttcttcaatgtagttgactgatttgtcttctcaaatgttataacaaacaagaaaagcacttactccaagttacttgaaaagagaa

SEQ ID NO: 154863 - DNA, 3147 bp, Arabidopsis thaliana landsberg
aaaaaaaagaccaagaagcaatggagtcaactgatcgttcaagtcaagcaaaagctttcgacgaggccaaaatcggtgtgaaagggcttgtggattcaggaatcacagagattccggccctgttccgtgcaacgccggctactcttgcaagcctgaagtcgccaccacctccaaagcatctcaccatccctaccgttgatctcaaaggagcaagcgtggtggagaagatcggagaagctgctgagaaatggggattattccatttggtgaatcacggcatcccggtggaggttctgaagaggatgattcaagggattcgcgggtttcacgagcaagaacctgaagccaagaaacgcttctactctagggatcacactagagacgtgctttactttagcaatcatgatctccaaaactccgaggccgccagttggagagacactctcggttgttataccgcacccgagcctcccagattagaggatttgcccgcggtttgcgggtaagtcattcactattattgtcagaaaatcatgtgttattcgttcaatgattccacatggataatgtagtagctagacgtttattagcatacacagcttaataattctgcatatatggggcagggagattatgctggagtactcaaaggaaataatgagtttaggtgaaaggctatttgagcttctatcagaggctttggggttgaactctcatcatctcaaggacatggactgtgccaagtctcaatatatggttggccaacactacccaccttgccctcagcctgaccttactataggcataaacaagcacaccgatatttcctttctcaccgttcttcttcaagacaatgttggagggcttcaagttttccatgaacagtattggattgatgttactcctgtccctggggctctagtcattaacattggagattttcttcaggttaaaaagatcatgttgctacttcgatcttgcttcatttcatgtatgatttggggtttgatccttcttttttactgtgtgcagcttataaccaatgataagttcataagcgcggagcatagggtgatagccaatggatcttctgaaccgcggacttccgtggcaattgttttcagcacgttcatgagggcgtattctcgagtatatgggccaatcaaagatctcctgtctgcagaaaaccctgctaagtatagagactgcaccctcaccgaattttcaaccatcttcagctcaaaaacgctcgatgctcctaagttacaccatttcaaaatctaagacatttgggtttagaccttttttgtctactaatctatcaaactctctcggtacacaatgaaaactggtacttcatatgtaagccatgatataatacgatagtgtacatttcgaagcttattggcctcgcattcatcctcatccacccatgatacttgattttttcatcagataatcttgcaaacttcatcagaagtaaccaagagcatatggttcactagttttattgagtgagttgaaaactcatcctgtgagtctaggtcggggatctacgcaaaacttatggttcccattataccatgcttgttggatgatacatcaaataaataaccaatcgatatgcaagaacaacacctgcaacctatatctcacctagaccaaaccggtttaactaattgaaatatcactacaaattctcccccttttcctgatggatattggtgaaaaatcaaaaccatttcatttgatttatcaaaatggcttcttgcatccaagaacttcatttcactcacctccatatcccagtcaccatcaaccagcaatttcttgtacatccatcaagtccaacacctgcaaatcaatctcctcaccatagtctctatctatcaaacctagatgatataatcggagcacgagttttcactccctccgtttatttctatccatcaaccaataatcgagaatcttttgtactgaaacggcttcaagatgctcttagtgaggttttagttccgtattatccactctctggtaggttaagagaagtggaaaatgggaaactggaagttttctttggagaagagcaaggtgtgttaatggtgtcggcaaattcatcaatggatttagctgatcttggagatcttacagatccaaattcagctggggtaccataaatctttcgaaacccaggagatgaagcttacacagatcctcgaaatgccgttacttatagctcaagtaacgtctttcacctgtggtggatttagcctcggaattagactttgccattgcatttgtgatggttgtggagctatgcactttctcggatagtgggcagctacagcgaaaaccggaaaattgattgcagatcctgagccggtttgggatagagagactttcaaaccaagaaaccctccaatggtgaaatacccacatcatgagtatcttccaattgaagaaagatcgaatttgacgaactccttgtgggatacaaagccattgcagaaatgttacaggataagcaaagagtttcagtgtcgtgttaaaagcattgctcaaggagaagatccaaccttagtttgtagcacgtttgatgcaatggctgcacacatatggagatcatgggtcaaagcacttgatgtgaagccactggattacaatctcaggctcacgttttcagtcaacgtaagaacaagactagaaaccctaaagttaagaaaaggtttttacggcaatgtggtgtgtttggcttgcgcaatgagcagtgtcgagagtcttattaacgattctctttctaagacaacacgtttggttcaggatgcgagacttagggtttcagaggattacttgcgttctatggtggattacgttgatgtaaagaggccaaagaggttagagtttggtgggaagctaacgataacgcaatggacccggtttgaaatgtatgagactgcggattttggatggggtaaaccggtttatgcagggccaattgacttgaggcctacgccacaggtttgcgtgttgttgccacaaggaggagttgagtctggcaatgaccaaagcatggtggtttgcctttgcttgcctcctactgctgttcatacctttactcggcttctatctttaaatgatcataaataa

SEQ ID NO: 154864 - DNA, 2350 bp, Arabidopsis thaliana landsberg
atgaccggcggagactggattcacgaggctatgggtgatgattcattagtggcggaggctctgatctgtctcctccatgccgagccgtcacttcctgagacgaagagcggcggcgcgtcggatctcaagctgaagtggagcgtgcgtcagcggaggaccaaggcggcgacgttaaggaagaagcgagatcatgatacgcgtgctagtcccacgaccccactttcatggagcggcgcaacctcttttagcggcggtggaggcggtgctgctgctgccgttgatggatttgaggagtcaagtggcgttgtgaaactgtctgaggccgttagatctaaggttcgttcgataatttccctttggtttatatgttcaacagtttttgaaacttctgctttactctgttctgtgtgtttgacaactatacccctcgggatgcggcgttttgacggtgactagccaccgggttataacgaagcctagtcgtactttttacctgatatccattttcacgtaatctcagtcttccttgttttccgcaactacttccagttttgcccctctatgcctatttgtttctcttgaggccatttacgtcattttagtccgggatcggcttcttcgccggtcacgcaatcttggcctttctatctatactccgacttagcgttgaccgataatatcactctgttactctgacctgatcacgttctttttcttcatagatgaaactcaaaacctatctatcttctttgctttttcctatttttgcaatctagtgcctcctcacatcgagatgatggtgattggtgttggtggccaagtttcacgtcacgatgcttggttcctgaaactgttcgctgaattcaagccagttaaattacccagtcatcaccgattcaatgacgagattacccccgttcacgcagtgtgttttaggggtagttgggtcaatgagagaagttatgtctggcgttatttataatagcttataatgagggttgcctcttttatgggtcgagaggcgttttcgtggcggattaggtttgggggtttggtgcgtctgtggtgtaatcagatgcggcgtggaacataataagtctcataggtaataatgggctgacatggaaaaaagaaagtcaaaaactctccgaagcatctcttggtcaaaatcactaactcctttcatattggtttagctctttttctctatggttgaagctgaattatcttaccaaagtagaacccacaaagtcatcagttttgggtttgtgattaaaagaacgtgataaggacaagtggttatgtggataattcgtgacaacaaaactgtggggtcgtggtcatggggagacacgcgtataagtcttccaaatcacgctccattcacgtgattctattctttcgaatttagtatgtctcgaggtaggagaaaaagatgcacttcttattcatattgcttttcttgggtataagttgttgaccaagaaagaagattcttttttaaatgtttttggtgtttaacttgtcttagatttagcgttttgattaaagaaaaatgaacgtgctatatgtgttttttgacatgcaacaatctgaatgtttggtgggtttcacgcagataactcaaacgagtgttacaacaagccctttcaagagatcaagaaagaaaaaggtaaaccagaaaagaataattaatatcagattctggtagaatcacaacgttgtatgattttatgtcttagtttaatcactgtatgtggttgtccacagacacttgctcaacttaaagaggaggagagtgtgctcttaaaggaaaggaatggcttgataaatgtaaaacctctttcccattttgttctcatataaaaaaagtccaaatctttaatataattcttgttttcctgaatcaggaactcgcaactatgcaggatctgctcaagcaacaaagagcaagaaacgagtctttaaagaaactccaggttaacttcattttccgattcgttatactaaaacagtatcactcttttgagtataaataacatatcatatctctgtgcaggctgagtcacaaaagaatgatgattcctccttcttgctccctgaccttaatatagctctggataacaactcgagccctgaaagtctctatggaaccagctgatatataactacgacacaattttcacatcaatattcttttgtcagtgacacgttctctagactatgcgtaactatgtaactatacgatttggataagaatttatagataggtaatagtcgtcccctttccctttgctttgcagaagcatacaaagattctaatgacagaggagacgagttgaatgtttaa

SEQ ID NO: 154865 - DNA, 804 bp, Arabidopsis thaliana landsberg
cttgcaaacatggaaacagtgtgtgctctacatttggtggaagcaatcccgggattaaaaccgaagttattcagtcgttgaatgataatatcaatatgatatgtggctgcgcattcacagctcatccttcaacatttgcatctgtttccgtaagctaatctttctttctgtttccatactctctacggttgttatttgcactcatttcagtttttctctaaaaccgcagtttggtcggtctaagtggaatgggaacattggacgaacaggaatagttgttagagctgatactcctcttccaaacgttgctcgaccttctttctccattcagatcaacaatgctttcgagttctgaaaatatgtaagggcaagtttttggtttgtgtagtctcgtcaaaagactatattgtatatagtaaattaaactcatcaatccaacagagaaatttcacagcgtaataacgattcaattttgaaagttgatatgttggtaaatactgttgtgtttgtagattgaataaaagaatatatacaattcattactcaatctccacatcagtaagatcatctaacagtctcctcgacgaagatgatgaatttccttcttcttgctgtaataggctaacatctttgctcggatcagagaaggaagaatcgacccaaggaccgtccatcgaggaggagcttttgtgttctttgtttcttgtataggttgagacttgtgactcgctgtcttgtgacaaatgctctaaggccttaaacctcattgcggctgaaccacttggatcagcttcacgtttcacc

SEQ ID NO: 154866 - DNA, 425 bp, Arabidopsis thaliana landsberg
gtacctgagtattggaaaacctacgtaggcgaggtggatcaagagagggaaatgtggttgaactctttttacaaagctcctttgaggttaccaatgcctgctgagctcgaacattggtgggaaaatggtaatgacccttcaagatgttagtcttacatggttgaatgcattgatgttagactgagttttttctatattatatttttcttgagcagtggaggtgacaccggagtatgttttactgagcaagaaacctgaacctgatccaaatgatccttcaaaacttgtccagaagaaggaccctgttattttacatacaccaacaggtcgaataatcaactatgtagaggatgaaaaacatggcattcgactattttggcagcctcctctgaggaaggagaagaagtggatcctcaaaagttagt

SEQ ID NO: 154867 - DNA, 268 bp, Arabidopsis thaliana landsberg
caccgttaaacttgtagtggcgaaccatgctctcagatggagctgggaaccccagagaagaaggatacaagaaatagaaaccaaaccatatgagaccccatctccctctctatctttctcttctctctctatctctccttcttcttaaactgtgtttttagtctttttctctctgttttcgagatgagcgactggccaacgcaagcttataaagggagaggagaaagagatttggaaaccagagatggaggcgacgtcgttttaggtg

SEQ ID NO: 154868 - DNA, 551 bp, Arabidopsis thaliana landsberg
gcaatccggtgaatcgcctctagatgtccctcaatgtgtctcgtctttcgcttctctagtccccacgtatctcgatttcaactcacgctcctcggaaaggtcactctcttatctttcactctctgttttgttctttatcgcctgagaattgatgtggatttttcaaatttcagttaatcttagctaattgacttgaaattcaatgaaaagattcaatttttggtttaattaagcaagttgtgagatagatgaacgaatttgttgaccaattgcgttttacaggatacgtttgttgctctatgaagtcttatagattatctgaacttagttcttcccaagttgatagtttgaagtcacgccctcgcattgacttctcttctattttcgccactgtaactttcaaactcttcttcttcttcttcgttgaccattttcccacttctcttattaagctcggtcatattttactatcaggtgaacccgattatcgatgctgttcgtagcaatggggataccgctgtcaaagagtaagtgacttattctctgtctat

SEQ ID NO: 154869 - DNA, 959 bp, Arabidopsis thaliana landsberg
attgttctcacttccgaaaaggtttcttaatctctgattcaaacctcttttttccgatgaatttaggtttcgttattgtagttacttcgcaagattcatagttttccggtcatacgattataggatggttgcatttgctggtttgatttgcgatgtaaagatgttcaattcatcatcgatgttggaacagaaccagtttcatctctttgtttcaagacaggttttgtctctttgtgttttgtctgtgtctctctctttcaatttcttctctttggctcaagttggtaaataaattttgttcgatttttcaggtaatgagaacattctctatgcttcttgtggaaacgaaatcaagtcttttgatgttcatatggtaatttaaaaatatcaaaactttgattaactatctataaacatatccttcacttagttttaaagcttctctctttatgcaaattcatagctgagtgctacttcttggaagccattagagagttacaattacaacaaagatgaagtaaaccaggtagagatactaaaagcctcgaattttcgaaaaagttatcatatttacctgtgacatcgatcttttgggtttcttgatttgttaaaggtagtatgcaacggaaggtcatcttttcttgcttctgcagatgattctggcgatgttaaggtacactcaattgttgtttttaatacttaaaagattacataaacatgaatttgtgtgggacttttctcggtttgattagtttgcttgaaacacagatcatcgacattggtcagaaatgcctttataaaacccttagagctggccacacaagtgtatccttatttcgatattttgctccctcgcgtctatgaaattctatgagtctcggaaaaatctctcaagtcaacaccttaatgtgacatttaagatatgtagttctgtacaattcattccatggagaccttgg

SEQ ID NO: 154870 - DNA, 607 bp, Arabidopsis thaliana landsberg
gaagctgctggcgttacaagttctcatcttttctagtcttttacatttcacctccctttcgtcggcgacccaaatccacgttttgggaattcctccctaaaaatcagaaacccttggcttttccaacatggaagacgcctacgccagatctgtctcagaggtgctttgcatttctcttctcaatccgttattctctgagagttgttttcggatttgtaatctgtgagatatagctgcgatcgcatataatgttagctagccggtgatgatattcttggcaactgttttactttgatggaagtgaatttctcgtatttgagccctctgttaggtgttgatgtgattctgtgttttgtgcaggtgcttgatttctttggggtagacccaacaaagggtctttctgattctcaggtatgaacctgttgaaccgaattgagatctccattgttacttgaacttttaaagtcacttcaaagatacccatgttggttgttaatctttcgtttccgtatatgtaggttgttcatcattcaaggctttatggcaggaatggtatgtattacttccacttcacttgcacttctgttcatataaagcatcagtcagg

SEQ ID NO: 154871 - DNA, 576 bp, Arabidopsis thaliana landsberg
cttggtttaatccggttcgattcatttcccggtttagaagctgcaaccgggaaattagcttcgattccaggattatacgtgttcggagattcgttagttgatgccggcaacaataattacttaccaatttcaatatctaaagctaattatccacataacggcgtcgattttccgaacaagaaacccaccggaagattctgtaacggcaagaacgccgccgatgctatcggtgagtttttaataactattactctccgctgtcatatttttttctgtatgaaatgaaactattagtgttggtgttatgttatggcaggccacgattggtttgatttagatagcgtaacgtgctggccattaaaaattaaatattttcactcatatatacactaattgaaaaaagtggtcagacgttgaaaatatagtaattttaagagataatattacacgtagttctaacaattaaattatttgtgtttttgtttgcttagctgagaaatttggtttaccgttaccacctcccttatcatcacttagaggcttactaaaaagggagaagagaaaatcttccgccgt

SEQ ID NO: 154872 - DNA, 1675 bp, Arabidopsis thaliana landsberg
aacgaataaaatcaaatacttacttttgaatccgtttttttcattgtttgatcgattatgggaaaggttcttcagaaagaggcgttcggattagccgcgaaagacaattccggagttctctcgcctttcagtttcactagaaggtttcacaatatgtttttataatctctatcgatctcgtttgaatgaattgaacctaagttttggtgggattaatgtgtatggaaacaggagaaaaggatgtgaggttcaaagtgttattttgtggaatttgtcactctgatttgcatatggtcaagaacgagtggggaatgtctacttatcctcttgtcccagggtaagacatgcatgtgtcctactgtcttttttataaatttctaccccaaaaaaaaaagttctacgataagtttcgtttgattaatcccaagggaatgatttttctcctctaatgctgatattaaatccgaatgtttattcaggcatgagatcgtgggcgtggtgactgaagtcggagccaaagtgactaaattcaaaaccggagaaaaagtcggagttgggtgtttggtcagctcgtgcgggtcatgtgacagctgcaccgaaggtatggaaaactattgtccaaaatcaatccaaacgtacggattcccgtactacgacaacaccataacatacggtggttactccgaccacatggtttgcgaggaaggtttcgtcatccgtattccagacaatctccccttggacgccgccgcaccgctcctctgtgccggtatcacggtctattcccctatgaagtatcacgggctcgacaaacccggtatgcacatcggtgtggtaggattaggcggtttaggtcatgtaggagtgaaatttgccaaggctatgggtactaaggttacggttattagtacttcggagcgtaagagatacgagaccgttactcggcttggtgcggatgccttcttggtgagccgtgacccaaaacagattaaggatgcaatgggtactatggatggtataattgataccgtctctgcgactcattcacttcttccgttgctcggtttgctgaagcataagggaaaacttgttatggttggtgcacccgagaagccactcgagctacctgtcatgcctctcatctttggtaagctatatttgtagtaacaaatccgtatatatatgacttgtgctaaatttgcaatgtttagtcaataacgtgtgaaaataacattgaaattgtgtgtgattgtgttattgtgtctatatagagaggaagatggtaatgggaagtatgataggagggataaaagagacccaggaaatgatagatatggccgggaaacacaacatcaccgcggatattgagcttatctctgcggattatgtcaacaccgccatggaacggcttgcaaaggctgacgttaagtaccgatttgtgattgatgttgccaacacgatgaagccaactccttaactagaaagcttaagaattgaatatccccaaagcttttttcatgtttttgcttgtttgtttgatgttgtttgctggcgactttgtgtgtagtattaccacactgcatgtactttatcagttgaataaacttgaatattgtatttaataagctatctacattagattttggggaagtttgattaaaatttattccgattg

SEQ ID NO: 154873 - DNA, 675 bp, Arabidopsis thaliana landsberg; identical to SEQ ID NO: 11774

SEQ ID NO: 154874 - DNA, 644 bp, Arabidopsis thaliana landsberg
  unsure (1)..(644): unsure at all n locations
acgtttctcttggcaggttttgttgttgtttgaagatggtgtcacatgaagagaacacaagttttgtggaatggtttcttggtccacatccatacacgtatcctccttgtggtattgagatgattcatgaggatgatgaagtagcagtagctcatcatcatcatcatcaccagagcggtgagtattacagagagtatgaagatcatcgtagtagcgatgtagataacgatgagatcattgctagaactctccaagacgattttttgcagcttgaaatcgcagaaagtaacgattattcgcatcagaatcaacaacaacatcaacaagaaggttatactaacaactatagtaataannnnnnnnnnnnnnnnnnnnnnnnnnnnnnnnnnnnnntggattattcttcaggttattattcattggtttatgcttttcctctgtgttgttatggtattagggaatagattacagagatgcgtttttggttgttgtagaatggataggaaatgataatgatcaagatgggaggagcgatgattcggttaatgtcttttcgtgttcaagcccgagtgacacggatgagtatgtatactcgtgggaatcggatcagtgtgatgctgatggtgaatttggaaggagattga

SEQ ID NO: 154875 - DNA, 738 bp, Arabidopsis thaliana landsberg
  unsure (1)..(738): unsure at all n locations
ttgattaggttcaccgagttcttgttgacatagtttcagcttctgcaaatgctacacctgacttgggagatatcctcctttcaagcgagaggtaataatgattttttggtgctttattcagtaatattttatcatttcggtaacagttattcctttctgactaatcatcaaccaggttgtagctatagcaagtgcagcacttgatggtttcaagaatgaagccaagaaaatggtggttgcactagttgatatggaacgcgcttttgtaccacctcaacattttatccgtcttgtgcaaaggaggtattttggcttgtctttctttgcaatttttgtttttattttcaatggttcatgactgaaaattatttctctttctgacgatgcactgtattgactccatcagaatggaaagacaacgtcgcgaggaacagctgaaagggcgatcttctaagaagggacaagatgcagagcagtcccttttaagcagggtgtgtgttcattctgtatcaatttggatatacgtagtgaaaaatgttttttttttttttttatcgttttacatgaaaatatataatgtggaaattctctacatatatgtttatcaggctactagtcctcagccagatgggccaacagctggtggtagcttaaaatcaatgaaagacaaacctagtccgcaagataaagagacgccggaggtctctggtctgaaaactgctggacctgagggggagn

SEQ ID NO: 154876 - DNA, 387 bp, Arabidopsis thaliana landsberg
atatttatttaataaaaagaaaagaaaagaaaaaaactctgccaggatggcttctttgatcacaaccaaagcaatgatgagtcatcatcatgttttgtcgtcaactagaatcactactctttattccgaaaattccatcggcgatcaacaaataaaaacaaaacctcaagtccctcaccggttatttgctcggaggatcttcggtgtaaccagagctgtaattaattcaccggcaccgtctccgttgccggagaaagagaaggtggaaggtgagagacggtgtcatgttgcgtggacaagtgtacaacaagagaattgggagggtgaacttactgtccaaggaaagatacccacttggctggtttgtctttttatcatttttctata

SEQ ID NO: 154877 - DNA, 463 bp, Arabidopsis thaliana landsberg
gatggctagatgggatcagattttctccttacctgtgcaaaatcctaccttgccagaattttcttctaccgatcttgtctggtcaaaggttgaaggtaaccgggacaatatagataggttagccctcatcccatatactagggtggatgattttgtaagaggtgaatgctcgaataaagattgtcctacaagtttccatgttgaagctagacgtcggaaagccaaaggaaaaaaatataagccaaaggtggatggcatcttggagtatattctgtaagttacaccttggttttgtactagtcacacccagttagatcatttctctggttattatcgtcctctgaaagtttctctggtctgctttcacatcgtcgtgctttgtatcctattcttcatgttctgtatgctttgtggaaatcatttccgaaagagtggcagtgaatttagcttttgtttgcggcgt

SEQ ID NO: 154878 - DNA, 1340 bp, Arabidopsis thaliana landsberg
aagaaataatggagaagctgtcatcagctgctgtagttcctcagctcctccgcaacatcatcgtcgccgtcgttgttttcgctgatgaatctctccttcaaatcaacgggaattcaaagctcctcgagaaactccgtgtatttctcgtcacgtgtttcctcttactctgacgctatcttccttcaggggtctatttcgcaaaccctaattcgtgagtagtctctttcgccaacccttattcatcgaagacgaaaaagaataatgggatactggtgatcaaccattgcaaaaaatcgggaatcggacgaccaacttggcaggtattgtcagcgatgaatgaaattccggtgagttctataaagtaccaagtggttcgatcgttggcggagagactaatcgacgagaatcaaggagaaaactcagtcgccttgttggatttgaaccgtagggttttaaacgcgtcgtttcgtacaactctaagccggttagagacggcggttgagcgtaaccctaaccggagagatatagatgaaccggttcgtcgtggattaaaccgggttgtcagagctgcggttagagccgtgggagatgggtttatcggttggggtggagaagagacggcggatcagacggcggaaacgtcggagaaactggcggcggaattgctttggttggcggagaagatggcggtttatggattcgtggatgaagccgttgagaaatgggcttcggcttctaacttagcttggcttgctctttcgtgtgagccacgtcttcaatgctctttgatccaaatctctggtaaatatttatttttaccgcatgattttttaatttttcgtaaatatggtaaatactatatagaataatctctttcccaatctggaaaaaagaaagaaaataggattatactctttttctgttcaggatattctttttttattttgtatgataaaaatattttgactttccaaaacaaatttcatttttactgtgaagccttactattcaaagaagccaaggacattaaaaagggaagcgaagaagaagaaggagaggaagcaaaattgagagagataaagaagaagatgcttatttcgtggattccgttgctgtgccgagccagcaacggagctgataaaccggtgttaagaagtgcggaacgagcgtatctagagaaagtgttggagaagatgatatctgaactaaaagaagaggagcaagaacgagttctctcactctggttcaccattacacacattgcgcttcctctgactggcctgacctcaacggctcttatgttcgttggtgccattcttctcgccagcttttgctcttag

SEQ ID NO: 154879 - DNA, 499 bp, Arabidopsis thaliana landsberg
acattttcagctcttaacactgatggtgttcttctgcttactttcaaatactccatcctcactgaccctctctctgttctacgcaattggaactatgatgatgcaacaccatgcttgtggacaggtgtcacatgtacagagcttgggaagcctaacacaccagacatgttcagagtcacaagcttggtacttcccaacaaacaccttttgggttccatcactccggacttgttctcgattccatatctaaggatcttggatctgtctagcaatttcttcaacgggtcactcccggactcggtgttcaacgccactgagcttcagagtatctcccttggaagcaacaatctctctggtgatttgcccaagagtgtcaacagtgtgactaatctccagctcttgaatctctcagctaacgcatttactggcgaaattccgctcaacatctcacttctgaagaatctaacggtcgtttccttgtcaaaaaacaccttttcag

SEQ ID NO: 154880 - DNA, 7191 bp, Arabidopsis thaliana landsberg
atggattcaagaagaaagagttcatctcgggctagaagatcctgtattaataaagaagaagttgagtcgtttgacttgagtggcatgaatgaacgccaaattcgccaagctcgccatgctcaaagatcaagcctcattcaagggggaggttcaagccgttcaaacatgcaaagagaagaggtagcttggggaaagagggttgttgaggctggggaagaacgccatgaagaggcagtctttgaagaagcggtttctgaggaagaggttgagatcatcagggatgatacaccagcccctgttaggagaagaaaccaaccaaggaggaagagagagccaaccccaagtgagtactatgaatacttgaaggagttaaagtttgagggaactagataccctcataaggaaacgatgcaagagcttggtatttgtggtgatgtgcaatacttgatggaattggtcaatcttgcaacgttcatgagctgccaatgtgggggatttaaagaggagagctgccaactccttgcaaccctcaaagttcacttttgtgttgatgattctgagaaagaagaaaggggaggtcttggttacataactttcaaggttaggggtgtcgagtatactcttgatattagcccccttgataccattttcgggttaccaagtggagaaggaatccgccaagactatgaccaagatgagtgataagtgtgtattttgcatgttttgagcatccatttgtcatcactttagcatcatattatcactgttttataccatttctcatcatttgtcatcactttacatgtttaggatagatttgcatgcatgatgcatatttgcgttgatttcagatgatttggagctgttgacgagctatctaaagaagtgggcctgatcatgtcaaaccactcgaccccgaggtcgagtaggagcttcaagaactcaacagatcactcgacccactggtcgagtagaggacatcactacttcatcccatcactttaccatcactcgatcacatcactctaccccgaggccgagtgtcttcgccttcattgccagaacactactcgacctcatcactctacgtggaagtcgagtatcaccatcaccaccactcgactgcatactcgatgacaagcttcacagccttctccattccgcactcaaccagacattcgagcacaaggaaaaaaagaatactccagctaatcactcgacctctcactcgaccacctgggtcgagtactgttcttaatccgtcccaatattgtgtcgttttgagtattagggtttcggtaatatttcgctataagttgcatgtactttacattttcgtaatctaagttttaattccgtagacactttcttcttgactttttttgtaatccggatttctcttaatctattcagtattcagcttttgcctttgatttcgtttactgttgttcatctagttatcatcttgctattacactgttgttataatgttttcattctattcaacgtttatgttctctacaatgatgtctgagtagtgaataggtttctaaggatgggttagagtagttaagaattctcagtatgctaggtgtttgagtttgatttatagatcccttctggattagttgttcttgatgcctattgctttctgatcaactggaatttgagcctagacatttccgcacccaaaaggtgtttgatgaaatgtctgaaccactaattccacagattcgtggccctgtaccaaggtattggttgcagggagcgttttggctttaacttgttgattcgtaatgcctgttaggttagctctcgtcaatggtgattgagtctgggactaggttaacttgagggtctctattgcggtggcacttagatttggttaatgaacttgttgtctagggttaatttattgagcatgtcaatcacctgtaaactgagaaaacgaaactactcaattaccccatccttgggaattctttgtctgattgaattctttgtttactctactgtttttactgcatcttgttatctgtcgcttaatttctgcagttctttcttgttactcgacctcatactcgaccacctagttgtctggcaacagactatgcagtcgagtatccttgtttcattttctgtctgttactcgacctgtcactcgacctcacccagtgctctgcaaagagctgtgttggtcgagtgtttcactgtttctgtttgattttctgttttctgcatgttcatttaggactgctagaacacaccaaaacctgttatgcttggcttgacttagtgacttctgatcacatcttgattgttagcatcacacccatttggattgacaacctaaaatactacaacgacatgattggtgttataggataattgaccaaaaaaaacctactatcagtttgcaggaagagaaattgggaagaccgttccatcttggtgaggtgttcatccagacacacactaagtcggatggcacttatgttgatcggaaggcggagaagattgctcaaacttatgggcagaatgtgagatcaaagctgtctgaactggaggctgcagcttctactgtctctaatggcacttcacgaccttgggatctcacagtagatgagtataaagccatctttctcgaggtaagatgttgtagtctaattcagagtcttagagtccattgatgcattcattcactaattgtcttcctctctatttcttgcagtccacagatagggattcaagaggcaatccttatggacttggatatcttaaagacactctaggcagtgccaaccgccaactccccgaagactcagcatcctttcaagatttagaagaacggctgcaagaagctcaacggaaaattgaagagcaggctgcgtataatgagaagcaggatgctaagattgcagcccgagaagctgagtcagcccgagtcacagctgagcaaaaggacaagctcaaacacttgtccttagtcgagaagtatctccgccaaatcgatccgcaattcttggacttcatggccactcactcttccacatccactgagcgtctcccaaatactccacctactgctccatagatttaagaaccaaacactatacttgaacttatgtttatttgaataaagtagtttgtttaagaataagatacttgtatgtgtatttgaacttaattttcaatatatgtttatcttttcatgatttatagcatttcgagtaacaaaccacagcaaaccataacactaatcaacaaacaagaaacccaacaatcggtgaccaaattcttattcggataaaagcagaagtcgcaaaatagtcgtaaaaacgtcgcaaattaaacgtatagtagtcgtaaaatagtcacccaaattaccgactattttaagacaaaccaaaataatcataacctaatcatcaaacagacgtccattagtcgtataaatttatacgactattatatgactaagtatatcatatcattggtattttacatttactcgtttaatagtcggcaaattgtcgtaaaatatgttacgactattttgcgattacttgaaagacacccagggttcattaaatttaatcggaacatagtcgtaacattgtcggaagaatttaacgactattggacgacgatatgtttcacacgctctgtacagtgttattaatcgtgaaattgtcgccaaatagtcgccattataatacgactactcaacgactaatgtatattgtatggtctgttgtcataaataagtcgtaaatcaacgactaattgacgacagctggacttaacgactatggtataacgactactgtcattagtcgcggactagtcgtagattcagaattaacgactactaagtgactactttgtaagtcgttgattgcctgttttcttgtagtggttctaatgtgaatctgatgcctcgttcagttgctatgcgtcttgggtattccagtcttgagcctacttttatcactcttgtgttggtagatcgttctactcgaattccatatgcaattcttattgatgttcccgtgatgattggaaagagcatgattcctacagactttgtagtcttgccttatgagaaggaacctaaggatccattaatctttgggagatccttcttggacacagctggagcaatgatagatgttcgacaagggaggatacggctgaatgttggcgatcttactatgcagttcgatatgaacactttggtcaagaaaccaatcatagaagggaaaaccttcttgatagattctttcacttcatcagcttcagatagtatttcagagattgaatgagaagacccactagagcgagttttggtctcttccatagaagatagtgcagatttggacattgaaacttctacatatactaagctgctagatgagaccgaacatgtgatgcaacttcagttgaagaagcttttccatctgtgacttcaacgtcgactactaattcagattgggatccagcaaaaggctcctaaaatcgaattgaaaccacttctagcagggctcaagtacacttttcttggtgaaaattctacttatcctgttattgtgattgcttctcttaatcccgcatagctcaccttattgctaagcaagctgcgcaatcatcgcaaagctcttggctattctcatgatgacattgcaagtatatctccagatgtatgcatgcataggatctaccttgaggatgagtctaagtcttcagttgaacatcaaagaaggctgaatccgaatctgaaagatgttgttaagaaagagattatgaaattgttggaagaagggatcatctatctgatttcagacagtagttgggtaagtccagttcatgtaggtcctaacaaaggaggagttaaaatagtcaagaacaaaaaggatgagctgattcctactcagacaattacgggccattgaatgtgcattgattataggaagctgaatgctgcaactagaaaagaccacttcccctttccatttatcgatcaaatgttggagaggttagcaaatcagaagtactactgttttcttgatggatattcaggtttctttcaaatcccgattcatctcgatgaccaggagaaaaatactttcacttgccaatatggtacatttgcttatcgaagaatgcctttcggtctttgtaacgcttccgcaaacctttcagagaggtatgatggctatcttcacggatatgattgaggatatcatggaggtctttattgatgatttttcagtctatggaccatcatttgaggactgtttagagaatctctgcaaagtgttagcaagatatgaggagaaacatctggttttgaattgggagaaatgtcactttatggtgcaggatgagatagttctcggtcacagaatttcagagcatgggatagaagtcgatagagctaagatcgaagttatgacaagtcttcaagcacctgataacgttaaagcagtgaggagtttccttggacatgctggtttctataggagattcatcaaagattttaacaaaattgcaaggccattgaccgctttactctgcaaagaagtcaaattcgagtttacacaagaatatcatgatgcctttcagcagataaaacaagccttgattagcgcaccaattgttcaaccaccagactgggatctaccttttgaggtaatgtgtgatgcgagtgattttgcagttggggctgttctaggacagaggaaggataagaaacttcatgccatctactatgcaagtaggacacttgatgatgctcaaaggaattatgctactacggagaaggagttcttagctgtggtgtttgctttcgagaagttcctatcttatcttgttggatccaaggttattgatcacacatatcatgctgccttgatgtatttgatgcaaaagaaagatgctaagccaagacttttgagatggattttgcttcttcaggaatttgacatcgaggtaagagaaaagaaaggagttgagaatggtgtaacagattatttgtcacgcattaggattgatgatgatgtccttattaatgatttcttgtctgaggagaacatatacatgattgatacaactgaagaaggtgactgcaaatgtgataagttgcagaatcgagctttagcgtcgatcgacactcattttatgtcgatcgacactcaattttcagaggaagttgatattcgcagttgcgggatcgtgtcgatcgacaccattgagactgtcgatcgacaccctcccgatcagacaagaaataggtcaccagctgagaattgcaccaccacaacggtcgagaaggactatccatggtatggtgacattgttaattacctagctgcagatgtggaactggataattttaaagattacaacaagaagagattcctaagagagatttggcgatattattgggatgaaccttatctttataagcattgttctgatggagtttataggagatgcattgctgcaacagaggttcctgatatactatcgcattgtcacagctctagctatggacgacattttgcaaccttcaatacagtatccaaagttcttcaagcaggcttttgatggcctataatgttttgggatgctcagaagttcatatcgcagtgtgatccttttcagaaaaggggaaagatcagcaagcgtactgagatgccttagaaatttatcctcgaagtggaagtcttcgattgttggggtatagatttcacgggacccttcccaccttccaacaagaatctctacatcctagtcgttgtggattatgtctctaaatgggtagaagctataactagtccgaagaacgattcagtagttgtcatgaaactcttcaagtctatcatcttccctcattttggagtgccacgcattgtcattagtgacggaggtaaccatttcattaacaagattcttgcaaaattgcttttacaatatggagttcagcatcgggttgctactccctaccacacacaaacgagcggccaagttgaagttttcaacaggcaaatcaaagagattcttgagaaaacaatgggtaaagcggaaaaagaatggtcctactagttagatgatgcactgtgggcttacatgacaactttcaaaactccgcttcggaccacactttttcatcttctatatggtaaaact

SEQ ID NO: 154881 - DNA, 2557 bp, Arabidopsis thaliana landsberg
  unsure (1)..(2557): unsure at all n locations
caatggcgcagacattaatggcgacaactcgtccgtacgttcttctctcttccacaagagcgagtctttatcgcctttttcaatcttcaaagagacccttcgcttcattctcagctcctctcgtgagattcactaactcgagatgtgtaagcgccgttttgtctcgtaaagagactgcgccgtcgtcgatttacggcaatagagtttctagggtttctgggtttggtgctttggacattcgcagccttaatttcagtactaaatcctctcaaatcaatgatgctggttctattgatcaaacccttatgcaatccatggagctaaaggttggatttttatacctcattaactaatttcagtgaaattgattcattgtgtatgtttcagtgtcaattcaatttataggttatagtattattagtgaatttttgaagaaattgattggatacttggtattggcaacatgtgtcatatttagttgatggaaacttggtattggcaacacgattgctctcagtagctccaaaatgatcaagatcactaagctaagataattaatgagcaatcatgtctcttccttatatgattgaagcaaacgattctttttttcgatttatcaacacatgtctctccacttatgaggttgtggcgtcatttgcagatcaaagaacaattgaatgcagagtcggtccctgcaacgaatatgtctgtagatggacgtcatgtctggtaagtactctgatttaactcatttttgtcttccaatgatgattctttattacacttgagtgaagttgcagatgtgtgttatcactgttatggatagtgtttagtgaagtttgttagatatatagataaattcatattttgagattccttttctttcattttaatcacaaaaaagtttcaggttcaacaagtagtagaatcatcaaagttgggatataagttagtacttattcttctgctcttgatggaatccagtcatagattcttactttaacttgtcatattagatggttctgttacttaataccagttttgcttaatatttgtagcatcaatgtggtatcatcggcttttgagggacaatctgcagtgaacagacaaaggatggtctacaaagccatttgggaagagcttcagaacgttgttcatgccgttgatcaaatgacagcaaagactccctctgaagtttgaagcgttaaattttccgaactctaaaagtcttcaatatcttatattatttgattagctgacaatgctgtttgttttatcaaaaagaaaaagcaaaaggaactgatatacagcttttggttattttttaagtactttgattggttctcttgcaacccgccaacacatgttatgtgttggagcgtttgcggtttgcggttacacgtgtttggcgttttcaatcgctctaaatgaataagaacaaaattagcgtttgtggtggcggattatcttcaaaataaactttattctctactagctaatgttatcatttcaaaaaaaaaaatttagtcgataaatagattaaaatatatttgtggtcataaaaattatatgtatgcatggaaacgtatcaattcaaaactgaaaagttttttgcaatgaaaattgtaagatttataataatatgattgttgcttttatatacatgttacatgcctgaatagtgaataactgaatattgaactactatggttgatttgggaaccgtattagccatcaactagacaaaaatcgtttatatcagtagtagcaacacttaataatggttacaactagtccatctgctcaaattcccatatctttactttagctacatggattaacagtttttttttttgttatcggttattataccatcattagaaacataatgttgttttgtaaaaaaacaaaacactcatattgttacaacttggaaacataagttcatttaactccaattattacaagtagacaaacataggttttatagatactatactaccacaacccatcacatgttttttttcacattatgattggtatttacaaaacatagttgttatagatactaccacaaggtccacaacccatcacatgttttttttcacataatgattttgatattttacaaggtcttgaagtgaaaaggagaaaatgaagaatgaacagtgtgcgaaaacacactatgttcattccttcattttactatgaacacatatatatgtatgtatattcgngtagaagatactacatgaatattcttaagcagctttgtttcaccttggtattagttctcgcggcaatgacggcgattaggcccggacggtttttcatagggaagttgagctttttcataagaaaattgagctctccttggcaagttatgtcttcttgatggacctggaggtggaaccggatatactctatgacccggcgggtgggttttcttgccggtagctgcattatgatgatgatgatgatgatgatgatgctgatgacagttgaggaaccggagtgttgctccggcggttatcgccgaatggaggacaacgagtaa

SEQ ID NO: 154882 - DNA, 290 bp, Arabidopsis thaliana landsberg
catcctcaagcgataacaccacaaaaaaacaacaaaccaaacaaaaaaaaaacagagagagagaacaaatctccatcatcatcatggactcgtctcaaaacgacggcgtacaccaaccgcttctccatcctcaagcatctccatctccgccggagtcaaccaacggcgagctagaaactgtcctctccgacgtagaaactcctctgtttctcgcgtacgtaaagccccataatcgaatcaaagcttctctttaacctcgctgcaccagcggtcatcgtctacatgattac

SEQ ID NO: 154883 - DNA, 366 bp, Arabidopsis thaliana landsberg
cgaccatctcctcgcctagctgtcagctagtcagctcgtccaactcctcgtctagctatcagctcatccctcgtcaactacctgccgacctacctccaatgacggcctagctcacttattctaatatgaactacgtgtggcttgatccctttctaagggtacgtaggcaaccttttacaaggttcagctataaaacgaataaactctattcttcctcggacatcaagttcgtcttccggcctcaagctcgcctttcatctacaatcagctcgttcttactccatcaatgctcgttgaagaaatcatcctttgaaatccgtccaattcgcctaagtcgcaggctcgtctttaatagaaagattcttc

SEQ ID NO: 154884 - DNA, 498 bp, Arabidopsis thaliana landsberg
gtgcatcattctctttatctgcttctgcaacacaaaaaccccattaacatccaatcagaatgtcggcaaaccctaacccatggtcaccatacgattcatacaatgattgttctcaaggaatttgcaacatatactgtcctcaatggtgttacctaatcttccctcctcctcctccttctttattcctgggcgtcgacacttcctcctcctcctccagtttctctcctctcctcatcgctctcatcggtatcttaaccagcgctctcatcctcgtcagctactacactctcatctcaaaatactgtcatcgccaccaccaaacctcctcttcagaaactcttaacctaaatcataacggtgagggtttcttctcctccacgcaaagaatctccacgaatggagatggactcaatgagtccatgattaaatcaatcactgtttataagtataaaagtggagatggattcgttgatggttcagattgctctgtttgtttga

SEQ ID NO: 154885 - DNA, 421 bp, Arabidopsis thaliana landsberg
taaaacaaatttcttctcaggccaaaactcgcctctggaagctccgatgacgaagaggagcaaaggagctaacgaagataagctgatagaaaccaaaagcaaaaacgtttctggaaaatctcagaaacagaagaaaccagtagaagcagaaagcttaaaagaggaagaccttctacaagcatccggaactgattctgattacgacggagatgtattcttcttgctcctcttctcttttgtaacatctttattctgcatttgatttattctgggtttttttctttgggtgatttttagagtttgcctggttctttgaattccgacgatttcgactccgatttttccgattcagaggatgatggaacacatgaaggaacagaagatggagatgtagacttttccgatgacgacgacgtgcttg

SEQ ID NO: 154886 - DNA, 3666 bp, Arabidopsis thaliana landsberg
  unsure (1)..(3666): unsure at all n locations
gtctacgcacgtggtagctccgtccgggatctgcggagattctcctggatattcggcaggtcagttccgagatatcaggtccgctccgcaaatatatctgtgttagtttgtaggttgttattcgcttatctccctttatcaggtgaccgggcttatcaggcccaagtacccatttgcgtacgtgggctcatcagttgtgcacgttctctacttagtgggcttggtgggctttgtgggttggcttggtatttttgcaggtggattcctgaagggaaattctgctccaacatttgccccccagcccattgagtgagtaggcgaactcgatgagcggacatataggtcaggtaagattgcgaaaatattcttgatgagaagataatgtgattagatctctcagttttgaggataaactcaacaatttcgatttaatttcagattcccttaaccgaaagatttcgaggaggatacgcgagataagtcgctgctgatgtggacggctgagatggagcgtctcttcagcgcaccacatctgacggtccagatcaggcgcggagaagagatctctgcaatctcgaaaatcgtggtgatgatggctttaaataacttcccacctatccacttgacgtcacgtcaactcacacaactctcaaggtaacttctctcattctttattatttactgcgctttgttttgtagaagtagaaaaatctcgtctttattttttttgctatctccttcgtttctctgctattccctctttctcgatctgccttctttgctcttttctttcatctctctcgtccttctctgtcgaaaaccaaagatgagcgacttcgaagattccccgaataaaagcaaccacagctacggcgacgattcaagttcgtccgagacaaagtcggcggcgtcaccgccgcgagtacaaaaacgtgtcataaccctaggcggaatgggtccaattcgttcgccgtcaaccagagccgacaagccgaagaagaaaaaggctgccaagcaaggaggaggcacgccaatgacgaacagcgacctggtcgacctccggaggagatgccaggttccggtggaggtacatatgatactctcaaggccgccgctgcatcctgagaacgtgtcggtcgggtggtgctgcgcttatgccaatttcttcgagaaagtggcctatttttcccaattacggcgtgtatcctcgagatgctctactgtctcggcctcgcctttccccatatgtgtccgaacttcgttcgccatgtgctggcgttattcacccgggctcgggaagtaaacagaaaattcagctgccatgacctgcttcagctctgtcaggacaagaccaatgctaggagtgaccaagggacgtactacatcagtgcacgtcccggatctctggtcctcggcgggttgaaagcctgtcgagacaccaattggcgatccaagtatttatttttcagagtagatcgtcattcagttggcaattttgatcccgcgaggataacaaggacctggtctaccaacctgggtcagatggagacctgagcctcttgatttttctttgttgtttgtgttgaatccttgactgcttttgctaatcgttagtactgaaactaattgcttgtttttgatgatttgcagcaaggaccaaggaagttactctcttggagacggaacttgagctgttaacccttctccgacgtggtcagactgactggtccactttcagtagaaatcgcatcgtagctgctcttgccgtagctcgagcagttcccgtagctccagcagttcccgcaatcgttcctccagcagcaccgctagatccgatcgaagaggtcccgcagattgaaccagttcccgaggctgatcttcctataggtacgagttccgttatattttctttggtttttagaaatgtacgagttatcgagacaactgcgcaactcgaattgctaactaacaaatgtcgtgctctatttgttcagttcctcctgattccagctccacttcagaactcccgctcatcagaagaatgaggcgcacaagccttcgtgttcaacgagccaacgccggggctcctgctcgggctggtgatctgtctgccgcggtgaccacggctcgaaacactctagctgtttccagcgcatctgcctcagcatctcatccctcgcttcctgaggtcaacatcgggacctcagctgcagcaggtcaaccggataacaatcagatcgctcatgtatctaggccatctgcagttgttcgtcctgatggtgcaccgtcctctccgaagagggctcggacacagccggaggtgaatccggcggctgagttggtcgtgagcgatcagagggtcgcctctcctagagaggagaggatggaacctgcggctgctactccggaggcagctgcgtctgcggctagacgatcctcgggcaggtcccatggcggaggacgaggctccagaggtgggggccggtcttcaaaccggtctcaggaagtgaggcagacgtccaactccggcggaggatccgcgggaagcaggcctttccactggtctttcactcacgaccgtgatcacccgatcgttgaggacgaggctgggttagcgaacctgctttgccacatcatagggaggaactgtcaggttcctggagtgaagaacatagccgaggcggcggcctatgctgacatgatggcgaaggagggtcaggtaattatcgataactgtctccttctaatttatatctttacgctagttgtgactttcggttttgctttcggtacgcgatagctgccacaaacaagctggttgctctctatgagcagcgtctgagccaggtcccctcggcgaacgagcatgaagaaggaaaggccctcatcctggagctgacatcgagtgtgaaggctggttaggatcgcgaagtctcgttccaggtacacctcagttttgacttgtttataaataattcgtcgatgatttgatgattctaacctgattgttatttcaggcgaagatcgagaggctgaaanatggagttgtccacttcaaaagacctcgagaaaggttttgctgagaagatcgggttcatggagatggagctcgaggggttgcaagccgaccagcagacgacgaggagccagatccatcgcttggagcagaagagggaagagctctccaaaatggtggtgaacctgacttcgattgcacaagggacgaagaaggcggttcacaatgctaaggttgagctggctgctgcgtattcgaagctgctggctgggatcaaggagaagtgggtcgccaaaaaggaatacacggtactggaggggcaagcagcnnnnnnnnnnnnnnnnnnnnnnnnnnnnnnnnnnntcaccaaggctgctattgatctgaacgtggagagacctcgactgcaagcagagatggatgacctagaggcgcggtgcaagtcgaaggaggtatcagattttactctaagcaagttggatctcccgcaggtttcagatatttcggtggtacgtccgatggacgtcgacgagccagggacgccaattggcttggatgagttcgggagcaacaaagacgcgtttctccgaggtctcgcagagggttctggtactgtctttgctacaccagccggagaatcgagggagtga

SEQ ID NO: 154887 - DNA, 420 bp, Arabidopsis thaliana landsberg
cacagttttgccttctgttggcattggagcactttcttctagagaagccgatgggagagctaatgcctctgcgggtgaaaaggtacatatgcatttttttttttttttctaattgtgcattctgactttgcgttagaggtcttgaagttatagtttttttaatgctttccttggtttcttttgctggcttgttttgtttaaaaacttgaatggcatctgttcctgagatttctctgtaccattactaaaaagtaaatcctctttattatgatttcaggaggcccataaattactacaacccgcagacaaaactttaaggaccatggctattgaatttgctgaataccaggtataccaatatagatctatgtcggaaaaaattaaccattagtgttaccatctgcatatcaatcatctact

SEQ ID NO: 154888 - DNA, 818 bp, Arabidopsis thaliana landsberg
ccagggaagccttattcccttcaaacaaatgtattctctatgttaagtggcgaccgaaatgtcattgggagagggttgaaatttaccttgtggtttgaccctactcaagattttcaccattacgcaattttgtggaaccctaaccaaattgtgtaagtcaagatttcttatgttaagtatacgcattttttagttgtttgatatactaacttggacgatttttttattgtataaagattctttgtagacgatgtaccgatacgtacatataatagaaagaatgaagctatattccccacaagaccgatgtgggtttacggatcgatatgggatgcatcggactgggccacagaaaatggaaggatcaaagctgactaccgataccaaccatttgtggctaagtacaagaactttaagctagcgggatgcacagcggatagctctagctcatgcagaccgccatcgcctgcacccatgcgcaaccgtgggttgagccggcagcagatggcggcattgacatgggcacagaggaacttcttggtctataactattgccatgacccgaaaagagaccatacccaaacaccagaatgttaaaacaaacaaacaaacaaaagaaaggttataataattttattttgcattatcaaacatacatgaataatgggaggtcttgtgacgggtccacactggaaactaaattgaagcagttgagcgtccggtcctctatgatttgagattaaaaagaaaaggttttgtttttcaatactttgtaatgtttccatttggtatctttcttataattgtaatattgtgtg

SEQ ID NO: 154889 - DNA, 335 bp, Arabidopsis thaliana landsberg
agctagaattttcgagaagagaagaaaaggcttacactgggggactgtctattgcggttgaaagacttgaagcaggaaggaaaagaagaggtaacacatctggagatgacactagcgaaccaagcaatatcaaatagaggaaacatgatgttacccaaaaatattctgatgaagctgatacccagaggtaaagtctgatcattcaatattaaattttacacatttgtggtcttgctttcacatcaatattcaaatctgaatcttacatcttctttttctcagtggcatattaagtcccgataatgtgcctgaggacaaacatgaactaccattaa

SEQ ID NO: 154890 - DNA, 455 bp, Arabidopsis thaliana landsberg
tcttgatttgggcgaaaaataaactataaatggcttccccataacacacaccacccatgtgacaatgaaggactggctctccaacacattgattctgtgctaaaatggatgaaactaatggccgggaggaaaaatcagagaaggaactgaatgatgatggtgaatatttgattagaccttatcttgagcatcttgaaaagattcggttcagatacaactgtgagagagttgttgatctcgacaagcatgatggaatcttcttaataggggaattctgtctgtatgtgatagaaaacttttacattgacgaagatgggtgtatttgtgagaaggaatgcgaagatgagttatccgttattgatcaagcgttgggtgtgaaaaaagatgtctctggaagctcggattggcattccaagtataccacatcatggactacaacagtgaaaacaggagca

SEQ ID NO: 154891 - DNA, 676 bp, Arabidopsis thaliana landsberg
atggcggaagcaaacgagagaagtaaagaaatggcgagaagtaatagttgtgtgtttccaagagatctgcttcagagatttatctctaactctgttgaaggtgaagatgatgatgaagaagaagatgatgatgagatcgagttaaatcttggcttatctcttggtggaagatttggtgttgataagagtaataagcttgtgagatcttcttccgttgttgtaacgatgcctctgtttcgggaagatcatcatcatcatcaagcggcggcgatgataacaactaaggtttcgacggagacggtggcgggagcgactcggggtacgggtttgatgagaacgacgtcgttgccggcagagtcggaggaagagtggaggaagaggaaagagatgcagaccttgagaagaatggcggcgaagagacggagaagcgagaagcttcgtactggcgtcggcggaggaaacagtaataatccggaagaagctgctactgccaccgcttcgagacggcgaggtagaccatcgtcaggacttccacggtggtcagcgactgctaacaaaagcgggcttttgcggcagcacagtgctggtcttgattcactacaagtttccgttgaatctctaggcggaggaagagccgccggaagttcttcgagcgtctccgagttggaaactaaag

SEQ ID NO: 154892 - DNA, 10254 bp, Arabidopsis thaliana landsberg
atgacacatgatgctggtcataacctcaccgatttgagggataactcaaccaactggagattaacgtcaagatcctgcaatttgaatcatcctccaaacagtcatggtgaaattacgaccatgattcttcatgatgaaaaggtttgtattttcactttttttcttttaatcccaatttactttgttattattgaaacagatcatcacaaactatttaatctttgagttgtttggactttttcagaataaccgtgttgatgcaacaattcctcaaggaaactatcacaatcccttccgtccgtttctcaagcctggcacatggattcacatctctgactttcgggtcgttgttcctcaatcaagggttaggtattcgtcctttcgttttcacatcaaattcatttgggaaacaagtgtttaccctctcccggaacttgtgaaaagagacttctttgacttcatttttcccattgaccttaagtatccatgtcttgaggattgggattatgtcacgggtaagtttttagtcaatctatgttcttctcattttaagaattaatttatgatagtaatttatgttattatttttgaaatatggtattaatatattattctatacttagatgcaatgggtgtggtgacaaatatctctgctattaagaaatttttatttgtttgtcgccaaggtgaaaccgactatgaatcaagatatgtctcattcaaacttttggacaatatgtaagttgtactgtttttaagtatgtttagtaatgtgtcatctgtctgaaaaattagcttaataatgcattgcttagtctaatattttatcatattggttaggggaaagaaaatgaaatgctatgctgttggaagatgctgtgaactttttgttacaaatttctcaaaatgtatcagttcagccgcttataactatcagctcattgttgccattgtgagattttggagaattgctgagatttagggttagttatttttgtttctattgtaattctatttacttatgattgttatttgtattatataattttaaataaaactaatggaacaggtgagaatgttttgaagagtgaatttggatgttcaaaaatttacctcaatccaaccaatttccctgagatagatattcaaagctacatgtaagaattttatcattttgtattgtattcgttaaccataacatcaattaatcaatacaatttttgttttttctcttttacagccgcggtttcgaagattatgatgaacttccagagaacccaaggatggaagtgattgaagagaattaggagtttgacctcccatctcctattcttatttaaattatgttttgaacttatttaaatttcctgcaaactttgtcattgtaagttatttttttaaaaacaatttgcttatgttttgaacctatttaagtattggattccctttttattttctctatcttactttttgttaaactcctaacaaagtttacaaatatgacataaagaaactccaaacaaactcctatcaaagtttgcaacgattacataaaagtatagttatagttatacttatttctgttaaactactatgcttatgatttaatattttcgaccatgtttagcatagatataattattgatgattatcttttacatttaaaaaaataattgtttgggtaccaagaataaaacattaaaaactttgtgacaaatcattcttggaaacattcaggattgataagtgtgtattttgcatgttttaagcatccatttgtcatcactttagcatcatatcatcactgttttataacatttcacatcatttgtcatcactttacatgtttaggatagttttgcatgcatgttgcatatttgcgttgatttcaggtgatttggagctgttgacgagctatctggaagaagcggacataatcatgacaaaccactcgaccagaggtcgagtaggagcttcaagatctcaagagaccactcgacccccaggtcgagtagaggacatcatcacttcacttcaccactcgaccccgaggtcgagtgccctcatctccatcaccagaccatcactcgatcacttcactcgaccatgaggtcgagtgtcttcatctccctcttctgacaccactcgatcacatcactcgacccccaggccgagtgaatacatcacaataccaggcctctactcgatctcatcactctacctggatgtcgagtatcaccatcaccaccactgatgcatactcgatacaaacttcagagccttcttcattccgcactcaaccagagactcgagcacaagaagaaaagaagactccagctattcactcgaccacatgggtcgagtacagttcttaatccgtcccaatattgcgtcgttttaagtattagggtttcagaatatttggctataagtagcatgtacttcacattttcgcagacaagtttttatctagttttattccacagaccttgtgttctaaaccttttgtaatccggatttctctatatctattcaatattcagtattcagcttttgttcttgatttcgtttactgttgttcattctgttatcatcctgctgttacactgttgttatcatgttttcaacttgttcaacgtttatgctttctgttatgatgtctgagtagtgaataggtttctgaggatgggttagagtagtgtagaattctcagtatgctaggtgattgagtattgattgatagatcccttctggattagttgttcttaatgcatattgctttctgatcaactggaatttgagcccagacatttccgcgcccaaaagttgttcgatgaaatgtctgaaccactaattccagagatttgtggccctgtaccaaggtattcgttgcagggagcgtttcggctttaacttcttgattcgtaatgcatgttaggttagctctcgtcaatggtgattgagtctgagactaggttaacttgagggtctctattgcggtggcacttacatttggttaatgaacttgttgtctagtgataattttttgagcatgtcaatcacctgtaaactgaggaaatgaaactactcaattaccccatcctcgagaattctttatctgattgattttattgtttactttgttgttgtttactgcatcttgttacttgttgcttagtttttgcatttctctcctgttactcgacctgatactcgaccactcagttgtcttgcaacagactgtgcagtcgagtatccctgtttcgtttactgcctgttactggaccaactcactcgaccacacctagtgctctgcaacgagctgtgttggtcgagtgttttactgtttctgtttgattttctgttttctgcatgttcacttagtactgctagaacacaccgaaacctgttattgcttggcttgacttagtgacttctgatcacattttgattgttagtatcacacccatttggattgacaacctaaaatactacaacgacatgattggtgttttaggataattgactaaaaacctattatcaatttggcgacgttgccaattgggtgtttgtttgttacatttaagatttcagacttgcttagatcaagttctttttccatttttttttcaattactaactgagtgtttttcttgttatcttcttgatccaggtacacctcttctatacgcaaactcgatcaacaggcaatcagaacctccttttcaacgacaatattgaccgcatagctcgcaaaatcagagaaaggagaaacacagtcaaccttgtacctcagcaaccactcgaaatggctgaagaacagaatcaacaaaatgaccttgccaacattggtgttggagatgcaccacatgactaccgtcagaggaaaggaattgcacctcctgctatctagaacaataacttcgagattaagagtggtctcatctcgatgattcaggggaacaaattccatggtctgccaatggaggatccactcgaccacctagatgaattcgataggctctgcaacctgacaaagatcaatggtgtcagtgaagacggattcaagctccgtttgtttccattctccttgggcgacaaagcacacatctgggagaagaatctgccccatgactcaatcaccacctgggatgattgtaagaaggattttctatcaaagttcttctccaatgccagaactgcaagactcagaaatgagatttctggtttctcacagaagactggtgaaagcttctgtgaagcatggaagcgtttcaagggttacaccaaccaatgccctcatcatggctttactaaagcctctatgctcaacactctctacagaggagttctaccacgcatcagaatgcttctggataccgccagcaatgggaatttccagaacaaagatgttgaagaaggctgggaattggttgagaaccttgctcaatcagatggtaattacaacgaggactgcgacagaactatcagaggcacaactgactctgatgacaaatacaggaaggagatcaaagcgctgaatgacaagctggacaagattcttcgtagccagcagaagcatggcagttccttgttgatgacaagcagtatcaagtccaagatggggaggttaaccaattagaagaagttagctacatcaacaatcaaggtggctacaaagggtacaacaaattcaagatgaacaaccccaacgtctgttaccgcaacaccaacgttgctaatcctcaggatcaagtgtatcctccacaacaagaacaaggtcggaacaaaccttttgttccctacaatcaaggttttgttcccaagcagcaattccaggggaactaccaacaaccaccaccacctgggtttgcacctcagtcaaaccaaggtcctgttgtacctgatgctgaaatgaaacagatagtacaacagctgctacagggacaaccatctagctccatggaaattgctaagaagttatctgaattgcaccagaagatggactgcagctacaatgacctgaatgccaaagtggaggcgttaaattccaaagtcagatacttagaaggacaatccgcatctacctctgctcccaaagttatgggacttccagggaagtcaattaagaatcccaagaagtatgctaatgttcatactatcaacataaggagtggaagtgagttatccactagagagtgacccaagtcagtcactgaggacagtgcataccaagatggaaaggatttcagtctcaataaagatcaagctgaccagtcagtcgtatggcaactacaatgaagattatgacagaagcatccgcaccagctctgattctgatgagaagcaccacagggaaatgaaagctatgaatgacaaactagacaagctactccttgtgcaacagaagcacattcattttctgggtgatgatgagacgttccaagttcaggatggggagactctgcagtcagaagaggttagctatgtgcagaaccaaggaggttacaacaaaggtttcaacaacttcaagcagaaccatcccaatctgtcttacagaagtacaaatgttgtaaactcgcaggaccaagtctacccttcacagcagcagaatcaacccaagccctttgttccatacaaccaaggtcaggggtatgttcctaatcggcagtatcagggcaactatccgcagcaacttccaccacctgggttgacacagcagcaacaacaaccagcttctacaacaccattaccttcacgtgctcttccatggaaattcaggaaagcatagataaaaagatacaattctcttgtagagaagcagcttgataagatggaagcggtgatgcctctaatagaagttctcaacctgatcccgaatcctcacaaagatgtgagaaagttaatctggaaaggatcaagatttatcaagattcagaagacgaatgtgatgctaatccgtctagggccactgttaagaggagtgttcaagaaaaactggaagatcttggaagtttcactctaccatgttccattggtcaattggtcttcagcaattgtctatgtgatttgggagcttcagtaagcttaatgccactctccgtggcaaagaagctggaattcactcagtacaggccttgcgacctgactttgatcgttgctgataggtcctcaaggaaaccctttggcctgctacaagatctgccagtaatgattaatggagtggaagtacctacagatttcgttgtgcttgagatggaagcagaacctaagaatcctctgatcctaggaagacctttcttagctccgtgggagcgatgatagatgtcaaagacgggagaataagtctcaaccttgggaagcacatcaagctgcagtttgacatcaacgaaacttcgcaaaggacagctctagaagaaaagatcagggctcagcctcaaccttcagattcaatcaccagaccaagcacaacctctacacctgacttgcgagatctcaaaaagaaatctgatgatcaagaagaaaccatagagaagctagctcagacagttgaggaacttaagagtaaactggatcagatgcaagagaaagctcaatcaaaatgcaggattgatactatcccgagaaaaaagtttacttcaagatggtctgaggagatagattatccaccagaagagaaagaggcctatttggaggaaagaagaatagagtattcttctacgcatctctcaagagaggatgctgaatatgaaaatgagatcagagaggactatgcagatcctctctatcacccattttcttcttaatgagtgtgaggagtcaagctagagactttaaacaagctcacttgggaggaattcccaagactgtttctgtaaataaaacttttattttcttgttatttttgatttgtttttggctgtgtttgtgattctcaggaacagagaaacaacgtggaggtagagtaaaaattttaaaatttaatctacagagcaacaggggatcgagtatgtcaaaaattcaagagtttgaaaaacttctgtttcactaagaagccatgaggtcgagtaagttggtcgagtattagtgatgattttaaaaaacaaaattttgaaattatacttatactcgaccaacagaagctacagagacttgcatggagtttaacaagtttacagaggattactgaaggttctagtcaacagagaacaatgcttcaggacaaacagacagagcgtggcctaccacctctcacctttgttcccccacgcgtttttagagataacaaaatctcttccctcctttcccaccactcgatctcaccctatcctttcccaccgatatcatctctcttcctctccaaacgctcaacctcgaagactcactctccctcacgtctctcactcgaccaaacttcactcaccatctctcttcctcaccaaacactcggccactccattacactcgaccacaccgctcactcgatcccacacctccggcttctccatctctcacggcttcgtctcccttcccactcgaccacgacacagccactgccgctcgcgccaccgccttcattctttctttcactcgaccggtttcgccatctctcatcactcttgaccttgccgttcactcgaccactccgcctttcacttcaccggaagcttcaccgtctcaacgtcttctccatcttcactcgattgcaacgacgctcctctccaatcgacgcatactcgatcgccggactttcgccatctccccgtcacctccgttcactcgacctcaccgttccaacttcaccatttctcaccgctcgcgtctcctcttcactcaaccgctacacgaccaattctcccttctcgccattcgccgttcatccgccaaagcttctctctcattctcacgaacactcaaccgctcatctctccaccggagttcgaagactctcgatcatctatgcttactcgacctcaagccgattcactcgagtgagcttagctcgaccgctcttcaaaccgccactgtttcccagagaagtttactcgacctcgccggacgcaccgcaaacactcgactacagtccttctaggaacaaaagaccaaagccacaatttcactgtactcgaccgtattactcgactgcgtacttgactggtttagtgtttgcgttttatttagactaacatattgatatttggctttgagttacattctttttcaggaaatcaatatgagtaactacagtggcgaatcctccatggatgcggattacaacgtcgatgaagctgaatcttggtcaactggaccagagagagagcgacaggcttatgagagcttcagagctgagacccaacgctcagtagctcgacgcaatgagaggagagctgagattgctagaggaaagagagcaatgaccagtagatatgagttcgatcgacgaagatattgacgtcgagtatgagcctgagtcatggcacagagagacgaagctgttgaacaggcctgatgaagttacagtagaggagtacatcagacttttcgagctgaacaacttctagggaacgaggtacccttgttatcagactttagcccagctggggctactggaggacgtacagcacttattcgagaagtgtcatctggagacactgatgtcttacccgtacgtcgcttacaagaaggaaacaatagagtttctttccactctacaagtggagatgtatcagggacttacagcagatgagctggagagtgaagggttggggttcttgactttttcagtgagcgagcagcgttaccagctatctatcaggagcttggaaggattgtggggtttgcccagtggaaaggaaaaaacacaaaagttcgagagggaagagttgaaggatttgtggttaaccattgggaacgatttggcactcaactctacaaggtctaagagcaaccagattcgaagccctgtgatccgctactatcagcgctcagtagcgaatgttctgtaccccagggaatctacaggcaccgtgtctaacacacacatggagatgattgattatgcactcaagggcattctccgcagaacaaaggggaagaaggtcctaaagggcgaccttaatgatgcaccaacggttatgcttctgttgatccacctgtgtggatacaggaagtgggcgcacaccaacgagaagaagagggtgcgaggagccctttgtgtaggtggtgttgtgacaccgattctgattgcatgtggtgtacctctcacgtctccagggtttgatccgaggatgatggatttagatcatttgcgtcgttgtgagtttctggagcatgacatggttggcgatttctatcgctacaaattcgagcactccttgacccgaacaaccaacattctgcttccctgcaccgaggccataaccatacttcagggagaaaacattgacttcaagcctgcgcgtgattacctctactttgagagcgctccaccgactgatgacaacgtccctacaacagaagctacagaggatgagattgctgagacagatgaggataggaaggaggagtacgatacgagcatgtatcatttcagtgagcatgtacctccagcgcgggagagcaagagcttgagcgaagctcacagaaacaacagtaagttgcataggtggtgcaagaaacaagataggctactcatcaagtgcttcaaggccatcaagtttctgacagacaagctaagctgctcctcttctaccacagctattccgcagggagagcctcctcaggacatgccctcgaggagatatgacgcgccagagccaagtcgccacaggcctgagccaagtcaccacaggcctgagcctagtgaccgagtagtcccaccagtccctgcgaggcattcatcattcgagcctcgggagctcgggagaaagaagaaggctgcactcgctcggtctagcagcaggagtacacgacttctccagtcccgtagcttacgcgacggcggtgctggccgcagcagaagaagagaggtcgagtatcatcagagcggtgctggccgcgacgaaggagcagaggtcgagtacccccagggggaagctgagacacaacagggagattcttcgatcgcctgggagcaatcacaggcagctattgacgaccaactccgctccttcttccactgaggtatgcacctcactccaccattgtaatataccatctcttgtttttattttgtttttgtgatgtgttttgtcc

SEQ ID NO: 154893 - DNA, 1283 bp, Arabidopsis thaliana landsberg
tttggcgtttcccgtgattttgtctaaccaaataatccaatgtacattattattttaaaattgtctgtaacctttatttttggttatgacaggtttagtgatcaacggcgacttcgaaacatcaccgtcaagtggctttcctgacgacggagtaactgacggaccatccgatatcccaagctggaaatccaacggtacggtggagctaataaattccggtcaaaaacaaggcggaatgatcctcattgtcccacaaggccgtcacgccgtccgattagggaacgacgcagagatcagccaagatctaacggttgagaaaggttttgtctattcagtcacgttcagcgctgctcgcacgtgcgctcaactcgaatcgataaacgtgtcggtagcgtctgtgaacgcagacgcggacgatatgctggcgtcgcggaacgttgatttgcaaacgctttatagcgttcaagggtgggacccttatgcgtgggcgtttgaagcggaagatgatcatgtacggttggtttttaagaatccgggtatggaagatgatccgacttgtggaccaatcatcgatgacattgctattaagaagctctttactcctgataaacccaaaggtaaccataaatttctctatatttctattttcgactccaaagttctaaaatgtgcctatttcaccctgatttttttggttacattttgtagataatgcggtgattaatggagatttcgaagaaggtccatggatgtttaggaacacgtctcttggtgttttacttccgacaaacctcgacgaagaaatctcgtctcttcctggttggactgttgaatcgaacagagcggttcggtttgttgactcggatcacttctctgttccagggggcaaacgagccgtcgagctactctcaggcaaagaaggaattatttcacaaatggttgagaccaaagcagataagccgtacatattgtctttctcactaggccacgcaggtgataaatgcaaggaaccattggctattatggcattcgcaggtgatcaggcgcagaactttcattacatggcgcaagcgaactccagtttcgaaaaggcgggtttgaatttcacggctaaggctgatcgaaccagagttgcgttctacagtgtttattacaatacgaggactgatgatatgagctccttgtgtggacctgtgatcgatgacgttagagtgtggttctccgggtcgaagagaatcggagctgggtttgggttttgggtttttgttcttctcgttgtcggt

SEQ ID NO: 154894 - DNA, 461 bp, Arabidopsis thaliana landsberg
taagcattgggtttggtttggtttggtttggataccgttttgtagaaactacacctagaattttgaatggtttatcaaaaaacaggttttattcgtttttcccccttttcagattagtatggttacacctgcatgtttggatatggaataaaccatcagttcggttaaactgttggacatcccttttatatccaactgttatgaatcaatgttctttacaatgtgtgcaggattaagaacaaagatggtgcgagcagtccaaagacagtgaactgccgctcaagcggtctaagaatctgcacagctgctggttcaactgcagcaatgcagtcagcaggtgggttcgtgatgccaatgttgtctcgtgatctacagttcatggttagagagccaatatctcctggttcaaccgcttcgttaatgcattcgaccttcaaaccagaccaattcatggacgttag

SEQ ID NO: 154895 - DNA, 1383 bp, Arabidopsis thaliana landsberg
atgaaaagaaaggagctatctttggtcaacggaggagctgggagaggaagagcagagggaactctagcttgttcagggttgaaagaagaagccatggaagaggaaatggatcttaaagctgaggttgacgaagatgggagcttcaaggtgtgactagtgatcgatctcggagataatttagggaggaagttagatttgagagaaatgaagcgagaaagaggattagggtttaaaagattcttcgaattgaagaagagtgacgatgaaattgctgacttcatttccctttagtccgatgatcatataggtaggtagatgatattgatacttcacctcacaaaagccatgactcatgaatcctctgcgtttgcgtttcaaccgtattgacgcggttcaatcaattttatacactaaattcgaatgaaatcgtaccaaaccggataaatttaacatccttactaaatccaaaacagaatacatatgggcctgaaaacgaattggtcttgggcctgaccgaatcaatcgcttttctctacattcgtctagaaatatccatctacacttctccaacgatcaagacgtttctcgaacgttagagaagcgcttttaagttctataacaccgaaacaatcgctctctctacattgctctagaactatccaactcaacttctatttaatactttcttacatcaaaatcaaaatcaatcaaaccaaagaaaaagccaagaagcaagaaagttaacacaacagctaagaatggatttggagtttggaaggtttccaatattttcaatcctcgaagacatgcttgaagcccctgaagaacaaaccgagaagactcgtaacaacccttcaagagcttacatgcgagacgcaaaggcaatggctgctacaccagctgacgttatcgagcacccggatgcgtacgttttcgccgtggacatgcctggaatcaaaggagatgagattcaggtccagatagagaacgagaacgtgcttgtggtgagtggcaaaagacagagggacaacaaggagaatgaaggtgtgaagtttgtgaggatggagaggaggatggggaagtttatgaggaagtttcagttacctgataatgcagatttggagaagatctctgcggcttgtaatgacggtgtgttgaaagtgactattccgaaacttcctcctcctgagccaaagaaaccaaagactatacaagttcaagtcgcttgagtttgtttgtgatcgtgtttttgtgttttaatgaatgtaatcgataagcaactacctcttggtgttcgttgtaaaatgaaataaaaatagttttctctgttcatatttgtctttgtgttcaatcttcaaatcaatgaagtttttgctctcttga

SEQ ID NO: 154896 - DNA, 669 bp, Arabidopsis thaliana landsberg
atgaggaagatgagaggaagcggagacgaaggacaatacgtggcaaaggaaaagagatcatcaccactgcaaaggaaaggcattaagagatggagatttcgttgtgacagtaaggagaagtgagatgaagcagatcctagtaaattagagaagggggctaggcaaaactagaagcatataaggaagaagatgaagagaaaatagtagtttcaagttgaggttatacaaggatgtttcctgtcataccagagagaatcagtttctaaataagacatatctgcagagatcatgttgccatgataccctcgacatttttccaacctttgtaattgatcgttccaaataatgtataataatgaggtcataggaaacattcctacccctatacactatttaaaagtcttctcaatctctcattatatatttattattattatttttttattaggggagaggaacactttctttttaacgcattagtcgacttatcaggtatgaacaaggagtcaagtcctatgagcactaaccgttttgatgaggtaaaaggaagagcagtgagattagctcaagcctttgtggattatgttgggaatggatgtccttaagtttgttgattggccttctggattttccattagtcggattgatttgaatctgcagtacttaagc

SEQ ID NO: 154897 - DNA, 3429 bp, Arabidopsis thaliana landsberg
atgattaatggagtggaagtgcctacagacttcattatgctggatatggaagaagaacataaggatcctctaatcttgggaagacctttcttagcctcagtgggagcagtgatagatgtcagggaagggaaaataagtctcaaccttggaaagcacatcaagctgaagtttgacatcaacaaaactccacaaaggtcaacagaagatggaaaaacctatgaggacgatagagtgatccggggagaaggatatgagactaaaagagtaaaagagcttaaaaagaggtctgataagcaagagaaaactatagaagagctagctaacatcgttaaggaacttaagagtaagttaaatcagatgcaaaaggaagctcaacctaaaggcgggattgacactatcctgagaaaaaagttcacttcaagatggtctgaagagacagattaccctctagaagagaaagaagcatattttgaagagaggggaattgagtattctgctgtagacttctccagggaggacgctgagtatgatgatggtatcagagaggattatgcagaccttctctatagttcattttcctcttgataagtgtgaggagtcaaggtagagactttaaacaagctcacttgggaggaagtcccatgattatccttgtaaataatttttactttcttgttatttttgatttgtttttgttgtgtttttggttctcaggattagaggaataacgtgaggctagagtaaaaattcaaaacttttactctacagatggcctagagatcgagtacattggtcgagtgtgagtgatatttaaaacccaaaaaattttaaatcattattttactcgaccaacagaagctacagagacttgcagggatttcctgcagtttacagtaggttttctgcaaattttctcagtcaacagagtgtggaccacgagctgaggataagctggagagagaatctaaaactcaacctagaccactcattttaaagcgtcactcgacttctccaaatccactcgaccttccttttttcatttcaccgccgacactctaatctctctacaccacaaatcgccgtccaaagagctactcgatcctgagaatttcactcgaccgccgcgccgccgtcaccagctcatcccctccatcacccgacaaaaccacttcactcgattcctttgatatacttgaccaattcatccacatcaaccgccgtctctttcaaaagaagctactcgacctcgagaaagcactcgagccctgcaaaacttacttggcttcttgttcgtgaattcagcagagccttccaacttcagagaagttactcgacctctaggtttcacgactcactctacctccacgatttactcgacctgctgtagcattccaactcgacctctgagaagatactcgatccagttcgtctaagctcaagaacagctcaggttactcgacaataattttggtttcattgcttattgacaataattttggtttcattgctatctttgagactaacctattgacatttgagctttgagttctaaatctctacaggagaatcatgagcaattacagtggcagttcttctgttgatcctgactacaacatggatgagacagagtcgtcatcttcaaggccagagagagaacaaagagaatatgaaagcttcagaaggaaagctgagatagcccgaggaaagagagcgatgacagagaggtatgagcttatagacgaagatctggaagatgagtacatgcctgaacagactcgcagagctaccaaacttctgcacaagcccgacgtattgcctgctgaggaatatgttaggcttttcaagctgaatgagttctgtagcacgaggtatccttgctcgacctcacttgcacaactcggattgttggaagatgttcagcacctgtaccaaagttgtcatctggacactctgatggcttatccgtatgtagcgtatgaagatgagacaatacaattcctctccacgctgcaagtagagctctaccaaggtatgacctctgatgagttggattgtgaaggattgggattcttgtgattttctgtgtatggtcatgagtataggttatcaatcaagcgattggaaggattgtttggcttccccaatggaacgggatctaagccaaagtatgaaagagaagagttgaaagacttgtggatcaccattggcagctctgtaccgttgaatgcttccaggtcaaagagcaatcagatacgcagccctgtcatcaggtacttccagcgttctatagccaatgtactctactcccgagagatcacagggactgttactaactctgatatggagatgatcgcaatggccctcaagggaactcttcgccaaactaagaatggtatgcccctacagggtgaaatcaatgacacacctctatctgtacttcttctgatccatctatgtggatacaagagctgggctgtcagcaataaccgcaagagagcacgaggcgctttgtgcataggtggcgttgtgacaccgattttgatagcttgtggagtcccaatcatttctgctggactcgagccgcgagcaatggatatcgagcacctacgtcattgcgaattcctggagtttgcaatggttgacgatttccacaggttcaggtttgagcactctacagacaggagagctaacatccttctccctagccttgaggtcacacggataatagagggagataacattgattttaggcctgagattggatgcctctactatgagaacgctccgccattggatgaggatgatcttcttgaagaagctgcttcggatgggatggatgaagatagggcagtggagttcgacactagcatgtatcactttgctgaacatgtacctccagcgaggtagagcaagagcttgactgaagctcataagaataacagtaaattgtagaagtggtgcaagaagcaggacaagctgatcgcaaagtgtttcaagcttctgacagataagctgagttgttcttcctccaccactgctattccacaggtacagcctcctctggagatgccatcgaggagatttaatgcacatgcgcacaggcctgagcttagcgagcagagagtcccacatgtccaggctaggcattcgtcattcgaatcccgggaacacaagagaagaaggaaggctacactcactcgatctagcagcagatcacgcctcattcactcgaggagatcactcgaccgtggtgctggccgcagcaaaaggagagaggtcgagtttcctcagagcggtgctggccgccacagagctgatgaggtcgagtacccacctgctggagctgatacagaacaaggcggttcgtctatggcatgggagcaatcgcaggcagccattgacgagcaactacgttcattcttcgatgag

SEQ ID NO: 154898 - DNA, 205 bp, Arabidopsis thaliana landsberg
cccaattccaccaccacacagacaaagcacaccgaaaatggcggtttcttctggaacattctccactttcctctgcatcaaaactacatctttccgcaacccctcaactcctctgtcctctctccggttcgcctctcacccggcggctaaacactgcttggtccgagcggtaacatctgcaacggaatcttcagagccaacagca

SEQ ID NO: 154899 - DNA, 205 bp, Arabidopsis thaliana landsberg
cttttttttcttctactttgtccccgcttcatcatatatccacgaagttaagatcaacggaatcccaactcttatcgcttctatagcgagtccgcgagtaaaccccgagaaatcatcctctgttacaccgacaaacgatgcaagaacgattccaagatatccgctaactatgaatgcaagagcaatggctgacatgacaaatgcc

SEQ ID NO: 154900 - DNA, 190 bp, Arabidopsis thaliana landsberg
tttgaacaagaagaaaggagtgattttattgggagatgcattcaatatgcgcaatccagctttagcatttggaatgatggttttattatctgacattctcattctacgccgtcttctccaaccattaagcaaccttggcaatgcccaaaaaatctcagaagttatcaagtccttttatgatatccgcaag

SEQ ID NO: 154901 - DNA, 832 bp, Arabidopsis thaliana landsberg
tctctgaaaaccatattcactgagagaaaatgcttttttgtcttctattgtgtgcagttttacacttttgggaatccgtcggttgtactgtatatcaaaaaccttgccaaagatgttgttatcgatgatttctattacatatttggtaagaattagctctgctagtcaaaatcacaatcttgtacaatctagagtcgttaatttacaagttgttacctgcttacaccttacctttggggaagtcaattcatagctaaatattagcattcatgtagggtcacagtttgaaagcagcgaagtagctaaatcaagtcttggtgtgaggctaatgcaggtgatgcatctgtaaccttaaacttccctttgattattatcaatctttgatggaatgagtgaatgaaataatattacaggaaggaaggatgagagggcaagcttttttgacatttccgtctgttgaagtcgcacatcgtgctctggttagcatcctttaaacaacaacaacaacttcttgttctgcataaatgtctgaatactgtggaagaaattatcattgacaagtattcgtgttgtgcctgagctgaaggtaataagaaaaaagtgtgactgatatgttctttgtgattttgcagaatcttgtaaatggttttgtgttcaaaggcaaaccaatgataatccagtttggcaggactcctggagcagccaagccaaacgaatgatgatgatatatataacatcaacggtttttgaagagtaggtgcaaattctttttgtgtatcatcatgtaactctttgactctcagtttaaagtcaataaaatatatcgctgcct

SEQ ID NO: 154902 - DNA, 1108 bp, Arabidopsis thaliana landsberg
agttttgacaaaggttagttggtcaatatatgcgtagagtggtcctgtcggtagcttcaatttttaattagtttctcttaatccaatctacttgatattattactgtaaagtgaaaattaactaataaagcaaaaaacaatataattttaattatcccaacactaaaatcggcaactaaataagattcgattcatcttcttccagcttcgaattccacgcaccaaaggcaaagacacaaagccacggcttttctctcttgtcgttttccacatacattcgtcttttcataggatcaatctaatatcacaatctatactttctctgtttacattctcgtttccgaggagaaaagtctcgatcttctggatctggggtttggtttggtttggggttgactcggttttgactcggtgcgagtcgtctcgtgagatggatgtctctcctttattagtatctctttgagagtctggctttctgggttcgatagattcttatagttttgcgtagaaatacaaacaaagatgtcgttgaagaatcatcacagaggattagagctctctgcttcgaagagttttgtctcaaagaaatggactttatttctctgtatcggtttcttctgcgcaggaattctcttctccgacaggtaaccaaacaatgttctttaattaactcacttattctttgcacgttgtattaagtataggtacgagattcaaatttttattgaagttttagattgtaaaataccttacaaaattgtccaagtatgaaaatcctcttctcccctaaacgctttacaaatatacttggttcgattggtctaactacttcggtaaggttcggtttggtttttccggttaagtttcccaccctacttatttataattttagacatattcgttggcatatttcgatgatatttgtaatttatgattttggggcctacatgcaacttttcaggcccacacgctaccaacttcggcccagggcctgtatctgagccaagatcagtctttgccaattttttttcccagtcgcttcagatcccatgagattcctccggtcaatgaaactctagtttctctgcaatctccggtgtgtgctcag

SEQ ID NO: 154903 - DNA, 848 bp, Arabidopsis thaliana landsberg
atgccctacaaactcctgcctcctaagatacaacagttctttaagactgacctatcaaaggagtgtcagccaactatgtctgaggctgttccacaattcaatgtacaagttgttgaaagttctgaccaggatatagccattgacctgtctgctactgagttgttaaggcggacaatccaagtatttcttcatttggtgcatcagggatcccatactcactgtggcttaaagaagaaatacaaaggagaggatcttgaccagggttgcagagatgcagctcctcagaataatactgatcacagagcaggggaagaagcagttgttaaatcaaaacgtcttgatgatggttctttaaaagttccaccattacctatcaacatcaatgtgaaaccaaaatcaagcctgcagttagctgtctccacatttggttatcaaatactacagtatcctcaatttgctgaactttgctgggtgacatcaaagcttaaggaagggccaagtgcagatgtttctggtccttggaggggatggccatttaattcgtgtatcactcgcccttgtaattcctcggagcagactattacttcttccgattccaacaatgttaaaggaaaagattccactggaattgtcagaggtcttactgctgttggattatcagcgtatagaggaacctatatatcgctgagggaagtctcatttgaggtacggaaagttctggagctcttagttggacggatcagtgttaaaattaatgctggaaaggacagatgtcgatatattcgaattttgtctcaagttgcttatctggaagatctggttaatagttgggtatacgcgatgcgaag

SEQ ID NO: 154904 - DNA, 245 bp, Arabidopsis thaliana landsberg
tggacaccctcagatggagatgaaaggctcagcttctgcaattaaacctgaaaactacatggatgttgatttattagttggatcgcaaatggaggataaagcgataaaatctgctagtgtttctcatgctcctcaagatagttatgacttgttaggagactttatctcccctgctaaatctggttcctctggcgttgtttctcaacctggccagcagcaaccaagtatgatggatttgctgactg

SEQ ID NO: 154905 - DNA, 614 bp, Arabidopsis thaliana landsberg
gaataatatgttaactttgtgcatgctgcttacatctcgttttgtatttcccctaaaagagtaatctcctatcatttagggtatttcttgatcatgtctcagtatctgaagtgttagtagtcttagaatgattctattgtttgttttcttgtctcttttcactttagttgtttttggctgttgatgtgtatgtttgttggtgggttctttgcctaatgatatttaaggttaaacttgttagtctgctgttcaagcttatgaattctagtgcatttatgtgcaagacttgtcttctggactctgatttcttatatctgcttgtttgaatggttgtagatgatatgggattctcaatgtttcataggcaatatgataatccgggtggagagaatgacgcattggcagaaaatggtggtgggtctttgccacccagtgctaatatgcctccacagaacatgatgcgtgcgtcaaatcaaattgaagcagcacctatgaatgccccaccaatcagtcagccagttccaaacagggcaaatagggaacttggacttgatggtgatgatatggacatcccgtggtgtgatcttaatataaaagaaaagattggagcaggt

SEQ ID NO: 154906 - DNA, 1161 bp, Arabidopsis thaliana landsberg
attggtaaaatattggtgacgaacaacactcgaggctttgtcatcgatcgactcaagtaaatttctctgaattctacggagcggataaatgatgcacattgctttgagacgcagaaccatttcgccaagacttttagaggcatcggtaacagaatcttcatttgtagatcataaggaagcttgaattctccattcttgttttgagacatagagacctactaaacacacatgtgatatttataagagattctcataaattggtttgttaccaacgttgtgacttgtcgagtcgtaaaacatatacatgcatctctgatttatatttccaaaagagaaatattagttcctcacgttaaaacttaccataattattggccaattaagattctttattttctactttctctcgtttaaatttatcttttaacacaaaaataaaataaaaatcagtaagaattaaaaattccaaaaaaagagaaataatcaatgcaccacaagcactccaattaaacgcaggcgttttgatcatcaccggaggaggtcaatttctgatttcttccggcgagaaaacaaacggaagagaaaaaaaaaggcgacttttttcttgtcccgggttataaagatgtcagctttgtgtcctgtctgcaatctcacgcttcctctctccctaatccaaaggtatcaatccctaattttagctttgtgtcccttatttctatatgcttcttagtcttgatgtgtttgtctggttatggtggatggtttgactcagccatgtgaattcccacttcgaagacgatgaaatcaatccacaaatcgaaaccgatcaccacttggctctgcaactcgcttctgatgatccttcttcgtcttcctctgcttcatcatctgtaatgctttcttaaaacccttaaatcttctttccactcgtgcgttaggttgagtaaagaaaacccaattgagaaagttgtttcatttctgcagaacaacgttgcctcgttggtccagttaaagaccaagagtcatttctacagtgtaggtcatggtggtttgatttgtttgctgaggaactgtcttgagtctgaactgaaactgaagtcgaaacctttagagtgtagtactagtttactatcaggctttgttgatcattttcaatcttca

SEQ ID NO: 154907 - DNA, 1706 bp, Arabidopsis thaliana landsberg
tggttttcacggttctcactactctctgtgatttttcaaactattgtatcgttaggaccaaaacaagtaaaaagaaaccgcagaagaaaagatttgagagagatatcttaccaaacaaggtatatatttctcttgttaaatctttgaaaatactttcaaagtttcggttggattctctaataagttaggttaaatagtcaatatagaattatagataaatcgataccttttgtttgttatcattcaatttttattgttgttacgattagtaacaacgttttagatcttgatctatatattaataatactaatactttgtttttttttgttttttttttaatacatattttgcttttggaagatcaaatggacagcaaacagatgttgttgtcggcgcttggcgtcggagttggagtaggtgtgggtttaggcttggcttctggtcaagccgtcggaaaatgggccggcgggaactcgtcgtcaaataacgccgtcacggcggataagatggagaaggagatactccgtcaagttgttgacggcagagagagtaaaattactttcgatgagtttccttattatctcaggtaatttaaaacatataacatcgaaagttcccataattcgcatgcattcaactagactttaagatcaatcaattctaattaggatcttaaaacaattcttgtgatggaatatacatatgttttgatcgtcactttaatttatagtttacgagtttcaagacgataatacaagtgagaatatagaaatgataaggaaataatatgagtcatcacatattttttggatagttttttttgtttgttttagttattaaatgtagttttacaaaaacggataagatatttgttggagtgataataatggtgaagcatgtgaatttctgtttacatacgccgataatgatttcattgtttttctagttccgacacgtgtcactatcatttagattctttgatctttatcccaaaatgtttggatttattcttttgatcactgaaacatacccacaccgatcgatacatagtacatgtagtcttgttcatcaatgtttttacctttttgggattgtgcagtgaacaaacacgattgcttctaacaagtgcagcttatgtccatttgaagcacttcgatgcttcaaaatatacgagaaacttgtctccagctagccgagccattcttttgtccggccctgccggttagattccgatgattcgatcttgatcttgaaccaattcgtttgtgttttgaattttattatgtttccttgcagagctttaccaacaaatgctagccaaagccctagctcatttcttcgatgccaagttacttcttctagacgtcaacgattttgcactcaaggtttcttgaactttaaacaaaaacattgaaatatgtttcttactttgagtcttctccattgtgaaccttaaatcttctttattgtgtttgcagatacagagcaaatacggcagtggaaatacagaatcatcggtaatcggtttactgatttcgtttcatgaattgttactagtttcttgtaaatgatctaaatcggagagctggttttattttccggttgtcttagtcattcaagagatctccctcagaatctgctttagagcaactatcaggactgtttagttccttctccatccttcctcagagagaagagtcaaaag

SEQ ID NO: 154908 - DNA, 600 bp, Arabidopsis thaliana landsberg
  unsure (1)..(600): unsure at all n locations
cgtctcattcgagtaaaaaaggtagaagctattgtattccggatcaaagcaacctccagacgttttttgaaattattccctagtaagccaaagacagtttggattcaacaaatttaacgtagaaactagagataagtacttgaaggtgtcatttcaatctgattcttgcaggctttttggaggaaactgatatctacaaacgacgtgagctactcgaggagacaagtaatttagcggctgagcctgctccttccgctcctagtccttctcccgggattataactgaagcttcacctcgaagcagcgggtctttccctgcagtaaccaatgcaaagaagagaagaccacctttagtccctcctgtaccttctcctgataagggcagtactagtcctgatatctctaagaatcagccacaggataataaacagtcaaaaggatcaaaacatgtatggctgtatgtggttatcgcggttgcttctttcgtcggtttactgattatagtagcggttatcttnnnnnnnnnnnnnnnnnnnnnnnngagcataggtccttggaaaactggtcttagtggacaattgcagaaagcttttgttaccg

SEQ ID NO: 154909 - DNA, 7172 bp, Arabidopsis thaliana landsberg
  unsure (1)..(7172): unsure at all n locations
atgcaaattctggcgcctgttcttctggaagctgggttacaattggccacaaaggtgagcatgacatctgtcgtagttcttccttcagatttttggccattatgttactaaattaatgtgtttaattccagataatgaccagtggaataataagaagtgatcaagttgcagtcaaacgcatattttctctactttcacgtccactcaatgactttaacgaattatattatccttcgtttgctgaatgggtcacaagcaaggtgcataagcaacaaaagggtttattttctaattttatttggctatcactgagtatacttattcttgcaacgtagatcaagatcaggcttcttgctgcacatgcctcgcttaagtgttatatatttacgttcttgagaaaacaccatggtgaggtgccagtagaatttgaagcactgttgccaatgttttccaagagttcagaccttctcgggaggtactggattcaggtcctaaagggctacagttatatttgcttatgtcaaaacctcaagaaaagtgtgagtcaactcctaatagttctgttttctctctttagctgaacacttctatccttgtgctcccctatcttctataaagatcttaaacttgccgcagcagtgctcattcttagatgaaatcccgccacatactgtgtcaagaaggctacagccttgtctggaagaggcatggcctgtcatcctgcaagctttagtcctggatgcaattccggtgaatcatagtgttgaagaattttctgataggtccttgatatctacacatcgcatggttacactagaggctgaagattttcagtttctatggggcttcgctgtacttgtcttgtttcaagggatgcatccagcctctagtatgcaagtaataccttttagctcagctaaaatcaaatctagtggagactccagcatcaacgaatcttcgttccagggcctaaagttatatgaaattgcattaccagttttccaatctctttctgctggaagatttttttccagtggctttcttagtatagacctctgccaagagctattgcaggtagagccacttcaaatattttgtttccttttaaattcttctcatgccattctatcttagttcttattatcatcagctactaaagcgtatttgatattggtttaagcagccacatgcttcttctttggaacacataataccttgtgctttgtgcagatccactacaccccatgtttttcttatttttcctaactggcttctgctttagcaatgtccaagcgccataggctgtgagctttgattagttatacactactctaattggattcattttccttttgtaactcatccaggttttgtcgtattcctttcatatggacagttcatgggatattcttgcagtatcagtagtacaacaggtacacaactcgttgatgttattgaaccctaaagcatcatttttggcttgcatttactgacttttcttaagattggaaatgaggttcaagaacgtttgtatatatgtattccttctctgttctcttttatctttagttagttggaaccaagatatactattccactgtaggagaaataatcagttacccttgtttctgttaccctgccataggcatatcaccagatattatgtacttcatggtcataataccactgtttgatgaatttcttcgtaacactgattcctgattaattttccaggactatatatgccttacgcgttagaaaagatgcgagttctgatgaagtttatttttttccaacagatctcacaaaactgtccaaaagattttcttgaaagtgaggaatttgcctattcgactattgaactctgtcttgggtacctgttcaaaattctccacaggtgtgcattaaagagatttttggaagctgtgttcacttctgtttaaaattatgtagagagaaatatactgcattatatttggaaacgaccttaccaaaaattcctttctgtttcagacataatgaaatttcgccagatgatggcatttgggacaatatgctttcccctttatttatctccataaagacgctagtgaaacgttttgagttgaaggtaacatataaactttgagggatttttgctttatttgttgcatttctcgaattctgttatatttgttgtactctttacatctaactgatgattgtttgtaaaatgcagcatcgtttaaattcggcgcctttggcatttttattaagtggctacaagtgcatccggcaagtccccactgacgcatacctacccaaagctcttgagattgtgaagtccaccaacgatttattgcttgagcttaccagagcctcatcgcaaaagccttatactggtatgaaaatatgataagcaatggccgatgttatttaggaagctaaaatgataagagtttgtatagaatgaacagatagtaagtttatatagagttggtgctaggttaattttttgtctactaggctaagggtggttatcagatggtgtcaaagttctgtgagagggtagaatgttagattcgttttgatggtacattcagtatagatcatgtatgctttatgtctgttttatgtgagccccgaagttgcaaatgcagaattgtgaagtcgatttgtgcaactgaaatattttgcatcctttattgggacattgtaaagtttgttgaaactgtttgatcaaaatgattttattgcagatggcactaattttgctgccgatagtggcttccatctaagagcaatttttggtgcttgtctgcatatggttggggatctgactagagattgtatnnnnnnnnnnnnnnnnnnnnncagcaagagatcagggttacgcaagctacttcagttgaagcttgtattctgtctggaacaactcttttcactggctaagcttgcctacgagtttgattgtccagtagatgaaactaataccaattctatctgtattgtcatgttgaagagttgccaaattagtatagcagcagttgttaaagattccaatgttcaggtatctgagacttgcctccttgtcatatgctagttcaactgttgattatcgagctcttcatagtataagttcaaatatctgtaggttcaagctactgtcttacaagtgctaaaaagcttggtacagcgatacaacaacccagaggagaaaagttttgtgatcttatttgtcggcgaacttattggagatattgtcagtctgatgcagagggcgcttctggttgttttctcatttcttccttccaaaatcactgaatttacatttttagaagaaaagagtaattttgacgtctttttagatgtaaaaactatgataactgacttcattcttattcttttggatagaaacctgtgaatacggaatcggtggtcatagctggtgaatgcttgcggttcataatgctacttcagacacactcaattacagatgaacttcagaagggattcatgagcctttttcttgaagtggttcttgtcgtcttctctaagacttcagatggcgtttctcaggttccattcctagcccgacatgtaaattctgtattagaaattttgttgctccctcttaaggcttaaatgtcttctttttattgttttatggataataccaggaagtcctcgagttaagaaatgtagctgtgcggcttgtttctcatctagctcagttgccttcctcggctgttcactttaaggatgttttgctgtcgcttccagtaacacaccggcagcagcttcaggttgttatatgcattcgatttgatttacttgcctggaaacagtgtgttcgaaagttctaatggatcccaaatcccctatccttttaatcatctgatctttctctatattttccttaaatgtgtcatggctaagcattatgcatgcaaaaatttgaaataactatctaattggtgtccttgttcttctgatgttaggatattattcgtgcttctgtctctaaagatagtgcccttgcgaagccaaaatccttggttccagccatggatatcaaactaccagcacctgtggtagcaacgcctgaaaaagttacctctactgctaatatggttaaagaagaagcgttgtctactatgccaacatctttcaatcaggttagcacagtagaaagtggaactgacgaagaagaagaagaagaagaagatgatgatgatgatgattgggacactttccagtctttccctgcttccacaaatcttgaagggtcagagtctaagacagaaagtgttgctgaagaggagccggatcttcctgggaggtcttctatacaggatgatgaatcaaatgcagaagaaactgatgatcaacatcttgcatctgaccatgccacagacatcacaagagaagactcgaatgataaaagcaaagaggttgttgaagaggagacagtagagccatgtttcaccacaagagaagactcggttgacaaaagcaaagaggttgaagaggaaacagtaaagccatgtctcatagaagacgcgcttacaagccagaatgacaaaacctcatctggtgaccatcctgttgaaataaacgaacaatcagttgaaagcaagaatttggaatctgaaaacattggaactgatatcaaacttgcttcaactgaggtagagtcaccagccttagatgatcttgaaccgcaacagattcaaaagtcacccgaggatgaatcgtacgaggaacatgtacgagctgacgctattggaacggaagagacacttgctgaaaatatgagcgacgtggattatatataaatgctactgcaaaacatttatgattcatttgtgtcagctttatgcgtcacttcaattgctgtgattactggtttggggataaaagttgaaattggttttatacattgtttgatttttctactgtgctttcttgtaaaaaagctctccgaatctccgcgcaagtgctaatcacactgttaaaagttctgatgaagttaaatggttaattaaggcccgctgccaaaaaaaggatggttaaaacttaacactcatggcttcttgggccttggtcagtgccgaccataaatgagattgattaacaatttaacataatctaattaggtcaaattttaacagatttgtattcatatctctctctctttcttccgcaagcagactaatacaacgatcatgaatagaggagaaaccttagattccatcccaactgatctgattcttgatatactctcgagactgcctacaaagtccatcgcgagatttcactgcgtttcgaagctatggtcgtccatgcttgccagtcaagatttcaccaggttgttcgttaacaggtcctcatctaatccacgtctcttactcgggatcgttcgaggcggtgagtggagcttctactcgtcgcctcagcctaagaatccatatgagaagtcatctcttgaagtagccgctgattttcatatgaagctttctgaaataaaacaacatcaacatcacgggactagctatgcttttggtttgatatatttacgtactgtgtggatgtcaaaagagggtaactatgaagtgtgtgtgatatgtaaacctagcacaggacagtatatgcgatcttaccacctcaaccgtcaggaatctttggcgatttagggtttgacccgattggcaagcaattcaaggttttggttcttaacattctagacaatcattatattctgacattaggaacagaaaatgataagtggaggagtatccaaagttccttaaggtatcgtccttgtgggcaaagcccgatatgcattaatggagttttgtattacatagcttacgatacacaggacagctcgaatgatgtgataggttgttttgatgttaggtttgagaaattcaagtttttccatgtaaatcatgatatggtaaaatgtttttttgaattgataaactataaggacaaattaggtgattttcctcatgagtaatcaatgtgggttttagaggatctcaaaaaagaggaatggtcaaagtatgcctacactttaaggcctgataataatgttgttaaggttaataataatctttcctttgttggggttactactagagataaaattgtttaggcgaagatgtatgcatgtaaaccattttatgttttcaactataatcccgaaaataacactctcttaagtgttgaaattcaaggtgttgtagaagactctgaatggtttagcaattatcagagagtctgcgtctttgtagaacatgtgaaggatcttcatcagtttgataatatgaagacatctataaacctaccagtacagaagcgtaaggccacaagcatatcaatatcatctaaatatgatgatcatgttaggacgacactgatatcatctagaaaaaatcagcaagtgacgtctgtttctcgcccgcaacaagatcggcgtacaactaacaaatttgatgcattgtgtcttttagaagatgattgaaattttacaggtgtcaaaacctgattgcttaccttactcttcaagttagctgaaaaagctccctatttaatacaagttgtattctctctttgtaaccattaataaatcaaagaagttcttaaaaaaattgtgtttctattacgattctgtcaaatttatataaagtcggtaacattaacactaaagatttaaaggaagtaacggcctttggaactgtctatcacacgagtgctagatatgttgcaatcaagtgaatataaaggagctcgaagttcttaacacaagagatctgtgagcttgtttggtcggtgacacatcaagattcatacttctaataatgaatattaatactgttaagtccaaaagatatttcatgttctaacatcaatcataatcaaataaaaaaaaaacattagtggaaaaacatggccatttctacaattgcaacagctacatttacagccacgatttctgctgtaagaagcagagcgtttccttttgatacgctcttgaaccaaaaacgttacctacccaaaatatctagccacctttgactttttgttcttaagatctatctcggcaactcaattttcctcctaatcttcggatttttcgcctgcgcttgataagaatctcactgaaaacaccttctactttataa

SEQ ID NO: 154910 - DNA, 1192 bp, Arabidopsis thaliana landsberg
  unsure (1)..(1192): unsure at all n locations
cccaaatacaacattgacattttaaatgctctatctggaatgcctgagatggaccttttgttgcagtctccactaggggctctcttctctctgactgtccgtcagtgttctttgtttggccagctggttcaccagttattgtgtaggcaactgtatactgatgaaccaaatgcaacatggtttgtctttggtggccaaccactccgtttctcacttatggagtttgaggaggttacaggtttgtgnnnnnnnnnnnnnnnnnnnccgtctgaaatgaagtctgtcctctcttaccctgatggtgaatcaccatattggtacaaacttattggaggcaaacttggttttgttactgttaagtcactgctgctacgactaaaatctgagcctcagatgccgcgttggcgtaaattccaaattgcccttgttgttcttgtagaaggtgtgcttctttctgagtctcatacagttcgcccgtcagttaaagtggtagagatggttaaaaatgtccccttcttcctaaatatccttggggacgtcactccttttttcgaactctgcgttacacaaaagttgggtctcacattcgttctaagcggttcctacttaagaaacttggccaatcctccctagctattcatggattcccgcttgctctccaattgtttgcgtttccctctattcccctccttcaacgccatttgccacatgctgatgatctttctacattccttgatcaacgattgcagcgtcttaccaaactcaagtcctttcactctaaaaatatattagcagttgaatatgatccacttgtaagttctctacatctttactaaattttcttctttcatgctcttttctgatacgtcttttctttttctagcttactgtctcttacccctctgctggaccttcctccttgcttcctactgtttttgctgaccccagaatatctcggctagaggcacttttttccactaggacaaggtttaccatgtcatcttgggcaggtggtgatgcattctttcccccattgccaaaacccaagaagagggttagagacagaactgatactgatcctagttgctcaaagaaaaaaaaaaaaaccccaaagaagcctgttgttgaaaggcggctgaggtttggcaaatcttctttgcttgctgaagtgtgctctgctatccgcagttga

SEQ ID NO: 154911 - DNA, 938 bp, Arabidopsis thaliana landsberg
ttcaaaatcttgtagttcaaaagaagattgatcaactataatggagaacgaatcgccctccaagaaaaacatgccgccatcgtgcggaacactcgtaaccatcctcagcctcgatggtggtggagtcagaggaatcatcgccggagtaatccttgcctatctcgaaaaacaacttcaggtttatatctatataaatttcagtagaatgcaagttactaagatagtagatacatatgataggatcataactcgccatgcgaattttgtagtagttaagtccctgcatcgatttatgatcactaattcatattaggttcttaccatatagtaactatgattcatcaaatttttgtatttactcttcgaaaaaataaaattttgtcggtatataaaggaactagatggagaacacgtgagggtagctgattatttcgacgtgatagccggaactagcaccggtggtcttgtgacggcgatgttgactgcaccggacgagaacggtagacctcgtttcgcggctaaagaaattgtgccgttttacctcgaacattgtcccaagatatttccccagcccacgtaaggaaattatatttcgctatatactaatatcaaataataattatatacaacttatgttcacatgttaacaccaaaaaaaaaacttatgttcacatgttcgaacatatatattaaatatattatttggaaactttggaggaataattcaaaccaccagtaagaaatgaaatgttttagtcctcagagaacaagtggtgtatttggtgtcccattcccatatatttgttttttctaatgaacaattagcatatatatgtatatataattccacgtagcaattaaaagtaaactctaatgaaaattgcagaggcgtgcttgctctgttaccgaagcttcctaagcttctgtctggtccaaag

SEQ ID NO: 154912 - DNA, 2202 bp, Arabidopsis thaliana landsberg
  unsure (1)..(2202): unsure at all n locations
ttcttcttcttcttcttcttcttcttcttcttcttcttcttcttcttcttcttcttcttcttcttcttctcaatcttgtagtaggcgaccatggaatcagagggagtgtcactaccgttgatccacaagcatgtcatgatgccttctcatgatcagcggaaaggtgattgttgtggacgctcagaatttaccagtggtggatattactgcgaaatctgtgacttctttgttcataggaaatgtgttgacgagtcctctgaatatattaaacacacatctcactctgttcacactcttaagcttctatgtaaaccacaccatatatgtaatttatgtggcaagagcatcaaggatctattctatcgttgtgagatatgtgacttcgatgtggatctatactgtgcaaagtacccaccaccagaggttattgatatttccgagacgcatcaccacaagctcacccttttcaagaagcggattgagtttgattgtgatgccagcaaatgtggggagactggagatgggtttgcttacaaatgtcctgaatgtgatttattcttccatgtggattgcgtatggcatccgccagaagtaaatcaccctttagaggtaaaccactcttaccaccctttacaccctcttaagctccacataggtcaaccaccagactattctgatggtaaatgtcgtctttgcgcacaaaagattaaagagaaattgttttatcattgttccgcttgtaacttcagcttggatatggattgtcttttaaacccaccaccacagtctattttggatttgaaagctcatgctcaccaactcatctttcgcccaagacttgattcttttacatgtaatgcttgtgggttaaatggagatcgaagcccttacatatgtgttcaatgtgatttcatgatacatcaagagtgtcttacccttccacgccttataaacataannnnnnnnnnnnnnnnnnttgctcgcactaatcttctgggtcttgtatattctgtgtgtggagtttgtcgccaaaaagtggattggacttgggcaggttattcttgtcaaaggtgttctaactatgtcgttcattccaaatgtgctacaagaaaagatgtgtggaacgggaaagaactcgaaggagttattgaagaaacagaagatatagagccgtatgtggtaatagatgacaacacaatacaacatttcagccacgaagagcattacctaaaactcgacgacaatggtgttttatgtgatgaaaacaagcggtgcagcgcatgcacccattccgtttgcctcgaatccttctatggttgtatggattgtgacttcattcttcaccaaaactgtgctaaatttcctaaaaggaaacgacatgtgctacacaatgaacggcttactttatttacacgcgaggctggtcacttttggtgtaatgtttgtggtagaatctccaatggtttcagttaccaatatggggatatgaaattagatgtcatatgttgttcagtgttggagccatttgtccatccaagtcatcccgatcatcccttatattacatttcaccagagatggaagaagtctgcaatggttgtaacatgtcgggaactagaatgctcaggtgcattgaagatggttgtggatttgtcttatgcttcaaatgcgccactttaccgaaagtggtaaagcatagagttgacgattatcctctctcactatgctatggcgaaaaggctagtggtaaatattggtgtgacatttgtgagaaagaaaccaatccagagacgtggttctacacatgtaaagatcaccaggctagtttgcatacagagtgtgtgtatggagagttttcagggctcatgccaggaagcgtagtcaagtctgatacgggatcatatcacgttgcgctcctctactatgtatctcgcccgttttgcaggcagtgtaagtcgcattgcatgtcccctatcatctataagatacctgaaacctcagtttcttatctttgctctgatatttgcataaagcgtttttcaaagagagactgatgatgtttagttttgggctttgtgtgtcacacacgtttttctgtgttcaagaaattattagggtcgtttgaatatttttcctttatttttcgttaaggttttccgttgaatcctggtccaaggaggaatcgagtctttgagtataaatag

SEQ ID NO: 154913 - DNA, 762 bp, Arabidopsis thaliana landsberg
gtcttggttctgtgcttgaatcgtgacccaaatgaccaagatcgatcaaaatcgaaacttaacgtttcagaagatggtgctgtaccagagattaatcatccaccatggaagaaaagaagataagtttagagtttcttcagcagaggaaagtggtggaggtggttgttgctactccaagagagctaaacaaaagtttcgttgtcttctctttctctctatcctgtcttgctgtttcgtcttgtctccttattacctgttcggcttgtctactctctccctcctaggtactactatttgtgccacacaatcttaacttcttcttcttttttggtatttctatttgattcatcacttatcttctctgttttttactcttctccagattcgtttcgcagagaaatcgaaggtcttagctcttatgagccagttattacccctgtgtgctcagaaatctccaatggttagtctttttatttcacctttttaccaactcctgaagaaaacagagttttgatcttttcatcttaatattagaaacagagtttgtgtataatctgcataaaacttacggttatcgattcttgtttatgcacgcaggaaccatttgttgtgacagaaccggtttgagatctgatatttgtgtaatgaaaggtgatgttcgaacaaactctgcttcttcctcaatcttcctcttcacctgctccaccaataacaacacaaaaccggaaaagatcaaaccttacactagaaaatgggagacta

SEQ ID NO: 154914 - DNA, 264 bp, Arabidopsis thaliana landsberg
tcagcttttatggtgtattgtgtatagatcatgctggaaagagatactggtcgttcacgtggattcgggtttatcactttttctgatcgccgcgctatggatgagtccatcagagagatgcatggaagggactttggtgatcgggtcatctcagtgaacagagctgaaccaaaactggggcgagatgatggagaaagtcatggctctagaggtggcagagacagtggctactcgattgctggaaaaggaagctttggtggaggt

SEQ ID NO: 154915 - DNA, 357 bp, Arabidopsis thaliana landsberg
atgaatcccgaggaatcaagaaggagagcttctgctcgagccgtggcaagagggtttgagatgattaatgagaagaatcagtcaaggaatcaggaagctgcgagtcgtggttttactcggatgacaggccgagtacaatggccgagtatggccccagagtcctctgtgggtcgttctgcggctgctcgaaaggaaatagcaagaggcaagtgggtctgggagtccgagccggttgcagaagaagaagtgcctgagatagagaaggaagcatctgaggaagatgtgcaagttgatgaagaggtcctgatagttcctacaaggagaagaacgaacaccatgaggagaaagaaagaccta

SEQ ID NO: 154916 - DNA, 949 bp, Arabidopsis thaliana landsberg
taggctaccgagcctgtattactttgttcacaaggccccctgtttgcggcgaatgcatttgtttcccggagcatcaaacttgtgtggtatgtttgatcaattcatttttcttgttgttaccgcgaactgatagttttatagaggaattagtctcttgttgtttggattagaaattgaaaagttgtgtggaagatatctaactgttggaaagattgctgcttatgggaacagaagcatttggttttgtttagttattgattgttatgtttgttcatttgtaatggatgatctagatttacggtccccaagtggttagatataattgacactctcaacaacttaatacttcgaaaaatatgatttactgatgttttcacagtgctccatcataacagacgcgagataaatattagtggcggcaagatctatttcatggggcatatacattttgttctattttataatcattctgcagtttttttccttcattataagttgaacaatgttcagaatttctcgttttctttttgctactttatatggtagacaaggtgggacaatgatagaaatatgtttttatcatgtggtaatcaataggtccggacttattcagaatgggtgatagatggagagtatgatcagccaaagtgttgtcaatgccaagcaacatttgatgagggggcaggtcatcaagtcactcggttgggttgcttgcgtatgttgtctgactcttaccattgttggattggatttttatttctgaattttgataattaaattaatggaacattttttaccctctatttgtatcagatgctatacatacaagttgcctggtttcgcttatcaagagttttcctcctcatactgcacctgctggttatgtgtgcccatcatgtagcacacctgtaagccttattgattcatatatatttattagtaaactttc

SEQ ID NO: 154917 - DNA, 363 bp, Arabidopsis thaliana landsberg
cttctccttcctgtctccaccagctccctccttctcaatcattagcttcttctcttctcttctctcacagagagagtaatcacaagccaagtgagaaaaataaaacactaaacccagatcgaaaaccatgtctattaacaacaacaacaacgacggtgttatgatctcatcaaacggagctttaatcgaacaacaaccatcagtcgttgtgaagaaacctccggcgaaagatcgacatagcaaagtcgatggaagagggagaagaatccgtatgccgattatatgtgcagctcgtgtttttcagctgacgagagagcttggtcataagtcagatggtcaaacaattgaatggttacttcgtca

SEQ ID NO: 154918 - DNA, 3260 bp, Arabidopsis thaliana landsberg
ggaattgaactgaatcacacacccttcagcatataagtaggcctaaaaaacctgcttatcaatttggcgtcgttgccaattcattgttgcattgttacattcaagatatcagaaacttttaagatcaagttcttttacatttatcaagttactaacttatattttcgtctgcttgtttttgtggtataggtattaatcattgtgcatgcaaacctgatccaaaggttctgcacacgtattaccattcagagacagaattgacaaaatagcttgtgagttacaaaaaaccaaagcaaagacaacctgtgatcagccaagaccagctgctatggatcaacagaacagaccagttgatgttcaagacccatctaatgttgatcaaccaagaaacattagtgttggtgatgccccaaggaatcatcaccaaagacaagggatagtgccaccaccagttcaaaacaacaactttgagatcaagagtggtctcatctcaatgatccaaggaaacaagtttcatggcttacctatggaagatcccctggaccatcttgacagctttgattttctctatggcctaaccaagatcaatggtgtcactgaagatatgtttaagctcagactttttcccttctctttgggagacaaggcacaccactgggagaagactctgaccccagactccatcacctcatgggtcgattgtaagaaagcttttattgccaagttcttctctaatgctcgcacagctatattgaggaacgagatctcaggcttcacacagaaaaacaatgaaactttctgtgaagcttgagagagctttaaaagctacaccactcaatgcccccatcacggttttaagaaagcatcattattgagcacactctacagaggagctttaccaaagatcagaatgctactcgacactgcctcaaacgaaaacttcctgaataaggaagtagcagaaggatgggagttggtcgaaaatctggcacaatctgatgggtgctacaatgaagactatgatcgctcagtgagaggaactagaggcactgagaataaatagagcaaagatatcaaggctctgaatgaaaagctagacaagctgttgctggctcaacagaagaagatacactacatcactgatgaagagcacttccaaatgcaagaaggggggaatgatcaaaataaagagctgtgctacatctagaaccaaggagggttcaacaagggctacaacaactacaagcccaacccaaacctctcctacagaagcactaatgtagctaacccccaagatcaagtgtatccaccacaacagaatcaatctaagccttttgttcagtacaaccaaggttatatccctaaaaaagagtttaatggaggctaccaacagcagaatcggccatcagggtttattcaataaccacaacaagccccagcagctcaagatccttaaattaagcaactcattcaacaaatcattcaaggaaaagctactggagctatggtttttgacaagaaaatagctgaattacacaacaagatcgattgttcttacaacggtctaaacgtcaagttcgaagctctgaattcaaaaatcaagtatgtggagagtcaatttgcatcaacctctgctccgaagcatcctcaacaacttctagggaaagcagttcagaatcgtaaggactatgctactgctaatgctattaccatccaccaagaagatgagtctccaccaaatcatcagactcccaatacttaggacaatatgattcaagaaggggagggattcaactcaaattgatgcacctgccacccagcaattcatctggactatagagcacacacctttgctgaatactcaccattatggaaaaaaattcaaaattgaaaaactcaagaaagatgagaatcaagagatgattagcagtgccaccacccaagaaacttccaagaagaaagtcatccaagaaaagcttgatgatcccggttcattcactccgccatgctctctaggaccattgacattcaataggtgcctttattatttgggagcatctgttagccttatgcctctctttacagctaaaaggctacggatcatggaatacaagttctgcaacttagctttactcttagctaatggttctgttgcacatcctcatggtctaatagaaaatctgcctgacaagattggaaatgttgagatacctacagattttgtggtattggacgtagatgaagaaggcaaggatcccctgatcctaggcagaccattcttagcttcagctggataagtcatagatgtcaggaatgaaaaaattaatctgaagcttgaaaaaggcatcaagatgaagtttgacatcagagaagctttagggaaatcaacaacaggaggtcaaagttttgggattcaggacatggatgttgatgaagaaacagaagttgaaactccaccaagagttaactatagttctcaactcagcaagctgaagagaacttttgaccataggaagagagcaatacaaaggttaactcagactgaagatcctacaaaagatgactggtatgagatgagaaaaaattttaaatggcaaagcagagtcatagagggattatcttcaagggtgatgaagctgaaagatcaactatggatgtttgaaaaaagagttaaaaagttttcagatggtattgatccagagaagatggaaactgcactagctatcaaggaggacaaaaatctcacaacataatggtttgcaccagaagatcaaaaaggagttcacttagaggaaagaaggccatggaacaagttgttgagtgaggaggaaactcctattccaacttattctccaggagcgcctaaacagcccaccaactcctctacggaagaagaacacttgacacttgattctgttactgaagaacttctggaactaaggatagaatacaaagctcaagaggataccattggggagctaacttacaaaatggaaggactgaaccatgcaatcttgtaacttcaagaaatggttaaaggctaccccagttttgaatttgaggattggtcaaaggaacctggttcagaagaagaagattactctgatgatcagaaagaagcttattttgaagaaaaatcaaatgagtactcgtcctaccatatctcaagagaggatgcagagtatgattctagcattgaaaattcaaccactgaagatgaagacttttctgttcctctcttcaacctcttttctaactaa

SEQ ID NO: 154919 - DNA, 957 bp, Arabidopsis thaliana landsberg
tataaaaaaattaaggtttttgtcttgtcttgccgataatgcctagagagtgtttaaagatttgatttaaatactcttttatgttaactacgatgcaaagagtacacaacaaaccgattgattctatcggaggttttaagcatttggtaaaacagagtaacggcggtgacggtggagtgacggcgacggatatgcaagaaccgagcattgagactgataagcttagctacgagattttctctattctcgaaagcaagtttcttttcgggtatgatgatgacctgaagcttatggaatcaaggagcagagacccgagtccagagcaagaaacggcatcaccggcgatggtggaagctttaaacggcgtcgttccgggtacagttaagaaccagagaggtaaagtttgtgttttgagtatcgatagtggtggaatgagagggattatacctggaaaagctttggcttatctggaacatgctctgaaatcgaaatcgggtgacccgaatgctcgaatcgctgattacttcgacgtagcttccggttccggtatcggtgggattttcacggcgatgctttttgcgtcgagcgatggtaaccgtccgatcttcaaagcggaagacacgtggcggtttttagctatgaaaggtaaaagcttttacaacaaatcaccaccggggatactaaacagggttatgaaaaccggttcgggtggttcgggtgggtcaggttcgaagcttgagaaagcgatgaaggagtctttcgaagagcttacgcttaaggatacgcttaaaccggttttgattccttgttacgacctcacgagctctgcaccgttcttgttctcacgtgctgatgcgttggaaacggacggttatgattttaagctgtgggaagtttgtagagctacttgggctgagccaggagtgtttgagccggtggagatgagatcagttgatg

SEQ ID NO: 154920 - DNA, 670 bp, Arabidopsis thaliana landsberg
attgaatctctttctggctgattgattaatggctgaggattccgatcttttgcctaattcgccggatgtaggcagaggatggagaaggatttctactggaaaactgagttttttatacactcaagagaaagttgttcctaattatctcagatctcccactggttcttgtcatgatgcttgtaaatacggaaggaaagatgaatctgaagacaagccaagagttccacatcgcaaaagggttagaagaagcttttctggagctataaacttggattcaccactgaggaagaaggcattgacaaaaccgctgttgagtccttctcgtagatgtgattctgttgttggctttgatcatgcgaagagccaagttagaaacttttctagcggagtttgtgatgttaagaagagacatgcagatggaacaaatgaaaaggtagtgtctgtttctgaatctaggttagctgattcgactaagcgaaagaagaagaagaagaagaagacggtctatgtgtctcgtggaagggctaaagagattgttgaacaaaagaggcgtgtcactgctttaaagctgaaagctgttgcacaaactgcagagattgctcttcggcgtagtactgtgaagagaaagaagatgaatggcggatcaaaagctgcagaacagaagaaggca

SEQ ID NO: 154921 - DNA, 463 bp, Arabidopsis thaliana landsberg
tttcggattctggtgatctctgtaacaaaatcgcttctctgtgtttttcaggctaattgagagtgtcccttgcgttagagtttgttactagcttttttcgtctgaaacatggcgaattttgccaaaccagagaacgcgttgaagcgtgctgatggtaagttacgaaatgttttcgttttaacatccatttggtcaaatggatgtggttagggtgtgtatgaattgagattgtgttaaacactttttttttgtgtgtgtagaattgatcaatgttggacagaaacaagatgctcttcaggcgcttcatgatctcattactttcaagagatacagagcttggcagaaaccgcttgagaagatcatgtttaagtatcttgatctttgtgttgacttgaagaggggtcgattcgctaaggatggattgattcagtttcgtattgtttgccaacatgtgaatgtcatg

SEQ ID NO: 154922 - DNA, 457 bp, Arabidopsis thaliana landsberg
atttaccaaactaaaatttttgtagggtttaaagaagttatgaacactaatccagtgactaatgggtttgttaaacctgttcctactgaagaagaacaagcaaaggtaacttaaactttgttcattattttagatttatgttctgataagatttgtgttatttgactttagattgaggaagtgaggaagctattaggtccattaccggagaagctttcgagtttttgttccgatgatgcagttttaaggtatctaagggcaaggaattggcatgtcaagaaagctactaagatgcttaaagaaactttgaaatggagagttcaatacaaacctgaggagatttgttgggtacactattgaattatgaagtaacattgctgatatgtttgagtttatatgaccaatgagttgtgttttcgtatgaggaagttgctggtgaagcccccacagggaagat

SEQ ID NO: 154923 - DNA, 1254 bp, Arabidopsis thaliana landsberg
acgaccacacaaagtaattacaatggaacacagaaaggtaagagggaacggcatagacattcacgtagcaatccaaggtccctccgatggtcctatagtccttctcctccatggtttccctgagctctggtactcatggcgccaccagatctccggactcgccgctcgtggctaccgtgccgtcgctcctgacctacgtggttacggtgactccgatgctccggctgagatttcttcctttacatgctttaacatagtaggtgacttagtcgccgtcatatccaccttaatcgaggaggataagaaggtgtttgtggttggacatgacaggggagctctcatcgcttggtacctttgtctttttagaccagataaagtcaaagctttggttaaccttagtgttccgttgtctttctggccaaccgatccatcggtgaagcccgttgatcgcatgctaagctaattacttagtatacggcaatgattactatgtctgcaggtttcaggtttgttctttatactcttgtaggcttgtagctaattacttgaaggaaaagttagttattaggttagatggttgagtgtaggaagttggagatatagaagctgagattgcagaggttggaacagagagagtcatgaagagactactcacttatagaactcctggaccggtaattatcccgaaggacaaaagtttttggggatccaaaggcgaaactataccactcccgtcttggctaacggaggaagatgttgcttacttcgtcagcaagtttgaagagaaaggcttctctggtccagtcaattactaccgtaacttcaacaggtaagtttgaaccagacaagtcttgtctctattgtttaggaagaagtgttgaatgggtcttgtaatggcaggaacaatgagttgttgggtccatgggtgggaagcaaaatccaggttcctacaaagtttgtgataggggagcttgatctggtctactatatgcctggtgtgaaggaatatatacatggtccccagtttaaggaagatgtgcctttgcttgaagagcctgtggtcatggaaggagtggctcacttcattaaccaagagaagcctcaagagattctccaaataatccttgattcatctccacattctaatatttcgttcccttataaaacactcttgtaagttccataataagttgaattttgaggatgcatcttcatgtatggacatatcatcattcctcttttacacaccttatg

SEQ ID NO: 154924 - DNA, 258 bp, Arabidopsis thaliana landsberg
agcattcacggatccagtccattagcttgggagtgtggtcctcgacactaaaaccaccaatagtctcccatgtgtggaaccaagggtagtaggagatgagaaccgagtccaccatcgaaacgttgtcgtttccaccgaagtagaccatatctccaagctctatttctaatactttcaatatctctatgaactcttgttgcgcttcttctaggtcttcgcccctctttgaccacgttcttcttccagcgtcaaaaacct

SEQ ID NO: 154925 - DNA, 1316 bp, Arabidopsis thaliana landsberg
ttatatatgtattaatagtcgtttgcatgtttgtgatatacgacccgaaaatgaatcttgcatgtcataagatctgtgcgtggtattaacgtattctattctacgtgcccctccgcataaaggcatagcgtagacccttttgtgaagagggtgacaaaaaaaaacgtatccgctttagtgagctagtggaaaaaaaacgtatagacttatcacacacatgcaatattcagttttaattgaaaagattctacggatatatgtttttttagatactcaaatcagaatctttttggaattagaggaggccgcgagaggatgcaacaaatcaagaaacatatagaattacaagattccaccatcaaagaatctttttggaaaagagattccccatgatttatgcttccactaatataattgatttattgtggatttccaccaagatttctttctctttcaatttccaaaagaagatatcaatttcgtaataacaacattgaccgtaaatagtgtttccaaatttgatctcaccctctttggtcaaaccaatatatagaaataataccccaataaagaatccggttcatggtaggcttggtagctaatgtcaaggatttagtatttttaaaacgttatgcattagctttctatcactttttaataaatgaaaaataataactcaaacaaatataaaaggccattccctctacgaaaagcaaaacatgtatttagaatattaaaaagtctaaaatcaaacctaaaattcaaaaatcaattaaaggccacaattgtcctataaaattatgggcttgaagcccaataatatctaagtgaaaaactaaacttaaatgctctctcaagggaccaagtctcattattaccatcacctccgagcgttctcttctctccatctgtctgccgctcctttaacgtcggctcccattttcttattcacaatgaccccaagaaactcgaggagatggaaaaaagcaaaaggtaaaaaaaaaagaacaaagctttcttcgagaaccagagcacattgattttaaggtaattactttctcaatgccatggaaaaaggtcccattttgttcccctttcctgtaatctaatcgtttcaatccgtgattatctcggtaagcttggaggaaatgacttagatttcataaatcgattcatgagttgtcagaaaggatttaaattttgttggtttgttcttatttcttctggagctgctatgaatttttagatttagtttggctatgattctaaacctacgtctttatgaaagcacttacattttctagacacaagatcat

SEQ ID NO: 154926 - DNA, 413 bp, Arabidopsis thaliana landsberg
aaggggtcatttcttatcttaattattctcctgggagctgtcttggggcggcttccaggcaccacgtgtgtacagaaacataaagcagtatccagaggcttacacatacaacgggattgtgatagttcgaatcgattctcctatttactttgccaacataagttacatcaaggacaggtgagaaaggcgtttattcttccttgtggtatgaatctattagaaacattaacaagctggctttttttgcaaagtgcagactacgagaatatgaagtagctgttgacaaatacacaaaccggggactggaggtggatagaataaattttgtaatcctggaaatgtctcatgtacaacacatagattcgagcgcagtggaagccttgaaagaactgtatcaagagtataaaacaagg

SEQ ID NO: 154927 - DNA, 576 bp, Arabidopsis thaliana landsberg
aaatcgaaaagtcattaccctaagagtcccagagtcgtcagaaggaacagcttttgaaatggacggtgtcacataccaaagattcccaacggtgaagatccgtgagcttaaagatgactacgccaagttcgagcttcgtgaaaccgacgtttcaatggccaacgctctccgtcgcgtaatgatctccgaagtccccaccatggcaatccatctcgtcaaaatcgaggttaattcctctgttctcaacgacgagttcattgctcaacgacttagtctcatccctctcactagcgagcgtgctatgagcatgcggttctgtcaagattgtgaagattgtaatggagatgaacattgcgagttctgctctgttgagtttccccttagtgctaagtgtgttactgaccaaaccctagatgttactagtagggatctctacagtgctgatcctactgttactcctgttgatttcactagtaactcatctacttctgattcaagcgagcacaagtaagtcccttttcatcattgtagtgattatttgttctttatgaattgattggaattgctaagcttaga

SEQ ID NO: 154928 - DNA, 605 bp, Arabidopsis thaliana landsberg; identical to SEQ ID NO: 14028
  unsure (1)..(605): unsure at all n locations

SEQ ID NO: 154929 - DNA, 928 bp, Arabidopsis thaliana landsberg
ggaaggttcctccttgtcctcattctgatcatctctgcttcgtccaggcaatctatgttcttcatccaactttccacttgaaggctacaatcttaacgatgcaatttttcgtggataatgtggtaaagtcctgaattatttcaaagtcccaaccttttccgccgatagactcgagtcattctaaagaagtctaatttgctgtcattttcttgttccatttcgaaaaatccgataaggtatggaagaaagttgtatatgcagaccgacttctgcagctgttcaaatacgttcctcgtgagcagctgacaatcccagactttgttttccagtaagttcactctactcctcacactctagtaacgttattcagttctcgatttgttttacttactagaccttgtgtgaaaaattgcaggcatgatcttgaagttaacggaggaaaaggtctaatcgttgacccaagaacaaaatacgtttatcaacggccatgaaccaaaatcaaagaccgttactttattcagtacttgtatgtttgcttgtgaaatatttcttcattctttcatgcttatcttctcaagatgatcctgggagcaaataaagtcttcttcttcttctaatgtaatctaaagattgaatctttttgtttataaatccattttctcagcacaaaaaaaaagccaaagtcttctctcttttctctgtttgtcaatgttcttgttcagctgaagatgacgcagtacatgccattgtttagatcatgctcgagcttacgattagtaagtcagcttcatgctcacctacttgtcaccggtcgtctccgtcgtgaccctcttccagtgacgaagctcattgaatcatacgctttcatgggttctccagattcgtctaggctcgtctttgaagcttttccttaccctgattccttcat

SEQ ID NO: 154930 - DNA, 355 bp, Arabidopsis thaliana landsberg
gggatggtctgtccctcggggaagttccttcctcaaggattgagccgtttcttcattagctcgaacggtgccttgagattatctcctcatcggttcatgacagagtccgaaccagagtcatttcggacatcatgagagcttctttcgacgggttcttattggtcctccttgcaggtggaccatcgcgtggcttcacaattcaagactctgctgccgtagaagaggatttcaagtttctatgcgatcttttctggtcaaacggagacggattgcctttggatttgatcgagaaggtttcgacgactgtcaagagtatacttccgctgctgcgcacggatacagattctttgattga

SEQ ID NO: 154931 - DNA, 1512 bp, Arabidopsis thaliana landsberg
atgtacaacaaaaaagaagtaatcgatgtatcgactttccagttaacccaaaaaccggattgtgtgttctcaaagattgtgagtctgtgtgtaagaagacaagtaaagggttagagggtatttgctggaagtttaatgccaaaggaaaagatcctaagcaatgcaaatgttgtggtttatggcctccactttactaatgttgctacccaattatttctaataaaaattcttattataaagtaataaaatatttttatgaggtttatgacctactattttttacttgtattcacttgaaaagagtaacatgaagctgagaattgtgggtgtaaattgcggatcgaatctactctctctcgcctttaaaaagaacacctcctcctctcattttcttcattcgtttttgctcagaactaaacgaaattctctcccatttctctctttcttttcaaagtaggtctcaagagtatatgatttatatattttatttaaagttcgcagattctactatcgagtattgcaataccgatcttattgtgattgtattctttctttttatttttaaatcaggatttcgtgattttaccgttgggtggataaaatcgaatagcggagcgaagttagataattttttttcatatgaagtaaatcgaggtttgaatacattagatgaggaaaaatcatattataagcgtagtgtaaataccaaccatcactaaacacccacaaaaccttaattcatttgttatccgtaattgcttagcaaaagaaataatcaaatattatttaaatagaaaattaaaaaatggcaattttgtatagcaaaatatgttattcttttgaaaattccatctgttacacattcctctaattctatcgattggaaaaatagtattagttacaattcccttctaaagcatccaatggccataatttttttatgattgttaatgaagagaaaacagtggacagtgtcatcacatggaattggttgtggataaaacaaaacaccccactccatacatgatccactcttctcctctcaatcttcatcctcactaatgaattaataatacatttaaatataaaatgattgaattcattatttgctcgattcggaaaatcgtaattgaattcagataatggaagctagaagactcgcgatcctctgttctcacctgaacccacctggtccgaacccgacccgagacccgactctcagggtctccgattgtagctctggttcttccggcgacgggaaagtggaatcatctactctccaaaacgactgcgttttctgcaagattatccgtggcgagtctccatgtctcaaggtttacttttatgtctctgtttcttctaattcttatacacaacataactaactaaactcttactttgatgcacttttactactatgatatttctttgtgcattcttgatactaatccactaactcatgtataataaccatcattctctcctaacacttaccatttgctctattattta

SEQ ID NO: 154932 - DNA, 159 bp, Arabidopsis thaliana landsberg
atgaaaccaagttcttaccctaaaggtaaaaataatgaatcttcacacagagagaagaaacaaagtgttgtgactcaactatggacaggtaacggagaatgtcccaaaaacagtattccgatcagaagaacgagaagaaaagaaattttgcgaaccgaa

SEQ ID NO: 154933 - DNA, 1839 bp, Arabidopsis thaliana landsberg
atgtcagcattagcccagcacttgttcttcgcctttccatcgaagaaacgaggtctctcttctccgttagattttacattggaacgtgacggcgatgaaggtggcgacggaggaggaacggcggcggcggtggtggagttagtaaaggaggcggagaaagatgaccccatcgcattgccgtcctctctctctagaattttgggtttttgaaccgggaaggtaaattaaattcggttcaagtaaacatagaccgaaccgggtaattttggcttcttgttaaattagaccggaattttgcattttccttctctttttggcaactcttgacgcctgaaaaatcttttgatcggagattgctaaatcagacggcgaaagaaactccgtcgtcttcgtccatgacctccgtgtatatactcttctgcgggtttgtcattttcggttgaatttctttctgttttcatttgagtcttgtttcaatcgcatgattccaccttcgagtaacttatactccatagatagtcctgaaattagtatctactgttgggtgagtgtgtgcgtctgtgtgtggtgtttcgtgaagagtcttggataaactcagcgtactctatttctgttagtataagtaggctaattgaattttagaactatactttaggtggtcttagttcaagtacattgcagacaaacttgaagaacgtttttcaaaatcgaccatgacatgaattcgttccatgatgcttcttcttcaccatcattcttcatactgtttctctcaatttctatctgtttcaggatatacttgctcatcagattttatagaggtctgtcagtttgttgtgtgctaaatctgttagctttatgttgttaatatcatcagtgctactaaatgttttgcagatagactacgcctttaagctgttaagaaatctcgtatatagagaaggactatgacacctggcaatgatgaaacagcagtaagttgttactgcagcatactgaaaaagaatgaacatttattctgtttatatgaaaacgaattgcttggtttaatggttccatgtttgcagcatgttatagaggagcttgaaaacgaaaatgttgtggaagattttgcaaatataacttcgcctgctgggaagtcgtttcttatggtcagttgactaaacgagctctttaccatctccaattccatttcctgaatttgggtatatgatttcttttggatccaacttgttattacatataatatttcgtagaggtttcaacgtgaagtttgatgccattttacgttgtaagactatgcatttcatttccaaaccaaggctgatataggtataataagcctctgagtagattgtttacagttgcgtatacatggttggctcttctttgatatgtaagcatagagtcacttaagtttgtagagatatcaagcatcatgcttttgatacctctctggcaaaatatccaagcaatctggcatgaatattcatatgttgaagattcgaaaggtttttatttttcatttaataagatgcttaatgttggcatgcatataaaacatattgctccgcattaaatatatttaattacaaccaggtttctccattatccaatttaatattctttaatgatttttaaaagaggctcttcagattgtccaagtccatcatctactagtcttccatcaggatcctgccattaatctcaagtttcagagcggtgtagttcagagaggtagagagtgtgggatctacacattctgtaagtaacataaatacagtcttcaccgattatagttataagttataccgttctgtattcaaattcctcttgttt

SEQ ID NO: 154934 - DNA, 64 bp, Arabidopsis thaliana landsberg
aggaaaatgtcaaacatttcccgaatcttctccatctccaactctcaacatttcagcgactatg

SEQ ID NO: 154935 - DNA, 147 bp, Arabidopsis thaliana landsberg
tatatgtgtgaagagtgatataacacacatcttaatgaaatatcatgtatgcatgttctgtttggtttaaaacgtgctaagactctaattttaacacaaaggaaaagaagatgatacacaatttagcaacaatatcacatgatgagt

SEQ ID NO: 154936 - DNA, 351 bp, Arabidopsis thaliana landsberg
aactcagcttcttcttcagacaccattgatatcctctaaattgttccccgtcgtagaaactttaggtaatcgttgccgtcgagctgatatttgtgaaggggaaaccctaattcgataagggattgtaaagttgcacaagtttgcttatccccagaacctgctctgcaacacaacaatgggaaaaaaaggagggactttgaagagaagtagcaaaagcacaaaaactcgcaaagatatcgtcgaagaccaatacgatgacgagattgacgcctgtaaacttctaaacacttagaaaaatatgtcctttcttttgtttcctaaagcttaattggttattgggatgtatatgtc

SEQ ID NO: 154937 - DNA, 260 bp, Arabidopsis thaliana landsberg
ctgtcattactgaggcaacatcgagtacattcaccggaaaatggatgccggagctgaaattgatgtggttcggccggtggaggcagattcggcggcggaaattagtccggaacaagaccacgaaggaagatcggagccttcgtcgttgaaccaaggggagattttaaaaacacttgctacggtggagaaggattcgcaggcaatcgcggagagcttttcgtctctctttgtttccctccgatcaactctttctgaggtta

SEQ ID NO: 154938 - DNA, 104 bp, Arabidopsis thaliana landsberg
gctttgtaggttaaaagcccaaactggtgaatttattccttgaagaagaaaggggaaatttgggaaatgaagaagatgatttagtatcataattgatttggtgt

SEQ ID NO: 154939 - DNA, 624 bp, Arabidopsis thaliana landsberg; identical to SEQ ID NO: 5123

SEQ ID NO: 154940 - DNA, 199 bp, Arabidopsis thaliana landsberg
ttatatgtcataaacaaaaactctcttttatatttgtctgtttcgattaaagatacaaattaaaagatgaccacttaaaacccctcttttctcttccctactaaaatcttgtttttttcataatgataaataatgactcagggtttataataatgttatgactatgtcacatgtatagaatagtaaataaaaaagggct

SEQ ID NO: 154941 - DNA, 618 bp, Arabidopsis thaliana landsberg
ctatttgacataacaacgattttccccagctgacaagtcgtcctgggtctgctggtggcactcaaggacatctaggtagtcggtttatctgaagatcttttgaaattcatatacttaatataacataagtttttgaaaagattttccaaatcatgtcttgtttcctcatactcttgcggtggtgtttttaggctctttgaggaaacaaggtttaggagttccacttgtccaacacaaccaggagttcagcatccaaaatgaagactttcctgcccttcctggatataaaggagctggtcttttattgtcgatcactttgtattgtattgtgcataaagctgggtcttgcagactttatgtgcacgtagtgaggaatatcgtctctagtttcccctatcttgaaaagttttcctctatgctattctccaaaatctcatgaaagtccgtttccaagttcataaacttcttagcttccttcatattatagcttattgcatgagaaagatgataagatgtgcttcttaatgatgtaagctaaacctgctggatcattcacaagcgtagtagatttgttgcaggtggtaattctgagtatcctatggatttgcatcaaaaaga

SEQ ID NO: 154942 - DNA, 122 bp, Arabidopsis thaliana landsberg
aacgtcatcgtttcatgttgtcttcaacctcacccacactttcttcggtctcatccttttataaaatccccatttcctctgacgatttttcgcctctctctctctctctctctctctttctt

SEQ ID NO: 154943 - DNA, 132 bp, Arabidopsis thaliana landsberg
gagacagacgctagacaaaacatagtaccaaacttcttgtcttttgtcttctatctccaccatggaaaccaagaagtcaaacaagatcagagagatcgttaagcttcaacagcttctcgagaaatgacgaaa

SEQ ID NO: 154944 - DNA, 565 bp, Arabidopsis thaliana landsberg
ggtatgattccagaatttatgtatacaacttttctcaaagccaaaagatacaaatactactaagaaacattgtcaattgaatttgataagcaagccttaaaggcgtgaaagaaccaacttttttactgaactatattcaagtgatgcttttcttttcttttctgacttgtttaagcgattgccgatttgattgtctcagtttcttcaggacgccaccatgacttttcaattgaaagcaagccttcattgtctttggactgcgtcattttaaccttccatttcatagatttcaccattttctcaacttctcctaatgtttccatgtcatcccttatgatgaaagttccttgtggcctaagaatccgatcaatctcagccattaccgacaccaaattgcacctgtaatggaaaatatgaaaaatggtttgattcattaactcagatcagatcatcaagctctgcatttgaaaacaaggagaaccagtgattgttttatacctcttcctcagggtagagaaaagatgatcggcatggagaaggtcgtaagttctgggataagtgttga

SEQ ID NO: 154945 - DNA, 726 bp, Arabidopsis thaliana landsberg
aatggtcgagacatgttttccttaatgtccaattttcttaacgatctgacttgtgttgtctcagtcaaagatcttgattctacgaagtgaaaacatgagttatcgccctgttttctttagaaaggttagttaaactaacaagacacagttcacctttgtccatacactggttacatgatcggcaagcttgagtcttggttgagttttgacaggaggacttggaaaaatctctaatacgagcgtccagccaacagaaccgacttaaccctgctctgaaaccaggcgatattcaggttccttgttatttaactttagtctccctatttcttgtcaatccataattctgtcatctcatattgacattcatgattttgtatttcaaaggttgcagttttcgaagatattgtcaagggaatgagggtaaacaatcaaacatgattctgtaatgcattttcctttaagaatgattggttttgctgaacctgttttcccgggcgaaattgcaggaaagcacgacgtcaaactgggacgacattgtgtttataccgcctggttttgaggtttcaactgagcaaacacaggagtaagtgaaatccttggagcatcgtaaaacctcaacacaatgcttctcccttttcatattcctatctcatcattcaacaacttgatgaacacagcgagttggaaatagcgttgatgatgttaactccattaacatccttctcc

SEQ ID NO: 154946 - DNA, 497 bp, Arabidopsis thaliana landsberg
caaacttcgccttagcgcaagaccgagctcctcacgggttggcttatgagaccccagtggcattttcaccttctgcatttgacttctttcacacacaaccagaaaacccggatcccactttcaacccttgctcggaatccggctgctcacctcttcccgttgctgcaaaggtccaaggagcttctgcgaaagcacaggaaagcgatatagtatcaatttcaactggtacaagaagcggaatagaagaacatggtgtggttggaatcatctttggacttgcgtttgcggtgatgatgtgaaccattatagatcattttagcaagactttgagtttgaatgtgtgcatttttcttcacttttttcttgaagcagagtattcaagtgatcaagtctttatcgccaaggctgtgtttgaagggttaagtttgagtcccaaactatataaaacttttggagatccaatttagttaaagtgtgtaatatagagtctatgtagt

SEQ ID NO: 154947 - DNA, 316 bp, Arabidopsis thaliana landsberg
atcgcaagcgaacttggctctgaagggaggggtctaccatcgctgatcaggccgataggaactcttatatctatcattataaatttatcacattcaatgtttgcataagacatcttggaaactatagaaatccatacagcttagttcgcggattttataatttcttttaccttagaaatgtcccagtattacaacttgaacacttaactttttattgaactacattacataccacgcaaaaaaaggcaaaaacatgtgtgttcactttatcatatggatcactcgctgcactgcctcctactaattgacttaagcg

SEQ ID NO: 154948 - DNA, 341 bp, Arabidopsis thaliana landsberg
cttttaataaaaaagagcacgaagaacatgcgtcggactctctctcttccttgaattcattcaattggccacggcgacaaaacagggagccgattcagcaaaactgatacatctttttttatattctggattcttagggttctttttcggggaatttaggtaatttgtttgtccattttggtggggtatgggagatttaaaatttgtttttctatgcgtcggattctcaaaaatctgattttgaggagaaaatctcggtggaagagacttgcaaaaaatattctctactggtaaaaatatattcttctcaattctcattttcagttggtggagtttgattc

SEQ ID NO: 154949 - DNA, 409 bp, Arabidopsis thaliana landsberg
taatacattttttgatattttatttttcatttatataaaatataattatgattacataacaagaagatacatacttgccaactaaaaattaagatttgtcgagaaatttcctgaataattatgtcagagatattctccgggtaaaaaaaaaagcaattacatataacccgggatatttttttttaattattatttggataatttatttgacagatacctaaactacgacgtcgtatgtacttgagttggttctgggtccgtttggtctgattcgtgcacaagctcgacgaagaaaggcctgagtgtatctgtccataaatctcgtccagatgcagcggctctttgtctcttcctcacctctatcataaccagctcgtccgttagctggtttatctcaaccaccattgcg

SEQ ID NO: 154950 - DNA, 420 bp, Arabidopsis thaliana landsberg
gaattggccgtcggatttgcccgaggcttggaacgacaaattggtgttcacggtggtgatgaagaatccgttgacataaaaaaatgttttcgatcgtatcatcatcttcttcttcaccactcgtcaactcaactctcaatttccaaaattcgccgaaatctccggtctccgttatgtcgacgacgtctaaattcaaaaatctcacggagaatttcaccgtgagagtgcttaaagcagagaatcgcgaactaaacgtgcctctgctctcacctttcactatcgcttcttcacggcttgaatcagtcagtaatgttgcgattcggattgagctcagcgatggatttgtgggttggggagaagctccgattttgccgtcggtaacggaggaggatcagataacggctatggtaaaagcgcggg

SEQ ID NO: 154951 - DNA, 288 bp, Arabidopsis thaliana landsberg
gtatttgccatccaaagtgtttgtttctactagggatcaatctctcattttcactcctagaaaatgtactagtgttacaagttacaaatgcaataaagcagcaagctttacgggatatggactgaacacatacggttaagcttaaccagttctacaactacaacatgcactcgatgtcccgatgttgtttcgttcgtcctcttccatttccttaaagccctctccatcttgatcactttgctgctcttggccatcatctatgttgtttactggctgagattccggttg

SEQ ID NO: 154952 - DNA, 249 bp, Arabidopsis thaliana landsberg
cggtggtgtttatgtataccagcagcaggctggatatccagctggaagcggtggttatccgccacgtggtgcatacccacagcagggaggttaccctggatatccgcctcagcaacagggtggatacctgggttatccgccacagggtccatatggttacccgcatcaaggttatcctccgcagggtccattcggttacccgcaacagcaagctcatggtaaaccgcataaaccgaagaagcatggtaa

SEQ ID NO: 154953 - DNA, 227 bp, Arabidopsis thaliana landsberg
cctgggtataagtttatttacatgggccaatatcatccaaagagtagagagcttaatattattttcataggcccactttatatgatagaatcttaaaaaaaaaaagccctacccgaaacccaaaatgggtcaagattctgaaacatcaaacatcaaagggtgaagtaatagtaaccgaggaagggtttgatgtggattgaccaagcaacaaatgattcttcatttct

SEQ ID NO: 154954 - DNA, 212 bp, Arabidopsis thaliana landsberg
aaattttctctcgaaaaagtcgatatccatggcttctcgcagtctcgtatcacagtgaatccaggagcttagattatcatagatcataggcattgattcttctcttctgagaatctcgttgcacatactcaaatatggaattcacggaggcttacaagcaaacaggtccttgttgtttctccccaagactctcgttacgtcgccgtcgccaa

SEQ ID NO: 154955 - DNA, 469 bp, Arabidopsis thaliana landsberg
aagatggcgaataatcctccgcagtcttctggtacccaggtttgctctctcttttagttcgtttcatgcttctatggaactcgaagtcactcaattgatttgttctaagtaatttgatcaatgtcaagcgtattagggttctttgatcttagtctctttcattgttgaatagcttggagcattcactcaattgatatgttgtcgcgcctaactgtcagaatcaaacattcaatagctgttatttcgtgaaaattttgttttagtgtatgattcatagtaatagttagtgtgtcaactattggatgtgcttatgagacctttttccagcagtttcggccgatggtacctggacagcagggtcagcattttgttcctgcaggttcacaaacctttcacccctatggacatgtaccttcaaatgttcaaagtcagcctccacagtattctcagccgatacagcagcagcagc

SEQ ID NO: 154956 - DNA, 66 bp, Arabidopsis thaliana landsberg
ctcatcgaaatgtcgtctcaagaaacgaaatcagatcaaagagaaggagcagagatctgcaatggc

SEQ ID NO: 154957 - DNA, 86 bp, Arabidopsis thaliana landsberg
tgcggattgcatatcagagcttggtctttcttttatatgaactggtcctattgcctcactcatcccacaactggataccttccatt

SEQ ID NO: 154958 - DNA, 587 bp, Arabidopsis thaliana landsberg
ccgatcatcaaattagttatcttcagctcaaattggatttggtttggtattacacccacaccagaccaaattgaaccaacacacaaaggctttacatgcagaggcagtagaagcatttaagccaaaatagcataaagagacagaaagtcaccatcacaaaacaactaagattgtgtccccatgtatacaaaaaagaaagggactctgctcataaccaaaatagaagacaaactgtaatatatcattcacttcctgcatctccaagctgataccgagtatagaggtcgatcttgccagcaaattactgcgcacccgctctcttccttgattctatacccatcaaaaccgcacccttgaagcaatctcctagcctgcaacatcgcataatagctaagaggaacattcccaaaaccagccaaatcgatcctctggctccatttctcaagcttctcgtgtctttctcttctctcaaatccctcgcaggatatgatgttcttgatctcctccccgaagagcatcttctccactttgatcctatcttgagacgttcttggaacttttgtttccaagcaatcaaacaatgctgc

SEQ ID NO: 154959 - DNA, 65 bp, Arabidopsis thaliana landsberg
tgcagctgagtttcttggaattatggtcttctctgtttttttcctttgggctatctatgcttata

SEQ ID NO: 154960 - DNA, 832 bp, Arabidopsis thaliana landsberg
ttctgcagatattgaggacaggagattctaacaaacttgagctaaacgtcaagtttcctttactaggtatgcatttgctctatattgtataatctctcaaatttcacattctcttagactaagaattagatatgatggtcttgtttaatagcgtccaaggctgatctactgtcttcttcacatagaatgataactaaactctcataagcatccaaattttgtgtttgagtttcccatcttatgagagaactatgtgtctaaggcttcttagctttcttgctattatggagttgcttgtgtgattctattcctgaggagattgttactcggtttgatggtaataggtgctctgagttttaatgcaatttcaagacaacaactgaaagacaggaaaacagttttgtctttcaatacaccaaatagataactaggacctgtccagatcactgtatagcgtcatagtagtattgcaattggttcttgttgattaatgtgttatactcaagatttggccttgctaccttctttgctttcttctgagaacgtttaggtacaaagctaagctaagagttctttatttttaagaacaccaaatattcaaaagcttgatcacttgcatatagtaccacaaatgttccatgtttacttaacactgtatgttaccaagagtatatgttaccactcttgccgcataagtcttgattgttttctatcctctccagtttccacagagaaatcatggggttctggacactaatggaaggattgctactatttgcaaacgcactggctatcttaaacgaagaccgttttctagctcccaaaggatgga

SEQ ID NO: 154961 - DNA, 119 bp, Arabidopsis thaliana landsberg
ttcgtgtaggaaagaaggtatctgttgaaggaatttcctgaattagtttcttgtggagagaactcaaaacttttggaaattggttgtggtaatggcagtaccgtgcttccaattttccg

SEQ ID NO: 154962 - DNA, 595 bp, Arabidopsis thaliana landsberg
tattgaaacattgaaagtttcgatttatttcagatactgtatataacacactagatattacattaagcttcaatgtagttacaccaattaactggtgttaccagttacggatggcatttggttttgtggaatcggttgttcgttccttactcttcttgatgatgagaacaagttagcactgaagctggtatagaactgtcttccacttctagtagcattgttaataccatcgcaaagtgataagcttcctccaattgaaaacgatcttctcacgttttctactcttcctgagccacagtagtttgccaaatcactttgtgcccttggaagaaaaatgttatggtttcttctagatctggaactgtcttgtcttccacggaggtcattgctcgattcagaatctggttgatgattcgtctctgtttcttgatgaggtggttcagtgataagaagtacaggggcacgacataaaggacagttcttgtgagagagcaaccaagtgtcgatgcaatttagatgaaaggcatggctacactttggtaacagtctcagcgactcgtcttcttcaaactcgtttaagcagacagagcattct

SEQ ID NO: 154963 - DNA, 121 bp, Arabidopsis thaliana landsberg
ggacaattacgacgacagcaaaaaaaaaaatatgtgtggacacacaatgacaaactcacattgaactatcttaaaataaatttatactaaatcgtagcgaatatataatcagtaaatagaa

SEQ ID NO: 154964 - DNA, 748 bp, Arabidopsis thaliana landsberg
accacaatattagtttgatactaaataagtaaactcttagagaggtaagtatatataaccaactactactagagaggtaaacaaaacattccttctaaaaactttggatatccaagaacctcgcgtcggaaacaagtggcatctggatgtgctgaacttggaattcgaattcccaagatcgtgatgcgtatggcttggttttaacggaagtggggccaaattttcaacgtaagaagatataacattaatgttagaggagagacaacgaatctcatctgtacctgaataatatttgaacagcctcttgtgattatcatagaagagaagattcccttgcttagaaacccacacgggagtgaaccaccttttctgccatggccaggaaaaaccaactccatgggctaaacttatggagtaactcttgctccacgagtaacccttgctccatccttttccttctatatccatgctccagatctctagtatccattcaggcccaacgttggtggtcatggccatggctagacggtcctcaaggttcactaactggtttcctgcgtgacccacgtagccggaaggtggtggacaccatgatagctttcttcgtgaagatccatagctaatattatgtaacccgcactaatttgtaaccagtagattgatccattcacacacaccgatttacttcccggaagcatattatgaggaggtgacctcagtttgctccatacaccagtttcaatatcaa

SEQ ID NO: 154965 - DNA, 688 bp, Arabidopsis thaliana landsberg
  unsure (1)..(688): unsure at all n locations
tttttaggaaaaacgttaaactcataacaataactctaagctattatcattcaaattaatacattacatatgatatatcaaaccacattctctcatgtttcactttataaccaataaatcaaatattagcagcagaagaagaagaagcttcctctaacttcattctgcgccgagtttgcatcggtaggaatctgatctttgtctctaacagtcatcaatgagcaagttcccggcgattctggtggcaagaccgtgttttccgacgagaaaacacgtttaatggccggaggaacaagctcagttgatgagattgtggagaggcaacgtagaagcatttgaataatctctgtgaagtttggtcgatcgtttggatcctctttccagcaagatgttacaatcattgctaaatcctttggtaaatcgtctgcgcttggcctcacgttctaacccgaaatattataaagcagacaacaatcagaaaaacattgtccggttggagaaccaaatggttgaaacacttgaaaatcaagaatgaaaccttgaatgcagcagcgtaagcggcttggagatttgacatgccttcaaaaggtaatttgttgtggataagctcccacaagacaannnnnnnnnnnnnnnnnnnnnnnnnnnnnttatagtgttttttctcaccatgcctcaacgtgaccgt

SEQ ID NO: 154966 - DNA, 134 bp, Arabidopsis thaliana landsberg
atcattagtagatctgccatatcctctataattgaattttaaatatcactataagcaattctgtagatatacgtattcttttagattatataatatttgatatgaaattttgaatattataatttaattgattg

SEQ ID NO: 154967 - DNA, 324 bp, Arabidopsis thaliana landsberg
cagaagaagttgaagcaccagaaccaacacccgtcaatccatcatcagtaccatcatcttctccttccactgacacatctattccaccaccggaaaacaacgacgatgatgatgatggggatttcgtcctaccaccacacattggattccaatatgcatcgccaccaccaccaatgttccaaggatattaaaaccaatgtagtagtgacagtgttacccatttttaacatttctgtccattttttccatgttaattatttgtatcaaacgaaaaagatattacaaagatgaaaaattaaaatgccaataattatatagtagatt

SEQ ID NO: 154968 - DNA, 116 bp, Arabidopsis thaliana landsberg
ttccagtttttattcttggtaccattgcctgtaacgtaggcttagcggttttagaaccatcaatgattggtgaacctgcggatccttttgcaactactttggaaatattacctgaa

SEQ ID NO: 154969 - DNA, 548 bp, Arabidopsis thaliana landsberg
gccgagtaatgcaacctgaaataaggttccaagtcgtccctgcagcattcagcagtcacttccccattcccgtcttcatggaacttctacatcatcaccttatcataaccggttaattcagtaacttccttaaccaaagcatcacacatcaacaatatattcacactaggcattgcctgcaatcttgaaatcgattcagccgcaagcttatacgatcttaaagccccggcagcagtcacaggcacctcatccggactcacaggctccaaatcaataacaagaccttcctcaatccgatgcagaatcgcataaaaaggcttacttgaagacctacaatgaagcgtgataggattcaaaatactaatctcaccaaagtcaacagctttctgcaaagcagaacaacctggagacagaaacaatgatttcacatcagttcctatagtcaaagcttcacgctgctccatacttggtactgtatgtggaatcaaacccaacatctcttgagtgttttcactaaaggcaatgactttaaggggggatcctctaga

SEQ ID NO: 154970 - DNA, 98 bp, Arabidopsis thaliana landsberg
aagctctagatagagagagagagagagagacaaagtaacaaagagaaagagagagaaatatggaagagacaaaatcgagattcaagaagatctgtgtc

SEQ ID NO: 154971 - DNA, 133 bp, Arabidopsis thaliana landsberg
ctcctaactcccatgcaagacgcaaccaccagagaaagcgtcctcttttaaatttttctgagcctgagccgcatcgccgccgtaaatggtggcggttttgccgagatgacgatgacgacgccgccggaaatgg

SEQ ID NO: 154972 - DNA, 277 bp, Arabidopsis thaliana landsberg
cggccggatactgaacttatcattagttttgttagaatgggagtatgattaggccattcattacagtttatgattaggggcatgcgtatcccttgagctttggagtaagaaaatggggaaatggtatagatgtgaatgaagtataatttttccttcggtatcatatcaccatcatttgtccgtccattctagcccaatctctggcaggcgtctaatgttacgaccttacgtttgcatttttggctgctggctcttaaaagcgtgtgcagtaagactt

SEQ ID NO: 154973 - DNA, 463 bp, Arabidopsis thaliana landsberg
ctctttcaaacaatgctttacttagtgcacaagcaacagtgcttttccctgaaccactgagaccagtgatccaaacgacacaacccttttgttgaagaagttgttgtctgtcgcatctgcatatcgaactctcgtgccacacgatgttctctgctttctcttttccgttatttcttccctctttcagtatagtttctgcgcaaacacaaagttaaagagattgtaaaaatggtcagaaaaaaacaacaacacgatttgtggagatgcttaaacgtaaattgctttttctgaaatgtgaacgatctgctatatgacgaaacagagagagatgggagaacctgaaagggcgggaaaatcagcggtgagggaagcttgagcagagacgttaacggctgagattggatgaaggaagtagaatcgctactattttcggctgtccgcggaatagagacgcaggcacttg

SEQ ID NO: 154974 - DNA, 223 bp, Arabidopsis thaliana landsberg
ttataaatacgttagtgcgttatatgaaaacaatagaagtctatgtatagtatgaaatgtagcatgaccgggttattaattaccttggggacaatttagcaaaacaacaaaccaaaagacgagtttgtgagttataggaagtcgtccgcttacgacgttgtccatcttgattcttataaactcttgtcggaatccatggtcgtccgggtaatttgtgaaccct

SEQ ID NO: 154975 - DNA, 165 bp, Arabidopsis thaliana landsberg
agattatataaaaccaaaaatgttatgtggtatgtataatgttactatttataaaattaaactataaaatatggatgtgttagagaatgatacaatttgtaaaacttttatatatgaaaaataattattaaattttaaaaaattactacttaaaaaaaaaatcac

SEQ ID NO: 154976 - DNA, 174 bp, Arabidopsis thaliana landsberg
actcatcttccgatgttcgtgctcctctcatccctaatcatcctcccgataattccgatcctgatcccaccaccgcgatcaagtccgtctgatcgatcttgagttttgtttgttgatttgctatccttttgtaaaagtttgccaatttcagttgatttgtggttgatttgtggt

SEQ ID NO: 154977 - DNA, 358 bp, Arabidopsis thaliana landsberg
tgtttccaatttcttcagcctcaagtaaaaaaattagggatagcctcattaaaaaaatcgcggttttttgttgttgtcttatccatttatccatcttatctgaaatttgaaccagaaagacagaggaaaccaatccaaagatctttctcaatctattatcttcatacaaatatagtgatttacatatattccaggggatatgtatatgtgtagaagaaagagaaaaaactcttggggtcatagcaattcctttttttgtacattgtaaaatcaaacttcttgggtcgtaacaattattttcttcacaaattacaactacacttgtattaatggagatgccttttggcctggtatcaac

SEQ ID NO: 154978 - DNA, 63 bp, Arabidopsis thaliana landsberg
catcgccgacactttaagaaaaattaaagaaaagaaagtacactctctcaccaaacaaaataa

SEQ ID NO: 154979 - DNA, 324 bp, Arabidopsis thaliana landsberg
  unsure (1)..(324): unsure at all n locations
aataaaggtattcaacaaactcgagagtaaatgtactacacaacatataagctttcagaatattaaaaaatcactcacaccatcagaaaaaaacatgatgattcaaaaactgcatatgacagacaaataaaggaaaactattaactggaccatcctcttcactcattttctaggttccttttaannnnnnnnnnnnnnnnntgtaatctgttagaatcatagatcaaaacaaaacaaaatgctcttctatttccataaaaaaaaagtttcacactctagaagtgagtctttctatttgatcctatagatagcctactctcagat

SEQ ID NO: 154980 - DNA, 450 bp, Arabidopsis thaliana landsberg
  unsure (1)..(450): unsure at all n locations
tgtcttcaagcatttacataatcatgtttgttatacataagccaataggctgcagagtcagatctctgaatcaagtattcaatatacaaagccaatcatgattcagtaaactagctacacnnnnnnnnnnnnnnnnnnnnnggtaagagaagctctcaaatcgaagacaataaacaaatcaaagccagagttagcgattttaagctccgcgatgttgcagaaacaatcttcttcttttatcttgagctcataaacacctttgaaatgctgccatgcgactgaaaggtgctgctcatcaatatctatataaatgattatactcttcagtcttcgactcttcattcatatactctctttctctttagaagggcagggaatatggagatggatccaatgaggaacagcactgacaaggtcttgaaatcatacaaatcctttactgatctgaga

SEQ ID NO: 154981 - DNA, 305 bp, Arabidopsis thaliana landsberg
ccatcctaaatactttacatgaaaattaggattagcgcactcatcaaaaagccatccatgacttcagatcaattggggactagactaaacacagctttgttatataataagcaatagtctatagatttacatgacattaatcatggactcatagtaatatcagaccaatgatgtctatcacaaatcctgaaactcttcaaaccattcgtaccttaagtgaacatgacccccctagcttttgatgatttagtttctccataaagtaagttacaggcttggagatccttaggtaggttttaacgcgc

SEQ ID NO: 154982 - DNA, 578 bp, Arabidopsis thaliana landsberg
ccctcaacaacaacaacaccggagaaacttccgagggccaaaccgagatgtcagcttcgggcacaatgtcatgctcaacatcatcttcatcgctctcttccatcctcagcgccaaactgaggaaatgctgcaagtctccttccccatccctcacctgcctccgtcttgacacagccagctcccatatcggcgtctggcagaaacgggccggttcaaagtctgactccagctgggtcatgacggtggagctaggtcccgcaagctcctcccaagagactactagtaaagcttcacaagacgctattcttgctccgaccactgaagttgaaattggtggcagcagagaagaagtattggatgaggaagaaaaggttgctttgcaaatgatagaggagcttctcaatacaaactaaatcttatttgcttatatatatgtacctattttcattgctgatttacagccaaaataatcaattataccgtgtattttatagatgttttatattaaaaggttgttagctatatattgtttctctttttccacatttgtatctaataaagtattggtgtttgtaact

SEQ ID NO: 154983 - DNA, 151 bp, Arabidopsis thaliana landsberg
aaccggcggatcatcggtttcgaggttagactcgttccggaggattttgacaagggaaagatcttcgaacaggcgggatcattctcgcgttgaccaagatcgtgaattggatattgaaagacagtgaattcagtatatagtatatacacac

SEQ ID NO: 154984 - DNA, 419 bp, Arabidopsis thaliana landsberg
tgaagaacataatttgatgatcttaataattaagggttcttacaagaacgattttcccctaacattctggagtatattatatgtacaaaaatcacgatcataaatatctccagaaaactctacaaaaattaaaataatttcaaatctaatattccaacttttaagattccagattctgttacaaaaggaatcgaatcaaagatcttcccggagaaaaggatgagcaagaagctgcggcgccgtccacctctcactcgattctttacggagacaacagtcaacaaaactcctaaactcgtcggaacatccttccggcgcacgcggtggttctccaaagcacacgacgcacattaacgtcgcccagtcaggtctctgtccctgaggaagcaacggaaaatgtccgacgaagagctcaagta

SEQ ID NO: 154985 - DNA, 327 bp, Arabidopsis thaliana landsberg
cgccgtccgtgtctgtagagatcaatcatgctaaccgatcttcataacgatttggtagatgagatactgtgtgtctgtgtcgcgttccggcgaggaatctgaaacggttacgatctaccagcaaacgatggaaccgtttattcaaagatgataggagattcgcaagagagcacatgcataaagccccaaaggagtatctacctctcatgttgacaagcgagtacaggatctgtccggtgagcatcaatctccaaggagatgttccttctgtagtgttaaagagagagcttagcctacagatccggattatcacatcaattcgatata

SEQ ID NO: 154986 - DNA, 205 bp, Arabidopsis thaliana landsberg
gcaacgaccaagatggtgttgctgatgccatctaccgctacgcattctgagactccaccaccatatttaagtacaagatacaccaaattaaatttttgaggttaagtaggcattattcttcttctttgtcttacagataaaagacaaacattggtcattcttgtctcattcacccaccttttgaaggaaaatgattgattgcaga

SEQ ID NO: 154987 - DNA, 128 bp, Arabidopsis thaliana landsberg
catctatgtgaagacaataacgctcaactaatctggggaccaaaatagatggcgaaaatctaaataaaattcaaaattcttaaatgagaacaattgcatataagatgtatgattcataataatagagc

SEQ ID NO: 154988 - DNA, 192 bp, Arabidopsis thaliana landsberg
gaaactgaaccacacaggtcttacattactatgattccactgataaacattttgggttttaacctaacaaaattggtccaaaggatatatataatgatacatagtgaaggaaagagtcattgcctagatctggcctcagcccttcgagcctcttcacgtgtagttggaaacaactccacataccttgaccca

SEQ ID NO: 154989 - DNA, 246 bp, Arabidopsis thaliana landsberg
tgggaagcaaccgtgggagggaatggacgttatggggagggacgcgaataggaagcagcagcagcatcgggattgacagcaatgtcttccagatgatatttggaagcgatgcacggtctgggccgcgtttaacgttattgttttctttgttaatgatttcggttttgtcgttatcaactctattattgtgacgaatggataacaaataggatttggaccgttcaattgattggtttttggtgtaaa

SEQ ID NO: 154990 - DNA, 104 bp, Arabidopsis thaliana landsberg
atgcttgtagtggtggtgattgggaaaatgaagtgtaggagatttgagaagaagacgttagaaggtggtggtggtggtggacttggcggtggctttggtggtgg

SEQ ID NO: 154991 - DNA, 336 bp, Arabidopsis thaliana landsberg
caaaggctctcttcatgacggtgtagttggtacccggtggacccgacccgatcacgaaaggattgggcattttcaggccatttacagtgacactgagatcaggctccgattcggcggcggaagagatcttaagtccaactctagtcggcggtagaaaactccggcgagaggatggatcgaagtcagctgataaggtggttttagaggagagtccagagaagcgattcaaggcgaaactcatggaagccataattagagagatcaatctggaaaattggcagaagtgatcaaatcttgagacgtgaaactcaagaattatgagagagagaagacgac

SEQ ID NO: 154992 - DNA, 109 bp, Arabidopsis thaliana landsberg
cgggcaaacgagaatccagggaagtaatatcctgggtaaatttcaaataacatggcgcacaaatttgggtgaacctggtcgcttacaaacacaacaaagtctcggcgct

SEQ ID NO: 154993 - DNA, 159 bp, Arabidopsis thaliana landsberg
gctttagcttgcatctgtagtcatttgtcaaagagaattgaacagaggctttctatattcgtggtcaagggtttaggagattctgggttttggcgtgattttgaggggaaagattgaaactttccccgtgaatggtaagacagtgagaaatgtgtgggt

SEQ ID NO: 154994 - DNA, 103 bp, Arabidopsis thaliana landsberg
actaaatatcacctatttttcttaattatagtgtaaaacatgaaacgttgcagtaacaacacatgttagtgatgcgtaaagaagagagatgtgcaatccataa

SEQ ID NO: 154995 - DNA, 807 bp, Arabidopsis thaliana landsberg
tgacataccaaactagtgaactacaacgtgtttcatgttatttatttggttatatagttaagcccattaattgtccctagcccctaggcccattatcaacctatcgtcgaagtttgatggaattttttacagagctcgacggaatgttgcaaccccagcggcgagtgtttccgattccgttcaggtacgttactatatatataagaatctctaaattcgttgaattatccgaatttgtttgttcatggtgatgttgtgaaccgaacacgaaagaattgcataggcttattattgtattaatttgaaaaacgagagagaattggtgtttggcttagttaaattcacattgctaaaccaaatcatctcatacaatgcttacatattcgttaaattcagcatctttgactaatttttccactacctgaggcagtaaacaagcctgaaaatcaagacttgcttctccaattcctttgaaaacaacgagtcttccattgagatacggtggtccagctcttgcagctatcggtttaccccaaccgaaatcattacagtacacatcgaaccggtgagagtttgtgacaactaaatctttgctaccaacagaaaccggaatcttgatatttttcacccaattctctgcaaatgctttggctttttcatcagtttgtgacagctccatgttgttgatttgcattgcagcccagcctagtccatggtccagcagctctccaaccgtgaccgtagctatcccggtttggcttacattcccaaaacactcttcttctagtggcggatttagccgttgcc

SEQ ID NO: 154996 - DNA, 174 bp, Arabidopsis thaliana landsberg
tacaacaacaaaaccataggtccatatcaataatttatttcgtttaaataacaatgtgaaatattcgcaaacgcaatgatcaaacaagattcattcacactgcttaacaacggctgaggtaagtctcgtgaacaagttgtgcggttaagagatctacggtacccgaaccggcgg

SEQ ID NO: 154997 - DNA, 76 bp, Arabidopsis thaliana landsberg
agattcgtatttaccattcgcgacaaaatttcatagtactcatcttcgcagaatctttagataacgagcttttgaa

SEQ ID NO: 154998 - DNA, 176 bp, Arabidopsis thaliana landsberg
tcaactaataaactctggagccgtaaaccagacgtcaaaaccgggaaatcagaatttccggttaccagattcctccgtacacaaatcgataacatcaagacaacaaccgtcggtcccggaatcggcggcggcattggctgcggcgctggaatcggcattggtctctccggcgggct

SEQ ID NO: 154999 - DNA, 91 bp, Arabidopsis thaliana landsberg
cacaaatctgtttcgcatttaaaaagtccaaaccatatgtccaatggaaaagggaaggatactgttctgtttataaaggaaaaggtaacgc

SEQ ID NO: 155000 - DNA, 393 bp, Arabidopsis thaliana landsberg
ctttttggttaattggtattatcggattttgattataatgactgggaatcttcaaaatgctcgaatcgccgttgactccttgtccatatggtaattaagtcgttttaatgacctttattttgtttatgttgatatgtttaattaaaagtactaaaatagaaagaaaagtcatcaatcatatataaatcttatcgcattgtttctcacgtctgctttttgggttgttgcggaaaggttatagttgttttcttgtttttatcttctattgataaatgaatatattactccggtttagatgtatgattaattttagaacaaaacttttggcagcatggcgataaatggttgggagatgatgatacctctcgctttcttcgccggaaccgggtaacg

SEQ ID NO: 155001 - DNA, 69 bp, Arabidopsis thaliana landsberg
agctgtcagttcttctcccttggcttcagccttctcaagcaaggaagctttctcagaaagttgaacctg

SEQ ID NO: 155002 - DNA, 671 bp, Arabidopsis thaliana landsberg; identical to SEQ ID NO: 67307

SEQ ID NO: 155003 - DNA, 869 bp, Arabidopsis thaliana landsberg
  unsure (1)..(869): unsure at all n locations
ataacaatgggtgcatttatgggactactactactatttaaaaatataaatagtttttctttagtctaccactcctcgnnatcagactaggctacatccattgaaccataataaaattaccgtggaaaaaacagtacaccgnnnnacttcctatataaacacaaagatccatgtgcccataaacatttactactagtctactactatcgtattttttttccttcgtctatgactacactacgttgtttaattttggaatcaaattaattagtagacgacgacttcaaacaataattatttaacatacacgttttgaacaactgtatgcaataattaaaaaatcaacaagaccaatcaaaatcattaacaaatgctgtaaaaaaaaccattaacaaatgtcatttaacatgtttctaagaatatttaatgaaaaaagtatagaccaaagctctagtgctctaaataaaatattaaaaataaataaataataaaagaaaaagaaaaaaaaaaaaaaaataaaaaaaaaaaaaataaaaaaaaaaaaaaagaaaagaaaaaaaaaaaaaaagaaataaaaaaattagaaaaatagaataaaaaaaagataaaaaaaaaaaaataaaaataaataaaaataataaaaaaataagaaataaaaaaaaaaataaaaaaaaatatggggggggggggggggggagggggaataaataaaataaatataatataagaaaaatgaaaaaaagaaaaaaaaataaaaaaaaaataataaatataaaaataataaaaaaaaaaataaaaaataaaaataaaaaaaaagtatattaaaattaaaaaaaaaaaagagaaaaaaaataaataaaaatatagat

SEQ ID NO: 155004 - DNA, 686 bp, Arabidopsis thaliana landsberg
ctaagtattttcaaattacattgtggatgatctttgaattttcaaagctaagttgaaagagtaaaactttgaattttcataaaggcattgtaggatcaatcaaatctggataagaagtaccacctctacagagattacagttccaaaaggctgaaacatgtcaagaagctgagcaatgtcgtagcttctagggatattacacacgtagagctcgcaaggtctcggtttctttactggttctgctttggagacgacactatctttattgggttctgcttctcctttaactacttcttcttctttttcttcatcgagaactgataattctgaagaagagaccttgatttgaagtggttgagctacaaagggacgagaaagagaagagtgatgaaaagaattggaagaagagaattgaagtttcagagattctaagtaagagtaagaagaagaagagattagggttttgtatttgggaattgcattgtgagacgatcgagaagaagaagataagggaattgcgaagcaagaggccgtcattatcgaaggaccagaaagtaaattatttgagatgaatgattaaaaaaaaaagaaatgaaatagaaattaatagaacaaatcgggtcgggtcatttaacccgttacaatcctgcttcgtattcgctacgtcagatgagacactctctttc

SEQ ID NO: 155005 - DNA, 290 bp, Arabidopsis thaliana landsberg
cttgactacattgtctatctccgagcacaagtggacgtcatgcgaaccgtcgcagccgtcgatttattcacccgaaacttaaccaacgatcgtaggaacaaataaatgtacatgcatcactcttgtgaatatgaagtagctaatgatttaaatgtaagtccatgtacatatataggataacactatcttatcatattacaattttcgaatgaattatcgatttactgctggtcatgtaaattatgggttaatttcttattattaatttgaagaccacttgattgttacta

SEQ ID NO: 155006 - DNA, 473 bp, Arabidopsis thaliana landsberg
tccccagtagctaccggcgccctatatgcagtcgctcgccatgtggtccgacccacgacacgtgcaccagacgtggcttccgtgtccaccacctcctcttcctccgtatccaccaccaccaccgctgtatccaccgccagatccgcgtccacctcctcttcctccaccgaaaccgcggcgtccgccagatgaaccaccaccgctgtttccttggacgggagcgccgtcgggtccagaaacatcgatggccttgggacggttgttgttgtcgatctcaacctcgaactctacggcttcttcggcagcgaggcgacggaaaccctcagatctgatggaggactggtgaacgaagagatcgtcgccaccgtcgtcaggagtgatgaagccgaaacccttctgggtatcaaaccacttgaaagaaacctttgcgcctctcaccaccgccgttgtctccgctcatttgagtggatctc

SEQ ID NO: 155007 - DNA, 226 bp, Arabidopsis thaliana landsberg
  unsure (1)..(226): unsure at all n locations
atctctctctntgtgtctctttttttttgggtgtaaactctctcttgtgtctctatttctattttcaattggaaactgattaagatcttttctcaatgaaatgaagtttaggccatagattattttttttaatcaacggtgatagccttttttgagtgtggcaatgtgaaatttgtaattatgctaattatattaaagaaaaaaataataatccatgtcctagttt

SEQ ID NO: 155008 - DNA, 147 bp, Arabidopsis thaliana landsberg
tatgtttacagctgtaaatataaaatcttattgaatcagttgaaaacaaagttccagtgaacgcagagagtttctttcctcagtaagaaaatgaaacttactacgacaatcagagagtcagcagaatgctgtaagaatcataaacat

SEQ ID NO: 155009 - DNA, 356 bp, Arabidopsis thaliana landsberg
gactaggttaacttgagagtctctgttgcggtggcacttagatttggttaatgaacttgttgtctagggttaatttattgagcatgtcaatcacctgtaaactgaggaaacgaaactactcaattaccccatccttgggaattctttatctgattgaattctttgtttactctactgttgtttactgcatcttgttatctgtcgcttaatttctgcaattctttcttgttactcgacctcgtactcgaccacccagttgtctggcaacagactgtgcagtcgagtatctgtgtttaattttctgtctgttactcgacctgtcactcgatctcacccagtgctctgcaaagagctgt

SEQ ID NO: 155010 - DNA, 283 bp, Arabidopsis thaliana landsberg
agtaccgtgggattcctctggagagatccagttgagcgtcgttgggaccgaaacctgcaccgtcacgagaggcttcgatgacttgaccatactctgcgaagttctccggagtagcttcgatcgggatcagtttcacctctaccggggatttcgccatcgttggaacacttgaactctcaccatcaccacagggaaaatggaagtgaagataagaattagcgtacgagctttttggagttttcctaaaattctcttcaagtctagattcagtaagaaaacacca

SEQ ID NO: 155011 - DNA, 108 bp, Arabidopsis thaliana landsberg
gcgcgtctattgctggttgaaaactatttccaaaccccctcctaggcctaagcttgtcttgggcctctgagaatttctggaagagctccctttggggtaaagctccac

SEQ ID NO: 155012 - DNA, 197 bp, Arabidopsis thaliana landsberg
ctcgagaaagatcttgaggacgccacgtgtctcctcgtagatgagaccactaatacgcttgactccacctctacgagccaatcttcgaatggcaggcttggtgattccttggatgttgtctctcagaaccttcctgtgacgcttcgctcctccctttcccaatccttttcctccctttcctcttcccgacatcactt

SEQ ID NO: 155013 - DNA, 420 bp, Arabidopsis thaliana landsberg
atttgggtcccatactgtcttcgcaacttggccctctctcttgcgttcagaaggttttgtcttttaagtttcttcttgattttggttttatcctttgttatttttagtctggtccgtattttctccgtatcttgtttcaaatacattctctcgtaaagaaaccgctttttttggtttagtactgaatgataaaagtattgttttcgtacgaaatttatgtcaaccgtcctagttctagaggatcacctagaccatatgcatgggacttggtcgagcttcgatgtggattagcccgagttatcaatagaatactgaaaattggcataattaactttgatttaatggaaatgcgtttttataatatactgaaaatttaacagacatgatgattgatgagtagtaaatttcaaatggcataac

SEQ ID NO: 155014 - DNA, 85 bp, Arabidopsis thaliana landsberg
aagcaaaaatgacagaactcaaatggatatgtatttcattctcactaacactcttgctaagcttagcagttgaagcagcctttaa

SEQ ID NO: 155015 - DNA, 750 bp, Arabidopsis thaliana landsberg
cattttacaggtacacttagaagacttatgaagaagacggcacattgaactcaacaacaatggtatcatcaacataatcacgaatcttatcattctgcaacttcatctgatcatccacagcctcaatttcacccaaatccctaaaatacgaaatcgatccaatagagaaacctttagatctccccggagaaaagttttctccgacagtaatctgatcaattccttcaaatttctccttcatcacttccataatctccaatttcgcttcttccatgacattctctttcaatttaagaagcgtgattttaccgattgaacaaggaggcggtgctagggtttccggagcttgatcggcgatccaatcaacggccatgatatcttcgcgaatcgattctgattccttgacaacaagaacgtgatcaggatgtatagcgtaagcgttgagatcttctttggatctgtaacggctatgaaggacgtgagtgaagtcggaggcggtggtggagctaaggcggtgtattgaaccgcagtagagatgaagcacttggtcgagattgactagttcgttgattccgttgaccatggagtttatctttccggagtcaacgtggtcctcgttgagcttgaagaggacgacgtgctcgacgattgaagacatggttacgacgacggagaagagattggattggtttcgtattttggctacttattttttaatttgaaataattttagagaaattgatatttatt

SEQ ID NO: 155016 - DNA, 507 bp, Arabidopsis thaliana landsberg
agcttgaactcaattcagataagaaacttcagatggttcaaaaggcaatcaaaagccaaagtaacaatgtgcagattctttaatactatacaatatttagggtaagcaaagactatcatgaacccttaagacagagagagatagttaacttgtgtgtgcagtcttgtgccttaacagccttcaaactcacaggagtgtagtcaaaagtattctaaaccccaaacctttctccaatttgctgaactcttaaaaagtctttcttcttcctgagtaatctagacctttgtgagagagactgagtgatgtaactgaaacctgagagatctcaattgccatctgggtttctgctggacccgccatttttggagcttcctttacctttcccaccgccttttgtcttgctagaaggtttagagttagctggtttgctgctagcagcttgtgaatccacatcagcaagaccattctccaaagctttcaccagattttcaaagaaggttttggtta

SEQ ID NO: 155017 - DNA, 300 bp, Arabidopsis thaliana landsberg
ttaaatttgtaagaaacatagaaaatgtttcttctttttatttgcacacatcaattttacaagtatatcaaatcaatatggcgagagagcatttacatatgcctgacgtcatattcttacgtcatttctccggcgaacagttacattccaccgtcacacacaagaaaacgaaaagatatttttttaaagaatctttttgtaattaattattcggtcagaaagagatcaaatcaaccgtcgccgatctcgtcttggtcaccggcgactgaggcaacctcgccgtgaaattaggaaaagaac

SEQ ID NO: 155018 - DNA, 327 bp, Arabidopsis thaliana landsberg
ctactctacactctgataagagaacaagaagagatggtgagattaccaaacagagacaatattgcggttaagctctcatgtcaaatgtttgtttctgtttcaaaatatgttgttgttcttctgaatgttgtaagtcaatgtctaaaacatgttgtatagatctgaaaactatggaacatatttgttaattattttgatttgatttttttttgtatttatctcttacaatattttgttaatgaggatttgtcactacaatttatctcttactttcatcaacaaagtattgtaataactaataaatagatacaaaaaaatctttctcac

SEQ ID NO: 155019 - DNA, 422 bp, Arabidopsis thaliana landsberg
agaaagaagatctaaatcaatttctgattcctcgtctcaacaccatctacgaaaccctccaggtaaattttcttcttatcggttttggttcttttcacacaattagattcgtaatttagacacaagattatgctacaaattttgcagttgttcgatggaacagcttctcctacagtggaaagagttaattggaacgatgttcttcagatgtctgatcacctctctaaacaagccaccataggtttttatttcacttgttataatttcttgattccttttgtgatttcctgttctcaattggtgcttgggactactcctaatagtgggaatgctatggactggagaatctccaaaagctgattcacttaaagagactatggagtcttacttcaatgcccttcaagggtttttactctgttgcc

SEQ ID NO: 155020 - DNA, 203 bp, Arabidopsis thaliana landsberg
gcgaattgtataaaatctaaactaaatgataatttgttattaaattagattaaagtttccaaattatctaataacatattaccaaaagaaataagtttacatatatataatttgaattaaaataacctaatatgttatggaaacgtttttaaatgatttccgaaaatattggatagttattaatttattgatttaattcgttt

SEQ ID NO: 155021 - DNA, 161 bp, Arabidopsis thaliana landsberg
catttttaacgtctagtggttggattgtacaggtggcgttaaaatgttgataatgcatatggaatataaataatagtggtgtggacaatattcatcccatgtgaccaccaaatgtgaatacgcaatcaaataatattatttatgatgactatgatttcaat

SEQ ID NO: 155022 - DNA, 125 bp, Arabidopsis thaliana landsberg
ccgtaagtatttgatcaaatgaatatgctcctagaggattgtatttaacaattagctatctttatttctggacattttttatgtttctttgttgtttttcctcctcaataaccatcaaagatact

SEQ ID NO: 155023 - DNA, 686 bp, Arabidopsis thaliana landsberg
actcgaatgattttagcagtgcacggttttccgacattcttggcccgttaagcgaagaccaagaagtggtattagaagaagggaaagagcggaattcgccaccacttgtgcttaagaacaagccgccgaggtggcatgaacagcttcagtgttggtgtttaaacttcaggggacgtgtaacagtcgcatcagttaagaactttcagctcattgcagcaaaccaaccacagcctcagcctcagcctcaaccgcaacctcaacccctaactcagccgcaaccgtctggtcagaccgatggtcccgacaagatcatattgcagtttgggaaagtgggaaaagacatgttcacgatggatttccggtatccgctctctgcgtttcaggctttcgctatctgtttgagcagtttcgacacaaaacttgcttgcgaataagtcaaaaactcagctttgtatgtaatgttatcagatttgctttggagattcttgttttgtggtgttttattttcaccgagaatctcataattagatttgtttcaagctttcattgcttatgctgtttattggtgcaaccaaaaagtttattcgagtttggtttttctccatagtttgatttgtattcataacggtcaaaaacataaaacgaaaataacaataaatcattaagaagcattggttattgaaata

SEQ ID NO: 155024 - DNA, 112 bp, Arabidopsis thaliana landsberg
taacgaaaaaatccatcagatctgctgccgtcgtccgagagtcatagttccccattgtagatccaccaacgaacctccatctgagagaactacctccgctcgtcgtcgactt

SEQ ID NO: 155025 - DNA, 388 bp, Arabidopsis thaliana landsberg
aaaaagtaatatcacaaatcaaaaactaaaacttgagaatgaactcagtgtgtatctccagctgcatcaatgatgcacatgaccctcgcgtgccggtgcgtcctgttcgtgcctcctacgtgaatctctataagtggccggagtccgacgccgagttcgtcaggtccgtacgtcgtggaggcggcctaccggcggcccgtgtagttgatagcatatcttgtcgacagatgtatctccgtagctacactttctctcgggaagacgacgagagcaaatcggagaaggtgtcgtcagggacgcagacgtcgtgtctagggagagttaagggaacagcgtcgtttcgacgtaagagtaaggaggaaaatggcatcatcatcgttgagagtac

SEQ ID NO: 155026 - DNA, 258 bp, Arabidopsis thaliana landsberg
aatggcgtgtgcaggggaaggtgtcccgccacagaaagtgcgagacatgttccatagtagccgatgggcaagtccactaggtattaggactaagcgtttgcagaaagcattttcaagctgatgaacggaggggttcagtacatcacagaattcgaacgctcttatttcctaatcgttattgaactcccggttcccctaatgatgatgatgccctcttaatgagtaaaaaaaaatgttttgattttggtccgggtaggt

SEQ ID NO: 155027 - DNA, 95 bp, Arabidopsis thaliana landsberg
aggctgttgttttgtaaaatatgcaacttcgaaagatgcggatagagccatcagagcactgcacaatcagatcactcttctggggtaattaccct

SEQ ID NO: 155028 - DNA, 240 bp, Arabidopsis thaliana landsberg
tcgtctgtaagaagataatagacaaagaaacttgccgtgttttataatctcagttttgtgtgtttggtgagagagcaagaccggtacacaacaaacacacaagctactacacagagagagaagtgagagatagagagaaaccaacgtcgtagatgatgactgatttctcttaccggtgacgggaatatataatcactgcggtgaagcttcaggttggtggtgtggattagatataagctc

SEQ ID NO: 155029 - DNA, 688 bp, Arabidopsis thaliana landsberg
gttgctttgcctcaaactcaaattttgaatctgatttcgaatctttacgcttaatcaattattcatctggattttcaaatccaatccttttcctccctggtaagaatctctcttcttcttcttcttctctctcacgacgattccactgttctccgattctgtgttagttcctgcgatattttccatcacttgttcgtgtttcgttattacgggtttgtgttttgtgaatttgttgacctttgtgtctccgtaatttcgtccaacggttgatgtttttgattgctgattagatttttgtcggtaggtattgaaaacgatgatctttatggattttgttttctgtttcttctttcctttttgtaatctgacttgcaagctttttgctttttttgtcggtcggtgttaaaaattgttccttttctcttgttcaattgtttcctcaggtgaccaagtaattggggattaacaaagggactggggctttattaagctcgaaacaattgttcttcactctggccgcttctgcaaagtcgtgtgcttctcgcacctctgcgcaggtgtggggtggccttgaagtggtgacttcactctgtcttccaaggatttctctagcttctatcatttggaggctccgtcgtgtttctgagggtcttacccttgattacggctaacatttactacgcccact

SEQ ID NO: 155030 - DNA, 570 bp, Arabidopsis thaliana landsberg
ttggcgagcttcctcaagagagagttcaagaacacgcttggcacgaggagtgaatgggatctcaacagcaacaaagccacttccccttccaataatcttctcaacctccacacgtgcatcttttaagttaatccccatggatttcaaaactttagcagcgattccagtaccctcaccaataagaccaagaagaatttgttcggttcccacaaaattgtggcctagtcttctagcttcctcctgagcaagcataataactttgatagctttctccgtaaatctttcaaacattgctttcaccgtaaaccggctagctttccccttgggcacattcattgcctgtcgcaccttcgaatgaaaatcttgacgactttttccaagagtgtctaaagcattgttaccgcgtaatcccataaacccttgcattcttaaaccagacacttgtaactgactacacatcattttcaccgatcttctcgatcttccagatccacgtgaaggaacattcctctggtaacaagctaaagacggtggagtcgattgagccaacacccttgtggccatagccat

SEQ ID NO: 155031 - DNA, 253 bp, Arabidopsis thaliana landsberg
tgttgaaacgaacctactgaattaccccatccttaggaattctttatctgattgatttattatttactctactgctgtgtactgcatcctgtcatctgttgcttagtttctgcaattctttactgttactcgacctgatactcgaccacccagttgtctggcaacagactgtgcagtcgagtatcactgttacattatctgtatgttactcgacctgtcactcgaccacacccagtgctctgcaacgagctgt

SEQ ID NO: 155032 - DNA, 211 bp, Arabidopsis thaliana landsberg
caaaaaaaacatataattctctctttatttaaagcttttgatgatgaatcccaatttgctagtaaggcttttggccaattatatttccaggaggattgtaaaaacaaatggtcaacaccgttgactctttcgtacacgtggcttgagcacacccgagctctttagagtttctccagacgacttgtttataaaccccgcacgtgtggttcgc

SEQ ID NO: 155033 - DNA, 364 bp, Arabidopsis thaliana landsberg
ttccaactaatctcccatccattccctctctgccgactagtctcccatccattccgttcttctctcccccgccttctgcaactacttcgagtccttgaactatcatcacttcatgtgattgatgatgtatattttattataagattgttgtaattagttgtttcattgtggtgtgtttttgtttgtttaattacgcatacccccgtttgatgatttgtattttgtacctttaatttccttttgattattaatatgttgtattttaaatttgtttgtggtttgttaaagtgcttacttggttctttactcatagtaatatataaaaaaattggtgacgtttgatatatacacatataagttggta

SEQ ID NO: 155034 - DNA, 458 bp, Arabidopsis thaliana landsberg
agtggatatatccagttttgaagccaggatgcaggcgatgaccaaaccaacctacaccgccatagttcagcacgccaagaacaagaagccggctattgttttcgtcccaacccgtaaacatgtccgcttgactgctgtggatctgatggcttattctcacatggataacccgcagagtcctgatttcttgttagggaagctggaagaactggacccttttgttgaacaaatccgcgaggaaacactgaaggagacactgtgtcatggtattggatacttgcatgagggtttaagcagtctggatcaggagattgtgacacagctctttgaagctggacggattcaggtttgtgtgatgagcagttcattgtgttggggcactccattaactgcgcatttggtggtcgtaatgggaacgcagtattacgatgggagggaaaattcacattctgattatc

SEQ ID NO: 155035 - DNA, 447 bp, Arabidopsis thaliana landsberg
ttcccaaatagtacttttttttttgtttggccttcttatagaaagaagaactcaaagcacagagagaagatgagcgaagaacaaccacacgccaatctagcggttcccgcgtttaaaactgagaaagatcccgtaacgcaaaccgcaaatggtcaaaggtagcgtttggcggttcggtgggaagtgataaggcagcgaaagcatccaccgtaacgcttagaggtgtcatctacatgctcttcgacaactgcagcaaagacgtcaataagaccattttacccctcggccacggtgacccttccgtctacccttgcttccgcgcctgtatcgaagctgaagacgccgtcgtcgacgtccttcgctccggcaaaggcaattcttacggtcccggagctgggattctccccgcaagacggtaactttctcactcaattctcgatcttccac

SEQ ID NO: 155036 - DNA, 249 bp, Arabidopsis thaliana landsberg
atacaacccggccacttggatgctggaagctagctcccttgcggccgagttaaagcttggagttgactttgctgagctatataaggcttcagccttatgccagtaagtgaacacaacaaaaatatatttgctaatgatgtgatgatgatacttgatctaactaattaacatatgaatggttctgtctcaggcggaacaaggcgctggcgcaagaactaagcgtgcctccccaaggagcgactgatctct

SEQ ID NO: 155037 - DNA, 316 bp, Arabidopsis thaliana landsberg
caaaaactataagtcccacactcaagtcaattaaagcactccaatggtccaacaagtttcgtcgtcaaccttgaaactcaacctttggatgattgatatacaaaaatacaggatctaaaaacacctaccgaacttgaatagtaggtgtgttgtgtttgagtgtccccctaggtaaacatggtagcagaagaagcaagaaaagaagccatggctaaatcagtatctggggggaagattacttattttgtgggggcacaaggggtcatggcccgccatggggtcgctcatcttcggttaggaaattggggtttcaggt

SEQ ID NO: 155038 - DNA, 182 bp, Arabidopsis thaliana landsberg
agaagaaaaagtggagattgttcaccatggtttatcaggttggtcccatgttcacgacatatataagtaaatattttgttttatccattaatttgtaactcaattttttttgtttaaatgatgctgtgccgataattaacagaacaacgaaaacatcataccatctcttaaatttaagaatg

SEQ ID NO: 155039 - DNA, 99 bp, Arabidopsis thaliana landsberg
gttggatgggctccccaggaatacaatactggtgagaaacaaaaaactggagggcaggcccagggtgttggggaaattgaatcccagcacgggacttct

SEQ ID NO: 155040 - DNA, 318 bp, Arabidopsis thaliana landsberg
gtgagagcaacggtgtcgcgtattccgatcgatacagacgctcacgaggcgttaggacttacttggggactgacagcaacaccatggctggcttaggacaagaacgggatcggaccaccgtgcggatctaacggtcatcttcttcctcgatgcgaaaactgctacgcttacttcaatacctattgtgagctcgatcaatgggcttggaattgctcgctttgtggaactctcaatggacttccttctgatgctattgctcgttactctaatcctcactctatacctgaaatgactacctccttcattgatcttgagatg

SEQ ID NO: 155041 - DNA, 444 bp, Arabidopsis thaliana landsberg
ttacaacagacttcaaaccccccaaaaaaagaccctaacaaaagtctcagattatcacaagtttaatttcttctctccataaagatgaaattttcgttttctctgcaagactgctaactcaaacttctcagcttatttagtatttgctcctcttaatagttctatctcttttgaccattcggtcgtcaccgaagcctcagatacatggtactgaggatctttccaccagtcgcttctccatgtttgcaccgttatacccaaatgtccagaagaccttaagtatggtgaaggcaaagtatgttcttgttggaaatgaaaggttgagagagcttcaatggcagagtgcttccccgtatgctacccattgtttgaagctatctgggaaatcatcgcgaatctttgtgtgtacagaaagttcggtctccactggttcttttccctgcc

SEQ ID NO: 155042 - DNA, 75 bp, Arabidopsis thaliana landsberg
ccaccaccttctaaataagaagtattagtcatgtaattcttccttactgaatccaataacaagagagagacaggg

SEQ ID NO: 155043 - DNA, 355 bp, Arabidopsis thaliana landsberg
atcaccatggctaaagccagtagtactctgtttgctgtttcctgctccgcttcagctcgtttctctttcctccgacgctctgaatctcttaaaccctcagtttcaagagcgagattcgccgttccaatggctatggccgccgcgtcagctgccaccgctaaaaaactagcgcctgctgtgattgtgggtggcggaagagtcggaagggcgttacaggaaatgggtaatggcgaggatttgttggtgaagagaggagaagcagttccggttgattttgaaggacccattttggtttgtacaagaaatgatgatctcgatgctgttcttgaagctactcctcagtctagatggaaag

SEQ ID NO: 155044 - DNA, 426 bp, Arabidopsis thaliana landsberg
tataaaataatatcgatcttacatctcaatgttcctacaagtaacaagctttttttttgttgttgtgtgcatagaatataacatcaacaacactcatgagaagaatccatttgcaaatttttccctatcacacaactgtaacacttctatttctccaagaggccaggatttaccacaatcttacttgtggcttgcatttcttcaggccaagagaatggaacaaaagaatgtatcgataatccgaccttgaattaagcgagtttctttattagatcaaagagatgggtctgtgggtgtggggttgtgtgcttcaatgtcaacatgctggattcctgggacaagctcttggatctctttctctaaccggtctacttcgcttcctaaagccgtgacaacttcctcacctgcaacagtttatacagtttg

SEQ ID NO: 155045 - DNA, 805 bp, Arabidopsis thaliana landsberg
cacagatcttttacagagaatcttgtaagaagaaagaagatgattgagaggtgtttaggagcttaccggtgccggagaatccaaagagctttacgccaattaaaggtaacgattctctgtcttcttcttaccgttgttgtcctacgtagcacaatcggcgccggtaaattcggaactccggagcaagatcttgacgagatccgtcaacatttccacgcacgcaaacgaggtgagcctcaccgtgtcctcgaagaaattcagaccggaggagattcttcttccggtgacggtggaggtaattccggtgggagtaataactacgagacgtttgacatcaacaagattttcgttgacgaaggtgaagaagagaaacccgacccgaataaaccttacactctcggacccaagatatcagattgggatgagcagagatctgattggttagctaagaaccctagcttccctaatttcatcggacctaacaagccacgtgttcttttggtgactggttcggcgccaaaaccatgtgagaatcctgtcggtgatcattacctcttgaaatcgatcaagaacaagatcgattactgtaggttacatgggatcgagatcttctacaacatggctcttctcgatgcagagatggctggtttttgggcaaagcttccattgattaggaagcttttgttgtcacatcctgagattgagtttctttggtggatggatagtgatgctatgtttacagatatggcttttgagcttccatgggagaggtataaagattacaatctggtgatgcatggatgga

SEQ ID NO: 155046 - DNA, 466 bp, Arabidopsis thaliana landsberg
tttgtcgctataaaaaatggtaatgtagaatatataatactcgagtgttattatcttaagcaagtttagtagtaccgaaatcatatattaaagaaaaaatggcttaaaagaaaaagaattgtgcactattcgactcatattatttgtcaaatgaaactctgtaccggagcggatagttctagttcatatgcagcttggtaaaactctgcagcttgctgtgacaagccttgcttctttgcaacgtgccctagcttcatccatgcgtcgtgatttctcgggtctaattttaaggcattcatcaggaaacttttagcggttggaagtgattcacccccggatttgatcatagcatctgctatagaaacaatgctgggtacgtgatctggttcgatcgagagcgagaggaagaaggatattaaagcctcttcatgaagtgatttagcttctagacacaaacctgtattag

SEQ ID NO: 155047 - DNA, 361 bp, Arabidopsis thaliana landsberg
agaaatttaacaaaagacatgtacaatgaaaattagaagttcaacacaaaccatcaacgaagaaataggttaaaaacaagaagacaaaaaaaaagtttaaaataatctgaaaacaattctttacaaaacatacaacatttgtcgaataactctcttgataatgttacaaatcaagattcttctttaacagctactgatccccaacgcttcgaatacgtttctgcagatgttccaagctctcaactctacgcatcgaagctgttctgttcatcttgcaccctatcaaggccttgcttttgttccccgagctgatgatctctggtgtagtcacttggctgcttgtagtgtctagagaatttga

SEQ ID NO: 155048 - DNA, 336 bp, Arabidopsis thaliana landsberg
ttgttgttgttttgacatattgatttgaatggatgatgaaggtgttcttgagcatgtttggtccagctccaagacatgtagaaggggaaaggcaagatcatcgaccttcggtttcatcagtaccttaggtgaattagtatttttgttttgtaggttttgtctttaattcatagtatccatttgtaaatggttaaaattgtttcaccccacagccacagataaaaacttaagttcagtgcatagcggaaaaagaaaaaaagatcacaccaaatgttattcttttgggccggtgttactgttttccattgtttactaattcatgatttcttcgtctta

SEQ ID NO: 155049 - DNA, 667 bp, Arabidopsis thaliana landsberg
ggagttaacaaactcgttagccgtacatctgattcgaacggctcagatggtccgtacagcatggtgttgaacaccaaaggtttaaccatgtacgttaacaaaaccggtacgccgttagtttacggcggatggccagatcacgatttccgcggcaccgtcactttcgccgttacaagagaattcgataatttaacggagccgtcagcttacgagcttctcttagaaccggcaccacaaccgggtaataaccgccggttactccaagtcagaccaatcggaagcggaggaggaactttaaatctgaacaaaatcaattacaacggaacgatttcgtatcttagactcggatctgacgggagtctcaaggcttactcgtatttcccagcagctacgtatctcaaatgggaagagagtttctcattcttctccacttacttcgtccgtcaatgtggcttaccctcgttttgcggcgattacggttactgcgatcgtgggatgtgcaacgcgtgtcctacaccaaaaggattactcggatggagtaataaatgcgcaccacctaaaacgacacagttttgcagtggacccaagggtaaccccgtcacctattataagatagtcggtgttggcattaaactgggccttatgttaatgatggcaagcccacttc

SEQ ID NO: 155050 - DNA, 211 bp, Arabidopsis thaliana landsberg
tcacattttattttatgtatactaggcatataactaaacaaacctactttcttacgattacgaggtccattcaaatatgaaattcaatcctgaaaatacagcatcccacttttttttactactcaaggtttcgatatatttcgaaatcgagaaatttctactggggcgggtgctatccgagaacaattagcccatttagatttgcaaatta

SEQ ID NO: 155051 - DNA, 411 bp, Arabidopsis thaliana landsberg
ccaggatcagttcctaaatggcaacaaatctcaacaaatgagcgagagagccacaaagagggaacataaacaaacagaattcaaaacttgaagaagcgatcaaaaacctgaaacttgagcaggcgtgttgctctcaacaactctcaccggcattttcttccgtctcctcctttccgtctgataaaaatccgatctttggtgcgaccaaatcaaatcgtggagcctaatcaataaccacatctcatcatacccggttcggttttcttaaccgaatcaaattatacataaaacggattaggcttctccggttttcgactgcgttttgtataaaacctctcaaaaaccttttcttctctccccgtcagaccgatcttctctctcctcgccgccgcctccaagctttttttccac

SEQ ID NO: 155052 - DNA, 348 bp, Arabidopsis thaliana landsberg
tgaacgcgtcacagtctcttgaacttgccttcattgttgcagaacggctcaggaagagaagaacgggtagccagcgtgtgtcttgagtccggttcttcccttttatacactttttgattccaaacaactcttttctctttgtcctgtgactgtgagttggtgtctttatgacttaagttaaaagcccaaaagcctctctaggaggagtaaacctgtttcagctgtggacagaccatgtcatgtcattgttctttatgttaactttaatgtcaaaccgtgtgacttacactagtgtatatttatttttacgtatctacacaaacatgaaacttgttctatagttagtac

SEQ ID NO: 155053 - DNA, 91 bp, Arabidopsis thaliana landsberg
tgtcaggcaatctcatttgtacaatctcagctggtggacgcaatgtgcaaaccatttctcttgtcttcccaaagtaaacctgcgcttttca

SEQ ID NO: 155054 - DNA, 623 bp, Arabidopsis thaliana landsberg
aggctaagagaatggatgttgtttggggagaaacggctggagttgatggacaactatggctgttatgtcctatactgttcattttacaggtgagcttttttctgtacatagatgaatcaagtttatgctaaaacattttaaagcgtttaatgtcttccttctttttaacaactgtgaacatttctatgtatatatttgaaagtcaatatatttaatagattatctgatgtaatgagatctcttagatggcttgtatagtagaacctctttgctttttccacaatagtcttgaggttttctgtttaacttattgggcttaacaatgtgttgctaaaactcaggtgtttgaagcatacgttggactgctgttgctaagaaaaacagtaactggagttgttaatgaatggcaggtatattattttcactcttttggcattgttttcaacgggtttattcccggtataggccgacaaatcctaattcaatagagaacagagacttaaaaaataggaagtaaagtaaaataaatgttgtcgcttttcaaatgatggtttgtggcattcttctggtagtgatgactgttgggaacttcataaacacaataggaacactgatgatcacag

SEQ ID NO: 155055 - DNA, 599 bp, Arabidopsis thaliana landsberg
gaagaaagaaagatctctcggtggtggtcattcaacattgaaagatcttcgacttggcaaaagtgtttcactttcgctctaaaaacttcatcttcactttctctcctcctccatggcggacggtggggctgaccctccagctccaccatcatcgataaacgccggtgaatttctcttgtctattttgcacggaagtccttcgccgtcgtcacaaggttctcagcatcatcagtcattcgctctcgatccagccatcgcagccattggtcctaccgtcaataatccttttcctccgtcgaattggcaatctaacggtcatcgacccagtaatcataaccctccttcttggccactcgccttttcacctcctcataatctttcccccaatttcttagggtttcctcaatttccgcctagccctttcacgacgaaccaattcgacggtaatcaaagagtatctccagaagatgcttatagattagggtttcctggaactacaaatcctgctattcagtccatggtacagcaacagcagcagcagcagctaccgccgccgcaatcagagactcggaagcttgtttttggttctttctcgggag

SEQ ID NO: 155056 - DNA, 204 bp, Arabidopsis thaliana landsberg
  unsure (1)..(204): unsure at all n locations
atctggatgggccgtgtctactacgcctttggattcctttttgtagtcttgatccttcttgtcgaaatgtgtgccgaggattccctagtgctaacatacatgcacctgtgcgttgaagactataagtggtggtggaaatccttctttgcatctggatcccgtgcaatctacatcttcatatactccatanactatctcgtcttc

SEQ ID NO: 155057 - DNA, 941 bp, Arabidopsis thaliana landsberg
aatctctcaacataaaatcccacaacaacacaacccaaaaaaagacagagacaatggcacagcccatgcgcttcatgctcaatcaaatagaaacagaatcctacggcgctttcacccctcaaatccttagtccgctgatcaatcatgcgattccacacactcgagctcaaatctcgggatcacccgtcgtagctgtcggcggaggatcatcaggtcggaccttctttggcgtcaatgtggaattaccaggtctgcctcttgaccactccatccacgccgaacagttccttatcgccaacctcgccctccacttcgagcaaaaactcgaatgcatagccttctccactaacggctcctacttcgaccctccatgtccccactgctgccaacttcttcaagaaatccgaaatgcgtctagtaccaaactcttgatcacggacccatcccgccagcgcgacatgtctctttcgacctaccttccgcaaaaatatttctccctctacaatgaggtcccgaaatacttcttcgctcgccttctcgacgaaaatcgcaataacggcctcaccctcattaatcccaatcccatcagagactgcctagattccgaaatttgtaaccatctaggctgcagggctctaaaggcggctaaccgatcgtacgcgccgtatagcaagtctccgtctggagtggcgctcatggattttcaagggagagtgtacagtggatggagcattgaatctgtggcgaaccctattttgggggcagcacaagctgcactggttgacttcatgactaatggtggcggccacgagttcaataacatagtccgagggtttctggtggagaagagagatgcgaagttgagtcacttggccacggcgagggagattctaaataagatagcccacttcagcttcattttacgtgtcttacattgccag

SEQ ID NO: 155058 - DNA, 386 bp, Arabidopsis thaliana landsberg
gtctctcgtagcagaaaaatgtcagagaaaggaggcaaggggctcaaatcctctctcaagtccaaagatggtatgtgtatttcccactctgtttctttgttgtttaacattactttcctcgagattcgtttctcagtgtctagggtttttgttgcaggagggaaggatgggagctcaacaaagctcaagaagggtagaaaaatccactttgatcaaggtttaaccttttttgattctcttcatttgatttcgcattcacagtctgaagctttttttccttttttgatttgataaaaatgtcatctttttaatgaatgtgcagggactccaccagctaattacaagattctcaatggttcttctgatcgtcaaccattcaaagttct

SEQ ID NO: 155059 - DNA, 530 bp, Arabidopsis thaliana landsberg
attgtaacattattattcagttttagagaaaacgatacattattcaaaagcaagttcattatgatcttttgttacagattcagaaccaaagttttgactttcttaaggattgagattgcatacagccactgtctcccatgtctctagagtcttgtcctcggtatcggttttgcatagagcaagtcggtttaaccggaaactgagtccatcgaggctgctatcgagcgtgtaagctttctcctgcgcattcttcttctcttcctctgtcaactcagcgtaaagcaggctcaaatgcggcatgtaagctgcaattatgtgtagacagagaatattatatggaatcatgaatctaaaatgagagattatcctcaagattaccatcaaggcttcccaaaagcaacaaacaccacaccctatagatatcgatttcgttagcaatttttgtacttaaccaagccgatataatctcaaaatgttgtttgatttaagcaaaaaaaagtaaacttggcaggctagtgtacaacactccc

SEQ ID NO: 155060 - DNA, 131 bp, Arabidopsis thaliana landsberg
gggaattacttagaaatggagagggaagaagaaaacataagtggtaacaagcaatcttcccctaaaacaaaactctctaatttatactggcaaagtggttctgtctcgatagcttggtttagttgtgcttc

SEQ ID NO: 155061 - DNA, 567 bp, Arabidopsis thaliana landsberg
ttgttggatatggtggagaaaaaccaaatcaacagatctttgttggcacttctcgacgaaaacatagccaatgcatacaaaggaaaccaggttagacccggttaataattgagttgacaaaagaaatttgttctggttcgaagttcggttaggtttgattcgggttctgtttttgattaacatatgtatttcggttcttgctcgaacccatttttccaaaacgtgaaactcaagtaacccgaatcaaaccggaaaatcgaatgccaaaccgtaaaattgactatatgataaagcttttaatcatcgtatgaaattcatatgtatttgttgcagaaagaagcaggagattacatggagaagatacgctcttcagttcttaagtatttgacagtgtaggatcatatgagtcttcgaaagatttctcaagcttttgaatgttttctattatcggtgtatttatatttttgtttgttgagtaaaatgtattttctttttttcagaacgatgtttatatctttagggtcatttcagatcttcaagtaataaaaagaatttaatgaaataata

SEQ ID NO: 155062 - DNA, 402 bp, Arabidopsis thaliana landsberg
aaaaaacactgttcttatgttgctgcctaattcactgctagtgagtatagtctattctactctatagccagtttgactttggtggtacaaggagaaggaacaacagagaaatcaaagttcgttttactgttatagagaatgtgtaaaaaaaaaaagatcataatcatacaaaaactggcatacaaaactaaatatagcctggctatgacacacattagcagtttagtatgcttccaaaaaaagtttcatccagactgttgccggcctctacctcgcccacgtccgaagcgaccccgccctctacctctaccacgaccatggaagccccttccccgttcagaagactgcccgctgctaaacccttggattgtggttcattggggactgcaaatcactgggact

SEQ ID NO: 155063 - DNA, 649 bp, Arabidopsis thaliana landsberg
ctaaacacacaatcctttcgtctgtggaccttaccgagtccctttcctcctcaacaaacctggatcgggctatcacgttaccggcgagctttacgcggtttctcctcgcggtctctctcgtctcgacgagctcgaaggaatcagtcgcggtcattacatccggcaaccgatacgtctcgcggcggcggaggaagaagaagaagaagaaggagatctggaaacagaggcgccgtcgacgtgcgtggtggaggcgtattacgctcataagagttatgaggaagagctgtggaggaggaatagaggaagatcattcggcgcgtacacggaaaacgaagcgcgtggatatgtgaaacgcaatgataggcctcagcatcttagcttcttggatcatatccgtattttcgtatcttctccatgtgattgatttttatttctttcgtggtctctctccctctcgtcgcttttctatgtttgtttgtttttttctcgggacaaaagaaacaacaaaacacacaaacacaaactagttttacaacttgtaagggtcccaccagtccgtccgtccgtcgtctccgtatcgatttgattagagagattgttgggtgtaaaacttatgattcccatcttaaataagtttatggttaatttt

SEQ ID NO: 155064 - DNA, 225 bp, Arabidopsis thaliana landsberg
aaaattgagaagaaagtctttgtttagcatttgttcaagtaatcaagttataactaaaaaatgaaaccgaaaagtcttctgttgttaataaaagtcttctgttgatgatctttgtctaatagctgctccacttaagtgaatctatcatcaagtcacaagtattggctgtagaataccctctcttgtattgttcccaccataaccctaggtgtgtggtttccccca

SEQ ID NO: 155065 - DNA, 447 bp, Arabidopsis thaliana landsberg
  unsure (1)..(447): unsure at all n locations
acgtttgccttttcaggaacccactcaaagaaacgggtgaaaaatggtggctcgtggccttctgtgacaacatatacaggagtcctcatggttagaccttcttccagtatatccatctctnnnnnnnnnnnnnnnnnnnnnnnnacaatggactaagaaacactgaaaaaggaagccatattcggtaaccccgagttcgccattcttaaaatttatttatgccatatgatgttttgatcccatttttactgaagttccacccgtaaacagcaaaaaaagcacttggaaggccaaacaaagatgaaaattaccagaccaagagtaagagcttcttccttcgactttatgtttgagtttgatccaatccagacatatacttcactttggcagtccaatagaaatacatcttcagtagttaaatcatcttgcacaaaattgtatatttct

SEQ ID NO: 155066 - DNA, 327 bp, Arabidopsis thaliana landsberg
tcttttaccagttttactgatttttctttttcatccaggtagctgtgattgttgcaggatcttgtgtagaaacagatcacaagaagatgaatgataactcggtggtgcggctttgattatcttcagagattttagattctgtatccactctgttgcgatggggtcgtttgcaggcgcttgtgagattgtggaagagaaggatgatgaagtaagattgccaaaacattcagggagatatggtaaatcggttatgggatcatcaagtaaggatttggtggagcgtaagcaacgagagtatcatggttctcttgagtatgacattgataa

SEQ ID NO: 155067 - DNA, 548 bp, Arabidopsis thaliana landsberg
agacggagcgggatctgaagagggagaagaggaaacttggaactatcgaacacatgtgtcaggtttttttttttgttttccactctcaatctcatgatcagagattcaatacatgagtgttgctatagtatatgagccttgatttgctctgatttggttctagttttagaaagaacgtgtaatggattcttttgttgtcttacatttgtatgacctgttattaaatagctttgatttgtgttgaaggttgtcaaacaagaaggatgggagaggttatatggtggattggcgccgtctcttgctggaacggctgcatcacaggtatgttctctcattggtgtgaatatttggagaatctgtaattttagccatttttttggtatgaagtttagaatataggcttgaaagtggatgttaattttggatgagacagggtgtgtactactacttctaccaagtgtttcggaatcgagctgaagccacagctcttgcacggaagaagaaaggtttgggtgacggatcagttgggatgtttgcttcacttttag

SEQ ID NO: 155068 - DNA, 235 bp, Arabidopsis thaliana landsberg
aagaaatttctcggacaacctttggatctaagtctacagatgaagggtgaagatagacccatatcctttgtgcgtgaggaggatagagatgacaaaagaagaagagcggagttcattttgcgacagtgtatggagaacccagtagacctcaatcagttgtaaaataagtgattcattacagtctgtgtagcgtagtattaatcttgtgatttgtaacctttctttatacagggcc

SEQ ID NO: 155069 - DNA, 1061 bp, Arabidopsis thaliana landsberg
ctccaatgcttaagctgaaatctagtttattttttctatttactaaaacctcccaaggaccaaagaacatcgacaaaggaagacgacgaagaagatttcgagcttcgacaaatcatgcggattcttactgctcgcatagctaacgtaattacccaaaattcttcatctgaaatttcctctctttacccgtttataagattttccttgtctttctcttcatcaatgggtttaacgggtcgttaccgattcttctggaatctgaagtaaaatttgcagcatttttgcagggcacgaaacgcgaatcctcgatctcgaaatttctcctcgtcgaacaagaaaggtgcctccttttttccttttgtctttttttcaatcaagtctataatctgtgaaaggatcgactcatggtcttaaatttacaccagattaagatagaatgaagtagattgattcgaaaatctgatgagcttttggttaagtagttgtaattgaagtccatttctcacttcacactagtagtgagagtctcgatttcaatcacatttgcttgtaattttactccaaagtggttgctttgtttgatgaatccgtactttagtcttagaaacaatcatgaagtagtcataagagtagagaagagtgtgacttggactcatcaaaagaagtaaagggcctttaggtttgggtgtgttatgttcttagctttgctttcattttctagatgaccttacattggaggaagaagctgagaggaaaataggttggtgtctcaaaattttctttgcgggcacagcaacgtatattggataccagtttttcccttacttaggtatgtgaatgaatctctatatctaatcagctcttacatttttttattaatggtggatcactgattgtcacttatttgggttaggtgataacttaattcatcaatcaatatcgcttttacatgtgaaggatcctttgtttaagagaatgggagcttctcggctttcccgtttcgctattgatggtaagactcagagttactctctgatggagtgcttaagatacttagttag

SEQ ID NO: 155070 - DNA, 783 bp, Arabidopsis thaliana landsberg
ggttttgctgaaaaatatgggtggttttgatttaataaagacggtaacaagcaaagagaaacggagatcttggcattgcctggattctcataaacatggccgctctaaaaggtactctcgcttcaatagtttaagctcaatcttttcactaatattgaatctttatcttaaatccattaatgggtttttgagattatctctcgatgtttcttgcacaccaatgtttgcttaaacgtctctatgatgaaaacgacgtagatagagactgttatgcaaagaagtctgttttagagctttttctgtttagaatgtttcttcctagaggctagaacgaattcttgtttatgatcttcccagtgcgtcgtcagagcgggatcttcacacttctggtaatggagcttcacaatctgcaaacaacttcactagaatgcaagtaagacactttaaagctgtatttcatatgattgtttttttcttttgaggttgatttgtatttttctggtccataggcatcctctgttcaaacaacagcaaacaagagaccaaaaccactgcataattgtcagatgttaactaaaaacaatgtgtcttctaacgacagagcatccttggaacgcgatgtaagcgcgtcatgtttcgtatctcctcgtctttaacatgcattatcatgtccaaaaagtgaattgatctcatctgaatgatctttgtgacttggctacacaggttgagcagcttcaccttcgtcttcaacaggagaaatctatgagaatggtgttagagaga

SEQ ID NO: 155071 - DNA, 105 bp, Arabidopsis thaliana landsberg
tgcattccgcagtgtctggatgctctgtgtctcaacaatagcggtcttcaagctgtgaaggaccgaaatgccttgaggtgttttgtgaaaatatttagttctccc

SEQ ID NO: 155072 - DNA, 248 bp, Arabidopsis thaliana landsberg
aggcctcctttggaattctttgcgatgatccaaggaagagttttggcacgtgatctatttgtagcttatgcacggtatgaaaatcttctatctaccttgcttgatatatgcgaaactttgttgcttatgaaaactttcctgttgtaggtgtcataagcatgaatttctgaaggatttcttcttatctacgggccagattcatgtacgtttcatgatcacgtttttcctgtaaacgctgaagttgacca

SEQ ID NO: 155073 - DNA, 198 bp, Arabidopsis thaliana landsberg
atgccattgcaattctcagttttgtttctctcttgcatgctttgattgccaatgtactaatagagtcttagaagatcactagtactgtccttaatggttgcgtgcttttcttttttggtgttccttagcctctaagtgacttcagtgcagtgaccataggaaagcaacctttagattatttacacacagtcgggttcc

SEQ ID NO: 155074 - DNA, 316 bp, Arabidopsis thaliana landsberg
aagaaaacggtatcacattagaggaaaacaatctaagtgtaagtaagtcggaaggttataatggtggtgtggctcaggttatagaacgaccatcatggaagtgtcaggacttaaagtcaccggaatgtgtgaagcagaacaaagttgtacgttcatagtcttcttatatgtatttacacctaaaagaggtaagaaggtgcagattcaacagcattgtcattttcagtacaatcttaatgttgtttacttttatcttgttttgcttttttgggtaatgtgtttgattttatgttgtatattttgggaataatatcta

SEQ ID NO: 155075 - DNA, 343 bp, Arabidopsis thaliana landsberg
tttttatgttctagttatcctctaaactcccaccagacaaaagtaccaaaggactaatttcataaaaactgaacaagaaaaatcgaatcctattctatgaactggataattaaaagaacccaagaccatttacaaatgtatttcctcttggtcttcttcctgtggcgagcaatgtggtagacatgatatgaacattttgaccttgtgggggtttgggattcgtgttgctgaaaaaacccaaagaagattgaaagaagtgactcaagacaacaagctcggtccattttccacagcggtgcgagctttgacatggttattgtgcccgtgccgagacatttggatg

SEQ ID NO: 155076 - DNA, 206 bp, Arabidopsis thaliana landsberg
agcttattcacatttacgatcaaagaactgggttttgagatcagggttgcaatacggtgtggattttgtggcataccgtcaccatccatctcttgtccactctgaatactcggttttagttcagtctggtgacagtgatcggttaagagtgtggtcagatatccattgtgctgttagattaagcggaagtgttgccaaaacagtgt

SEQ ID NO: 155077 - DNA, 235 bp, Arabidopsis thaliana landsberg
agcagcaggactgtagaagaagaaagcacctggcttaagtgataaagattgtaatcctgagtttttccaaagactagaaagaaggcaatccgtggaagtagtagttcctcgtagatgtaaagacactgatgaggaagaaccaggactcgatgatctcaatgccatgggatcttcaaatcgcctcaagaacacccaagcagatgataaacaggtaaaaggtaggtttgatgggaac

SEQ ID NO: 155078 - DNA, 792 bp, Arabidopsis thaliana landsberg
cgtgccggaggatattttgtttgggcagcacaacctgtatataagcatgaaaaggccttggaagaacagtgggaaggtatcatccgtgcaccttaatatatcatttcagcattcatgaagtgtcagttttgcctatacaaacattccaaccaaagctcgtttttgctgaaaactctctaattttctagggagaaagctctaaaagctactacctacactatactgttgaattaaaaaaacatccatctttgcttcagtttgcctatcagaaggcatttagagaaagtttcttttggtcttgcaaggatatatattgagtctcttatttgagaccatgcttgtatgtggtttagtaagatggttttttcttttcgtttttccagagatgctaaacctgaccactaggctgtgctgggttcttgtaaagaaggaaggatatatagctatctggcagaagcctgtaaataacacttgttacctaagtcgtggtgctggagtcagtcctcctttgtgcaattctgaagatgacccagataatgtttggtatgtttccgatgccttcaactatccacttcttttagctgccaaattaaaaattaaacatcgagaaactgctttggttcccaatcttgacattgactgttcgacttattggtggaccttgcttctgttccttaggccaaaatttgttcgattccgcaacttcttttgtcctaggtttgtcacctctgactgattctttgtttatcttaggtacgtggatctcaaggcatgcataactagaattgaaga

SEQ ID NO: 155079 - DNA, 625 bp, Arabidopsis thaliana landsberg
  unsure (1)..(625): unsure at all n locations
tcgttccttctctggtggcgtnnnnnnnnnnnnnnnnnnnnnnngaccaacggtgagtgtttctctttgattgaagctctattctccccaatattcgttgttcaacaactgttgtaatctattttcgtctttccctttgctcgaaaaactttggagctggttctttcttgtttctgagatgaatttggttatgtttgtcatttgtaggggaaaaagaaggaaggaaatgcggctaggtatatgaccaggtcgcaagctcttaaacatcttcaagttaacttgaatctattcaggttcactctctttcttctttatccttcaacttttcactgtttttcttcgagttattgttcggacaagcatatgtgtgcactaggtttttttcagatgcttcgtgttttgtcaatttatcttagaattgatatcgagattgtgttatgttcctagctaggtttttacttagaaattctctggttatcagtaggtgactaatttgttattattgtacctgccgattatgtatttcaggagactatgtattgtcaaaggtatatttccccgagaaccaaagaagaagattaagggaaaccatcacacttactaccatgtcaaggacattgctttc

SEQ ID NO: 155080 - DNA, 334 bp, Arabidopsis thaliana landsberg
ttatacgtggtcgttggggatggtccaaccaggggcacctctataatttcttgtacgctagacagaacacaatctcggttttgattctattcagttgaccaaatttcaaaattattaaaacctcagcaaatgcgaggctacaatctcagtttaatcaactaagaggatgtattcagagacgctgaatctattctgtgtcaacatgaagacaagatctgacttcattttgcttgagatttttcgttggctgaggactctgaatcctggatcttatctcccatgtttgcatctgtagtcacatttgcatttccacgtgcccgagcgagtttctcag

SEQ ID NO: 155081 - DNA, 403 bp, Arabidopsis thaliana landsberg
cctctttctggtaacgtaggtgagtccacactaccacagaatggcgatcaaaatgactcgccatgaaagtcccagctccacaggttgcgttagggcactccttcctcaaacgctgaacctttccagatccatcgattttgtaaatctgaagaacagcgagcttaaccttcttatgcttgtgcttgatcttcttcggcttggtgtaagtcttcttcttcctcttcttagcaccaccacggagacggaggacgagatgaagcgtcgattccttctggatgttgtagtcggcgagggtacggccgtcttcaagctgtttcccggcgaaaatcaatcgctgctggtccggtgggattccttccttgtcttggatcttcgccttcacattgtcgatggtgtcggatga

SEQ ID NO: 155082 - DNA, 377 bp, Arabidopsis thaliana landsberg
acttattccatagtttctcctcttaaacttaaggcacttcattacaaacgtaagtgtattgtcatattcacacacacgtaagtgtatatataaatgcaatcgaacactcatggtggttgatatattatgtagatttagtgaccaggctgagtctgaacagcttctccggcatatgaacaacaccttgagcagccatggtaacctttgtagcagcagccgtggcggcagtaacttccccctcctccttgtctcccaccgcctccttggtatcgtcctcctcctccttggtatcctccccctccgtggccaccatggccgcctcctccttggtatcttcctcctccattgtcaccgaatccaccaccatgttgttcagg

SEQ ID NO: 155083 - DNA, 92 bp, Arabidopsis thaliana landsberg
cacgaggcgagaggagttttccaagagcgagaggtgccttagtgggactctgctagagggtacacgagtgtagccgaagaggaggtcttatc

SEQ ID NO: 155084 - DNA, 560 bp, Arabidopsis thaliana landsberg
tcaacttcagggtcaggttctttctcgaatttgagttgcttgctggaatcggagagggtcatcgtcgaggtagagttggtcaaagtgtctcttttatttgaatttttgttaccatatccggctattgaatttgagacttggtatgcaatttgcatttgtccatgatactagtgtgaagaatatgttgttgaagtaatatgattttggactttatttgcagggttatggagttgtgcttattaacaccgatgaggcaggaacccttttggtgactaatttccgtattctttttttggtatgatattatctttcctctgtttcttatatgcatttgatctattttttctggccaatgtaattatacagatcttgaacttacttatatttcactatttcaggattaggcctttagtttttaagtactgttgatcaatatattctttgtttctcttttgtgaagagtgaaggaaccagaaaagtcattccacttggtacaattccattggcaactattgagaagtttaacaaaatggtcagttgctatacacccctggggacag

SEQ ID NO: 155085 - DNA, 845 bp, Arabidopsis thaliana landsberg
  unsure (1)..(845): unsure at all n locations
cttagaaaataagaatcctctaagttctcctctctattgaaaacccaaaacaaaagttgagaacttttcatatttcagatgggcaacaagaaactgttgactggtgggtcaagcaaaactcatggtagtggtagtagctacagagatcctctgttgcagaatcaggtctgtttcattaaccattcttgtgtcttactctcatgtctgatgattcttgcttgtaaattttcgttatcgatgtaaagtttcgacctttactcagaaacttgagggaatttatcagaaatttcttatttaagaagaattgtggtgtcatgtgacttgaaattacttgtttaattcgaagagtctggttagtttttgaagcatagagttctcatttgacatgtaatcatttgattcgaactactggattgttacaacagaagaaatgttcttaaagtttgattcttgattcttgattttgccaatttatgagttttctaattgttagtttgtttattctnnnnnnnnnnnnnnnnnnnnnnnnnnnaaccgaaagcgaatggaagcgagaatggtttgaatgatcttgagcatggtgtagttgaggtatttgtttgtgctgtttgttttacagaaacttttcatttctagaagtgatgttgtcttaattggtttttttttcaggcggcaaatgttggatttggcagagtctttgcgttggtgagtgtttctttgtattataattgtatatcattcttgtgtaaagatatgccaatactcgagtattatggtttcgcaggcaaagcccgatgcgggaaagctagtgattggtaccattgctttgtgataggttcaacact

SEQ ID NO: 155086 - DNA, 143 bp, Arabidopsis thaliana landsberg
ttaacatgggaaatcttttgatttgaacatttttactggatgtaaaatccttcagtttttctgtaaactgtaaagacaggtaatttagtatgatgaattaatgaagaatttgagtagaagaatgatagaaatcaaacaaagtt

SEQ ID NO: 155087 - DNA, 335 bp, Arabidopsis thaliana landsberg
agttgtgaaatctaatcggattttggatccggctaattaatcgtggtcattagcgattccacaaatccaacatgtttttcacatcttcatgtatatttagcatttattttttttttaaaaaattcaactctttttttaaaaggttatataaatattaaattaatatgatgttgtgaaatctaaccggattttggatcccgccattgaaccgtggttattagcgattccacaaatccaacatgttttcacattttcatgtatatttagcattttttttttttttttcttaaaagattttcaactctttttttctttttgatttttttctatacgta

SEQ ID NO: 155088 - DNA, 183 bp, Arabidopsis thaliana landsberg
agcatccatgcaagatgttatttttcttacataatcctaataaaaatattttcccaaatttaaaacgcatttatattacattcgaagaagaaaagagttacaccagtcaaacccccacattagtaatggaaattttacatattggaaaagaaagaacgaaagaaaaagaaaccaaagaaattt

SEQ ID NO: 155089 - DNA, 186 bp, Arabidopsis thaliana landsberg
tgaaatcgggagagcaaccacatatactcaatatacaaccgccggaatgatgatcgacgatgagattgttcaccaagtcaacttcaaaccggatcttgtggttatattgttcaattctttgtaacaccaggagcttctatcatgtggctatctcatgagctcttaccaagaggtagaatccagctc

SEQ ID NO: 155090 - DNA, 1882 bp, Arabidopsis thaliana landsberg
ttgcaatttgcaaactgcttcaatccaatttccctaaacctcttagaaaattctgcaaaacccaccaaacaaagaacaccaagaaagacaaaaggcaggcaagactacaaagcaaaaccttcttcttcttcttcttctcgttactcaaatcatttccatatatacgcaaaaaccattaagacaagctagaaacaaagaaacatggttttctctgtttctatatttgcctctcttgcaccatacttaatctcagcatttcttcttttccttctcgtcgagcaactctcttaccttttcaagaaacgtaacctccctggccctctctttgtctttccgataattggaaatgttgttgcacttatccgcgacccaacttccttctgggacaagcaatccgcgatggcggaaacttccgtgggcctctccgtcaactaccttattggaaaattcatcatatacattaaagacgcagagctctccaataaagtcttgtccaacattcgtcccgatgctttccaacttactggacatccattcggaaagaagctcttcggtgatcacagccttatctttatgtttggcgaggatcacaaatccgttcgtcgtcaagtcgctcctaacttcacccgcaagccactctctgcttattcttccctccagcaaatagttatcctccgtcatttacggcagtgggaggaaagtttttctagtggatctcgtccggtttcgatgagacaactcatacgtgaactcaacctcgagacttcccaaacagtttttgttggaccatatctcgacaaggaagtcaagaaaacgatttgtgatgattacaatgtgttcaatcctggaacaatggcgctcccgatcgacctccctggcttcacgttcggggaggctcgtcgggcggtatcgaggctagtgaagacaatgtctgtttgcgtgggaaaatcaaaagcaaagatggccgcaggagagaatccaacatgtctagtcgatttctggacgcattcgatcgtagcagaaaatcctccaccacctcactccaaagacgaagagattagttgtgtgctcgttgattttttgtttgcctcacaagacgcgtccacgtcatcactcctctgggcagtggtgatgcttgagtccgagccagaagtgctaagaagagtgagggaggacgttgcaagattttggtcgcccgagtccaacgagtcgatcacagccgatcagctcgcggagatgaagtacactcgggctgtggcgcgtgaggtcttaagataccgaccaccagcaagtatgattccacatgttgctgttagtgacttccgtctcacggaatcgtacacaatcccaaaaggcacaattgtgtttccttcccttttcgacgcctcgtttcaagggtttactgaaccagaccggttcgatcctgaccggtttagtgagacaaggcaagaggatcaagtgttcaaacgaaactacctagcttttggatggggtgcacaccaatgcgtaggccagcgttacgcattgaaccacctcgtgctcttcatcgctatgttctcatcgttgtttgatttcaagagacttcaatcggacggttgcgatgacatcatatactgtcccacgatatcgccaaaggacgggtgcacggtgttcttgtctaagcgcatcgtaacgtatccgaacctctgatttggatttttgttacaaattattggtgatcaaagtcaatactcatgagtgtgattactattactgttgttcgtgatcgtgatgtgtctcgtgaggtgagttccactagagcgttatgtcttgttgaatttgagaagtcattgttttgccattaatctgtgctgtcttattttgtttggaccccagtgattct

SEQ ID NO: 155091 - DNA, 131 bp, Arabidopsis thaliana landsberg
tgataattttatggcattatcataaaatatctcccatattttaatattcgttaaagtatatcgacattaccaaggaaggttacaatagtgtgtacatggttgcaaatagttggattatataagtttataaa

SEQ ID NO: 155092 - DNA, 819 bp, Arabidopsis thaliana landsberg
  unsure (1)..(819): unsure at all n locations
accgaactaacagaaacatgataccaactcaagttggttgttcgtgtaataaataaaaattgaatctttcgactaaaacaaagtttatcttcttcttcttcttatgtgacaagaacgaacaatcctccattgacccaaatttcgaaaatgtcaacgaatcttcttcgtcttattctcctattcatcactttatctatcacttcatctctgtcaactccgtcgccggctgattctcctccttatctatggccgttaccggcggagttttcgttcggaaacgaaacgctctcggtggatcccaccgtgactctaatcgtagctggaaatggcggtggatctctgattattagagctgcgtttgataggtatatgggtataatctttaaacacgcttctggtagaggttctctattgtcgaggattagatttctgaaaatggttgagtatgatatcannnnnnnnnnnnnnnnnnnnnnnnnnnnnnnnnnnnnnnnnnnnnnnnnnnnnnnnnttccttcaattggaaagtttcaatcttttaggagctgatagcggcaaatagttaaattggtttgttttctgttgaatttcagcttcaattgggtgtggatgagagttatacattgatggtgtcgaagaagaacgagcaatcgattgttggagcagccacgatcgaggttttacttttgctactatagcttcttcatatgcggaatgtgtttgtgggaatcttataggttaaagtttcttgtggtttcaggcaaatacagtttatggtgcacttacaggattggaggtgtgtaacttaatagtcggtat

SEQ ID NO: 155093 - DNA, 486 bp, Arabidopsis thaliana landsberg
ataacaaacaatacctttataagatgctcttattagtattaagtatatatatactaggccaaaaaatactacacatggattcttttctcttctccatgattcattagaaagaagaggagaaaaagagagtaaaactttaccacaagacatagcagaacttaaaatgtagacaaaacctggaaaagattgaggaaactctcatctggtaaacaaatatgatgtctgtgccaagccggcttctctggagttactttcctgaaaaagttcaatctttgcagtatctcgcgtttcaccagaagttaatgagtcattcacaggttctgcatatgaacctcttttaccggatttgaagcaggaaactaaccaaagtgttgacttattgtcggtaatcaagaagaagagattcccatcatcatcctctcttgtcatacttgtttgcaaactccttgagtaacagcctctggcgaaaggcgagatacgtatcta

SEQ ID NO: 155094 - DNA, 201 bp, Arabidopsis thaliana landsberg
attgacatgaaatgtttataaatttaaagtttggggccattagtgtaattcttaaaaagatttaaaaagcttttatgttgaatgttgagagtcaaggtcagctattgcagaagcgtagattgtttcagagtcaagcatctcaatacattgtaataatatgcatgcgtgtgtttcaagctatatatttatgtaagtgcattt

SEQ ID NO: 155095 - DNA, 148 bp, Arabidopsis thaliana landsberg
taccttcccaacctgattgccgagctctcttctcccacaaagaagtaattttcctctccttgatcaacaaagcttcagctctctctctagctgattcacaaatctcagtggcggcattgcacttctcagcctccttttgatactgaga

SEQ ID NO: 155096 - DNA, 3439 bp, Arabidopsis thaliana landsberg
catcatggctcactccaattctcaccaagtactcgatttcaaatcatcaacaacttcaccgctttactcaattcactcgacttcccggctagagcacatccgcctttcaagctcacattcgtcactcgaccgctcctctcctgcctttcacagccacttgacctcgccaagacacaccgcctcaccatctcttcatcactcgaccgccacagaattcactcgaccaaaccgaaaaaaaaaaaaaattaaaaattaaaaaaatttggtacactcgacctgtttttggtttgtgtgttttgtgtttctagtcttgttggaactaacgtattaacgtttatttttgagttacatttgttttcaggtttcgtaatgagtaactacagcggagaatcctctatggaccctgattacaatgtggatgaagctgagtcctggtccgctagaccgagagagcaacatgtttaccagagcttcagggatgaattcgaacgctgtgcagcccgacgtaatcagagaatagctgaaatcgccagaggaaagagggcgatgtcaagtagatatgagctgattgatcaggatatcgagactgagtatgagtcagagtcatggcgcagggagacaaaactgctgaacaaacccgacgaggttacaatggaggagtatatcagtttcttcgagatgaatgacttctggggaacgcggtatccgtgttatgaaactttagcccagctggggttactggaggacgtgcagcatctgttcgagaagtgtcatctggagacactcatgtcttactcttaccctgcctataaggaggagacaatagagtttctttccacgctacaagtggagatgtatgaggcactcacagactttgagctggataccatggggttaggcttcttgacgttctcagtgaatgaacagtggtatcaactttcgatcaagaagttagaagaactgtttggtttccctagtggaaagggaaccaaacccagatttgacagagaggagcttaaggatttgtgggccactatagggaacaatctaccgctaaactcggcgcggtctaagagcaaccaaatccggagtcctgtgatccgctactttcagcgattagttgccaacgtcttttactccagggagtctacaggcaccgtgtctaacacggacatggagatgatagattatgcgcttatagggattctccgccggacgaaggggaagaatgtcttgagaggcgatctcaacaaggcaccaccagtaatgcctcagttgatccatctgtgtggatacagaaagtgggcgttgacgaacgggaagaagaaggtgagaggagcactatgcatgggtggtgttgtgacgccaattctgcaagcttgtggagtaccgctcaaggaaccagggttggcaccgaggatgatggacttggatcatttgcgccgatgtgagttcttggagtttgacatggctggcaactttcaccgctacacgttcgagcattcatcgattaaaatcgccaacattcttctcccctgcattgacgctgctaggattctcgagggcaggaacattgacttcaagcctgcgcttgaagaactttatttcgagggtagtccgccaactgaggagatcagtcataccgaaggagctacaacacaagatattgatgagagggatgatatagatgaggcggagtttgacacgagcatgtatcatttcagtgagcatatactcgaccccctggtcgagtgacttcatctccatcttctgaccaccactcgaccacatcactcgaccccctggtcgagtgacttcatctccatcttctgaccaccactcgatcacatcactcgaccacgaggtcgagtgtcttcacctccattaccagaccactactcgaccacatcactcaaccttgaagtcgagtattaccatcaccaccactcgactacatactcgattgcaagcttcagagtcttcttcattctgcactcaactagacactcgagcacaaggaagaaaagaagactccagctattcactcgacctcgcactcgacctcccactcgaccacatgggtcgagtacagttcttaatccgtcctcatacttcgtcgttttgagtattagggtttcgaaatatttggctataagtagcatgtacttcacatttgcgcagacaagaagtttttatctagttttattccgcagaccttgtgttctagaccttttgtaatccggatttctctttatctattcagtatttagtattcagcttttgttcttgattttcgtttactgttgttcattcttatatcatcctgctgttacactactgttatcatgtcttcaacctgttcaacatttatgctttttgttatgatgtctgagtagtgaataggtttctgaggatgggttagagtagtgtagaattcttagtatgctaggtgattgagtatcgattgatagatcccttctggattagttgttcttaatgtttattgctttctgatcaactggaatttgagcccagacatttccgcgcccaaaaggtgttcgatgaaatgtctgaaccactaattccagagatttgtgaccctgtaccaaggtattagttgcagggagcgttttggctttaacttgttgattcgtaatgcctgttaggttagctctcgtcaatggtgattgagtctgggactaggttagcttgagagtctctgttgcggtggcacttagatttggttaatgaacttgttgtctagggttaatttattgagcatgtcaatcacctgtaaactgaggaaacgaaactactcaattatcccatccttaagaattctttatctgattgattttattgtttactctactactgtttactgcatcctgtcatctgttgtttagtttctgcaaatctttactgttactcgacctgatactcgaccacccagttgtctggcaacagactgtgcagtcgagtatccctgtttcattttctgtctgttactcgacctcacccagtgctctgcaaagagctgtgttggtcgagtgttttactgtttctgtttgattttctgttttctgcatgttcacttaggactgctggaacacaccaaaacctgttatgcttggcttgacttagtgacttctgatcacatcttgattgctagcatcacacccatttggattgacaacctaaaatactacaacgatatgattggtgttttaggataattgactaaaaacctattatcaatttggcgccgttgccatttgggtgtttgtttgttacatttaagatttcagatttacttagatcaagttctatttcaatttttacttcagttactaactttgtgtttgattcagaatggctgatgatcaagatgaccagaatctacccacaaacattggtgctcgagatgcaccaaggaatc

SEQ ID NO: 155097 - DNA, 823 bp, Arabidopsis thaliana landsberg
cgatgaattgatacaatctcttctatctgctgagttttttgttttctggtaaacaattttatctgtggagttttctggagttgctagtggaagaatctgtctcacaggtgagcttatttcgttcggctttgatggaatctatttcgattgaatttaattagaaaatttggttcttatcctcagtgtttccatagcagcggtagctgaggatttctcagatttgattgttttttttttggttgcagttagtttcattgaatgcctcatttcactggattttagttgtttatgtaaactcgcggtttaataatgatagtttaactcgattttgctagaaattacgagcataaaatggtggaatcctactatctgattttttttcctactttgtttttgtgctacttgctatgagatttgactttttggctgtagaatttgagtctaatttctggaattcatgaatagttgaaagaatgggttaactcttagggtttggattacatgtatttcgggtttcatgggatttgattctggataagaaaagtcaagttttcttatatgctgggttcgatttctctattattggaagctgtttaatatatttatatttcctatccagaaccagaaatagtgtttgtgggagttacatgttttgcaatagagatgacatatcggggtaatgtgcatgattttagtggtgattaaagagtctgaagttgggaggaatgtcggacttgtacattcatgaggtgagtggagtcacaatcatatatgtgtgtgtatcttttttctatgagactatggatttagatctttcgttgtt

SEQ ID NO: 155098 - DNA, 286 bp, Arabidopsis thaliana landsberg
aaacataaaatttagttatttcttttcaagtgagatttaagaagttgattttaaacatttgaaagaaagagccttcgtaatttgcatgtgagttgtgaatgaagttgctgaacctttattgaaatatttgggtggtcataacttcatcaggctactaacttagttagaaaccatactctcagtctccttcacgaacccatccccggtccaatctttatcagatttcaagcctctcttctcagcttttctctgctcaactgcttctttctgtctcttaactaaatct

SEQ ID NO: 155099 - DNA, 64 bp, Arabidopsis thaliana landsberg
aatttttctatataataaataattcttaaattttaaaaattactactttaaaaaaaataatcac

SEQ ID NO: 155100 - DNA, 405 bp, Arabidopsis thaliana landsberg
aaatagaaaggtatatcacaaatcgaaaataaatataaacaacctctgtgaaatctctttctccgatctatctgtaatatatggcaggtccatttgaagtgttatcccaaacacctccttccttgacatactccaagtacctagcgaattctggttttgcagtcgtcgtgctcttcttcttcttcttcctctttagactcatatcgaagaaactaaatagagggtgagccgaacccctggttttctccaccggtttattcaccttcggggattgaccatggggatttgtaggaacgctctccggtttcacttctaaaagccctgcgcctgcttcttcttcgtcgccgagcttcttgtagctgcctcgaaccttcctcgtgctcagcgctctaatcattatttctt

SEQ ID NO: 155101 - DNA, 383 bp, Arabidopsis thaliana landsberg
agcaatggatgattatatatgcttacctttttaggagttttttatcttgcttcaaaacattaggtgacttggtatgctttcgagatctttctgatatttattctgccaactcatttttcttcctcttttctttaacctttaaatcgatttaagttgattcctatgcatgcctctctatcactcccctcttatatgcaagaaaacacaaatcctcagttttctacttgtttacgggatctggatattgactaggagcagaactttatgtaatactatggtataatggtttagcataaagagctattcactttgtgcccaaagacagcttctgcatagatgttgcagaccaaataataaagactacatgctgtgtttcgacatgc

SEQ ID NO: 155102 - DNA, 471 bp, Arabidopsis thaliana landsberg
gagccggaaaaggaatgttccgccagagaaaccaaggcccgcaaggtaatataaaagagggttgtgggaaattacaattctggagtcaagtataatatattttgagattaaaaggcaatttgttgatcccttggcatgagaaaaagttacagcttactatgttcttactaaagcagattttagagatgtgaaatatatgatcctcgtggtctaatgattatgtaaggcaggacatggtgtggattacctgatatagaaaactctccttataaagaagactaatggaactgcttcatatagtaagtctcactatctatagtaattagtgaatgagccaaaacttgttctcactactcttcaactaacaccatgataacttgtatgaaattgttatgcagggacgagaaaaataaactcatacatagaatcaacagaagctagcccttctgcatcgtcgatcaaaacagcagg

SEQ ID NO: 155103 - DNA, 385 bp, Arabidopsis thaliana landsberg
  unsure (1)..(385): unsure at all n locations
aaaaaacaaattagcctgtacatttttcattatcaacgtagccaagaaaccaaattaaaagatgacagtttttgaccattcacacattttatgtgcacaaaaaaaaagtacaaatttacagaaaattcttttggagctgaaaacaaacccgaattctgttttcttctcttctttaaagtctataaatatatatataaacccaatagattagaaagngattcttcttcctatacctttctcttctccatgaccagtgcctatgatttacagattgagcaaacgttcttcacaatcagccatttctccaagcactctgcatgatactcgtgcccgcaatccaaagtcgcaatcttttcttcgatcttgaagctttcctgtaaagata

SEQ ID NO: 155104 - DNA, 240 bp, Arabidopsis thaliana landsberg
tagtcttacgtcgtacataaattatttttatattattgtaacaacaacgggaaaataaacattaaaacagaaatatgcatgtcataaagttactcatagagtgacagagacttattttatgtaaaatacacacgatttagcaccaaagattattggtagatttaacatgggacgtaacagatacacttgtgtgctgggaagacatagttgcatgatccatgtttggctccttcaaggtta

SEQ ID NO: 155105 - DNA, 134 bp, Arabidopsis thaliana landsberg
cttgttgtgatataggaactatttttcatagatggaaaatctttgttgtatatataatagactcattacaagctttagtggtatcatcctcatcacgtttgatctctcgcaaaactttgaattacagaaaaaga

SEQ ID NO: 155106 - DNA, 309 bp, Arabidopsis thaliana landsberg
ctttgatgtgaagctatgttacaacaagatctatgaggaggaacaaaaggttccgtcttcttattttagactctgagagctgcgacaggatcttgccatgaaattttcctcttatttgatccgtttccgccattcctgcaagaagatggcttcacatctttctgctgcatctcaatgctactgatcattaatctcttacatgaattactttcttcaactctcgtgttctcttgattattgtccactgcctctgtttcttgctcttcttctccctatataaatcaatttatgagtaaagacatgtttggt

SEQ ID NO: 155107 - DNA, 79 bp, Arabidopsis thaliana landsberg
ttttataggttgtgtgcagaaaaatcatgactttggcttctcctcgagtttcaaattcaaagacgactgtgttgttgtt

SEQ ID NO: 155108 - DNA, 561 bp, Arabidopsis thaliana landsberg
cgttgatcttacttgagaaacactcaaacccatctttgtcataaacccttgtactacaagatccacttggtccatggtggcatgtcaccaacgtgtaatcctcctcgtccattatgaacatctcctcgtcttctccgtccgtgcttccaccatggctcatgaactgaaccggatcagaccggccgggttggttcggttccgatctacaaacgctcgtgattcgacgagtgtttgagttctcgagcgcggctacaatccctagaccaacagagccaccaagattgtcatcgtagaacctctttgaactgtttctttgagatatctgagggagaatcttgaaatccagtgggcttttagggctcgtcatcaagacgtcgaagaaaggagccgccgtggatcggttgacaccgacaaggagctccgatatctttccgatcatgggatgggttcttttagtaagcatgatcttgagagagcagggttttgatgatcagattaaatcgaaaaaacaaaaactaaaagaagaaacataaaagaagaagaagagagaagattggtggt

SEQ ID NO: 155109 - DNA, 257 bp, Arabidopsis thaliana landsberg
gttaacaatgggatgtatattattatccttctcatcagatgaatctaaaagaaatggctcaagattcttcatgaggtttcttttcctctcctactgtacattagaaacagagcatcgacagaaatgaagatgatggatcattgccctcattattaagggcacaaaataaattaaacattacaaaaaaaaaaggttatcgattgattgattcatatgatgtttggatttggatcgtttcgatgagaatccgcaaaatc

SEQ ID NO: 155110 - DNA, 99 bp, Arabidopsis thaliana landsberg
aacggaatattctgtgttttctgtttttcattatatcaagttttggtctctctatttctataactgaatcttcaatatatttagtagaagtttatatcc

SEQ ID NO: 155111 - DNA, 56 bp, Arabidopsis thaliana landsberg
tgcacctccattggttgctcgtggcacagggtggctcaaccaaggattaggaaact

SEQ ID NO: 155112 - DNA, 341 bp, Arabidopsis thaliana landsberg
aaaccgctattgtgaaggttctgttttctgattgcaacagttctgtatttaagaagattgatgaagaagtatacattttgaagggacaaggagaggagttgatagagttaataacgaatgcaagcaaatttcttccatcttcgtgttcatatcttcaaggcgcacttgtctcatcgatgcatctatgataatgaatcttttcttcacctttttctgagtttatttgtgactcagtttttttacttgtttagtaacaacatttaccttttggtttagttatggttattgacgttgttctaacttgtattaaaatatttggtttttcaattgaatgaaaggaa

SEQ ID NO: 155113 - DNA, 313 bp, Arabidopsis thaliana landsberg
aaactagtcacaaacgatactagttatttaatttattattacgaaaatgatgaacaacaattaaagatcaaatcacttcaagaaaccttgagccatcttggcataacctccaagcccaccaccagactcttcatcgtctttcttagccgccggctcaggctgacttgctggctcagcctgactcgtcggaggaggaggaccaccagcaccggtggagtgtgacgactcgtagtcgttgagatacttttcagccttgtcgaggtactgaccagtgctactcttttcatcgaacttaccgtatttctcggcagcg

SEQ ID NO: 155114 - DNA, 330 bp, Arabidopsis thaliana landsberg
aaatccccacttcacgaatcgcaaaaggtcaaggtacgttcatacatgtccgtttctagaattagggtttttgtttttgcagttagtactagaatctcaaatggatcttttttttttggatgatcaggtttattgatgtattgcgaaattagggtttgtgaattcgaatcggagattaataatagattttgtgatggagtgttcatcacgcatagaagaatcttgatttcgctctcgatgaaattaggagtcgcgggcccttatttataattaagatggtgaataataaaaccctttacggctattcatcgaggattctattaaggaatg

SEQ ID NO: 155115 - DNA, 349 bp, Arabidopsis thaliana landsberg
tccggtgtagtctacaggagaactttgagaatccacgggggcaaggtacagcttcgtatacaacgaatggattgaatatgcgtcgatctgcgatgactaattctcttgtgagaattggtggtgttgaaggtgaatgggtgcgaagagctttgactactttgattagaccatcttcacatcaactaaagagaagatctgcttatgagcctcgtcgaagtagactcgcatctatgtggaaagcagaagatctttgaatctctcttcagggttgttcttgtttatgatatactcagatctgccatgaacgagttgaatcaaggagcagaatcggagctgagtcataccggac

SEQ ID NO: 155116 - DNA, 76 bp, Arabidopsis thaliana landsberg
ttgtttttttttttttttttttttttttttttttttttttttttttttttttttgtgtgttgttttttgttttttt

SEQ ID NO: 155117 - DNA, 371 bp, Arabidopsis thaliana landsberg
tcaccagaaaagaacttctattttgaatcatttcccaaaaagggaaacttttttttacctgtgtaaaaataacttttaatcgtcatcatcatcaaaaaaaaaaaccggatttaaagtatagagctttgctcagaaggtatatgagtgacgaggaaacgatgcaccatttcgaagctagtgaaagttataactgctgcaagagttgttctcagtagattcgtggcgcagcctctgtaaaaaccagggaacccatctttctcaaacactttcttgatgcaatctcttactcctgagtaacgtttctcactgtggtgcccttgctctagaagcctagctcgtactacctgcacaccgcgagatcaacatgtttc

SEQ ID NO: 155118 - DNA, 347 bp, Arabidopsis thaliana landsberg
cagccttatattccatatataatatgtggcaagtccagaatgtaatcacgtatgtcatagttatatgtgcccaaaacctggaaccaagaaacttccacccgtcttagttgataaaatagaaagctgcacaataccatcacacactttgtaaaaaagaaaccctttttattgacacagtctgtaacttgcagataacaacagtccaccaaacttagcaaggtgctaacatataccctgaactgagagaaagcagtagtgaataatacctcggcgatcctggtggaacatttgatattgacagcttatcgacgttactgaatgtcaagtcatcgatattttctagagtt

SEQ ID NO: 155119 - DNA, 370 bp, Arabidopsis thaliana landsberg
aacacacattcaaacaagagcgagattatagatcaagattcttttcaaagcaaacgttttgactcggacaccaaacgtgaaagtcatgtgggattcttcgactttttatccgttggaaactctgcctcctaggattagtttttttgcagtaactcctaaatttctagattaactatttagtccgcatacgtacgagattatctaggtcgttagcatgtatgcttgatgtgtataatcactaactagtgagctattacctgcgaaaattgtaagacaaatacataatgttgatgtatcacacattctcaatgtctgtaaaatttccatcgagttgttaactatcaaagttatgcgcttgaacggatttggg

SEQ ID NO: 155120 - DNA, 216 bp, Arabidopsis thaliana landsberg
caaaaagaaagaacaaaggtttgtgttctatcccttctgatgtcagcattacagttcaatgcttctgcgactgattatacgtgtgcatgtcgcgtatttcaagctctactttgtatatgcattagactgcaaggacccatcttgcatgagcttaagactaagacacttaaacaggtccctcgagtactgcctggaagcttttctccgatccgttcc

SEQ ID NO: 155121 - DNA, 121 bp, Arabidopsis thaliana landsberg
tattatttcatctccaagcttcgaaaacccaaaagagaagtggccactttcttcgcctataccctattaaatcaaatccattgctcatgtcactccccttgctgctacctccgactacatc

SEQ ID NO: 155122 - DNA, 258 bp, Arabidopsis thaliana landsberg
tatgagtaaatgataaaattaacatttcattattccattcatgatctgcatcggtttgcagaaacttcttcctttccttcctagcctaaaccgaggaccgaagctaggcatcaatatggatacttttgacttcttcaagctctagccacctcaagagagagaaacaaacaaactctagaaccgaaaacagatagtttttggtaataaacaaagctttggagattatttctctgtttatttttaattataaaaccacga

SEQ ID NO: 155123 - DNA, 148 bp, Arabidopsis thaliana landsberg
aatgtatcggtgaaagatagtggtacaactatcttttgcacatatttctactgatataaagtaaagatagaagggatatagcatagtgacaatgtagaaaatgcaatatttgattgggattacatagaatccaatttgtttgaatata

SEQ ID NO: 155124 - DNA, 233 bp, Arabidopsis thaliana landsberg
gagaaaaatgaaactttcatgtataataagcgatacaaatcgaatcttctttaaatgtgtttcaagaatctatctttactctaagtgaaaacctcgtaaaacttctcggtaacgagaattcccgaatccatagactccaatggatcttttctgagtctgtgtcttaaacagttcggtataacaataccaacatcttctgctgtaacttgatctcttcttggagtgctgcagtg

SEQ ID NO: 155125 - DNA, 257 bp, Arabidopsis thaliana landsberg
gaatgaggcggggggtaataattcccatattgattggacccaacccataggctcccatttttaataagattccagcgagagcatacaggtcttgaaatgtcctccccgtgggtgcaggtaaccaagtatgtaaaggtataatcggtgatttgcggcaaaagcaataagaatccaatataaaatagtatttcaagtgtacaggataggatttaagctaagagttctaaattaatgttggttcgttcgaaccataaaaa

SEQ ID NO: 155126 - DNA, 569 bp, Arabidopsis thaliana landsberg
tggtcagcgctttagagactatccgatcactgccctctaagaccaccgtctcgttctgctcaacaccatctcgattaggccgcaaagtcactgcagttagttttgccaccacttctgatcagcaaaagatgtatataaagccttaaaatcctaacgaaaaaaccgggttagtctcctccccatatgtgtgtagttgtttctgattcgtaatttggatgttattcaaaaaaaatatggttctcttcttaactttgatggagcagtgacgtgatgtcgcattcttatgcagaagggtacgcaacaaggtctgacgaataagggtttgaagtaatctatggaggaaatcaaacgcttcagaaggaaaacgagatccatgagaatcaccctggtactcagaatagttagttatcatatacacgtttattactacttatatcatcccttttattgtttacgattctcggtgtgtgtgtgtgtgtttactatgttattgaacattacgacaacacgccaggtagcgaatcgaagaacaaggagaaagcaagaaaccacacacaatccgctctgct

SEQ ID NO: 155127 - DNA, 80 bp, Arabidopsis thaliana landsberg
ttttttttcttttttttttttttttttcttcttttttttttttttcttttttttgggtgtgttctttttttttttttttt

SEQ ID NO: 155128 - DNA, 284 bp, Arabidopsis thaliana landsberg
aagcaaagtgatcattcaaatataaaagtagctttctcatggaatacaacaaagaaatgcacatgcagaagaaagtagatttaactctaaaagtacagaagcaaatctatgaattttactacaccggcaagtgtttcatcttggctcagggcattaagccaagctatactctttgtcgattcaccagttccggcaaagtagtctaaaccactatgctcataacaatgattgttgctcacggacatacataacacaaccaataacgatgaatcagaagcagacct

SEQ ID NO: 155129 - DNA, 356 bp, Arabidopsis thaliana landsberg
gactaggttaacttgagagtctctattgcggtggcacttagatttggttaatgaacttgttgtctagcgttaatttattgagcatgtcaatcacctgtaaactgaggaaacgaaactactcaattaccccatccttgggaattctttatctgattgaattctttgtttactctactgttgtttactgcatcctgttatctgtcgcttaatttctgcaattctttcttgttactcgacctcgtactcgaccacccagttgtctggcaacagactgtgcagtcgagtatctgtgttttattttctgtctgttactcgacctgtcactcgacctcacccagtgctttgcaaagagctgt

SEQ ID NO: 155130 - DNA, 426 bp, Arabidopsis thaliana landsberg
gcaaattctccaactattccttagaattcaacagtaaagatcgaagctttacatagagaaattacataaaaaccaacaacatcagatcaagactccaaagtgttaccaagaggaaatgagaagacttcacgaacaggagaaaactcaacaagaccaatctccataccataaccattcaccggaagcttcaaatctctcaacacagagaaagcctcagccatacgtgacttaggaacatcaagagccaccggacaaaacggaacccaagaatcaacacgatactcttcaccaatctcaacagattctttcttcaacatatcacataactgagtctgcaactgaagaagcgatagagacggagtcggagatagaaacaagacgttgttgtcgctagagaagctaccgatagtagagaacgagatcgag

SEQ ID NO: 155131 - DNA, 362 bp, Arabidopsis thaliana landsberg
tgtcaaagatgcaactaaattgaataaaagaacaaaaccaacagattaacttttcatacaaccattcccactagttgttagttcctgtcaacgtaattctagaagcaggaaacatagagtaagagagaagagagaccactgttatgcaagtaagtaacaattttttggattgagcttcttcttcttctttcaacggctttcttccgaacgcgtcttcctcgacctcccacgagtcatcctgattgtctcctccatcactgtctcctttggaccttccgggttgggattttcattccctgattctgcctctccttccacttcttctatctgcattggttccacttgggtggttgactgtggtg

SEQ ID NO: 155132 - DNA, 79 bp, Arabidopsis thaliana landsberg
tagaaaggcaaaaaaaagttgcgacattattttagaagagaagggcaagagctaaagaaactaacatgtcttttgtttt

SEQ ID NO: 155133 - DNA, 238 bp, Arabidopsis thaliana landsberg
cggagatccatctgtcgtttcatagccgtcgtctccaccgtgatttctccgctgctggcgccacgtgtgacaaaccggcaacgttcacgtgttgtcgtggccgaatttagggtgaagctacgagggagaacggtggttggtgcttcgcagatttggaaattaccgggtggtaagccaaaagcgccggagccaccaccaccgcggatgaaaccggctgagcatgacgtcatgctacgta

SEQ ID NO: 155134 - DNA, 327 bp, Arabidopsis thaliana landsberg
  unsure (1)..(327): unsure at all n locations
ctgcctctgtggaatactttccctattactcaccaccctcccatcaacatcctctcccttctccagttccaccccctccttcccacatttcccctccaccacctccattttctcctcctgatcacccaccaccaccacattattctcctcctcatcagccaccggcatcaccatatcctcatcctcatgcgccaccaccatcaccatatcctcatccccatcagccaccgcctccacctcacgttcttncaccaccaccaccaacaccagcaccggggcatcatgtatcattggcgttgttatctctctgggaagttggtttttctt

SEQ ID NO: 155135 - DNA, 92 bp, Arabidopsis thaliana landsberg
gatcgagccataatcaccagtttacctacacatttccctcgaaattgctttatttaatttttaaatcaagaaaagatatttgtgtcaccaaa

SEQ ID NO: 155136 - DNA, 158 bp, Arabidopsis thaliana landsberg
gatgttctcggaatctgttgtacatcggaagttcctataatcgcgaatattctcaagtcacttgacggcggtagagaatattccgtcatcgttccctcgagaaccgtgattgttgttcacgacagtctcctcatctctcccttccaaattggtaaatc

SEQ ID NO: 155137 - DNA, 294 bp, Arabidopsis thaliana landsberg
aggaagtgattttgtaaggagaataaaagggtaaaaaaaaattggtaactcttatatggtaagaagagaagaaaagagcatacctgggaaaatcaggggagaatttgctggagggtgtactggattgtatccatgacatcactgcggctttggctttagcgaggatgactgattctgcttacacagtagacaccattttctagactcgcccaatggccgaatccacatatctttgcttcctccacttactcgcaagttccgatccctttcaaagatgggttcttttgggaattg

SEQ ID NO: 155138 - DNA, 379 bp, Arabidopsis thaliana landsberg
attaatgtcgaactcttcctaaaccctctttgttcacatttccttctctttctcttcctccgtctctctctgaaaaaccctaattgactcgttgcgattgaaatggatccttgtccattcatccgtcttacaatcgggaacctagctttgaaagttccgttagcggcgaagacaacgagctccgtcgtgcatccgtcgtcttctccttgtttttgtaaaatcaaactcaaaaacttcccgccgcaaaccgccgcaatcccgtacattcctttggagacgactcagtttccggagatccaaaccctagccgccacgtttcatctcagcagctccgatattcaacgcttagcttccagatctatatttacttctaagcctt

SEQ ID NO: 155139 - DNA, 269 bp, Arabidopsis thaliana landsberg
  unsure (1)..(269): unsure at all n locations
taattaaattgtttcatttataaacattngtatagaccggcaagcagattaaggagaaggcacaagagcttccgaaatcagtaaagaacgccaccggcatgaacaaatgaatacaataatcatatgattcattatgttattttttttcacgaataaaaacaataattcattttttgaaacctaaagattaggttcaacggtttgattattcagactgttgtttctttctttcttaatattattacttcttctcttggatttttgtttct

SEQ ID NO: 155140 - DNA, 311 bp, Arabidopsis thaliana landsberg
tgacacaacgataactttagcacaaatcacttgctcttgtatcttgatttttgttcagttttacatgtaagccttgtaaacatataattattgtacacgaaaacttacgtagatcatattaaaatcgggatataaacagatacataattgttacaatcgtagagaaaagatggccttgagaacatagtttcactttcaaacgcgcaagtgatgctatctgagatcaatgacatcaaacttgagatttgggttcatgtaaacttccttacaggtattgtaaattggtcctccgtcctccggtgaactgtgcg

SEQ ID NO: 155141 - DNA, 260 bp, Arabidopsis thaliana landsberg
tatggttcatatctgggtctcaaccagtcggcgcactatatataagctctcaggccacaccggttctgtcaataagtgtgttttccacccaccgtagcctatcattggctcttgcagtagtgataaaaatatctacttgggagagatctgaatttcaaagctgtgaaacctttgcaactctaagtggaattgaagtctttagaatctacgatgtgctttgagacattttgtgtattgaaagaaaaagcgaatcattgctc

SEQ ID NO: 155142 - DNA, 219 bp, Arabidopsis thaliana landsberg
  unsure (1)..(219): unsure at all n locations
aaaaaaaaaaaaaaaaaaaaaaaataaaaaaagaaaaggaaagaaaaaagaataaaaaaaaaaaaaaaagaagggatcgatagcggaaacnaaaagaggaaaaaaaaaaaaagaaaaaaaaaagngaaaaaaaaaaaaaagaagaaaaagaaaaaaagtaaaaaaaaaaaaaaaaaagaaaaaaaaaaaaaaaggaaaaaaaaaaaaaaagagaaaaaa

SEQ ID NO: 155143 - DNA, 99 bp, Arabidopsis thaliana landsberg
aatcaaagtcatcatcagattggtccaattttagctttaataaactcaactaatttactttcatctcgttatcgtatatgaagcaactctggactttct

SEQ ID NO: 155144 - DNA, 136 bp, Arabidopsis thaliana landsberg
tctctctcttcatcccctagattgaactaattgcaattggagtgtatattgcagtatctagtgtttgaatctctgggtattcctctatggatccagtagatatggttgtgtcacagccatttacgcctggtcaggt

SEQ ID NO: 155145 - DNA, 103 bp, Arabidopsis thaliana landsberg
agatggcctgcgatagctgaaaaattgcctggacaaacagacaacgaaattaaaaatgtttggcacactcatttaaagaaaagactccaccacagtcaagatc

SEQ ID NO: 155146 - DNA, 238 bp, Arabidopsis thaliana landsberg
gcaaattgcttcttctccgatttcgcagacgattagatctcaacaagcagttttcgaattcgagcgattcatcttcgtgaaccttcttcttcaatggcgatcgataactctcgtcctcctccggacgaaatcttttacaagacgaagaagattttgtatcgtggacaaaggtgcaatatcattctccaggataagaatggaccatgtcctctcatcgccattaggacgtatatcttct

SEQ ID NO: 155147 - DNA, 352 bp, Arabidopsis thaliana landsberg; identical to SEQ ID NO: 78215

SEQ ID NO: 155148 - DNA, 875 bp, Arabidopsis thaliana landsberg
tctctccttacggaaacgagagtacgttcttcgtgttctatatctaattgattgtgtttctctcgtttatgtttggtaccgaatttagattgagaactagttagggtatctcggtgaattaaaatgaaatcgaaagcttctgatctagttacctagataaataattggatcaggagtactgaattttggggtttactgaaccctaatttcagaatctgcattgcttgaggttagataataagttgccctgattcaattgcagttggagaatatacaacagatgattgctggagtaatgtcagaggatagagacttacaattggaggcgacggctagcttcaggagattgctttcaattggtacgtgatttataaatctcttaacatggcgtttagggtttgattgttttgtgggttttagtttttgcttattgtggttggttgaattttttgtagagcgaaatcctccaatcaatgaagttgttcaatctggtgttgttcctcgcattgtgcaatttctttccagggatgacttcactcaacttcaggtgagcttgcctttcttatatctaagtgtagcttggtgctttgattcatatgctgatggcttttgctgtttgctttgcttgtataactatagtttgaggcagcttgggcgcttaccaatatcgcttcagggacatctgagaacactagggtcattattgatagtggtgctgtccctttattcgtcaaacttcttagttctgcaagtgaggaagttcgagaacaggtatccatttagcttcaatatcaattttctttctattagatctggcaaagaaactcttagatcaaattgctgatgactcgattccggggttttacctccaattt

SEQ ID NO: 155149 - DNA, 399 bp, Arabidopsis thaliana landsberg
  unsure (1)..(399): unsure at all n locations
aaaactaagcagaagaatgataatcgaaattcaaatgattctcaaaatttacagtcattatatgaaatatgcagtggcaaaagaaaacaatgcatatagtaaaaaatgatcactcatacagatccacaaaaaataccgtcatttcgtttaaaatcattatttgctttcttttgttcatatggatatatatatgaagatgcattggatcactcgcattctccttcagttgtcgccgaggaaacgtaactcataacaagagacgacgtactctcatcagccgtaacaggcagctgaaatagttgcttgcaagagtggcaagcgatctccatcattgttgcattaatcctcttgattgcttcttctctaacaacgtgagccttctccaactcggntnttgct

SEQ ID NO: 155150 - DNA, 256 bp, Arabidopsis thaliana landsberg
gggtttttaactttttaaaaagattttaaggggcctaaaattggttttttttttttggtttttttttgggtggtgttgtgtccttgtttggtatgtagtcaagtaaaaaggctgaaacggctgcagaaagaaagggttgggataaagattaatgtagcccgcagctctcttttacgttatgattgtattaaagtatatatatatatatatcatgaagaaattaaacatggtttcttcgatttatataaataaataa

SEQ ID NO: 155151 - DNA, 516 bp, Arabidopsis thaliana landsberg; identical to SEQ ID NO: 60959

SEQ ID NO: 155152 - DNA, 138 bp, Arabidopsis thaliana landsberg
gatctccagtcacattctcatctccacccaaaggacagaggttgtcaagcttcttacggtaactcggttcaagagctggatccggtttaccacaaccggattggttataaggtctgaacatgattgaaaaacaccgac

SEQ ID NO: 155153 - DNA, 394 bp, Arabidopsis thaliana landsberg
aaccagcctccttctctctctctgttagctgcgttcttcttcaagctagctctctgcttgtactctagaataatggaggaagagcttcgtgttcggctgaatgaccatcaagtgtcaaaggttttccctgtgaagcccaaatcaacggcgaaacctgtttccgaatcggagactccggaatcgaggtactggtcctccttcaaaaatcattccacacctaatctcgtctcctccgtagccgctttggctttctctccggtccaccctcactccttggccgtcgctcactccgccaccgtctccctcttttcctcgcagtcgctttcctcctcccgccgtttctccttccgcgatgttgtctcctccgtctgtttccgttccgacggagctcttt

SEQ ID NO: 155154 - DNA, 175 bp, Arabidopsis thaliana landsberg
taaaaacaccaaaacctttttattatagaagatacaccaatcggaaaccgggtttgaggaaaattatatggaacaaattgtcggtttgctactggggaactgattacttgggattggtaaagagtgaaaaagtgaaaaaccaggtgtcgaaattgagatcgtacaagctaaacaa

SEQ ID NO: 155155 - DNA, 167 bp, Arabidopsis thaliana landsberg
ttttctcttacccggaagaaattttccagactttgttatggattatgcgttgcttcggattcagattaagaggagaaaaggagggattaattgaaaaaattgggggattaaacgaaaagggaataagggagaagacggaggaggaggaggctgggattgagtttgtt

SEQ ID NO: 155156 - DNA, 200 bp, Arabidopsis thaliana landsberg
cttctgcccaaaccaaaaaaaaaagtttccagatccaaaattacaacaaagattctcaaactccaaaaacttcatcttaaaaacttaacaaacaaaattctaattacgaaaaatcccgatcctagtgtttacattgttggcttttttgtttgatctgtctgtaatttactttctgtttgacacgtggtatgttttgtaaa

SEQ ID NO: 155157 - DNA, 218 bp, Arabidopsis thaliana landsberg
aagatatttacgcatcacatgagctttcttcaattgttaaccatttccctccaggtaaaatttttgtgattctatcatcctggtgcaactgagcaatctatgcggttcacattccattcaatcatttacttgcatagcctgaagtcaagaagaatgaattagagggtgacccctatggtcttatgaacttcagttcagaatcttattctcctggaatt

SEQ ID NO: 155158 - DNA, 746 bp, Arabidopsis thaliana landsberg
  unsure (1)..(746): unsure at all n locations
tctttttccatatatagaagtatcttagacctcaagcacaaacntaatttccaagtttggggatattgagtagtctctgatccaataagaattgttgggttctttttttttttttgtgtgtgtgtgtgcagcatctgttgtggaagttggtcttcgcctatcttcttctagactgttgtatccttttgttttataatcttttactatcaaagtgtagctagcagatgtgtagttggtgagattcatcggcaaacttatttgaaaagccctgaactcatcatagatagaagcttgctactgagaaaaagtgatgaagaatcgagcttttctgatagccctgttcttctatctataaaggttagatcgtttctttttaatggacttaattagattttttttcctttaaggtttaaatgatttaagtcattgagattgtttagaaagggtaataatttcgcatttgaaacaggttctgattggtgtcttatctgcaaacgctgcatttatcatctcttttgccattgcgactaagggtttgctaaatgaagtttccaggtgattactgattcttcttcttcttagttcttattatgagtttttcatcaaagatctcagacttctgtcacctgaagattgtttatgtataattttttttaaaaactttgcagaagaagagagattatgttggggatattcatctctagttacttcaagatatttctgcttgcgatgttggtatgttgtag

SEQ ID NO: 155159 - DNA, 270 bp, Arabidopsis thaliana landsberg
aaacaggcgacacgatgtctacgactctgttcaaaaagattcttcagtctcataaaacctttgtacactaaatcaacgaagaagcagtcatcgtcgacgattacatctccgacgtcatcaccggcggcgagggagaaacaaaggaataatattccgtcgggcatgaaaagtgtcagtagtcaacttgggaagagtcggtcagcttctgcggcgatcggaggaatgtctccggcgaacagagtcgacgagtcattacaagttcaacaagat

SEQ ID NO: 155160 - DNA, 164 bp, Arabidopsis thaliana landsberg
ccaatgcgcagtgtaaaattcaagtcttaaagaagagaaaaatggtggaggtgtggtggtcactgattttagcagcagtgtctgcactaattgctggtcaagcttggaggataaagaagagacatggcgaagaagagaggatcaagagtgctcgaggaagagag

SEQ ID NO: 155161 - DNA, 307 bp, Arabidopsis thaliana landsberg
tgcagccttggaaaagcttaaagcaatggcacaacatttaagccagtgggtttggtatgtctctccttcaccaaacattatatatattctttttacctttgaccatgatgaatgtgaataatgataagaactgaaacatgaatctctgcgattgtgtaggtttcggaagctttttgttttgttttcaagctatacatatgtgaatacacttgatagaatcaaccctgagtcaaacgagctcttgtagagttgttgtagctcgtaatgttggatcattgagacaagtcattgatattttactttttca

SEQ ID NO: 155162 - DNA, 117 bp, Arabidopsis thaliana landsberg
ttatgaacacgttcctttctcttccggcggagtgtctcgccgatctacaagctattatttcagtctctgataaacaatcttgaatcgtaatgataaagcataaatatttgagttgaa

SEQ ID NO: 155163 - DNA, 203 bp, Arabidopsis thaliana landsberg
ctgaaataacattctgaagttttatgaggaccgagagaactaagtttaagaaaaatgttgaaaaaagcgtattagcagagggacaaacgctttttagggttttagatttcctctgagagagaattttcgaaagcttgagagagatttccaactacgttaggcatggcgagcaccaaagttcaaaggattatgacccaacctat

SEQ ID NO: 155164 - DNA, 98 bp, Arabidopsis thaliana landsberg
aatgacgtaaataccctccatatcatctccttcccttcctatatttaaacaccatcatacatctctctctcctttgtctcgtcttccatgtccgatat

SEQ ID NO: 155165 - DNA, 158 bp, Arabidopsis thaliana landsberg
taagtcaaaatgcttgaaatgatatatatttattttataaaatggcctcacttgttacaacttgctaccatatcagttgatgtgtattagttttattgttgtatatcacatcaattagttttattgttgtatttgctagccatgaagttaaatcagaa

SEQ ID NO: 155166 - DNA, 1137 bp, Arabidopsis thaliana landsberg
aaatccaactggggatcagcaactgtcgttggagtatttgcaggattgctatatggagggagcaaagaagcttctgcttctgtggtatgtctgctttcaatttcagattcaagctcgttacttgtccttgagatttgtgtttcgattccactaccttggtgtaacttagtgacttctggtactagactgaactcataagatatcaaagtttaagacttttagctgaatattatttcctgtgtaaaaatcagtgtgtgtgtgatttgaaacagagcaaagatgcagaagtgatgttgaagatgggtagtacacaggataagcgtgaacaacacaggttgatgcgagatgcaatggagaaaaggttcatccgagtaactcgtggctccctcattggagggatgcgtcttggaatgttcactgcttccttctttagtctacaaaactttttagctgagactcgaggagtgcatgatgttttcaatgtggttggagctggttcagctactgctgcagtttttggcttaatcagtactgatacatcccaaactctctgcatcctcctttggacttatggcttattagattcaggatgttaacttttctgtgtcctaacatatcattatctctaatcaaaatgtggcagtgccggggtctcttgcttggcgtgcgcggaatgtgttgcttggttcagttcttggagccacagtgtgcttccctcttggtaatttatttgcataaatatgtcttacaagtcataacaatatttagagattgatagagaagcatcagggaggattggaaagttggctagaactaagtgatacttgcattgattctacagggtgggtacaactgaagctcatgaagaaagcaaacgaaggcaataacattgattcgaccagccaccacggtgaggtcacgagtggtgttggtgcagccattgagagactcgaacaacagttgagaaaatagggaagggaacgcgcacagttttgtatgctaaattcgcttctctgaagcaaatgagaataagataccaaacagaaacagtgtgttcttgtgtaattgcaacaatttttgaatatgcaaatatcaaaacattgatggtttttctactctcttaacatatttcgcaac

SEQ ID NO: 155167 - DNA, 129 bp, Arabidopsis thaliana landsberg
cctttcctcctctcttttcagcaagtttgttcaccggaacgttttttaggagatcttttgttcttgtttctctggaatgtagtccagcaagaacagtaatgtgctacgtcatagcttggagtttcttct

SEQ ID NO: 155168 - DNA, 474 bp, Arabidopsis thaliana landsberg
  unsure (1)..(474): unsure at all n locations
ctgtgcgttgatgtaacttgattccgcaaaaatgcattacaaaaatctcaaacgtctgtatgaaaaaattcgctttctttcgtaccaaaccacaatttagcacgagaatcataaattaagctaataaaaaaacaactcaaaacagagacgtaactatgtgatgttcctgataatatactacttactactaggctttgtcttcgttgtcgtcagaatccgaagcagctccgagtttctgttgacgggtagttggaagagaatagtttcgtcgctctttgcctcctggcttcgaagaggcattaccgtaccagatcatacccagtactgcaattatcattccaacaaccacgtgcaagttaagaccttctctaccaaagaagaagaagccnnnnnnnnnnnnnnnnnnnnnnnncatgtgtcccagcacttggaacgatacagctgtgaatcttccgatgcagatgaactggctta

SEQ ID NO: 155169 - DNA, 312 bp, Arabidopsis thaliana landsberg
ggaggacgtccaattaatgactttccttggagtgaacagttataggttttcaatttcttggtgtagaatcttacctagtaagtccttctttacttaaatcagcagtattattaatactacattgcgttccatgataaataaaaaattcgattgtatctcatagactaaccagagttgataaattaaaatatggaaactcaatcgacgaagagttatttagatttagcttattatttgtgagacaggaggaagatttggagagattaattatttggggataaagtattacaacatattgatcgatgctctcat

SEQ ID NO: 155170 - DNA, 285 bp, Arabidopsis thaliana landsberg; identical to SEQ ID NO: 65285

SEQ ID NO: 155171 - DNA, 468 bp, Arabidopsis thaliana landsberg
ccaccactgcttccaacagtgagaatttcaacatctttcatcgccattccaattgttcttctcctttggtcctgtaggacgcttgtcgccggataattccaccggaagttttctaagcactgtggcaagcgaaaccctaaccgtcctcggaaatcgattcaccaatctctctatctcctctcttgaatcgtacacaacctttggtccccattctctcatgtactgcaaccacggcggttctgccaacacactgtttccgctgagatactccgctgcaatgatctcgtaccgtgagctcgaatctaccaagagttcactacgcgcagtgtcatttcttatcccaatcccaagcattgtcgatccctgtaagtaagtcccagccctaggaaagcttgcgtgaccatgttttgaagagtaaacaacggctttgttgcttccgggaatgatttcaaggtcgtatgcttcgat

SEQ ID NO: 155172 - DNA, 293 bp, Arabidopsis thaliana landsberg
caaacaatttcttagttgctcatatcataatcttcattccccacgaacactaaataacttacttttaactattaatcttcaacgatcttcaaacaaagaaatgtcgtcattacatccaaatcatcactaatttgggagaaaataataataagcctactatcgaatttacatcttttgaaaaaaaggaataagaagattccctcatctgggagcgaaagagacggtgatattcgctggccgttttatattcgccgaccatttgttcgattctaaatacagttagtgaagttttt

SEQ ID NO: 155173 - DNA, 863 bp, Arabidopsis thaliana landsberg
  unsure (1)..(863): unsure at all n locations
tgactctatcttctccttcattgcacaacagtaagttgctatagtttaatgtattatgatcatatttagaataagcttttaagtggttataggcatagaatgtattaggggatgtgattgaagcaacatgatttcttagttcattgcttttgtatctaatattttacatgttttcttgttttgtttggtaagtgctggttcacttaagaccttgaaggtgccaagaagtggtctgaccaattcgggtgtggtaaacgtagctgaaaagctctcgtctctcactttcttggatttgagctactgctgcaaaataggcccagaggcgatacaagccataggaaaacactgtaaatcactgagagagttttgcagaaacatgcatccattggatgtagcaagtgttgtctnnnnnnnnnnnnnnnnnnnngctatcgccaatacaatgccgaagctgaagcggttagagatagcttaccaccgagtcagcacagaaggagtactcaagatcttatcgtgctgtgtttttcttgagttcttggaacttagaggctgttgggacgtgcaacttgataacaagtttttcaaagagaagtttccggatatgaaagtgttaggtccacgcgtgatcggattctatgatatgataaatgattgggaggattgctgctcagattacttctcagatgggtctgattacttggcttgggagttttttgaagatggtgtaatgggagagttctatgaggatgagtttgagcatggttgggacgataatttttatgcggaaaacgcagttttagacatggaaccgcatatttggccaccatctccatgaaccagcccttgttatgttcgaagtctct

SEQ ID NO: 155174 - DNA, 85 bp, Arabidopsis thaliana landsberg
cctgaggaagagtctaagaaaaacaatcgctatgaccgcgttgatttctacgactacgagcttcccgaggatttcgaggttttaa

SEQ ID NO: 155175 - DNA, 180 bp, Arabidopsis thaliana landsberg
aaagaaagaagcaaaaagaaaaagctcgaagataggaaaatgttaagggaagaatgtactccaagttcatcatggtgggaagatgttcaacatcatcataatgatcatgcaaactcgattagttcgacgtctttctaccataagagtagtaataataactcacacgccaacgctagctgt

SEQ ID NO: 155176 - DNA, 324 bp, Arabidopsis thaliana landsberg
tgaagttagaagaaaatgagcaaaatatgatgacaaaagaaattcaagaagaaaagaaagagaagaagaagagaagaggaagtgggttttcctcatggataaggaaaatgcaaagacaaccaagaaaatccaaatgcatatttctcatttgtcttcctcatcttatcaaagcttcttgagattcaaaccaatcattttgggatattggttacacaatattggagcaatgtatgcaagatcatatgccaatttctatccttttttgcttgtatatttattatatatataatatggatttttctgaacatagaagtttttattgaa

SEQ ID NO: 155177 - DNA, 241 bp, Arabidopsis thaliana landsberg
gaccgcagaagaaaacagcagaggcaactgcatctgcctcaggaaaacggggtagggatacaggaagcacggggaaggacaataaacagccaaagaaaagaatcagaaaatgacaattcaaaacatgtttgcccctttagtggcatttcttaagagctcaagttattgtatatgctttggagttttttttttaatcttaattctaacattagaagtcctattctcatagttatggattaga

SEQ ID NO: 155178 - DNA, 394 bp, Arabidopsis thaliana landsberg
gtgaaaaagagaaaatctttggtccaaaccaaaagaaacgttccctttttttaatttgtctctttgctttaataatttccttctcaccgaaacacacaccacaaccaattctcttctccttcttcctctttcacaaattcgtcatctgggtattcttaaatttctcacaaattcatttactttttggttctgttccgagatttcaaggttcactatcgattctgaaactcttggaacaatccagattcttggttagcaggtggggaagcattaatcatgtatttatgatacactgctccattattattacgagagagttgaaagtttcctttttgactcgtttttaaaggcaaggaagaagaaagactttgtttttaaaatgccaatgtttcag

SEQ ID NO: 155179 - DNA, 188 bp, Arabidopsis thaliana landsberg
atttatcaatcaatttatttcataaaataatcaagtattatatactaatacaattttaatgcaatattgtaaaaccaatcagaataaaactattttgtgcaaaatctggattttacataaatcaagacaaaacttttatttagggtaatatgaattcgtgcaagagtttggataaaataatttcgtgc

SEQ ID NO: 155180 - DNA, 178 bp, Arabidopsis thaliana landsberg
agaaacttacaggaagccatggagggagacaaggattcgagaaacagaagaatgtaaggaagagagattgagattttttgagctgatacgataacgatatgaacgaggacacaacgatttggcgagtgtggagatgatttgatcaaatcaaaatatttgaggtgaacgctcgtcgttg

SEQ ID NO: 155181 - DNA, 1103 bp, Arabidopsis thaliana landsberg
atgatttcaaatccaactttattatcgtacacttgcattgcgaaaggaaccgtagttctcgcggagttcgtttcaaggcaagagccaggaatcgaagctatagctttacgatgcatcgagaacacgcctcctcatcattcaatgttttctcatacagttcacaagaagacgtatacattcgcaatcgacgatgattcctttgtttatttctcgatttctgatgaatccatggagaaacctgaatcattctgggttttgaatcgtttgagatcagctattgaagatctaattaaagacggtggatctgatgttgagacgctgattaatcctgtttctcattgtcttcaattgaagcttgatccagttttcgctgagattgttggtgttgttgatttggaattattggatatggatttggttggatcaccgaggagtgtagcgagagagagtcgaaatccgagtattgattcatctaaaggaagaagagctgctttgatgccacttttggggaacccattggaggcgttgtaggtgaagaagagattgcataatgaagcaaaagggggagattcttgtgaggttggttcgattcaggagatatcagagaagaatgttgatttatgtgggaatggtaataatggagtcttacgcaaggaactgagaaatggtttgttgagtgatcatcatcataaacaaaaggcgaaacagatttggaagaaacatgtttgggttgtgttgatgtttgatttctgcatctgtgctgttttgtttggaatctggctttggatttgtgaaggttttcaatgcattcaagggtaaaagttatcatcatctgtgtacatctccaaattcatattctttgaatccgcatcaaaatttgatcatttgacatcttcttttttctgggtatccgtttttttggatcaaatctgatcccttttgttatctctctgttcttgtcaactttttttttcatcttctttgatttttaaaagtcacaaaaagtgttgtttccaggaggaaactagggtataggttgaatcctggtttacattgttagtgatgttgttcattgtactttggaagttaaatcattcacaagc

SEQ ID NO: 155182 - DNA, 440 bp, Arabidopsis thaliana landsberg
aggataaaagtggtaaattgagtaattacaaaatcaattttgtaccaacaacaatagtggggctgaaactggggaaaagttttcacttcaaatcttttatttataaacaagaaagagagagagagagacaagagcaaggaagacgcaaaagccttggtcataccacacagattcaagaagatgcagctagaacagacatttgtgttgtccaatcaaacttatcacgactgtatttgctgctgcgtgaagaaatctgcttcttgtctttgctgctgcgggaattgctgcttcccttttgtcctttctttccattcttcttcaggttgtctttgctctttgatttctgcggttgctgtttcttgcttcttgtgtgagagacaatggagggaggaggatcatacacatcagccccccatgacacactgagcttcctcagtgac

SEQ ID NO: 155183 - DNA, 420 bp, Arabidopsis thaliana landsberg
catccccttttaccattactcggaaagcatccttcagcgtttaagtaggtcgcaagtccatgaactcccccagtagatgtaaacttttccctcaaaagaatattggtcaagcagatatagtcggagcttcacagacataggatccagaaacataactgaataagctccaactcttacccattggagaggtaagaaaagctttgccttgtctatcacaaaaaattacatatcatctctccgggagcttcatgtttcacagatttcccctgcagaaaagatgccaaaagctgtaaaacggggaacttgatgcaagaaactaacaagcatagtgccaaacacaacctccatcaaactagattttacccatcatttaacagccaccacgcggtaatgctcattagcaaacccatcgaggacatt

SEQ ID NO: 155184 - DNA, 356 bp, Arabidopsis thaliana landsberg
  unsure (1)..(356): unsure at all n locations
aattttgttaagcnccgngaanancaacaagagcgnnccattgaatctatgacccagnnaccctcaaaccccccagacacacaaacanatatgcatctgatcctaaaacaaactacaaattctcacaccatgtttctctcggatccaaaagattttccgagaacataaaagactgtttctagacaactaatactcaaaaagtttgtctccatctgcaagaatgatcctccaaaaaaaaatccctgcatcagaaagtcaactcactttaactcaaaaaacaacagcaaaacaacaacagatttcaaagatgtctcttcttaggtttccgttcagcagaatctcctgcagcaactgaa

SEQ ID NO: 155185 - DNA, 205 bp, Arabidopsis thaliana landsberg
agactgatgatatttattgttcatagtggaagatacacaaatcaatttttcagccatttacttcacattgatcaacattatttcagattaagaaatgactcccacagtagttaattaggaggatgacttaaagcgaaaaaaacgtttaggggaatagagacggaagaggttgaaggcggagatggaagagaggaggacgatgaga

SEQ ID NO: 155186 - DNA, 210 bp, Arabidopsis thaliana landsberg
caatggactggtgggcggtttcgtttctgaaattttatttgcccatttctcatatgccttgcttgacttcacttctcctgaaaaggaaatcacacttgataatcagcaactctcccaagtttacatagatttcagatcaggatcaccaaactggaataaaaaaattagaatgcatatttaggtggaatatgaaccatcaaacacacagcc

SEQ ID NO: 155187 - DNA, 322 bp, Arabidopsis thaliana landsberg
gatacaaacacaagtgttttattacaaaagatggtacatcgttcttgcacaagtaacaaccctgtgataatatacaagataagcctattttacagcggttttattctcacgcattgaattacaaaacatattctacatggggaggagattaccgacctcgcaaaccgatattatacagcagttattggatgttagggagatgttttgacatcagaacattaccgatctttatggttctggtccaatcccttggacgcaatcaactccaatctctgagaatgcttcaagaagttttgggtatagtttggagagcatgatcttg

SEQ ID NO: 155188 - DNA, 182 bp, Arabidopsis thaliana landsberg
tgcgagttcgtcgcaatttggtaaaaccgtcgtacgaatcgccgatgagcgggtttgcttcacagattccatccatggcgcttcttggatctggactcaccggcgaggtaatcttcctttagtttgattgatgtttccgattgtacggcttttgttccgatccgtgatttggggattcgtga

SEQ ID NO: 155189 - DNA, 126 bp, Arabidopsis thaliana landsberg
aagaagaaatttatattaaaagccaacgaacaaaggattgaaaccacaaaaaaaaacaagaagtttgagtttctctcaccctttgatatgcaagttgttcattgggtcatctacattttctgcatc

SEQ ID NO: 155190 - DNA, 214 bp, Arabidopsis thaliana landsberg
aacgcaatcaaatcttccgcaaatccgtcgcaatcttccacttgatcggtctcgctgaccgtgtcgcatcactaattccaccgtctctccgttcccaccgttcgatcctcgccggaatctctcccgccggatccttcaggtctcactgccatcactcaaacttcagcctctgtcgattccccagcaaacatcacaaccattgcttcacagaatg

SEQ ID NO: 155191 - DNA, 443 bp, Arabidopsis thaliana landsberg
aaatattatacccgcaaccccaccttttatcatgcattgtttattaattttccgatcatgggagcataaatagtaatatatccctaaacaaaacgacttacattacaattttatgaaggatcatttgatcaaggattacaatcaatatctatgttttaagatttagaaactactttttttctttctaaatttccatgtttaatttgtgtggatttcatatttttttactataattttttttgtttctttagtaatataatcaaatctgtttcaattcatttcattgtaaagaccaacattggattatgttcgaatttatattggcactaatatccatgattcaatagtacctagacagtgaagatatttaatgaatttgagctaaatattggctttttagcgacagtgatagtgaggaaaaaaaaaaataataataataatca

SEQ ID NO: 155192 - DNA, 403 bp, Arabidopsis thaliana landsberg
tttacaacgacgacgagcctttgatttcatctccaatctctcgtaccggtttcaacactataccggaatcaaacgaagacgaagaagaagaagataacgatgacggagaatttaaagggttttacgttaacacgccgtcaccgttaacgacgaagaaaatgttaacggattccgttactggacacgtggacgttaagctgtcttcagaagctgcaattgtggcggttgggagaggtaacgagacgtactcggtgctcatgaaaatcaaatctccgtcgttaccgacggcgcgtagatctccggtggatcttgtaacggttattgacgttagcggagggaatattgagatggtgaagcgagcgatgaggcaagttatatcgtctctacgagaaacggatcgttt

SEQ ID NO: 155193 - DNA, 404 bp, Arabidopsis thaliana landsberg
ttcctaccatataatgtcccatagattgattacaaacgatcacatcagcaatgacccaaaagaccaaaacactcgtaataaccacatcagaaaactaaaaaaaaaaggactttaatgaacttgataaattaattaagcagaagggagattaagagacttgaaacaagtaaatccaccatcaacaacaaggttatgccccgtcacaaacttagcatcatccgatgccaaatacaaagccgctttagccacatctatctcctcacacttctctccctttagttctcccgtcgcgttcacaatcgccaaaagttgttcctccggaatgctatgacccgcaaacgcctctcgaaacatcctcaaagttagaggcgtcgggatgcctgcgggcgatatacaattgattc

SEQ ID NO: 155194 - DNA, 464 bp, Arabidopsis thaliana landsberg
caagaagatgcaaatgtgtttgcagatgggaaactttagaggcagtgtaatgagttgctgtatcaaaccacttgttcaattacatgacaaaagtcccgttgttcttctccattgtttcgacaggtattttaatttttttactgacagcataattatttttctgaactcactgtgtctaaattttacttttgtcggaatttcttttgggcttttagttcttgtcttgaatggagacgtacttatcctctgcttgaacaagcttgtcttgagacttgggctattgatgttcttggttggggattctcagatcttggtaagattttacattttacacaaattaaacaaggttcttgataattcgattttagtacatatgaatgtgtgattgtttcttttcacaacttaatgatactgtagagaaacttccaccatgtgatgcagcatctaagcgacatcatttattc

SEQ ID NO: 155195 - DNA, 337 bp, Arabidopsis thaliana landsberg
ttccatttattcataatttttactctctccatttcttcattacttttctttttattttccggagatttttttctttgcgcgttggtatttgctgcttttgctgcagctacagtgtaagtttgattttctgggttccttcaaactccaaaatctcgcgtcgctttttgcttcagaatcgatttgttcttgttacttccatctgttgttctttttaactctgtgcatgattcaatttcgtgttcgtaacctgttttttgctgcttgtttagttcgacaattaggtaaaaaaatgacgatccctaaaacttatgatccttttaatcttcgtttagctact

SEQ ID NO: 155196 - DNA, 92 bp, Arabidopsis thaliana landsberg
catgagactttttagaattcatgtttgaataacatagaatttataaattctacacaaatctcttaaaattccactttcaatacaccccctta

SEQ ID NO: 155197 - DNA, 294 bp, Arabidopsis thaliana landsberg
gcaaagcatggacgaatgatatttagtgctcagcgagcgaaactgacggatcttgtccatattagccgaccaattattgttcataatcaaactaactagtgcttaatcataccattgttatatctttggtttaaaggggttcaagttctggttatatatgtggccttgcgttttggtgagtgtgcaagtgatagaactggccttgcgttttggtgaagcccaaatctattgtggcctccatgtatatattcattaataaagccttaaatctataagccttttatcttgcaaaaa

SEQ ID NO: 155198 - DNA, 86 bp, Arabidopsis thaliana landsberg
aaaaaaaaaaagaaataaaaaaaaaagaaaaaaaaaagaaaaaaaaaaaaaaataaaaaaaaaaaaaaaaaaaaaaaagaaaaaaa

SEQ ID NO: 155199 - DNA, 435 bp, Arabidopsis thaliana landsberg
gctcatctccggcacaagatcatgaaaaaccatcgtgtggctcttcttgcctccacgtggggtccgagctttacgtgtaaatccctgatgccacgtggcttggtgaggcggcgaggcatggcgatactttccggcgctagccgatttcaagcgaactctctcgtgcctacgagcaagagggtttgccgagtggaccgaaccgtcacaagcatggcaaagaaaggcatcatcagctgcgcaataccaacgtgcccgcctcttcacgcagctatcacatgccctcgccgtcttccctccaaccgcactagccaaacttttcatcatattgaacttatcaccatcaacaagaagaaatcttactttgagtaaaaccaagttgccaagtctcagttgcaaaaagaatgttttatcgaactatgggttctctctacaaag

SEQ ID NO: 155200 - DNA, 274 bp, Arabidopsis thaliana landsberg
aggtaagaccctgaggaatgtctattcttcacaagaagtggattaatgttgagactgaaatggcttgaatctggatgaacctttacagcagagatagtctaagactctaagagggtctgtaaaacttcctcttccctttttccatttcaaaaaaacaggaaacgaggcaaagaggaagatcacttagcaggagagtagttagatttacatcatttaaggcttgacagaaatgaataagaaggaagagaagaagacttaaaagagagagttaaaa

SEQ ID NO: 155201 - DNA, 135 bp, Arabidopsis thaliana landsberg
tggaaactttggcttcctgagccgctgctcggaagagaagtgtgagatccgctcggctagaggatttattacctgacaatcctctaagggaagcaacagcagattcagcatcacttgtgaactcctttttaagct

SEQ ID NO: 155202 - DNA, 84 bp, Arabidopsis thaliana landsberg
tgaattgattattacttttgtaaggctgtaagttcgtcgcactcatttcctttaccttctttggctgaattgggattctctctt

SEQ ID NO: 155203 - DNA, 259 bp, Arabidopsis thaliana landsberg
  unsure (1)..(259): unsure at all n locations
aggtgacgaaccaagtattcaggtacgcgaagaaatcaggagcgagttacataaacaagcctaaaatgcgacactacgttcactgttacgctctccactgcctagacgaagaagcttcaannnnnnnnnnnnnnnnntttaaagaacgcggtgagaacgttggctcatggcgtcaggcttgttacaagccacttgtgaacatcgcttgtcgtcatggctgggatatagacgccgtctttaacgctcatcctcgtctctc

SEQ ID NO: 155204 - DNA, 361 bp, Arabidopsis thaliana landsberg
ctttatatgtaatcgcagtattatttatatttcaattatttgtagtaagccattttaattttatgttttgccacgaaagttaataataggtcatgcgtgatttgaacgccaaaatgccaaaataaaagattaatttgggacattggtatcgacgaggcaaagaattattactgatacaaaaaacacagatgtttttttctataaactgagagatttcaaacaatgaaacacgtgaagttttctcaagggcaaaaattaaaagaaaaacaaaaatgtggtggatctaatctaaaagtggcacaagtaaagtaatagtacaacttcttctcactgctttcacctgcacacataatacaaaaac

SEQ ID NO: 155205 - DNA, 385 bp, Arabidopsis thaliana landsberg
aagttaagactttacacagcaggagctggagttattgcacacgttgcagatagtataaaacattaagagtcttccacgtttattacggccaggtgtataaatcgtgagcatttcgagtgtttgacccgttaatgctgagtgtgctacgacatttgaaccattcctgtgttttgcttttaccatacagtttgggagatcggtgcagatcaagaatgttcgcatctttgcttcttctattttttttcttggcgaaatcagaagaagtacaatccaattcatctgtacatgattttcttgtattagcttgttgatgatacaacacttgaaagatgttattatagattaaggtttcttaaagagaaaagttatatatgttcaacctcta

SEQ ID NO: 155206 - DNA, 334 bp, Arabidopsis thaliana landsberg
aaattgatggtacaagataactaagtacaattagaagtcacacatcaacggtttttatggtttttatgttgtttaagcagcaagaatttgctctttagggttatttacttgatcatatatcgtgaacaaaaaattataggtaattgagaggtcatagacttttgtaatacacaagacatttgtaaattgttatcacatactcaacaccatatatattttaaatacctctcgagcatcttctgttatgatttttcttattttctctaattttattacaaaccttatggttactaaatactattcagaaccgtgcctacttgaaagaaaagaaaac

SEQ ID NO: 155207 - DNA, 970 bp, Arabidopsis thaliana landsberg
gaaaacaagctcaccagtatctctctgtagagcaaattatagacctttaagatccatttccttgtcattcacgtcaccaccaccaacagaaggatatgtcaccattgttccaaacttattctgctgcatcatatattggtttgattcattgccatggttactatactgttgataatatccttgcatacccatttgattcccatagcctggaataggcaccatcgacggaaccggaaccggaacccccaactttccgttacttcctccgccgtcttgaaagctctgtggaggaaccggcgttgaagagaagagctgatccgacgacgaataaggatcttcttccgtcgtcaatccttgaatccgtttaaggtaaagcctatatttctgcaaatgagacgcaacgttctcacgagtaagtccttccacgttcatcagctgcataatcgtcttcggcactgcgtttttaatccctagatgagccacaacgtccacaaatctcttgtgtagctgcggtgtccacactaaacgcggtcgtttcgatgtcttcccagacgcgtcttcaggcccggagtctccttcctccgccgtggaatcctccaccgacgctgcttcaccaccatccgatttcttctgtttcttcggatctgatcctggaacactcgattcaactcgatccacgacctcctccatcacagacgaagcattggcactgcttcttaacgaagagagcgtgatttgcgacgcgcgattgacgtcgtgaattgtacggccccgttctgggatcatgctgaaagctaacgcgagaatcgacgggactagagattgagataacggagtcaaatcatctccgttgggtaaaccaatttcccattccggaatcctatattcatcgccgccgccggcgtcttctccgtcgtcgtcaccgtaatcgctcaccataacttccttccccatgtttcacacactcttc

SEQ ID NO: 155208 - DNA, 303 bp, Arabidopsis thaliana landsberg
ttatgaaatacatattttaaaaaggctgataaaaaaaggaaaaaagcaaaaccagaaagaaggaataaaaagacaatctgtaaactaagttctgacaactttaagtaaagttccccatgtgagaaaaaacaaaagatcatcaaagtaaaaactataataaaataggagaaaaaaacagaaaaagagaagaaagctgatagttcatgagctctttttaaccttttttcaccatgaagatcctcctgtattaatgaacatcccattccaatatgtattattaccatgactcttctcttgggttgt

SEQ ID NO: 155209 - DNA, 527 bp, Arabidopsis thaliana landsberg; identical to SEQ ID NO: 69269

SEQ ID NO: 155210 - DNA, 194 bp, Arabidopsis thaliana landsberg
ccgcatcacgtaaatttcatttcttttgggaaaataatacataaccttttgagtcacagccacctcagcacaagttactcgagtagcacagaagccatcatcaatagcttgcttgcctgggagctcaaccacgaattctctgtcttctaacctttctatcacttgaggattatctacgcaattcgtaaatgatc

SEQ ID NO: 155211 - DNA, 209 bp, Arabidopsis thaliana landsberg
tttagattcaactcggagatgggtttattcattttgttttcaactttgaagaaaaaagctaagcagctgggaatttatataattatttatatggtattgttgtgctaagaaagttaaattcataacatgtatttcttacttattttgagaagaaaatcatataagagaataatattcgatattagtctcctttgtttgcattatcaata

SEQ ID NO: 155212 - DNA, 366 bp, Arabidopsis thaliana landsberg
  unsure (1)..(366): unsure at all n locations
aaggaagatgttggaagtaccttagctctgtctttgaaaagaacagtgtagaagagctggcgttgccttcagaagatgaacttgaagacatagactactatccaagcttgccatttgcagctcttttctcagcttttaaggtagataaaatgccttataatgaacaatgtaaccactacgactcatttttagatgattgaaacacttatatggcctgtgcggngtttatgttgttttggggttaggcaagaggcttgaagatgacatgcctgctatgttactgttctgaaggagacaacattcctgaagcatttcttctagctgaggcttcatctaagcttatgggtctgactccctgacaagtca

SEQ ID NO: 155213 - DNA, 244 bp, Arabidopsis thaliana landsberg
ggtttctccttgagaaactgttcaatataaaaataaaatataattaaaaagtatgagagagagtagaattagtctctcaagtgagaaactctgagaaacccataagaacacttgtatatcatctattggtcaaatattattttattgttaaaaattaattatataactaatatttattaaaatactaatttttctttttttttgagaaaccaaaaagtatctcactgatctgatggagatgccc

SEQ ID NO: 155214 - DNA, 162 bp, Arabidopsis thaliana landsberg
gcaacgcgctagagacggatctcacataatcaccagatcaattttctcgagaaaaagaaaatgtgattatccattcgattttttcgcagaagaagacgaaagagagaagaagagaaagagatttgaaatcatggcgaatgtagtgggacagctaaaacgagg

SEQ ID NO: 155215 - DNA, 90 bp, Arabidopsis thaliana landsberg
cacagaaccctccctttctagctctaaaaacatcccacaaactatctttcaacaacacaagacctatcacgaaacaaatcaaaggcaaga

SEQ ID NO: 155216 - DNA, 313 bp, Arabidopsis thaliana landsberg
agattatgtgctttgtttccccttgttggaggattgctggcggaatttgtttggatccataagttatgtaaggctctagtcttccaagacccatcacgatttggctctctttcagaacgatctcgttgcccaagttttgttacattggcaaacatttgacagctgataaaatttagcttgtttctataaatcaagttattattattcgtatcatcaagtaacaaaattgatcttacactttgacgattaataaggcgggaacatgttatcgaaaaagtaaacttttttttttacatttatggctctgcttcat

SEQ ID NO: 155217 - DNA, 198 bp, Arabidopsis thaliana landsberg; identical to SEQ ID NO: 59145

SEQ ID NO: 155218 - DNA, 269 bp, Arabidopsis thaliana landsberg
  unsure (1)..(269): unsure at all n locations
gaatcggaacttgagctcgaccttcgacgtaatccaaaaactcatctagaatttctggagaatcgggaaaaaactgtccgacgcaaatcagagcatcaaagggaccagcagnnnnnnnnnnnnnnnnnnattggagttcgatttaaaaattggagatacagaatcaggtgaaatcggagagcagaaggagaaagatagtgatagagaccgattggacacgcttgaagagctgattgagacgtccaagaggatctccacagagtaaaatt

SEQ ID NO: 155219 - DNA, 259 bp, Arabidopsis thaliana landsberg
gtcaaaaatcaaataagaaatttgcgaaacaagcaacctttcttcttcttctttttcttcttcttcacagcaaatcagccacgtttgagggaagctcctcaacaaccacattgtagaatttctgaatatcaaacagcattctctgatcatcaagagtcacaaagttaatcgccacaccctttctcccgaaccttccacttcttccgatacggtgaaggtaattctctggctgagttgggaggtcaaagtttatgactag

SEQ ID NO: 155220 - DNA, 167 bp, Arabidopsis thaliana landsberg
caagtagtgctgactccatccgggattttttggttttgacccgttagactttcggatccttgcttgaatcaacttccattgtttgtattaatcactactactcaaactgacagagagaaatcaaaactttttttgtttttttttacggattaaaggaacaacgaact

SEQ ID NO: 155221 - DNA, 408 bp, Arabidopsis thaliana landsberg
gatagagcagcttggttacaagcattagcatctacaaaatgtatctttcctctgcggtcacttaatggggatttctccttcataccaccaaaggatttgtccatatcaactgagagactaaagaaacggttgcacgaagagggtatgaatgagaatctcgtcaaagagtgcgaacagatcatgctctcagaattttctgaaatgcacggacaagttaaacttttacacgaagaacggactaatttgcttgatgcattgaggcagcttgaggtaaacttactttatttccttcatgctttttcttttttggtttgtttgatcttttgatgctggctctttctttcttgttaaacccttgtgctattgtttgagagaggtgggcgggtgaatttgtattattgttcaaga

SEQ ID NO: 155222 - DNA, 250 bp, Arabidopsis thaliana landsberg
tagaccaaagggactaataaccatatttctcctacagattgttttccatgggtgtgaatggaacgttcctgggactaaatagcctatatgcaataaaacccgaaaacacaagagatatcatggacaacaaaatggctgtaatgctggtcccatcgctagagcccttgacagttgcagccgtgacacccgaagaagagcccgaggagatatctagcggtgtccaatcgcagttgatcgtgtagtgtcctga

SEQ ID NO: 155223 - DNA, 326 bp, Arabidopsis thaliana landsberg
tttcaaaactagtcttgtattctttgagatatataacttgtgcagttctgcgacacaagttatgaaagacgtatataacatatacatacacaagacttaagaatctttgatggtttgaccttaatatataaacatctcctatcttggtaacatgggtcaggagatgctgcacttagcatttggcaaaaaatactaaaatgaaatattgaactttcaagcagtaagaaactgaagcagcatttgcgaaagttttgagagtgaaatgaacttaaacgagaattaaagagctccttgaatgatttatggggttttgcttgtttctgcgt

SEQ ID NO: 155224 - DNA, 369 bp, Arabidopsis thaliana landsberg
gtcttcgttgtactccaaaattgaggaacaaaccctggagagtcacagttccgtgttagtgtttctgcagcgttgtgtcagtggtggttttgtatatccgccgctcgttaattgtggagatggagaccaactcgtctctttttggtttagtttctcctagctcgcatgatttggtcattgaggtattatttttttggcttgtatgaactttgttttagtagtcgtgatatgtagtatcttgtaagatgcgtgttgatgtagttgtgattggtttgttttattgttttgtgactgtttggagttaaagtttagatttgttttgttttgttttgtagaggcttgccactgtaaaggttcctaagaaatacc

SEQ ID NO: 155225 - DNA, 581 bp, Arabidopsis thaliana landsberg
ccatcctcttttttacatatgtttcatggtagtttaatcgtctaaatagaagaacgcactaagaaatggttgtttattaagaaaaaccgttatgtagatttttctctaagttatacgtagattgcaaaaaatctgatattggtgtcattcacagagttcatgaagttaaatttcactttccttgtgcagctcctctttcagaaaccgaagccgctttaatggagcattaggaagaagccttgaatcattataacacttgtgtttcttcaacaattgttcttgggggaatttgaagcctgtgatcgatctctcggtctcacacaggtgtatcaattatttaccatttaacaaggctttcgtaatttatcttggatttgttggtaatgggactgactcttgatgaatgattcatgatatcactatttgtttgtgttgtgtcaagtgtgtgtgtaaaaagaaactcgagcttaggtagaagcattgctcactaatatttggttttcctaaaagtaccagatttgattattttgttataatttctaagatgtaaaaaaaaactatagaagaagaagagtttgatt

SEQ ID NO: 155226 - DNA, 219 bp, Arabidopsis thaliana landsberg
gttttggtatcatgaactgaaaatagttgataaaagaaagaagcaaatgcaatgtaatggctggttattgtaaattgttacaacagaaagaactcaagggaaacaaaacttcaacaaattgcaacaaagttattaaaagaacaaatgaaaatagtacttctctaactccaaatctgcttctctcccagagaaaaacacattatataatgtcgacatata

SEQ ID NO: 155227 - DNA, 68 bp, Arabidopsis thaliana landsberg
gttttgtcaggtaaaagttgttcaaatttaaggagaaacacgccgttggattcttttcttgccaaggg

SEQ ID NO: 155228 - DNA, 548 bp, Arabidopsis thaliana landsberg
aacaataatcaactaagaaatctattgactttaatttcaaactttgacaaacccacatacgaatacagttgaccaaaagggaggagaagaccaaggacgagtaataataatacaggacaaaacttggacaaatcggaatttaaggaatcttctgtatcaccaacggatattacagaatctaaaacaaccttggcacatacgtatatatgcagtatgtaactcaccacaataaaaatcatagaacaatatacaacgcatcatcatcctactacaagtcagaattttgcaatccacgaagcagaatagtaaacggggaagaagataaagaggtgctcagatcataatacctctcatgtaattaatcgagcacctttccgtactctggtttggtccaagctgcataggatacagggtatggtttacccagtgggtgagatccagtgccggtttaggtcagcgaggtagtaaaaatccagacttgtgtgccccccttggagagcttcactagttatctgtgaacaagcatttctcaagggttttactactgg

SEQ ID NO: 155229 - DNA, 292 bp, Arabidopsis thaliana landsberg
gagagaaagaggaattggttttaagtgttaagagagaaaagcctttgcgcaatctcactgtgtgttggtatatattacggcgccaaggtttctttgatcgatttcttcttcttcttctggaaaattatctcgttttccgtttttagttctttgagtttgggatcgttcaatggagcccaacgtagtggagatcgctactcctcctgccgcttcttgctcgagaattcgaacgccaacaaaggttattactttacctaattgaattgaatttgatcggattttaatctctaga

SEQ ID NO: 155230 - DNA, 279 bp, Arabidopsis thaliana landsberg
ggcacgcagccctaggcattttcgtattcgtctccacacgcctctctctctctctcgcttcttcaatcattcatcactccgacgtcagatgcataatcctccatgatcgatcccaattgatcaatcgataaccttatcttcttcatcttctctggcaggatctgaatctgcatctggaagcgtgatttcatgatcatgtatttaaccgcttgatcttccgcttcttactccatcatgcgagctgcttattctcgctcttcttctcttttctctttccga

SEQ ID NO: 155231 - DNA, 167 bp, Arabidopsis thaliana landsberg
tccctctgttagataagtcatctcttttctcgtattgcaaattttaagtttgttcttgtttattctcttgagtgaattagaggtatgtctttgagtgttctcatatggagtgtgttggaaataggagcttcgatccaagcaaaggggaaaagtgttgggttcttggg

SEQ ID NO: 155232 - DNA, 162 bp, Arabidopsis thaliana landsberg
ggctgttttctttcaaactaaatagggccggtcagctcgaaccaatcgtggttagcctgtggggaaaattgcgaaccagaagtagcaggtgaggtcggtcagaaacagatggttctcgctacctccacgaagtagcagggactcttctttctcttttcaaac

SEQ ID NO: 155233 - DNA, 495 bp, Arabidopsis thaliana landsberg
aactttcgtaattaattgtgttgtagatgaatgcgattgacgacgatgatcatctggtcaataatgatggaagcactaagccgtcgatgatggtggcgaaatcggacggttcagatgaacagaaacgattttcatgcaagtggagtacaggaaacggtccaaggatcgggtgtgtgcgggactacccaatggatctgcagacgcgggcgcttgaacaagtcaacctttctcctcgtgtagtcaacggaacaatgggattatttggcccaataccatcgccaagacccagcccaaagattcgtgtctctcctagactatcttgcatgggtcttccaagcccaaggcactaattttaccaattttcctaatctgatcaattaaattatttcaaattttttgaatattccttttttttttcactcccctaatagtattgggcgattctttatttagagtataacttgtactcatttttatttaaaataatttaatttt

SEQ ID NO: 155234 - DNA, 407 bp, Arabidopsis thaliana landsberg
gacattggatctgctagatctttgcgaacaagctggttctgcataagccgtaacgatcaaccttgcaatgccacgttgcaaagagggggatgttttgtatgaaatctatctatatatgtaagacctaccgtaagagcgtaagcttttgggatttagttaagagtcggattcaaatgtatgtttactaagaagggatgagagtatgtgtggtcttaaggcaagcaaaagagcgaagaggctctgccgaataagcgactactcttgttctgtgtcgtgtctgatgtgtgagtgtgtgtctgtgtttgtgagagattcgatactctttgaaacaaagatttatgtagaagaatatagagaaagaaagactactataagcagagccaaaaaatgatgtgagatactgcctg

SEQ ID NO: 155235 - DNA, 263 bp, Arabidopsis thaliana landsberg
ttatgggacgactcctcactctcaggtagaaatcactcttcctagcgcaatggattctgatctgatgcgacgccaataccagaacacaatcttctacgtcatcaatcagaatcgaaccaatcactggacctgtgtagacactacacttcttcagtcggtgaaggaacagagcgttgaccgttcctgttaattttacttgacatgaatcaagatccgacaatgtgaattctccgatcgacgagccttcgaagcttttcacaaga

SEQ ID NO: 155236 - DNA, 386 bp, Arabidopsis thaliana landsberg
tcaggttcaaatcaaagtcgagcttttaatacagaaggagaagaaaatggtcacctgatcttatttacccatttgtacccaattaggtcaaaagaaagatactgttatatgtacaaaagaaaagagaagagagagcaagatgatgtagagacaagcacttggtgaagaaaatagcaatgtatctgcatcatcttggaatcatcccacaaagctaaaactgctgttggcattattcactaaatcgacttctcttcttccgcagaggttttgcagattgggcaccaattcttcatccgcagccattgttgtacacagctcacatggtacatatgttgacatggaatagtccctaattcatctccatcaacatactcttcctgcatata

SEQ ID NO: 155237 - DNA, 114 bp, Arabidopsis thaliana landsberg
tttttcctttgggcttttgagagagtttttttattaatctataaaatataaatccccagtggtgaattatttagcaaccagtttccagtctcgttataacattttctacagaac

SEQ ID NO: 155238 - DNA, 406 bp, Arabidopsis thaliana landsberg
gaaacggtacatcggctacgaaacgctaaggagagacatggttccttgtcagaaaccaggagcttcttactacgattgtcgctctggacaagctaattcttacagcagaggctgtgacaccattaccagatgcgctagagacacaaacgacatcaacacatgaaggtaagatccaagaaattgccaaaattggaagctttttggccgaggcaagtaaattatatgattaagcttttgcattgctgttgttatatatgtgtttttgacataagaattgttataatatatgtaactctgccactagttggttatcaatgttcaattattgagatctataaattatattaagttgttttggtagattgattgataaatttgggtgtttgtttgcttgtttttgggtgct

SEQ ID NO: 155239 - DNA, 538 bp, Arabidopsis thaliana landsberg
aaaaaactaaaaatagtagacatatagctcctatcctcctcctctccttttgtcatttttatattagcccctgctgagaatgaaattcagattttattcaatctgaaagttgtgtgtgttttagatacaattgaaaaaaaacttgaatctggactttgtgatactaaaaaatttcctcatcattttgttctgcaaccatttttacaggttggagcttataactgaaaacttgattcaaagaatcgcactaagggagttgaatatattctaaacatgtgaaatatataggtccaagtttgtccaatcattgtgctttcctgaaattggtacaagtttgtgaaattgtagagactctcttttttagcaatttaaaaatctcatctcttcaaatctatatataaaacagggggataacagaaaatgcaatggacttggtagtattaggctgagtctcaagtacaggtgtaagtagatagatacagaatgcaatgggatcttaagcccaagtgacagtcgttgcgacagttgtctctcagga

SEQ ID NO: 155240 - DNA, 183 bp, Arabidopsis thaliana landsberg
tagagatagttgattaggtaagctacagttatttttataccagattcagtcccatacaaagagtatagtaggtcacattggtgattagtcataagtaacagaaccccttcccatataatgacatcttcgacattaaagtcaaagatatttctcctcgtcctcctgttttcccttcatatgggt

SEQ ID NO: 155241 - DNA, 419 bp, Arabidopsis thaliana landsberg
tcttaaagcaactacacaagtcttgaaattttctcatattttctatttactatataaacttttaatcaaatcaagattaactatggctgaggagtacaagaacaacgttcccgagcacgagacaccaacggtcgcaacagaggaatcaccagcgacgacaacagaggttacggatcgtggattgtttgatttcttggggaagaaggaagaggaagtgaaacctcaagagacaacgacgctcgagtctgagttcgatcataaggctcagatctctgaaccggagttagctgcggagcacgaggaagtgaaggagaacaagattactctgctagaggagcttcaagaaaagaccgaggaagatgaggagaacaagcctagtgtcatcgaaaagcttcaccgatccaacagctcttcttcct

SEQ ID NO: 155242 - DNA, 118 bp, Arabidopsis thaliana landsberg
accacaacaacaacaacaaaaacccactaaaagaaagagagccctagaatccaaaatcaatccaaaagaaagaaagagtcttttgaaagtcaagaaggcagagagagcaaaaaaaaac

SEQ ID NO: 155243 - DNA, 145 bp, Arabidopsis thaliana landsberg
accaaaagacaaatcatatatttccactcatatatatttgtcttaacaatacaacaaactcttccttctgagtttttcatttttcctaaagttacactctggaaaacttctttctatatatgtgatagagattctgtacagaata

SEQ ID NO: 155244 - DNA, 780 bp, Arabidopsis thaliana landsberg; identical to SEQ ID NO: 50310

SEQ ID NO: 155245 - DNA, 161 bp, Arabidopsis thaliana landsberg
aatacatttataaattttgaagtagaaaaatggtggattcgtgaataaactggctttcctaagaaacagcatggctattaacatacactttattaaaaatcagttttgatgttttaatttttctatgactatctctatcttgtaaataacattatacagtt

SEQ ID NO: 155246 - DNA, 658 bp, Arabidopsis thaliana landsberg
aaaagcgtcggaggatggatgtgacggagtcggcggtggcggagatattgaaattgacgagagacagagccaaagctccgaaccacgccatgtctctagtccccggcggagtcgctgttccctttttttgttaaggtaattttcaggcagattagtcaaggttccttattttttatgtttttatccaaattcgaagcccaaaatttgattagtgtaatttgatggtgtttgatagattgtagaaatagtggagcaggcctagtttacttcacttcagcgttgagcctctacagtctaggcacataattttgcctcatatgatttgtttcctttaagataatattgtagctagtagctactgaatcaatcagtcactagcctgaacaatatacgagcctagtagtatctgtaggaaactttgaataaagaagaattttatcgttttcgatagatatgtagtggagtgtgtgtcaccacatacgagttagtatgtcttttgacttgtacagcattttgaacttgctattatgaacctattctttttccctgcagactaggaaagctcagagtcagaggcatgtccagagtttgatcgtcgtatccttgggcttatcaatatcagctgactctcagagtttgctctcatgctttgcccacc

SEQ ID NO: 155247 - DNA, 197 bp, Arabidopsis thaliana landsberg
aggtcgactctagaggatccccttcctttcacgaagatacaattcaagattcaaaaatatcaagaaacctttttttcgtccaccaataaatatattcacagaattaaggaataacaactatgaaaataagggcttccgttcgtaaaatttgtgaaaagtgtcgactaatccgcaggaggcgacgaattatagtaatt

SEQ ID NO: 155248 - DNA, 282 bp, Arabidopsis thaliana landsberg
gagagcctggaagacttgcaacgaatgttcacggatatggttggaggagatggcgtgagctatgactgtaacaataatccaaagggcaacaaaagaccacgtgtcaatatctcgaggagtagagctgcgatgcgttaaggcttacttcttttgtgtatgagtgtcgaggagtatcaaaatcacaattccatgttcaattgtctagaccatcaaataaattatctgtgaaaaccaactagaactagcccaatctttggaaatccagatgccccaatcactaaa

SEQ ID NO: 155249 - DNA, 242 bp, Arabidopsis thaliana landsberg
agtagctgtgataaaacaagaagaccgaggactagatacaaatcagctcttgctctatttctaagctacactcaaatatgtaaaatatcaacgatcattcagaatggtgaatagacgaactagtaaaggactaaaaccgaacccaacaccgagtgcattgagcaacacaatgtcctggacaatccacattatataccaacaccttccgattccgaagcaacagatttcgtagatacatataa

SEQ ID NO: 155250 - DNA, 333 bp, Arabidopsis thaliana landsberg
  unsure (1)..(333): unsure at all n locations
gtaaaaactcgataattcggagttagctgcnatgttagaggctcaaagagaagtggagaggatgcagattgagatgcatttggcgatgcaaagtgctttgatttcgaaaaaggcgaataaggcagctctcaattgcatctaattcgaagaagttgggattcttcaaattctctttacttgtgtctgtttttcttctttttgttgctttttctttatttatgttgttgttgctcctgcaaacttttcatgttgttgttgttgttgtttttttctttgaaattgttatctgaaataaaagaattatcagtttttttttttgaacgattattgctg

SEQ ID NO: 155251 - DNA, 64 bp, Arabidopsis thaliana landsberg
tcttagccttggaggtgttttctcatctggtccagttgcattgctctctggtttaaccccttaa

SEQ ID NO: 155252 - DNA, 282 bp, Arabidopsis thaliana landsberg
acagggccgcttagtgatcttgaaatggctttaaagaacaaacttatcactgacatgttgtcaaatgcttgaatggtgtcttttatgtcttgaaagttagtctttttgtgtcggttaatgcttcttcacttgtttttgttctgttcgattatgaatcttaagttgtttgtgttctgttctaaattggtttcattgtgctctgttctaattggttcgcgttcgcgttcaaacttcaatagattggtttgtgttctgttctaaatgaattttaacttcgtttta

SEQ ID NO: 155253 - DNA, 571 bp, Arabidopsis thaliana landsberg
gatcttggagaaaggattgggagtgtcaacactggtctatccgacagcgcaatctccagttgcttgttagcaacaatgtattatccatcatatcaaacagaggagcaaagaaaatgtgcaatctgcctggtaagatttagtttttttttttttttttcacaacctggtaagatttagttgtctgaaacattatgtgtctataaagttagaagtaggctaacttaagggtgatgtggtaattggtaaacaaataggaggagtacaaggaaaaagaagagttaggggaagttaaggggtgtggtcatgactaccatgggaggtgcatcaagaaatggttgtctatgaagaactcttgccctatttgcaaatcccctgctttaactgatgcttctaagaactcatcataaattataggttatcttttatgtgtgcatgttatattcatttgtctttcgaaaggaagaaaaatatgtgacaaaatataacattaagttttcttagtgattaatagttgtaaatagaagaaagtccaggatctttctcaagggttaatatatatgttaattattgg

SEQ ID NO: 155254 - DNA, 155 bp, Arabidopsis thaliana landsberg
ggaatcaaactcggatcctaggagagagtcggagtcggagtcgggttggaatgagacgggagaagcacaaggaagggaatgagaattggggaatagggtttggaaggatggaagggaagagaaggaaggaagagagaggaagaagaaacagagag

SEQ ID NO: 155255 - DNA, 87 bp, Arabidopsis thaliana landsberg
gtatcttggcgatatcaaaagcaaactgcttcccattcaatcttcccaccagcattccaacaatcccattcttcactccaccacctt

SEQ ID NO: 155256 - DNA, 240 bp, Arabidopsis thaliana landsberg
gatgaataaagaagtttactgctgagttttgttcaaagtacacgttaatcggatttatgaaacgacaattacacagactgacccaaaattggtaattgcggcatccgatttacccgaactgcatgccgttttgcaaaatctcaaaatgaaaaacggcatggtttcttagtaatctactctagttctagcaaactgacttgttcaattgcacatagagatgatcaactcaacacaggtatg

SEQ ID NO: 155257 - DNA, 277 bp, Arabidopsis thaliana landsberg
gtaaataaagtgacatttgcttattgagattgaccaaacatgtggtatactaatgtatttatgtttattgctttctaattacaattttattttatacccctccctattttacaagttagctttgccgttaaagagataaaatattgttgtctttagcatcccactccctgttgttccatggtctaaagccagttttacgcacggcttcaccgggtgctttttcttctcaaagcccgttcggtcttagaccatttccatatagaaaacggtacagccg

SEQ ID NO: 155258 - DNA, 98 bp, Arabidopsis thaliana landsberg
agtcttgcgcatctttcataccattagcaaggccaaatcatcttctgacattttcacaggctttttcttcactcgcttcaatggtggtttgctaatca

SEQ ID NO: 155259 - DNA, 104 bp, Arabidopsis thaliana landsberg
gacaccgtgtattcatgaaactgcaaatatcaaaagcaaggctcactaatatgtcttacagagaatctggaagaaccctagtagctttttaactttggaaacct

SEQ ID NO: 155260 - DNA, 304 bp, Arabidopsis thaliana landsberg
taccggcctggagctgaccggagcggcacgattttgactcgtcgagcgtgtagaagaaggatgtaccattattccattcaaggtcgtaggtaataccaccgagctgctcctggatgatattgaaattacgaccgttggtccagtcgtaccaaaggtcgatcatcgagaggtcgccggagtaattcatgaacattagcgcgtggaactgaggcgacccatggcgtcggaaccggctcatccgcggcggcgattttcacgccggcggttaagaaaatgaagataacgattactctgagtggtcgtc

SEQ ID NO: 155261 - DNA, 514 bp, Arabidopsis thaliana landsberg
atcactacctagctaagagcatcctccgccccagcgtcgttctccaggttgcatatggctacttccgctccccttcctcccgcgacatagttttcggcaaggtctcagttccttcttcttcctctgatctctacttttcgattctggattctgatttgtcttgtgggaactgcttttttttttgttaaatatctctcctttagggattgggattttgtggagttgatatgctatctgcacttgtttcacttgcttgctgttttttatgttgagggcattgttgaaagagtaaaaagttgtatactttttttttgtgggtatggtagttgcatcaggatgttgttataaaagcttatttcaaatggatttagagtctgtagagcagaaatacagtgagaaatgcttaggtctgtagtgtgtgcttttgttgttttagcagtaactagaaatggaatttcttttgtcttaccaggagacctgcatagaattggtggttattggtgaagacgggatt

SEQ ID NO: 155262 - DNA, 466 bp, Arabidopsis thaliana landsberg
aatgataatgtcattggcaaagcagaaaacagacttatctctattcttctttgaaaagctcgcgaccgatgacaatccttctgatctcgcttgtccctgcaccgatttcatatagctttgcatctcttagaaggcgtcctgttgcatattcgtttatgtatccatttccgcctaaacattgtatcgcctgcaacatcaaaccaaatcttttagtcttaaaggaaaggtaactaggtgatcaatatgtgtagttatgatcccttcggaggtttgctttgctggtaaccattagaaagacaagaggcaacgcttaaaactggtttcgggtttgatctagctttatgagctagtgtcacagtaactttaagtatgaaggaaaataagggtacttgacctgtaaagcgacctgcgttgctctttcggccgcacaaaaatagttccggggcagtcctagacaataagcaaa

SEQ ID NO: 155263 - DNA, 817 bp, Arabidopsis thaliana landsberg
acggatttacgtttttggcgggaaaatctcggatttacgttttttggcgggaaaatctcgggtttacgtttttggcgggaaaatcacgggtttgcgtttttggcgggaaaattacgggtttacgtttttggcgggaaaatcacggggttacgtttttggcgggaaaattacgggtttacgtttttggcgggaaaatcacgggtttacgtttttggcgggaaaatcacgggtttatgtttttggcgggaaaatctcgggtttacatttttggcgagaaaatcacgggtttacgtttttggcgggaaaatcacgggtttacgtttttgacgggaaaatcacggatttatgttttttggcgggaaaattacgggtttatttttttggcaggaaaatcacgggtttatgtttttggcgggaaaatcacgggtttacgtttttggcgggaaaattaagggtttacgtttttgacgagaaaattacgggtttatattttcggcgggaaaattacgggtttacgtttttggcggaaaaattacgggtttacgtttttggcgggaaaatcacgagtttacttttttgacgagaaaatcacgagtttactttttggcggaaaaatcacgggtttacgtttttggcgggaaaattaagggtttacgtttttgggcgggaaaaattacgggtttatgttttcggcgggaaaatttcgggtttacgtttttggcgggaaaatttcgggtttacgtttttggcgggaaaatcatgagtttactttttctcaatttcatcgcttgtatatttaagaaatttggcaaaaata

SEQ ID NO: 155264 - DNA, 260 bp, Arabidopsis thaliana landsberg
agaaagaacaggtaggctcatagaagggttctggtttagatactaggtgaactaatcaagcttgaaaacaatgcatgctttaggataggatttctcggcttctccggttatcttagctctaagtatagagagtcttgcggaacaccaccggttactctagaatcatagtttgagttcgagaacggtgcgataacaatccttatataagctagatctacaatttatctatctcccaagataattccttagacctgacgctt

SEQ ID NO: 155265 - DNA, 653 bp, Arabidopsis thaliana landsberg
atctagctatatatggaccaaaatgggctcagaagccaagaaaatcttaaagccacagtgattgtcgacagttatatctggccatttttttcggtttaaggcaatgaagagagactgtgactgaagagctagttccttctaacctttgaatactagtgtaagtgtttccagtgtaaatgagtatatatattcactactcctctggctgttacatttcaaaagctttgactgggagcatttacttctgtcatgtgatacatgatcattttgttttcagttctgtttcttcatgtcacatattcttagttcctcagtttaaatttttgcaggtgcttttgtccgtcagtcgccattttgtttgtagccaaatactaaagctggatacaagttgcagtcttatgatagttctaaaatcggtaatggtgtatgtcggcttgtgtgtgtctgtgaagtagagatatagctgtaatctgtatacagtttgagatatgaagtcagttagagtttctcctttttactattacatatggcctcttttgatgctcttaaggtctgagagagccaccatgctactcattgtttctatatctatgtatcatatacatccgtaacaatcgtaagaatcacttcgtattaaagaaaaccataccgaa

SEQ ID NO: 155266 - DNA, 201 bp, Arabidopsis thaliana landsberg
tctccaaggttcttggaagatttagattctaccaaactgatgtcaaaagatttactacaacaagaaattctttaacatccaaagataacaacttaaaataagctagaatcaacaaaaatctttaaagatcaaaacactttttaaccagtgatgttctgagacttgttgaggataactccttcatacttgacctggaaccat

SEQ ID NO: 155267 - DNA, 319 bp, Arabidopsis thaliana landsberg
aaattgttcatggttttgccctaattttgcacgaaatcattttacccaaatcttgcacgaattcatatttaaaggtaaataaaagttttgtcaagatatatgtaaaatccggatttttcaagatatatgtaaaatatatgtaaaatatatgttttgaagtaaatataagtcttgaagtaaataaaagttttgtcaagatatatgtaaaatccggatttttcacaaaatagttttattctgattggttttacaatattgcattaaaattatattgttatataatacttgattattttatgaaataaattgattgataaat

SEQ ID NO: 155268 - DNA, 507 bp, Arabidopsis thaliana landsberg
gcgatgaagcatcgagttcggtgttcatgaaggtcagagagttaagtattagcagaactggttaggtcttagtgacaaacaaggtattcatgttatccatccctgatactagaatgtggaatctagcatcgagttatcttacgggaaacattggaccgaaaaacgatatcagaagaccggtccatgctcatgcggagtgttcagatgacgatgtatcttctgtaggtagtaaagacgaaggtctcgagtgtcctatatgctgggaatcatttaatatagttgaaaacgttccgtatgtgttatggtgtggacatacgatgtgtaaaaactgcattttgggacttcaatgggctattgtgaaattgcctactcacccggttcagcttcctctcttcatttcatgcccctggtgcaaccttttgtctttccgtctggtcttcagaggaacactcagattccctcacaagaactactttgtgctttggatggtcgagaggatgaatggag

SEQ ID NO: 155269 - DNA, 188 bp, Arabidopsis thaliana landsberg
tatataacaatagagtttaaactttaaagtcttaagagtcgtctaaataaatacatgaattattaaagtgagttatacgtatcttttcaaatctcttatcaagcttttagataagcaaattttgtaaatactatgaaaaatgtttttgagtatcatagttcttgcaatatctcaaaatcaatttaaaa

SEQ ID NO: 155270 - DNA, 374 bp, Arabidopsis thaliana landsberg
gcccaaggagaatgggaacaaacggagcttgaatccgtcttcactgacaccattgatctttgttaggttgaggagcctatcgaattcatcaaggtggtcgagtggatcctccattggcagaccatggaatttgttcccctgaatcatcgagatgagaccactcttaatctcgaagttgttgttctggatagcaggaggtgcaattcccttcctctgacgttgatcacgtggtgcatctccagcaccaatgttggaagggccattttgttgattctgttcgtcagccatatcgagtggttgttgaggtacaaggttgactgtgtttctcctttctttgagttcgcgagctatgcggtcgatgttgtcgttgaaaa

SEQ ID NO: 155271 - DNA, 243 bp, Arabidopsis thaliana landsberg
acactcaaaagctatttgatcattataccatatgaaaatccatattatgaaccgtttcattcctctttagtaagcgactttgctactacgaaaccggcctccttgcatttgtgctctttttctcgctcaacgcttcagcaaacgcgcctatgatctgctgctgtgactcaagcatcatctggcaatgcttcagcttcatctccattctcgacttctccatctctctcatcatcttcatcttcg

SEQ ID NO: 155272 - DNA, 304 bp, Arabidopsis thaliana landsberg
gtttcttctcacacgattgcttttctttttctagaggaaatgtcaatttctcatttatatgtgaatataatactacagtatttgagttatgtagacagtctttttatccacttgacttcaaactgatgaaatggaagctgagagtgggtttggtaaacaagtaataatgtttgatgttgctggtatccacaactatgagcaacagattccaagacctcagatgcatcagactttatccattttagttacacagatttgaagcttaagtagtaactttttatacgagttcccaaagggagagttg

SEQ ID NO: 155273 - DNA, 67 bp, Arabidopsis thaliana landsberg
catcccataagaaggttgttgagatagggtttgatcccaccaccactaagtttgttttagcttgcgg

SEQ ID NO: 155274 - DNA, 73 bp, Arabidopsis thaliana landsberg
ctctgttagaaccttataagggttctgttgcagaggttccgaccaaaagccagagttgtatctttatgtgaac

SEQ ID NO: 155275 - DNA, 207 bp, Arabidopsis thaliana landsberg
acaaagcgattttttggcttcacgaactcaaagctatctctctccctctatctctgaggcacgcattttcgtctgtgattctcgagctcttttggggtttctccgagatttttggtcggttcttcacgttttgtttatggcggtgattacgtgatgaaagtcaccggaaagccgtattcgacggcgacattaccggcctttgagtcg

SEQ ID NO: 155276 - DNA, 380 bp, Arabidopsis thaliana landsberg
tacgtgagggcgttgaaggagaaaggagttgaggttaaagttcttgtatttcccaatgccaatcatcccttagataggtaagacaccaaagcctgccattttttgttgttcatagttaaatgatctctttgagaatggttttaattttaaaacatttgtttgcttcttgtgattgttaatgcagaccacagacggattatgaaagctttctcaacattgctgtctggttcaacaagtactgcaagctgtgaacacttgattttttttccgtatactgagtttgttttcttacaaaattggagttcgaagaaatgaacgtttaaagaataatcatttggttcaccaatcttagtgcaatgaaagactgccactttctggca

SEQ ID NO: 155277 - DNA, 1101 bp, Arabidopsis thaliana landsberg
cttcttcttcactttcctatctctttcccaataaaaggagtctctcgctttctccaacttcgctatccaaaggcgtcgacggtacaaaacccttttctttgctacacataaaacccttttctttgctacactcactctctttctcagtctgtttttatttttcatttgttgttgttgtgtttcattgaagaagcttttaggtttctgcttctctgttgtgtgagctgttttaaaggttgagtttgtcttttcttctatttctcatggcgtttggtttcgtttcttttggtggtttcattttgagttttctgaatctgggtactctttatttggttttattgatatgcaaaaatgcttactttgagattagggttgtgtattcgcgtttcgatttgttcaaagatgattgcttgttttgctttggagagtttggagataagaaacatagctcaagcttttgtgacattgttctgctcttagttggtgaattgaaattgtgtatttttgtgcctgagctctttctgtatacgtgtttaagagaattagctatactgatgttctaccattacccaatgcagcctccaacattgcatcatggcttggtcgatagctcttcttacacctcctttttttggtcccggaaggcatgtgcaggccaaagaatacagggaaccaagagggtgtgtgatgaagatgagcagtttaaaagcacctgttctgagaattcaggccacagaatacagagaaccaagagggcgtgtgaagatgatgtccagtttacaagcacctcttctgacaattcagagcttctcagggttaagggcccccagtgcattagattatttgggaaggcctagtccaggtttccttgttaagtataaacttgcaaaatcatctcggagagaaaaagctagccgatgtgtacccaaagcaatggttgagcgttttaccgagaaagcaattaaggtcataatgctgtctcaagaggaagctcgaagacttggccataactttgttgggactgagcaaatactgttgggtctaattggagaagggactggcgattgccgcaggttcttaaatccatggggatcaatctaa

SEQ ID NO: 155278 - DNA, 193 bp, Arabidopsis thaliana landsberg
atcacctcgttctacaaggtctttgggcatgatcctacaggttttggttgcctgttgattaaaaaatcagttatgggaagccttcagagtcaatcagggaaaactggatcaggtatagtgaagatcacgcctgaatatccgttatatctcagtgattcagtagatggtcttgacggattggttggttttgaag

SEQ ID NO: 155279 - DNA, 566 bp, Arabidopsis thaliana landsberg
tccttcacgtttttctcatctccaatttcactctctcagtctcagatctgagagaactccaccggatcagattcatcgccgccaccgttcacggcaccaatcatcatcagaacaaatcttatttcgcatggtccaatttccgatttctcatcggagaaatccctaattcaatcccgtttcatcgttataaccaatcggagaaatcaccgctcaaactttgttgctagggatttgagtgagtgagagaggaagatggagcagctaaagacaattggaagagagctagcgatgggatcacaaggaggatttggtcagtcgaaagagtttctcgatctggtcaaatcaatcggagaagcacgatctaaagctgaagaagatcggatcgttctaagcgaggtcgatatactaaaacgaagattattagagccagatattcccaagaggaagatgaaagagtacattatacgactcgtttacattgagatgctaggccacgacgcttcttttggttacattcacgccgtgaagatgactcacgacgataatcttcttctcaagcgtactgg

SEQ ID NO: 155280 - DNA, 376 bp, Arabidopsis thaliana landsberg
gtcacaggctggacttctttagaatgctctctttcttctacacaacggttggctactatttcaacacaatgttgatagtatttactgtttatgcattcttgtggggtcggctttatctagcacttagtggtgttgagaaaatagcgaaggataggagtagcagcaatgaagctcttggtgcaatcttgaatcagcaatttattattcagctaggacttttcactgcacttccaatgattcttgaaaattctctcgagcgtgggtttcttccagcggtttgggacttcataacaatgcagctgcaacttgcatcgtttttctacactttctccatgggaactcgaacccattactttggccggactatactccatgg

SEQ ID NO: 155281 - DNA, 116 bp, Arabidopsis thaliana landsberg
gtttaagtactgcagattcaaatcaatccgactaatgataaatccagaaggccaatcaacaaacttaaggacatctattcccaacataatccacaaaggcttgagctaatctcact

SEQ ID NO: 155282 - DNA, 295 bp, Arabidopsis thaliana landsberg
agacagacagtgaggtcttaaagaagatcaatgtctcaccatctacggataaggtgtcatctggcatgatggagatgatgttggaactaccatgtgaagtgaaatctgtagccatatcaattgaatatgataaggtgatctttcgttctccatagtttccaattcacctagcataatctgattgtcatgagtatatgaatactgtttgtggtactaattctgtgtctgaaattttctcacagggttttctgcatatagatgaatatccttctgatgctaatcaaggatttcacat

SEQ ID NO: 155283 - DNA, 558 bp, Arabidopsis thaliana landsberg
  unsure (1)..(558): unsure at all n locations
ttacccttacctggaaaaccaacaatcaagtattagccttacctgcaccagatggaaccgttgagaaagtgaaccaagacccattcgcagcttcactaaccattccaccaccttcgtacgtgcaaatggccgagatggagaagaagcagtatctactgagccaagagcagcannnnnnnnnnnnnnnnnnnnnnnnngggatgagaggtcaagccagtttggcgaagatgaacaccggtccagttccggcttacggaatgccacctgtcaacgggatgggaccgccacctacggggtattactacaacaatccttactgattcattcttttttgcacccattcatatatgtgtagatgactcgtcttccacctttgatcttgtgtgtgttttattatatcccctcggattgtcgtaaaacgattccatcttcttccttgtctctgctcgagtttgatttatagtttatgtacactttcttgagaatcttgattcccttctgtataacattttgatatcattcatgtttccactgtttaacttaagaacacttctgtcg

SEQ ID NO: 155284 - DNA, 187 bp, Arabidopsis thaliana landsberg
caaaatacaaaagaaaaaatggaaaaagttttctccgacgaaaaaatctccggtaaccatcactggtcgtttaatggaacgacgtcgttgaatcgtagtgcatccgaatgggcattcaatcgcttcatacaagaatcctccgccgttgcagacgacggagaatctgctacggcgtgtggtggtttcc

SEQ ID NO: 155285 - DNA, 1092 bp, Arabidopsis thaliana landsberg
gaaaataagaaagataataaaaggacgaggcaaacacgaagagctcacaacgagattcatgctttcagatttcaactggtaagtctaatcgtttttcatgtttaactgaagcagtagattgttctttgtgattttgagttgtggtgttttctctttttcccgttgttaagatgttgagaaaatttctgtccagaattgttgcttcacactatttgctgattcggtttggtttgcattggttttgaaattaaaactgatttcggttcggtttcattggttttgtggaaaaaaactaaaagagtcacgcgatggagaatttggagagatgtgcgtcgataaaaaaaagcatgaattggaaaagggtttacccacagaatcgctttcactcgctcaacgcgctctttctgcgactcggtacgaaatagagccttctgattggcttaaaaactctaaaaaaactcaaaaagtatacatgttgctagctcttattattatatgataaagttttgtacttgcatctttttttcagtcaccggaagttggaatttcgtttgtgataggatctaaacaagtatcaaagtctacaaatgctggattaagcaagttaaagacttgtgattcccctgtatcttcaacaacctcgtcttccaaaactttatccaaagacatctgtggatagccatagcaagccgcagttacattatacaggaaaggtaccacttaaggctttgcattccaaagaaaatgtcactgtcactttgtttgatatgtttgttctgtggattgttaacatttgtttatgcttgagtgaggtcccagacaggaaatcaaactcatactatgcatgtagctagtgttgttctgttgaccctataaagcctttacttttactctagtcagcttatagttgcattctttagcttagttctctgctttacacactttgcaacctagtagaacttttctcttatgacacccatgatcaatacattggttgacaataatgaaagtggagttgtacacctctcgcagctgctataacatcttttctttttatcaagtgatttttatgttcagtaatagcttactgtt

SEQ ID NO: 155286 - DNA, 409 bp, Arabidopsis thaliana landsberg
  unsure (1)..(409): unsure at all n locations
cataacaaaagaaaaaatcaatacattcgactatggaacttttactcccacacgcttcaaactcatgtcctctcactgttcttggcttcttagaacgagccgcctctgtcttcggcgactctccttcactcctccacacaaccactgttcatacttggtctgaaactcattctcgatgtctccgtatagcttcaactctctcttccgcttccctcggaatcaaccgcggccaagttgtctctgttattggtccaaacgtcccatctgtctacgagcttcagttcgcagttccgatgtcannnnnnnnnnnnnnnnnnnnnaacccacgtctagacgctcatgcactctccgtcattctacgtcacagcgactccaagctcgtgattcatgaccatcactcaagctcttt

SEQ ID NO: 155287 - DNA, 171 bp, Arabidopsis thaliana landsberg
gggggagccaaactcaaacttgtatttgattgaagaaaaagattctgaagcaaagatacaaattttgttggtacatgcaaaaaatcttatcctacagagagagctacaaagacttgacgatgttttcttcaatacaggctgaatccaaagaactggctgacaataattgcc

SEQ ID NO: 155288 - DNA, 247 bp, Arabidopsis thaliana landsberg
aagaagatgatgctctcgtgttctcctctcaccgttccttcttcttcttacccattccatttccttccttcgtcttctgatcctccttacgattctatacgaatatgcacccttctctttctcatctccacaattgcaaaactcttcaatctctccgcatcatccacgctcaaatgatcaaaatcggtcgccaatagcagccatgaggctgtcagtaagcttaatgagttatgcattctctcttcac

SEQ ID NO: 155289 - DNA, 289 bp, Arabidopsis thaliana landsberg
ttttttttttattttaattttttttttaatttttttttttttttttttttttttttatttttattattttatttatttattttttattctttttttttagtttgtttttttttttatttttttttttttttttttgttatttttttttttttttttttattttttttttatttttttttttttttttttttttttttttttttttttttgttttttttattttttttgtttttttttagtttttttttttttttttttttttttttttttatttttttttttttatttt

SEQ ID NO: 155290 - DNA, 256 bp, Arabidopsis thaliana landsberg
tatatgaccgtaaaaatttcaattattgggttatatgagacaggtccatgttttccagtagtctatagttttctgaggcttccaggttcaggagaagacaaaactaatgtacctatagtttattcttcttctgcatattgaagagcagcaacaaatctcaagtttttttgtgatgcatttctgttactctactccattggaccagaagatgttccctcctcttcaccatcgaattcttgctcaacacctctgacct

SEQ ID NO: 155291 - DNA, 104 bp, Arabidopsis thaliana landsberg
  unsure (1)..(104): unsure at all n locations
gcgagaactccagccttcactttcagaccaccggtaaaagcagctatcgtcgccgccatggaaatgcctcgagtagctcnaaagtctattggctaagatctctg

SEQ ID NO: 155292 - DNA, 366 bp, Arabidopsis thaliana landsberg
gaaacatgttacttaccattatatattgcgggacttttatgctctcgccgcgttctgtctcttccttatgagcaatctccaattccctttggcaatacattctgttccattttgtctatgcaggttaatcagaccagagtcaccgggttacttggatctataccgacgcctgaggaatggagattgctcataaggacgttactttctatctaatgttttaaagaaaaagctcactctctaataaattaatattagatactctgactatgtaataagactcatgcatgtatataatattcagagtcttcatgtgccttcatgaacatatatataccaatcaaggaagttataaaacttcatttatac

SEQ ID NO: 155293 - DNA, 1135 bp, Arabidopsis thaliana landsberg
gtctctctctctcgagtcaaaattagggtttcgtttcactatccaggtatgtctctctctctctctctctctatcttacctttcttctctgtgtaatttgcttctgaaatttctaatttcgtggagaatcttcttcatcttaccatcggatctggtagctctcacttcgattcatttcaaatttggatttcaaatttcgttcttagagatgtataatcgtggaatttgtaatctatagcttaattacgttcaagtagattcgagatttgatgtgattttgaagaattgattagctgaaaatgtggagtgatctacgttgtctgtgatgatgatattgatggttttcttcttcttcggctttcttcggttctgcagagtgtatacaaaggttgttgtggagcttttatcagttcacagaaataagatggaggtatttggaaagtctcccatggttgtttcatctgccaatgttctttgcttgtctgcaattctgggtcgcgattgcgatggacacaaatgtgattgaatatgtgaaaatgaaaatgtttgtgggaatatgtatcgctgcaaactaactgggctaactcatgtctgcgacaagaactgtaaccagcgcattctctatgataaccatagctctttgtgccaagccagcgggaggattttccctctctcgtccgtcgaggagcaggcggttaaaggtgttcggaggaagcttgacaccgctgagagtcatccttctgagagctgttcgtttaagcgtcgtcgtcgtgatgctcagttccatgcttctcctttcgagaggtcttttactgctgtgagccctatctgcagcccggctggagacggaatggagttggtttagattccatgttgatctccgcaaatcctgagactgagaggcctctttatcttacgtagaataacttcccttttctctttcttttggacaactatggatatgagacattgtgctattgctctcgcagggaggtctaggcatatcctccctgccttaaagagagcttttatcttagtaatgttgaactttatgtagtacttatgtaggagagactctataattctaatgctttattctggatcttactgctgtcgtatttaggtgatggttgat

SEQ ID NO: 155294 - DNA, 70 bp, Arabidopsis thaliana landsberg
gagctaaaggtcgaaggtgcggagacaaagcggttcgtgctggttcatggaggagggtttggtgcatggt

SEQ ID NO: 155295 - DNA, 1022 bp, Arabidopsis thaliana landsberg
cacattttaacccatatttgattgacaacttacaagcctccatgaaacattgaaacccttagtttgcagagaacacagtcgtggttattgcggttttacattacaagctttgatttatctaatggagatacaatatattacaaaccattcttcacttgtcgatccctgccttcacagatctgcctgcaatgtagaacgaaaaccactcgggtaataatcaaatcaaaacatccaaacgcaaaactgttgatacctagtgaaagcaatcttcatagcatttagataccaaagaagaccataacatcgtggtctaagaatatgtggcatcgcagaccaatacagaggacgttcttttcacgacagttagtattacagattgccatgaaaggcttaacctatcaaaagatcaagtccaacagtgaaggaaagaagctagcaaatgccaaaaccataacaacaaagactatatctgcctctatatccgacggtaaggtcatggcctagaactaagagcagcaatcaagcatctattaaagcttggtatgacagactactaacaacaatgaagaaagaaaacaaagaccaaggacttataggaagctactaacatccaacctttaaatccattgcagttccagagattcaaaaacaatgatccaagctaagtcaatggattattacgtcagaagtcaaattccacataacaaatagaacaaaaccctaaccaagcaatctaatccaaaactagtgagccaagctagattccaactaaattcaaaagccctaaatttgtagaaccctaaagatcccaaagttctagccttttattcaaattgaaatcaagaagaagatcgtttcccttcacaatcaagactctcatcgaaattcttcgaagggtatttagcagttatcccagcaacctcaaagacaagattatctccagaagatcgaatcccagtaatagaccacgacttgaaaaacgcccgaacccgaatcccttggagctccgcgatcttaccctg

SEQ ID NO: 155296 - DNA, 69 bp, Arabidopsis thaliana landsberg
cttctgctactccgcgtggtagaccttataatggtggaaggatgactaatacgaatcaatcaaggtcta

SEQ ID NO: 155297 - DNA, 295 bp, Arabidopsis thaliana landsberg
ctcatctatgtgtatatatataatcaacttacaagacagagagtgagagagttcaagagagaagaatcgtttacaaagtatacaaatttcttgagaatcatcaataaggacgattcggtggctgaaccgtaatctgagccggtaaaggtctaccagttccagaaccaccacaattgctacaagccgcacgacctgaaccagaacacctacgacatccaacgtcaccatcagaccatcgagaacagaaacacgtgactcgtcccgtaccattacaagttggacaacgagggaattg

SEQ ID NO: 155298 - DNA, 604 bp, Arabidopsis thaliana landsberg
  unsure (1)..(604): unsure at all n locations
agatggcgtgatgtgaagttgcgttcttttgagaatgcaagtcatcgaacctatgtggacttgaaggtatgagaacacatatcagaaactggtcaaacacacttttgagtcttagccactacataaatggttccaataactttgtgatttgttgcaggacaaatggaaaacgttggttcacacagcaagtatatcacctcagcaacgaagaggagaaccagtgcctcaagaactgctagacagagtcttaggagcacataggtactggacacagcaccaaatgaaacagaacgnnnnnnnnnnnnnnnnnnnnnnnnnnnnggttgaagcaggttcgtccatgtaaagaaggagaatggtaataacaataactttcacttgacgactaaggaaccaaagtgggcaactgtacaaagggaaacaacaaaatacagaaacatacttaatttctgaaaagaagagtctatatttttattttttttaaatcatagctggtagaaacaagacgttccttgacacttttggttacttttatggtaagtctgttcattccaaatttctaattgatttgattatgtaatttggtggtaggaccatggaaaaa

SEQ ID NO: 155299 - DNA, 327 bp, Arabidopsis thaliana landsberg
cgtagtagcgttctaagatcactgaggggaaggttggtcataaatttggagagtacacggaaactcagactttcgagaacaaatattgtaccgggaagaaaaaagggacagaaatccataaagtcaaaaaatatggcacgaaaaggaaatccgattttggtaagacttggaaaaaatcgtagttcagattcaagtcggttcagtgccgaggcactgttagggtgtttatacttttttatatatttcgtagccccaacattggggcctgttctgtttctactgcgattaatacattttgtttgggggctgaggttgggattgggaaat

SEQ ID NO: 155300 - DNA, 248 bp, Arabidopsis thaliana landsberg
agcataagtgagaacctacctgcaaggctaaatcacgtgttggcaatacgactaaagcacgaaggcatctcacaggacgagatgcaaggagctgcacaattggtaaagcataagaaagagtctttccacttcctgttggagagttaacacagatgtctctttcaaaaccacctggccctatagtttcatgccaaactgcgacttgcactggaaataatgaagatatgcccatgttctccaatgccatc

SEQ ID NO: 155301 - DNA, 269 bp, Arabidopsis thaliana landsberg
aaaattgaaaaccataacgttaactcaatatatcaaaagccaaaaacaaagggcttccagtaaaacatcggtctacaaactcccatcacctcacatgaatgagaattaagaaaaccaaaaaaaaaaaaagttccaagttcaaagaaattttattcgaaaacgacaaattcagaccataaaaggggatgaacagatgactttccactccctatcattcgagatctgcttcttagcttaggcctttgacatgtggacgatcaagtcgacca

SEQ ID NO: 155302 - DNA, 309 bp, Arabidopsis thaliana landsberg
acttgaaaagagaacccattttgcatttatcatgagttattatttccatgtcaaagtatagaagacctaacgcagtaatgtctgttgcaatacaatgaataaataaaagagcttattctttgcctaacctacataatgaacgtggacgacacaaaagagaaagtattatttcgagcagcttctctcttcaccatcttatgtgcatacaacaagacgctgcaacagacatttggctggaaccaatctgtctgcaaccttttccatagtcatgatgcgtttgtagttgatgaggatgcattactttccttc

SEQ ID NO: 155303 - DNA, 380 bp, Arabidopsis thaliana landsberg
gaatactagaaacaacatattggatgtttatccaaaagttcattgctgcaacattgaaacgaatacacagaaggagaacagattacaataatgatgtaagaaagatatataggtctaatggtcaagtgacagggtcaaagttggagacgccgacgacgacaccaatgatgacagtgaggacgaggccaccagaagcaatgctgagcaagaaattcttgagggaaggagagattccagaaccagcagcttcagctatctccggaatcaccatcgaagcagtaagagcagccgcggagataccggtcaaagccttgtccatcttgagggccttaacttgaagcctctgtgctctgcctccagttgcaaccaaagccttggat

SEQ ID NO: 155304 - DNA, 416 bp, Arabidopsis thaliana landsberg
accaagatcacaactccaatgttacggcgagatggtctacagcttcgtcggtcaggatctgcttggggaatgcagccgccgtgatcttcccattgaacggctcaaatcagtggtgacgtggaacatctccacactccgtccggtggtctttggcatgtctccgtacaactccgttctcggcgagactcaccacgtatcgaacggtcacatcaacgtcatcgccgaacaagtataatcatttgtaatataatcattatttagtcattacaactataaacgaaacatagactgatatatatacatcgttaactcttaggtagtgcatcatcctccggtttccgctcttcatgcgactcacgaacaagaaaatatcgacgtgacatggtgtcaatatttcactcctaaatttcgtggta

SEQ ID NO: 155305 - DNA, 141 bp, Arabidopsis thaliana landsberg; identical to SEQ ID NO: 79008

SEQ ID NO: 155306 - DNA, 424 bp, Arabidopsis thaliana landsberg
gttgtaggatcaattccatatctagccatagcagctactgcccttgagcaagcctgttgaacacgtaaagacccttcactggagctcaatgttcttataatcgccggcatgataatgtctatatgaggagcaatcttgactccatgagcacgagcaaggtcttcaaagagagatactgtgtaaccaccagactccaacccaatctctttgacatcagaaagttgagcaacaaaaacatgaaccacctttgcatccaaatctttcacaatcgatctcaaattgctcattgcagtcttgtgggaatctggatctttgtcaagattagccaactcttgtctaaatgccgaaccaagatttcttcccattctccccctcctggttcctctgaaaagcaaaaaaagccacaatgatgaattcagtaagc

SEQ ID NO: 155307 - DNA, 259 bp, Arabidopsis thaliana landsberg
gggagatatgatacttacaagaagaaaagtggacagattcctcggtttggagaatgggaagaagcaaatgagatgccaataacacaatactttgagaatccaagacaagctggtctgattcgtcaccaatacacaacaacttcttctgcttcttccactaccacttcatcttcatcttcttcttcttcttctgcagaagccttaaagcttgcttctcaccatccccgtccacgtcacctccacgctcaaagacaggttc

SEQ ID NO: 155308 - DNA, 199 bp, Arabidopsis thaliana landsberg
cttatcttcttcctcttttgcttttctaatctctcaatggctaccttaaaacacaaacctgtaaatctggtatcttacgtttataatttgaatactatattctcctcgcatagatccacgggcgactgcgcatgctactgcagccatcaaaactgatggtacagtgagctttctcgttatcggagactggggaagaaga

SEQ ID NO: 155309 - DNA, 468 bp, Arabidopsis thaliana landsberg
aaacaaaaatccaagaaatttttttagaagccgtgaattttctggctttcttctacttgacaataccttaggtctctggctcttctctgaaattttttaactaacaactgaagaaatctccttttggatcattccaaaagtttcacaaaatccagaagaaaaaaagaagaagattatatagaaaatttcaattgtgaaattatcaaaattccctctagaaactccatttccagaccttgacactaagatcagacttacacttagtttttttagaagtagctacaattggagttttaccttttggtatagttccttcaaatccttcacatgtcactttgatctctactccttcactcttcagcttccccattatcatcttcactttagttctcatctcgatctcatatcctacacgcgcgcgcgtcagatctgatctcagatgcttagcttcatccggatctaactcac

SEQ ID NO: 155310 - DNA, 272 bp, Arabidopsis thaliana landsberg
caaggctcctctatttctaacagtatttaaatagaaaaattcttttttttaaatgtaaagaaatataaaactccctgatatccacatgattttcccaaaaccccccaacaaaatacagataaagaacatagaaaaactctatcggatatatgtgtttatataatcaatccttcttcttctttttttttgttctgcttcgctctgctctgcttccggatgatgtatagattcttcacctctgttgtttaatcatttcacagaagcttccattc

SEQ ID NO: 155311 - DNA, 166 bp, Arabidopsis thaliana landsberg
cagttatgtgattgattatcaagcttaaatttttacgattcgatttggggtactgcaaatttctactgtgtttcgttcttttctcccgtgatagaaatctgagatttgaaaatttttttcttttagcagctttttcaatctgggtactgcacattcctactaaatc

SEQ ID NO: 155312 - DNA, 105 bp, Arabidopsis thaliana landsberg
accttggttcataaactaaaacctcagcaagattgtctcctttaatgtcattccactgcacagtcctctaaatcttgtcagtgcttctagacatgcctcctttcc

SEQ ID NO: 155313 - DNA, 145 bp, Arabidopsis thaliana landsberg
ccagtaaaagcgatttatgtctttgaagaacttctttctttcgtaccttgaaagatttggaggctcttcaccacatgataaatagttgacataatcagcataccacggaagtttctcctctactacaagcatctcatcccaaaac

SEQ ID NO: 155314 - DNA, 87 bp, Arabidopsis thaliana landsberg
taaacaacgatgatgaaacacgtgtccacacttcggtagctgtctaatcttatcgtcggatacaaaatcggataagcaaaccgtgca

SEQ ID NO: 155315 - DNA, 346 bp, Arabidopsis thaliana landsberg
aaattttttgactcaaatgagttgataagtcaaatgagttattgggtcaattggtttgatgagtcaaatgagttgggttgtaatggttaatggtttcaatggtttacccaattaatccatcaagttttgtaaaattgaattaaaccaagtaaaatctctaaaccagtgccaatttaagcttaaccaacacatctaaaccaatttaataaaatcaatatttttccaaatttcttaaatatacaagcgatgaaattgagaaaaagtaaactcgtaatttttctaccaaaaaacataaacgcgtgattttcccgccaaaaacgtaaacccgtgattttcccgccaaaaa

SEQ ID NO: 155316 - DNA, 400 bp, Arabidopsis thaliana landsberg
tttggcataaaccttaaatcaattaaaaaaagtagtaagggaaaatgcgtcaaaatctttggccaagttaagagtcagcaatcagcaaagggaaatgcatcagccatggagataacttgataactcaactccttatgagctttttgaatcactgtctcttgtgcatagaacaacatgtaacactcacatcctctcaccacttcttcttcaacctcattgatccatgcatcatcacatctataccacaaccctttaagcctcagatacgtcacatagtgacctgattccaacatccccttgtgtgtcacaaccgcaaatatctcaaactccgctgatggagatgatgatgacgaactgtcatactcaccttctccatcaaaggcaaatattctgttcccaa

SEQ ID NO: 155317 - DNA, 64 bp, Arabidopsis thaliana landsberg
attggtaaaaatccagcaaaagaggggttattccgagcgggttcaatggacattggggatggat

SEQ ID NO: 155318 - DNA, 133 bp, Arabidopsis thaliana landsberg
gaatttgttactacaaaattatttagtatcaaagttagattaattaaaagattgtttttcacattcttatttggtgtcttataaacataaccattattatctcttatttatatattaatagtttaattaaaca

SEQ ID NO: 155319 - DNA, 210 bp, Arabidopsis thaliana landsberg
ttgataagagttttggtcttatttttacgctgtagagtcatgttaccaatggatgaaatataccttgtttttcaataacaggcacacatacatatacttaacaattttctcaataatctaatgcctaatttgtaacatagattgtattcgatacaatgaagtcttcttatatagtctatagaaaaattgaaaaaaatgggcataattctt

SEQ ID NO: 155320 - DNA, 112 bp, Arabidopsis thaliana landsberg
tgaagaaaaaatccatcagatctgctgccgtcgtccgagagtcatagttccccattgtagatccaccaacgaacctccatctgagagaactacctccgctcgtcgtcgactt

SEQ ID NO: 155321 - DNA, 571 bp, Arabidopsis thaliana landsberg
ctctccctttccccaagtgtacccatcaatgcctatgtccattcctctcccttgcacataagctttgctctgtctatttaatttaactcttcttctgcatgaaagttttatgctttcgatgattcccaaaatctttctcatgcgttttttactttcttgatttggcaatcctcatgagctgattttgatttcttctttatggttgccgacacgaaaggtttgttgttcttgacttgtgtttttattttattggacagtcttcttttggtagatgaacaactcaaagacggagctaacaaagttgtttttttgatattccattaattttcctttattttattccttaatctttctttgatttttctctgcattgtgtcatgttttgtggcattactatttaaaggaattttttggtatctatgcattaatgtctgatttcttacatgacagaagaagctaggacacaaaacaactcaaattttgtttggtgagaaaaatcaaccaagaaaatattgattcttttggagcaaggagttggtttgattggtaatgctcaagttggtctctcttt

SEQ ID NO: 155322 - DNA, 188 bp, Arabidopsis thaliana landsberg
ctggaagtgatccaaaacactggcttattccacttctcttctctagggtttctctctaattctgaacttgctctctctgaatctcattattacggtggagctaattcggggttagctcacaaaaaaagccaactttatatgatgctctgagttgcttcatggtcctttttgtatgtttgtgtaaaaga

SEQ ID NO: 155323 - DNA, 366 bp, Arabidopsis thaliana landsberg
gacaaacttttgtttaaaattgtatttgataagtgttttcaagaggaccgatatcatcaaaaatattatgattttttctgtcaattaatattctttcattcttttatagagttgatcaacttcatgggcattttttagttccctcaagttttgatcctcttatgatatatctttatttgatgataaatttattttagttatgatctatggaggttgcttatttcaaacctcgttgatcacttttatttctgtataaaccaaaaaaccagtctttgaattttttctaaaaagacaggttttatttcttcaaccattttttaattctaatgttatataatcttgttttttgtagtacatttttttttg

SEQ ID NO: 155324 - DNA, 155 bp, Arabidopsis thaliana landsberg
ataagatttaacttttattagtaagcatgaatttacaatttaatcaaagaacttttggaactaaagttaacaggaagtgaaaataccattgccgtgttaaaaacatgatgtacagtaactgttgattcataatctacctccagactccagttggg

SEQ ID NO: 155325 - DNA, 422 bp, Arabidopsis thaliana landsberg
ttgtaatattcgaatattaatatccatactaaaagattcacatcaccatgaaaagttgaacccattcaagatcataaaaggaaaaagaatgctcattgcattgtctacacacaaacatgacgcaacctaaaaacccaattaggatcgttacaacaaatcgtggtctcatccacaaaaaaaaagctaaaacactgaacaagtcataaaagaagaaagcaactttacctacaaaggctctctctctttctacaaaagagttccttttctctctaaacgttatgaaacttaaaccggcttggttcagaaatcagaaccaacgcatccatttccgtggctggtttttgctagaagatccttttcttggtgttacattgatcctatccggattaactgctgcccatttgccaaaatcgggtgaagaa

SEQ ID NO: 155326 - DNA, 121 bp, Arabidopsis thaliana landsberg
tttgtgtctataaaataagacagcttctttctcttgactttccaaattcactcaactttctctcactccttttttctctctctctctctatcctctacagagctcgcagcaactagcgcag

SEQ ID NO: 155327 - DNA, 191 bp, Arabidopsis thaliana landsberg
ctcttactctctcatcttcttctcctttactatctctcttaaatctagctttcgttttagataaatagagagagagagacatgttaagtaggtttcaaattcaatcttgtttagtttgtttcttagtagtttcttttgattgtgatgatcataaagacttgttctttttctcctatattcaacgaattatc

SEQ ID NO: 155328 - DNA, 95 bp, Arabidopsis thaliana landsberg
tttttttcctttttttgagtgatttcctttgggaattttttttggaatgaaagaattggtattttacgacaatataaatgttatagagaaaaaaa

SEQ ID NO: 155329 - DNA, 650 bp, Arabidopsis thaliana landsberg
accatgattactcatacatatattattcaataagaatctaagataaagccgtcgtaaatgattattttatatagcaagagacattacacataaaaagtagcatttcacgattattattaaaggggacaatctctagttttatttatgaacataaaagagactgtgcgtttgtagagtaatatattaatatataggtttgtattggtccctcttgacaatttgagcaatgaacaattgaacatcatcacctcacgctcaaggccaagggtcagtgctgccagacacatcactcctgccacctccggaacgatatcctctggctgtggcaccatgggaacccgctgaagcatctttgggtagtctaccatctgcgttctcatcaactcctccagtgtcaccattagacatctttggcggagtgggtaaacctggtaactgcgctggcggtaatgttggtaatgatattggtgcgaacggtaacagtgtcttaggaaccgaagcggtcttcttatccataagttctttggaaacttcttctagcggccttgcgcctacattggcacaaacatctccaattacaatgagcaaaagtaccatcacatgaaactttgtggcgagattcattgtttttggtttataatttattttta

SEQ ID NO: 155330 - DNA, 526 bp, Arabidopsis thaliana landsberg
gtcagaccgaggttgtgatatcattgtatttaggacgtggttgatccgtagatatcacttcttccattgcttttctcttattactactcaacattggttcaagttgttccgattcaacttcttggtggagaggcaagatctcaatcactgatgactcttcttctatctccggtttagaaaccacaatctcttctatggcaactggtttctcactttctttcttcaactttgttttcatcatatgaggtttcaacttggtaagatcagctaactttactggtttcaagaaaaactcttcagctccttcttcgaaacatctgttggaagaaaccaccacaattttgtacatagttcaaagacttattcaaaccaaagaatcaaataacacccacctgccaattcaaaaatcaataagactcatattaatgttaaataaacagagctcttatctggagattcttgtaggaacgttctcagatgacattataactacaggtatacttctaaatgctgctgattcctatac

SEQ ID NO: 155331 - DNA, 975 bp, Arabidopsis thaliana landsberg
cttttatcacccaaactgcgacgagcacatcatgagtacaatgcaagatttatcttctactgtgtcggttagccctagcttcagtttctacgcctccggtgacctagtcgaaaccgccgttagagttatacgtgagtccgagagttattattccgttaaagttgacggcgaaaacgacaaagaattcgagttcgaaacattaccgttaggtgacgagagcctctttcatttctcaacgatgacgacgacttttaagcgctcttccgacgacgatgacgtggcagacgatcgagtcacctcgaagaatcttttctacggtggatggagtgttgatcctccatctctaacttcgccgtcggaatcaatttcatcgtcggattctgacgattcggaaaacatttctccgagcaaattctactgtttctggagtccgatcagatccccggctagagacgatagcttgaagagtaaaggatcttcgagacggtgtcgtataaaggaatttctgaggagaagccacagcgacggagccgtttcgaccgtgagcgcaactaaacggtgcagtttcaaggatcttctaaggagaagccacagcgacggcggcggcgagggatcttcgatttcgacgagtggaaacggctctctggtagtgaaagggaggaataaaacggcggcgtataagcctgatgtggataagagaagaaagtcttacttaccttacaggcaagatttgatcggcgttttcgccgggatgggtagattccgtaattaacgaatgtttgattatttcctaattttattatttaagtgtgcatattcacaaagaggtcctcgtttgatttttaattttctcttttgaccatgtaatactttttggtgatattaaattcacttgtgttttttgtcttttttacttttccactgaaatgttgtgcaaagtgtaagactttcgaagaaatagagaatattttaacg

SEQ ID NO: 155332 - DNA, 419 bp, Arabidopsis thaliana landsberg
ttttgtgtgtgtctagctgatctgttctccgatcaaatccaattctacaaccaagaaagacagtccctgaaacaacaaaaagtagaagtgaagaccgtgcgccgatagaaagctccttgcagctgcggttagcagcaagaacgcaagcccgagctctttcttgaacaccatgttcgtcttcttcttgttcttcggcctcattagccctccaaggctcttcttcacggtttcttgccctacaagatttgtctcttgctccttaagtttgctcagaagctccaaacctgactccgagtttctcctatgcaacttctcttccttttcagcaaacgctagcaaatcggactccgatgatctcccggttttcttcgtcacaacccactcgtaagccgatccaaactgaaacagcccggagatca

SEQ ID NO: 155333 - DNA, 262 bp, Arabidopsis thaliana landsberg
taaagtttgtcgttgaagaacatactttcaattttagagcttcttgaaacttattttcttatctggctcgatcttgagagttttgagattctgtgggagagacaatcttagggtttctgcatctagcaaaagtttgaatctttaaatatcttttagcgtttgcgattgtgttattgcctctgttctgtgttcaatgggaatcttcccttttgggacagaatgattctctgtggtcgttttagtattcctcggttcatgtcct

SEQ ID NO: 155334 - DNA, 220 bp, Arabidopsis thaliana landsberg
  unsure (1)..(220): unsure at all n locations
aattgattcatcttaaaaacatatattgaagatacaccaatcctgtttctaggcattcacaagcctacacatttgagtttgtttctgttcaaataaccctacaattgcagcattactagtaacctttttaacatgttttccagactttacctcagttctnnnnnnnnnnnnnnnnnnnnnnntccccatttgatcagcggtaagatctccaacctgagaa

SEQ ID NO: 155335 - DNA, 77 bp, Arabidopsis thaliana landsberg
aatcgtgtaagttgagagctctcctgttttttgtactagtgatggttatctttaaaatattattatttcaggattta

SEQ ID NO: 155336 - DNA, 530 bp, Arabidopsis thaliana landsberg
gattcatcaaagctttaatcatatcactttcttgatcgttcgttcatagtttgcttccggaacaagtaagtatcttctgcaccattgatcatcatgtgattcttgattcttgtttccgattattagttcttacataggatgatttgattacaccataggttttaaagaagttactgttataatttctgcgaaaataaaatcattttttgagttcttgttttttgtatgtcttgatatcatgtaaaccctagatttctctgttatgatttgattttcttctacaagacgtattcagactctgatctaaatctgaatcttttttaatattatagaaaacattgacattaagatcacaacatgaagatgtcaattagcaaggtcaagagcatgttctgcacaaccttaacaaagtcaatgccagccattgccttctttgggagaatggcattttcctttgtctttttcattactgcaatccaagagtaagaaacatcaaaataaatctttgattcggttaatcactttatgta

SEQ ID NO: 155337 - DNA, 277 bp, Arabidopsis thaliana landsberg
agcaaaaccaggttctgaaattggaaaactttttttgtcttgagggttcttggttgttgcatgaagcagaggaatgggcggtgagagtaatgaaggaggagagatgggttttaagcatggggatgatgagagtggtgggatctttagagttggaattacatcaatgcccttgtatgcaaaggcagatcctttcttctcttttccagattgggaaccagttaacaatgctgctgcttgtggcttctttagctttcattaccatccttccatggcgatg

SEQ ID NO: 155338 - DNA, 402 bp, Arabidopsis thaliana landsberg
taccaaagttaccaagaaataaaagaagtaaaatattacaaacaaaaaaacacattatatccaattttatgaaactcgaaccacaaaactctcacaaaggatcagtaataaaaagaaaaaactctcacttacaagtaatagttcatgcccactttgatcaaacaaatgtgaggaatattcaacatcacgcctgggctccggcaattcttcctcaagaacgagtacgctacgtttaccaccagctgttttacaaacactgagttccgctttgccttcacgtgaccgtgtccgacaatgtaagccacttcagcgtccttagcattcaccagatcaaacagctcttccttcacctgcggttgcctgaacttggtgtccattggtcggaactgaaacatccttctc

SEQ ID NO: 155339 - DNA, 429 bp, Arabidopsis thaliana landsberg
  unsure (1)..(429): unsure at all n locations
cttttgtcaagaaaaacggaagagtaagctgtgttgggagagatagaagaagggttagtgagtaaaccggaaccgtaccggaaacctggttcgttggtcattgagtgatcggactggtaatgagtggagttaaagagaaaagggtaagtgttgttgtggtcgggagagaagaaagaggaattagggttacaaaactcaggaagcttctccatctgatnnnnnnnnnnnnnnnnnnnnnnnnnnnncatagagaaagatatggagaagctgataaaatgggtatggagagaaactggtgaaaagcttacaagtgaaattttagggttttttcttttggatgattgatgattgatgatgagagaaagagacggtatgtgtgagagaaatggcaatggtactactgtgcccaatcagaactcaagcaatagt

SEQ ID NO: 155340 - DNA, 216 bp, Arabidopsis thaliana landsberg
gttgaattatacaaccggggatccaactttctttttatgcatagtgtttctactcgatcaatttggggttcagggcatgataaactaacttgttttacgtcaaatcctttattttcagtttgttgttgtctaacagggagatgtttttcgtattatttatctaatgtaactattaattgttgctaaccaaaatatcatttgatcctaaacctaaac

SEQ ID NO: 155341 - DNA, 224 bp, Arabidopsis thaliana landsberg
ataatatggttgaaagcatgcttttgcagctgccgtgtgttcaagggaatcataattatgacggggaaggaaatggtaacgtgtcgttttggagttactaatattcgatagtcgtttccatttttgtagtatagtttgaaaatattgtagttccttttttagaatggttccttcattttattttattttattgttgtagaaaggagtggaaaataattcaatac

SEQ ID NO: 155342 - DNA, 495 bp, Arabidopsis thaliana landsberg
agtttatgcaggaatcggctgttttgtcagatttttttacccagtttttctccaaaccagagtataaaagtgtgagagttcaactcgaaagtaaaaaaaacttttaaaatgtcaacttcaatactaagacggatactcgacccgacccggaaacccaaacccgatgcaatcctctcaatctctctcctcactaccgtctcttctccgccgtctccgccatcagatcctctaatttccgacgccgtctcaatcctaacacaccaccgctccaaatcccgttggtccactctccgatcactccacccttcaggcttcacaccttctcaattctccgaaatcactctctgcctccgcaacaatcctcacctctctctccgtttcttcctcttcactcgccgttactctctctgctctcacgacacacactcctgctcaactctcatccacatcctctctcgatctcgtctcaaaagccacgctagtgaaatcatacgt

SEQ ID NO: 155343 - DNA, 444 bp, Arabidopsis thaliana landsberg
gtcatggcccctacatctccctgatgaccaataacaacctaaaaggacaacatagttctcttaaaagtttgacaatccgtaggaataaagcgcaaacgaagttggaaatatatatatgcatcatcagaagagtcttcatctattagatcaatgtaaaataagattttctttctaccatctcagactgttttcaatacggccttccaactactactgtcttgaacatctatagaaacgatactctagtgaccaaatatcttcacatgcaacaaattcttaagaaaaaaaaaaaagaggatgatgagctataagagaaattttgcatcacactgttaagatttaatgcttattacgtacgttcaatggcagcgacgggacgtctttcattgacataaacgaccattcgatgcaaacactaaatgccaacataaccatatacttact

SEQ ID NO: 155344 - DNA, 117 bp, Arabidopsis thaliana landsberg
tgaataatcatcaatctattaaacaatgatttaatacataaattgcaacaaaaagagtttaaattgataagaaactttagtcctctctaacgaaccatacaaacattatatgaatat

SEQ ID NO: 155345 - DNA, 139 bp, Arabidopsis thaliana landsberg
acctttttgtctaattcaacaagataagcctctcttctacttttgtgaaattttccgtaatcaaatcagtaatcaaatttccccatcaatcgataattttctctcgccgcgttttctatttttctcgctcttccctttt

SEQ ID NO: 155346 - DNA, 352 bp, Arabidopsis thaliana landsberg
tttatcttcttaccatttattttccaagaaaataaaaaacagaaaaaattcgtggaaacgccattaacgagatctagcacaaactcgtagtgtggtgtagaagaagacaaaagcaaggagcttcatattaaaaccctagagatatttgtttctccaatttcaaaagacgagacgtgaagaagacgatcgaggatgaacattttcagattagctggtgatatgactcacctagccagtgttcttgtcttgcttctcaagatccacaccatcaaatcctgcgctggtatgtacatttcctcaattcgtttctgaaatttagctgaaatgcgattagattagcctaattctcgat

SEQ ID NO: 155347 - DNA, 319 bp, Arabidopsis thaliana landsberg
aaacaaaataatgctatagaaataagatgcaataacaaaattgaaaagaccacagctttgtatcattccaagtttttgttatcacaaaccctttgattcagaacgagggttctaatatttatctgccttaattctcttacattggttcactccgaaaggaacatgatcgctaaggttcttggtctcatctccgttgtaacacagattagggttcccccaaacaccaagtctccttcccattctctcataaaagtacctagagaattccaactctccgttgatgttatttccattcacgtaaagcgcgctgagactaggc

SEQ ID NO: 155348 - DNA, 100 bp, Arabidopsis thaliana landsberg
ccccaccataaataacaatgtacttcccgtaagaaaccgccggaaacacgcttctcgccgccggtacatccccagtagtctccacagccttccactgttc

SEQ ID NO: 155349 - DNA, 99 bp, Arabidopsis thaliana landsberg
cgcagacagcgcatcttatggaccagcagaaacgtttgtctgttcgtgacctcgctcataattttgagattggtttggctgcagctgctaagctatctg

SEQ ID NO: 155350 - DNA, 778 bp, Arabidopsis thaliana landsberg
  unsure (1)..(778): unsure at all n locations
ctagagagtggcgtttgatttgagataacggtcttctccaaaattgcttgaggaagcggttttgctgcgtctctctgggtttggactctgagcggggatagacttgaatttgaaaaccctatagaggatgcgaggtcgaggttcaaataatgccctcaatcaaacaatatactggatgcttcttgggattatgtgagtgcctactcttctattcttttatctnnnnnnnnnnnnnnnnnggtgctcagagatagtgacgaattgttgcttgcttgtgtaaatgtgtagtatctgagattgtatgatgtggagagctcttcgctaagtcttgaattaaactctcaagctgctcttcttgattgttgtttcgagaatgaatcaacttcatttacctctggttctgatggattcatccgaaggtttgcaattttcgcttttctattgtatgaagatagcaaatttaccttttcaatgaaaaagatctgatcttgtatagaatgataacaccttgcttgttaggtatgatttaaacgctggaacagttgatacaattggaaggcatgatgacatttcaacatccattgtctactcttatgaaaaaggtcagctttttacatttttaagtaagtggtgatgactgtttttacataagttgatttggtatcaggttttgagttttgaatctaagactttggtaacgttatgtatactgtcttatactaaactctaagtggtttgatgcggctcaggtgaagttatctcgactgggtttgatgag

SEQ ID NO: 155351 - DNA, 433 bp, Arabidopsis thaliana landsberg
ttccatttgtttataattttgagctttttgtcttttatacttggtgagatcaatatcgtcgggtcaagtgacgtcatggcgtctatatgtctacatcacatatcttgacgtggcgcttttgttgatgccctgatggctaattagccgacggcggcttccactttttttttttacttatcctcatattttccatcacgcgattgttcagcgcgtgcaacacacgcccgggactcagaaaaaattaaaacagtcattatttatccgatttgactacaaccatcgaaatgttcaaatggtatagatatctctatgttgtcaattatttaaatactggttaaggggttattctagtagatatactataataacaaaaatatgactatcatcagtttagtcttgtttataaaagttaatactaaaaactccacattgt

SEQ ID NO: 155352 - DNA, 201 bp, Arabidopsis thaliana landsberg
ttcgaaaattctggattcgtttgaggaagaaatagaagctacgatcatgaaaaaaattgaagacgaaatcagaaacgctatagaagaagaggagaaacttgctgagatggaagaattagcggttgtggcggtggctgagacggaggaggtagaagaaagcaaagaggttgttcctgattgtatacctcaaaatgaggaaag

SEQ ID NO: 155353 - DNA, 898 bp, Arabidopsis thaliana landsberg
tttgaacccaaatcagtacatcatactgatgtccttttgtgatcagctcgttgttaatgctctgcattaacgttgtcttcccaaccccaccaggtccataaacaccaatgattcctctttcttcttcttcactgagaaattccaaaacctgttccatcatcgtggtatttccgacaacgtacttgatgggtatctctctacaagttacttgaattgacccgccatctgttttgatagcttcagagcgttctctcagctcaccaatgctcttcaatatggcagaaaccttcttgcacagtttgtagtcggcacaaccgaaacaactgaggtatctcctcctcattcgcgtcctctgttcccgacgcctaaacctcactaaaagtagggctgttttagtctccgttacttgcaccgcactaagccactctctggcacgatttgagcagcttcgtccctctagaccgtcttgttggatccgtaaagtcaggtcatcacgtatggccttcaagtcaccgatggctgtttcaagatcagtgatggcttgtctaagatcagtcttatgtcctcttctctccgccatattcatagattcacacaacacctgagcacagccaacgataagagatgagatgaaatccatttcgatgatttctcgctctttcttttacttgactgagctaactaactaataaagatgaggtgttgactcataaagattaaagtaaagtcaactttaataaagctgtcttgcttgcttgtatgacttggttcaagaaacgagtagagagagataggaatcttcctcgaagtctcgaactgttgtttgcatgcttgtaatttctactggccaagtgaaggcccgataacaaaattggccctctaagagccttttaatgcc

SEQ ID NO: 155354 - DNA, 83 bp, Arabidopsis thaliana landsberg
gcttcctcggagaacagaacttacgccaccgccaatgaagagtagaaacgccgccgttttcgctggatctgtgattagaggaa

SEQ ID NO: 155355 - DNA, 194 bp, Arabidopsis thaliana landsberg
ggcctatacattcgagaatctacagccatctagtactggctttatgtaagtttaatgtctaaaagtatggtctatgtgagagaggcacacatgtattttgtatatatatgcgtgtagagtagtagctgatatatgatgtatgggaaacttagagaattacgtttacaatatttggtgccctattgaataccttc

SEQ ID NO: 155356 - DNA, 513 bp, Arabidopsis thaliana landsberg
tcctaagctctccatggatttgacctaattggctagagccatgtaagatacctcattggtgtatattgacatctgcttcttctttcaatgatatgattcgttcccccaaagaatatggtaacgttcatctactcactctacaatggtgtttttgtgagaataagtttgagatttttttacaattcttttttggttttttgccggatttgatgagattgatagaggaatgttgcggggcggggctactcgatttaggtccgctttgcaacatatatacatcacttctttgccagtatgtgtcttcttttatgtattgggactcataccatccaacgaaaagaggcttataaaatcttaagccaaaagtttgtagagaatgacatgggccctttctatgacaattaaatgtaaaatttaagatgacacatttgagatgaaatttggctaaataaaagctgtatctcatttggattagtgtcttcaaaaacatgtttattgtattatacatataaa

SEQ ID NO: 155357 - DNA, 281 bp, Arabidopsis thaliana landsberg
gtggacgagacaaatctacaaaagaatataaaaaacagaacgcagctattataggtgagacataaatttgatgagaactagcttagggttcttcagctccttcttcttcatcttcttgtatcatgttcacaagcatatcaacttgctctttcaacattgtgttctctctttcaatctctgttctcttgcttctctcttgtagcagctgaagctgtagatgctctaagcaccgtgaatcctcccctagctgctcgtttaacccatctatatctcgaacctgt

SEQ ID NO: 155358 - DNA, 226 bp, Arabidopsis thaliana landsberg
  unsure (1)..(226): unsure at all n locations
catgtttttttgttctctcccaattttatttgaatttgacatttgatttgatttctcgacgtagtgatttacatccgtacggcgtctcggtgaatcgaatttcatcatcgcngacatcctaaaagagtgtctatctattgattcactttcttccaaaattcntgtcccctcgaaattgattgacgagaaagagattggtatttgatctgatatctcagattccagg

SEQ ID NO: 155359 - DNA, 133 bp, Arabidopsis thaliana landsberg
ggaagttgtgtgagagaaagaaaaaacccagagagaagagagagagacccacaacacaaacacaaagtagacgaagaagacgacgacgaaacagctctcttcttctctcctctctctcaggtccgtcttcttc

SEQ ID NO: 155360 - DNA, 817 bp, Arabidopsis thaliana landsberg
aaaaaaccatatccgctcatcgagaaagtcggaatttttccgagaaaattcaaaagggcgaaaaaaagagcttttgcgtacagttttcgaattggtctccttcgtacgggtaaaatcagctcaaaaacctgacctttatttttctggttcttcacatttcccgatctgattttagagtcatagcttttctaaagttctcaatttgaactcatactgtttctgggttcttctttcgatgtctctggtgattttaacttttgtgctatttttaattcgatgctgaactgattagggttgatactgtttctggtcattattcactacgcagataaagacgacgactttgattttttttgtttggatttagggttttgtgatttctaatctctccttgtttattaaatctctcagtagattgattgtcaaattgaagattgatgaaactctgatatgatcgtaatcgtcgactgttttctttgattttagctcttcataattgggtttaaatggcaagagggttttaatagttttgacttacattgattgttaaacttaaattgatgattgatgaaactgaggtttggtcgtaatcgtcgattgttttctttgattttagctcttcatagtttggtttaagtgacaataaaggttttagcttcagagtgtggaatgtgttattgatgaaagttggaacatttttactggcttttacaggcaagctatggttcaagagaactatgaatgaaactgtggtgtaagagaatatcaatggttgttatctgctataatgttttttggaccaagtgagtttgatgct

SEQ ID NO: 155361 - DNA, 84 bp, Arabidopsis thaliana landsberg
  unsure (1)..(84): unsure at all n locations
ctcttggttaggttcttagcactgaaatttgatcagaagtaagcttgtgggttatgatcttattactttgngggtattgatttt

SEQ ID NO: 155362 - DNA, 547 bp, Arabidopsis thaliana landsberg
ccagtactactcgtgatgtatctagtgcagtacatgccttcccttggcttctggctcatggacaaggtactttgctcatccattaattttcttcaaaagttaccggtatgagatgtcgttttgtttccattataatgtgacaaacacatctgacaaagagaaaacaggggcagttattactctgttgaaagcagtcttttgattaaaatgaacggcttgcaggttggaggaaagcgtgtggaggtcgcggaaaagaaaggcaacacatactcgtgggatttactgttcgggaagaagactaaaacaaactgaagctgattctctagaagatacacatagatgtggttggttgagccttagtccgtagatgtggttggtgtttgtttgctagtttgattgttaaataactaccaaagcgtcgaaaaatgttttgttgccttgtgaggtgctcaataagtaagaaaagatgtgatcttctgtgatttagctactcgtacacacaaataaacacaaatttaacatcatccgagtgtagagaaatcaaaac

SEQ ID NO: 155363 - DNA, 116 bp, Arabidopsis thaliana landsberg
aaagttttgaaattttgagtcttgatcattggactaattcagctacatgagtagtatcttttttttttgttatattagaagtcgtctatgattgatctaaaacgataaaagattag

SEQ ID NO: 155364 - DNA, 306 bp, Arabidopsis thaliana landsberg
caaagctcttcaggtcatcgaaacagagctcgaagtctccagtcaccgttcttcggccagtgatgtcaacccttgcggtcgccgaggggttttctgctagaggcggcgctctgccaccaccggagaatacgttctccgtgtcccgaggctcgtctaccgatccaggagcttgacggggtctatctctccggtcatcggaatgttgtcgcagctcaaggaacttactttgtctaataaccagttggtcaacactgttccggtggatatcttaagctgtaagcaacttgaagttcttgatcctgggac

SEQ ID NO: 155365 - DNA, 463 bp, Arabidopsis thaliana landsberg
ccctgctttgtgttggtttaaccttgagaaccgtaacccttttgttgattggaatgatttcaaagctagggttttacagaggtttggtgatcctagatctgcaatggaacgtttgctcactctcaaacaggttgattctgttatatcatatcttggtgaatttgaggatctctcgacgcagtgtttggatgaccttgatactgtacttgaggttgtattcgtcaaagggcttaaggaggagattcaggaaatgcttcgtgtgtttcaaccaaagggtttgagtgatatcatcatgatggctcgtagattggagaatagtcctttttgccgtctgatcaaaaattcacaagtttgaagatttgtcttcccggagaaataccctttttggttcttgatgcttgtctttcaagattgtttctttgacctcccttgtctaaaacataaaactgttttagatttcttc

SEQ ID NO: 155366 - DNA, 78 bp, Arabidopsis thaliana landsberg
ttctttaaccttatagggattaagccttctccgttagatttagctttgatgtttaaaaatctgttcaaagttgtaacc

SEQ ID NO: 155367 - DNA, 232 bp, Arabidopsis thaliana landsberg
tacccctttgatcgagaattgagctggccggagagaggaggcaaagacctaaactgattccttttcgatcagatgaaacaaattaaccgacgagagagagagtaccgagagaaggctttaaattttcaacttttaatataaatatagaaactcattaattgtgcaatttcccaggaaagtgaaaaacttcaaaaggattactatttgttttctcgtcggtgataaaaagaaa

SEQ ID NO: 155368 - DNA, 321 bp, Arabidopsis thaliana landsberg
  unsure (1)..(321): unsure at all n locations
cttttctgtgatgattttcaagattctcgaaactcttttgatggcttcttcctttttgttttaaaatccgtgtccttatttataacaaatctaccaacttgttcatcactcattcaactactcccttcattacttttttctattacagaactaaagnnnnnnnnnnnnnnnnnnntgtctcatcattcatcaaggcatatttgatcctttttggctttggttttttgtttctacaaatcgctaaagtttttgtttttgttttcttcttttgtgcaattcagtgctacggagtgcaaggattgtatttgtgtgtgaacatcg

SEQ ID NO: 155369 - DNA, 184 bp, Arabidopsis thaliana landsberg
ctatccggttcataaaagccctaattttaaaataagatagagattatgaagactaagagcgtgaaactcttattcttcttcttctccgtctccctccttctcatcgccgtcgtcaccgccgccgaaggccattcacattgtggaccataatgtgaatgctcacacgaagacgaccatgaaaaca

SEQ ID NO: 155370 - DNA, 156 bp, Arabidopsis thaliana landsberg
cgagtgtttgtcagtaacaattaggtaggcgttcttcgcaatagcgacaccgataggaatcgttgtgggaatgggaatagcaaatacatacgataagtcttcaccaacggctctgatcgttcaaggagttttgaacgctgcatccgcaggcatctc

SEQ ID NO: 155371 - DNA, 485 bp, Arabidopsis thaliana landsberg
aattctgtttcttcgtggagtcacacatatatatatatcgcggcttatctgtctaaatccgataattagtcgtagaaatatcgttgtgtagattttacttggcaaagaagtcatcttttgtcctttttctcagtaaatcaggtcaaaaattctcacattgttgaaaactcaggggtcacacttaaacttgtcgaaaccaaacaacaatggaagatgacaaggatatatacacaaaagatggaactcttgacattcacaagaaaccagccaacaagaataaaactggaacctggaaagcttgcagattcattcttggtattgttcaaacctttaatcttttgttgtaataaaaaccaaatcgtttttttttgttctgaatttgatttgattgtatctatgagcaattggcaggaactgagtgctgtgaaagattagcttactatggaatgagtactaatctcatcaactatctcgagaaacaaatg

SEQ ID NO: 155372 - DNA, 435 bp, Arabidopsis thaliana landsberg
gagaaaagttgtcattattcaatcaaaagattaacaggcttagaattccattttaagccttacagaatcaaatacacgaaaccagaaactgaaacaacacacaacaaaagcttgaaggtaaaaatgcaacattgcatcaagttcttattcataaaacaaagaagataaaaggaaagaccgtttttttagcccacactattcattcattaacaggtgatgatgatcgagagtgttccttagatcccaaaagatgtttacttggtttcagagaagaaacaagataatatctttaagaacgataatctggaacaatcccaaagacatcacaatcaaattccttgtcatttcttggtgaacataatccgccaaaatctcttccattccttcatgaatgtgaaagactacagggattttgcgtaagaaagagccattagt

SEQ ID NO: 155373 - DNA, 716 bp, Arabidopsis thaliana landsberg
ctgctgctactacaacaactcgctaatcattaagtttcataactataatggcttcatcatcatcaatatcaaatcacaagattccaaacacactaatgtttttggtgatcgtaaactttttgtacctaattcaaactaattcagctgtcagtatcagttccaattccaactcccacttctcaagattctcgagacatcgaagctcaccatcatcaaaaaccaaacaagggtttcttgcaacggtccaagagagtatgaaccatgctctcttggctcgttctcttgctttcaacctcactctttctcatcgaaccgtacaaacccacacgttcgatcccatccacgactgcctcgagctgctcgacgacacacttgacatgttatctcgcatccctgcggataatgatgaagaagatgtccatacatggctaagcgcagcactcacgaaccaagacacttgtgagcagagccttcaagaaaaatccgagtcatacaaacacggacttgcgatggatttcgtcgcaagaaacctaaccggtttgttgactagctcgcttgacttgttcgtatccgtcaagtcaaaacaccggaaactcttatcgaaacaagagtattttccgacgttcgttccttcgtcggagcaacggaggcttctagaagctccggtggaggagctgaatgttgatgcggtggtggctcctgacggaagtgggaca

SEQ ID NO: 155374 - DNA, 76 bp, Arabidopsis thaliana landsberg
tcttactctctccagagcaacaatggctgcgactgcttcttctcttacaatcgcgtcgtcattctccgaaacacgg

SEQ ID NO: 155375 - DNA, 281 bp, Arabidopsis thaliana landsberg
acgaaatataaagagacggtcctccacctcctgaacagaggaaaccaagacaagaaccagcatcctctgattcctcttaaactataataagataatggagtgtttgcaagttttgatcttttggttagcacttagcttgttgaagtcgtgtgtaaaatcgtctagtaccaaatgatgatactgtatcatcacaccttgaacaatagctattgttatgttaggatgaaattcaacttgaaccatttgtttatttaggtaatgttcggttttggtttggtttg

SEQ ID NO: 155376 - DNA, 585 bp, Arabidopsis thaliana landsberg; identical to SEQ ID NO: 76457
  unsure (1)..(585): unsure at all n locations

SEQ ID NO: 155377 - DNA, 413 bp, Arabidopsis thaliana landsberg
tcagccaatgagaaattgccggagatattgacactaatcgaacatcccggaaactggcaaaccaatctaacaccaggcaaaatgtggagattacctttaccggtgatgtttaggtcacgtgtgagattcaaatcagcgacgagcttacacgtggaatctaaagagccaacacctcctaggtcatctacacatgaaaccgacgaatcatcatcatccggggaaggctccggcgccggagaaggtgacagtggttcgaatctaatcgcagtctcatcccacgaattgattaatttcggatttgcagatacgaggatgacgaacgcgaaatagagacagaatctcaccattggaatcgaaatcgaaatcatctagagatgagaatccatggttacacaaaacaacgaagacattgg

SEQ ID NO: 155378 - DNA, 455 bp, Arabidopsis thaliana landsberg
taaggccataagatgcagtaaaaacatctcaccagcggctaataaacgtgtcaacaacaacaatgaaaaacatcccgaataacttaaaatgctttccagctaaagattctgtgatctgcagttctacaagaaacataaactcagtgagatctaataatgaaaaggcttttggatttcttaaacactaagcagcagcttttgctgtgtggggaagaaaagctccacaaacctcaaacatcttgtaataaaagtaaaaacactaagcagctttggctgtgtgagaagaaaagctccacaagcctagatcttgtagtaaagcaactagatctctaacatcttcattctcttgaagcctctccacatcttcttcaccatggctcttgtactcatgtttaccttctgatctccttctcctctgtatcaccttccttctcttgtcatgatctgccattctt

SEQ ID NO: 155379 - DNA, 493 bp, Arabidopsis thaliana landsberg
aacttacgctgtggtttcttggccaccaccttgagagccagtgctgtagaagataccagctggtttaccggcgagtgcctgagccctccagagtccaccggttgcatccaaaaaggctttgaactgagcagccatcataccaaatcttgttgggaaaccaaagacaaacccatcagcttcagctagctcattcggggttatgattggggattcactctttggtggtgcgctcatcttagagagtgcctcttcgtgaagcgtctctggtacctgtggataacaaattcatcaggttcaatgattcacatggatatctatagcaaagcctaatggtaatgtgtgatttggaatatcttgtgctaagcaaacagaaactaaaatgcaagacacccgaaatctcgagtagcagagtccaaaacagaaacatgccttttcagccaaatcaaatcagtgaagcagagcatgtaatgccatagtaataccaaccaaacca

SEQ ID NO: 155380 - DNA, 266 bp, Arabidopsis thaliana landsberg
ccttttttaaaaattttttttatgaattgggggttttgtgtttttaaatttgatctctgaattatacgaagtaacccaaagcccaaaagcatttaagcatggggactccttttccctttaattaacataatctgtttcatccgattactattataaatcacaatttacttctttaataactacaacaactcttgtctctccatctgtcagttttaaattctccttctttctcttaactaattatgtttacgtctttacgattaatt

SEQ ID NO: 155381 - DNA, 282 bp, Arabidopsis thaliana landsberg
agtgtgttccttcaggcacttatgggaataagcatgaatgtgcttgctatcgtgacaagctcagtagcaaaggcactcctaaatgtccttgattctatttctttccacccaaaaatttaaataaatgaataagagagatccagtaaactaatataaaactataaatggatcttttgtttatgatttttttttttttcatttctatttttacgaatttgtcttggtctttttgaagtaagtttttaaatattgaaaagtgctaaaattatgtggaaatcgata

SEQ ID NO: 155382 - DNA, 664 bp, Arabidopsis thaliana landsberg
gaaacctttgccagttcaaccccagctcttctgttcaatcttgagctagatactttgcggtattatcactattgagatctcagttttttgcgtaactcaatctctctcggtttcctcacttgtggtgacaattgaattttagtgcagtgctgacctagggcttcttggctttccccctaaagatctgcactaccggtttctttctcaatttattcccgtcttttatatccgaaccagagagtattcaaaggtactatacaattaggatgatattttcttagcggacctttcttggctgcttacagaaatgaagcagcataatagttgtttgtgttgcttggctaagacagtggcagtggcaccatttgtgttgaactacaacggagcactttttcgacaatatcctggtaaatgctagactattctttacaagactaaaacaatatatatcatagctgtacctatttgtattgtgacttccttgatcactaagcatgatgtgatgcttgtctcagtctctctatcagatttgcataatcattctcaattccagtgtcctgaacatgagagagtgttttctctatccatatctgatatggaaaaaaaatgaagggaaatggcaggtgatgcttaagcaaactgatggttcattggcgtgtgctgc

SEQ ID NO: 155383 - DNA, 526 bp, Arabidopsis thaliana landsberg
caagaacagctcatatttttgccatggtgagagatgaaggagttggagaggtgaaaggagacattgtcaaatacagattaaccaaagcggacgaagagaatctgacaattgggttaaagcaagcactgaggatcctagtagcagcaggagcagcggaggtaggcacatacaggagcgacgggcagagaatgaagtgtgatggaatcaaacagaaagatctagaggcatttttagataccgtaaacgcgccacctggagttgtgtccatgagtaagcattggactcaatcctttacagcgcatcaaataggatgttgccgtatgggtgccacagaaaaggaaggagccattgatggaaaaggagagagctgggaggcagaagatttgtatgtctgtgatgcaagtgttctgcctacagctcttggtgttaatcccatgatcaccggtcagtccactgcttactgcatatccaacagaatagccgagttaatgaagaagaggaagaaagactgagaaaatctcaaaag

SEQ ID NO: 155384 - DNA, 578 bp, Arabidopsis thaliana landsberg
atttgttcgtgaggttaactttgactttagtcaacggtacgaagcctggtgagaatacggttttagcgactttcattgggatgtatttaggccggtcggataagctgttgaccgtgatgaaccgggatttcccggagttgaagctgaagaaaaccgattgtaccgagatgagatggatcgattcggttctgttttgggacgattatccggttggtacaccgacttctgtgctactaaatccgctagtcgcaaaaaagttgttcatgaaacgaaaatcggactacgtgaagcgtctgatttcgagaaccgatctcggtttgatactcaagaaattggtagaggttgagaaagttaaaatgaattggaatccgtatggaggaaggatgggtgagatcccgagttcgaggacaccattcccacatagagcaggcaatttgttcaacattgagtatatcatagactggtcagaagctggagataatgtggagaagaaatatttggcactcgcgaatgaattttatagattcatgaccccgtacgtgtctagtaatccgagggaggcgtttttgaattaccgt

SEQ ID NO: 155385 - DNA, 153 bp, Arabidopsis thaliana landsberg
ccgccatgagaggagctctcttgagaaatgcatctctctgcgctcgcagaatcattctttctcctcgtttaacccatcagatctcccccaatggttccctttcttgctccaatcgccgcttctgcttgttccaagttcaaaattttttttctt

SEQ ID NO: 155386 - DNA, 4579 bp, Arabidopsis thaliana landsberg
  unsure (1)..(4579): unsure at all n locations
ggaattgaactgaatctcacacacattcaccataagtagacctgaaaaacctgcttatcaatttggcgccgttgccaattttttttgcattgttacatgaagatatcagaaacttttaagatcaagttcttttacatttatcaagttactaactcatattttcgcctgcttgtttttgtggtataggtactaatctttgtgcatgcaaactcgatccgaaggttttgcacacctattaccattcaaagacagaattgacaaaatagcttgtgagttatcagaaaccaaagcaaaggcagcctgtgatcagccaaggccagctactatggatcaacagaacaggccagttgatgttcaagacccacctaatgttgatcaaccaagaaacattggtgctggtgatgccccaaagaatcatcaccaaagacaagggataatgcctccaccagttcagaacagcaattttgagatcaagagaggtctcatctcaatgatccaaggaaacaagtttcatggcttacctatggaagaaccccctggaccatcttgaaagttttaataggctctatagccttaccaagatcaatgggtgctacaatgaagactatgatcgctcagtgagaggaactggaggaactgaggacaaacagagcaaagatatcaagactctgaatgaaaagctagacaagctgttgctggctcagtagaagcagatacactacatcactgatgaatagcacttctaaatgcaagaaggggggaatgatcaaactgaagagttgtgctacattcagaaccaaggagggttcaacaaggggtacaacaatcacaagcccaacgcgatcctctcctacagaagcactaatgtagctaacccccaagatcaagtgtatccaccacaacagaatcagtctaagccatttgttcagtacaaccaaggttatgtcccaaagctgctgtttaatggaggctaccaacagcagaatccaccactagggttcactgaacaaccataacaagccccagcagctcaagatcctgaaattaagcaactcattcaacaaatcattcaaggacaagctactagcgctatggcttttgacaagaagatagctgaattacacaacaagatcgattgttcttacaacgatctaaatgtcaagttcgaagctttgtattccaaaatcaagtatgtggagagtcaatttgcatcaacatctgctccgaagcatcctcagcaacttcctgggaaagcagtccagaatcctaaggattatgctactgcaaatgctatcacaatccaccaagaagatgagtctccatcaagtcattagactctcaatactgaggacattatgattcaagaaggggggattcaactcaaattgctgcacctgccacccaacaattcatccggactatagagcacacacctttgctgaatactcaccattctggaaaaagttcaaaattgaaaaactcaagaaggaccagaatcaagagatgattagcagtgcctccacccaagaaacatacaagaagaaagtcatccaagaaaagcttgatgatcccggttcattcactctgccatgctctctaggaccattgacattcaatacgtgcctttgtgattgggtgcatctgttaatcttatgcctctctctactgccaaaaggctagggatcatggaatacaagttctgcaacttagctttactcttagttgatgattctgttgcacatccacatggtctaatagaaaatctgcctgtcaagattggaaatgttaagatacctacagattttgtggtattggacgtaaatgaagaaggcaaggatcccctgatcctaggcagaccattcttagcttcagctggagcaatcatagatgtcaggaatggaaaaattaatctgaaccttgaaaaaggcatcaagatgaagtttgacatcagaaaagcttcagggaaatcaacaacaggaggttagaattttgggattcaggacatggatgttgatgaagaaacagaagctggaacctcaccaagagttaactatacttctcaactcagcaagctgaagagaacttttgaccacaagaagagagcaatataagggttagctcagactgaagatcctacagaagatgactggtatgagatgagaaaaaaatttaaatggcaaagcagagtcatagagggattatcttcaagggtgatgaagctgaaagatcaactatggatgtttgacaaaatagtcaataaattttcaatgagtattaatccagagaagatggaaactgcattagctatcaaagaggacgaagatttcacaacagaatggtttgcaccagaagatcagaaaggagttcacttagaggaaagaaacttggagagccagttgttgagtgaggagtgcctaaacaacccaccaacccctctgctgaagaagaacacttgattcatgattttgttgctgaagaactcctagagctctggattggatataaagctcaggaggatacaattggaaagttaactcacaagatgaaagagttaaacagcaccattctggaacttcaagaaatggttaaaggctacccaatttttaaattgaggattggtcaaaggagcctggttcagaagaagaagactactctgctgatcagaaaaaagcttattttgaagaaaaatcaaatgagtactcatcctaccatatgtcaagagaggatgcagaatatgattcaaaaactgaaaattcaaccagtgaagatgaggacttctctgttcctctcttcaaccttttttctgactaagctctgtaagagtcaagcttagtgacttaaaacaagctcacttgggaggaagtcccatgactatccatgtatataatttgattctatttgtgtgtttttgtgtgcttttggtttgattaagtttcaaggaagtatttggaaaatttcatatcaagacgtacaagcaaaaccatttctgggcaagtgaatcgaccgcatgatcgattggacggtcgactcattcatgtccgcaaatccgtcaaatttataatcgagcactcaatagagcagtcaatagacgagttagtcgattggacggtcgactcatacatgtccgcaaatccgtcagatttctaatctagcactcaatagagcaatcaatagacgagttggtcgattggacggtctactgattcatgtccgcaaatccgtacattnnnnnnnnnnnnnnnnnnttgatcgattggttttcaaagcataggtaagtcatttcttgacttcgtcggttcactagaaatcatgcggtttagtcccttaacctaccaaaaccgaaaaaaaaaaaaatcccttcgtctttcttctctcgcgattctcttcttcccactttctctcttctttcatacacacttgcatgttcttagtgattcaaagctcttgctcccctgtttttctccatagaacccgaatttagtatctccattctcagatcgacaaggtaaaatcttctgctctcaacttttcagatttctgtaaggtccgcaaaatcctgaagtttcatatctaagtcgatctagtgcttaatttgcatggtttgtgcttgttcagactttctacactttggataaagattttcggtgcttattttgcatgttttagtttgagaatttgatttttgatgatttagggttcatgtgtgaaaaaagtgacgaaaattcctaaatttgttgaaatttgagatttttaatctttttgtcttgcttacttgttgctttaaacattggtttacttaatggtttggacccaattcatcatatcttgcgaaattttctataaactgagactcttgaatgcttttgaggatgttaatgtgagtttgaatttaattgttgtttggagtagacattgcatgtgttaacttcattgtgccttattaaaaagatgttagtaacaatttgagacttgttctttataatttactatgatttttctcttgttacttgcttggttttgagtttcttataggcacaatggtagaaggcataaagagaacaaaccccaaacgttctaagacaatgacctcaactgaatcgcaaagtgaacccgttgctcattggactaaggaagataagaaagctctcaaagtcatctctccacttccttcatttccaacgcgttttgcaaatcgcgagatcttagagaagatgggtttgcacgagactattgacgagttgttcacaaagatgggacttggcgccttcacctccatggatcaccctacattcagtgagcctacagttgatttctttagcaccatggagtacacatttaagaacccaaagataccactagctaaaaaaggaatcatcaacttcaaggtcaaaacaaaggctttctccatatcaattcccgacctttgtgaagcctatggatttgagaacaaaagcgagatgagcttcccgaagtataatggaatccacttcctttggggcgagatagcaggcgggaaattcagttgtaacgcaagtatcaagagcgtccgccattcggtaattcgttacgccttgaagct

SEQ ID NO: 155387 - DNA, 115 bp, Arabidopsis thaliana landsberg
ggaccagaagtagccatagctaatttctcggacctgaggctggaacttgcttctgaagtgttctcatcagaggttgcctcctcctcctccttgtggtctccattttccttcttgg

SEQ ID NO: 155388 - DNA, 818 bp, Arabidopsis thaliana landsberg
gaacttcaattgatcatacaagtaacattggatggaaagcgtaagaagagttttagagtttttgttttctgtgtcttttgttttcgtatagtagaaggaactctgatttttgttgttttgatttggtttcttttagatcacaaagagcaaaaccggtgattatagatcctggactgtatttgaacaagaaatatgatgttttttgggttacgcaaagacgaagcatcccaacagcattcaagcttttcacaggtgcttgatccctctaaatcctataatcatctctgtgaaagtccttagacttgattgcttctctttatgttgtgtagctctttagtttggaggaatatttgctatgatttgattcatatatagttggatgaaacactgaatcatcatacttagactgctaggcaaatcataataatctctgagcaattcacagacttgatttgattgattgtctttatgttgcttagctgtttagttcggtcggtgttttttcagacttgctccatttctcattggttaaacaacttggaatcattatgcttagattgcttggcaaaactttcatcatcatatttagaacatttgataagatctgcgataatactaagaagttggtgttatgtgtagttacctttgattgttgggaagacttttcttcagagtctgttagccatttgatatgttacattgttttgttctgagattgtctctaactaacatgcgattcttggtaacaggctctgcttggatggcattatcacggccattcatcgactactgtatttggcggtgggataatctacctc

SEQ ID NO: 155389 - DNA, 402 bp, Arabidopsis thaliana landsberg
agcacctgccaattacatagcacaaaaagttataaaacagaagatgattacgatacaaaattatagtacctatataaaagaaataagaccaaccaaccaatccacgcctctcaaaaaccggttctaaccggccaatccagccggtttagattaccggactcggaagtttccgtgctttcgtagtataccatttttgtcatagctaacattctcaccctatattgttttagttatttacattttcctccccatttgttttactcacatcacagaacacccatttggattctcatcactaaacaactcaggcgcacgcatgtgaccataaggatctgcgtaaccttgttggttcatatatggtggtggtggtgcttcttgtccatacccttgaccgtaaccttg

SEQ ID NO: 155390 - DNA, 76 bp, Arabidopsis thaliana landsberg
tctctagagacgctggaatgatgatggagaataagcggaatgtctgctctctcggagaaagcagtatcaaacgcca

SEQ ID NO: 155391 - DNA, 670 bp, Arabidopsis thaliana landsberg
tctacagattcagccacataaaagctcagattcttcagtaatctgctcaggttgtgaatcagccatctctgaatctgaaaccgcgtatatctgttcaacatgtgacttcaatcttcatgagcaatgtggtaacgcagtgcgtgggatgcaacatccttctcacgctggtctccaccacttgactctagtcccttacacaacttacagcgctggtaccttcctctgcagagcctgtggctgcactggaggtaaagggttctcttactgttgtcctttgtgtgactttgaccttcatgttcaatgcgctcacctgcctcaggtcttggttcatgagtctcatcctatgcatagtcttcttcttgtctacaacagtactcctcctatgtcttttactcagtttggtttcgggaatcagcttgtttgcaatctttgtaatatgactatggatggtaggttttggtcttacaactgttatgcttgtaactatcatattcatgcttcatgtgctgtgaataagcccaatccagtggctgcttctgctgagaactgtggggcgagtgatgaaggaaagacaccgactgctgaatctgttcctgttcagggtttggagactgagcagacggaacaagtagctgcaataacagagcaagtggaagatccagttttgagg

SEQ ID NO: 155392 - DNA, 133 bp, Arabidopsis thaliana landsberg
ccgttctctacagctctagagaatcccccgactcaaaagcttcgaatcaagcgtcggagtcagtcgcaaagccttccgtctcggaaaattcgtacaagacatcaacgcattaagatcctcacgatgggattca

SEQ ID NO: 155393 - DNA, 122 bp, Arabidopsis thaliana landsberg
aaaagaaaaggcgatgcattaccaacttttttaatattgatcctcaccatcgaaacctcattatgcgtctcgccggagctcgccggaatatactttttgactcccagtcgaaggtccggtac

SEQ ID NO: 155394 - DNA, 1669 bp, Arabidopsis thaliana landsberg
gaaggcggaggagacggcgaggagatagccaccagagaggcggcggaagagaccgagggagacgagctccccgaaggagagaacgacttgaggcgcttttgcttccccatgaggaggggagggcctgccgagcccggcgagaggaggagccggcgccgctggagacgccggaggctagaagagaaggaaaccacttttcgccctttagagagagagaaaaagcttgataattaatagtgaatagttgatcgtgagagagagatttcctgatttcgacattatcttcaaagattctcctttatcatttccgaaagtcccataaaagatcctattttaccggaaatgatccttggagaatgaacggtttttacaagtctttgcctcgcgtgttcttcacggctcggtggtcgtttgagaggtggcttcggggcaaacggtatgggcttggtacctatatttacacacagtgtgcacaacttaacccttgctcaattttttcagcacgagataatcgatctccgtcccgataatgcaaaggtctactacgctaacgcttgactctgctaaggttctgcgttcgaatttgattcagcggccaaaagccagatctccattgctgatgctttctgcagaaaaggatggttgtcgtagtaatagtgtgtataacccatacaatgatagggtttacgagacgaagagtgactttgcagggtatcgattcctggtaagctcaggtaagtggtttctggtggtagattctcgaatgaaactctatattatacatgtatttagcgagaagaggatcgatcttccaccactagaatcatttaagggtagccattttaagatttggcgtgaaggagaggagaatgtcaagcatatgctaatggatgatgaggatccattttgtgatgaaattcctcatgctgccgaagatctgagaggtcgtttgtgggttgacgacaagaatggaaactacgttgttgtgtggcagtttgaaatgtacccatttctagggttttgcaggacaggggatgatcattaccgcgagattccaacagagctcgaggttcagagggagttacgaggtttaaacgatatggtactgaaaggttacaatctttacgtctatgccacccgtgagttcattcgacacttagatttgtctggacaagatgaagatggtttcaaggatgtatccgagaaacataggcttccaatgtggatgccaagtatgacaatgaaggaacgtgaaagtaggaaccaattgaagtgtatcccatctaacaaaggcattgctgttacaagagcaggtcaagttttgcttgtctatacgttcgatttaggtacctctgcaagtcataggatgttccgtttgtacaagagggatcctaaagatcttgacccgaaaaccctcgacacctggcttcttgaggtgcattctctaggtgatgaggccctctttcttgatttgggtattactgtgcctgctgaccatacccttggtattgagcctaactccatttatttcacccgtggtgatcgtatccgtcacaaagaatcgtcatgcctcgacatctgtgtcttcaatcttataacaaagaccatcaaacgcttccacggtctctccaacttcaacttctacgatgctcagtggtttcttccttct

SEQ ID NO: 155395 - DNA, 280 bp, Arabidopsis thaliana landsberg
gttcttcctatacctctatactggaaagagcaacaacttcaagctaaggttcaattaaagaaacagccatgaccttccccaaatttggaaatccttcttgctaataagcctagctgtaacataacatacattgaaaaagtcacttagaggagtttccttgtgtgctataggctttggaacagaatcccatatctgccacaatgaagaacaaaacaaaacggtgatcagcttatcaacttggaattagctgaaagtcactcactcctcttttaccttctga

SEQ ID NO: 155396 - DNA, 268 bp, Arabidopsis thaliana landsberg
cctttatcattcatatctctctctttctctctctctctcagctctggagaattgaacagagaaattttctgggtaaatctcacttttttttttgtttgtggctataatcctcttctttacttcatcatttcatcaggttatatagcttcaagcttgcttcttgttgttgctgggaacggggtatcttctttgggtatgttcataattcacagaaaaagatttaacccttcttgccttgaagcaattgcttcatgtgattagaaaatct

SEQ ID NO: 155397 - DNA, 501 bp, Arabidopsis thaliana landsberg; identical to SEQ ID NO: 57079

SEQ ID NO: 155398 - DNA, 219 bp, Arabidopsis thaliana landsberg
aaaaaaggaaaaaaaaaaaaaaaaaaaaaaaaaaaaaaaaaaaaaattaaaaagaagagaaaaaaaaaaaataaaaaaaaaaaaaaaaaagaaaaaaaaaaaaaaaaaaaaataaaaaaaaaagaaaaaaaaaaaaaaaaaaaaaagataagaaaaaaaaagaaaaaaaaaaaaaaaaaaataagaaaaaaaaaaaaaaaacaaaataaaagaaaaaaa

SEQ ID NO: 155399 - DNA, 435 bp, Arabidopsis thaliana landsberg
ggatttccttttaaatgcaatcttccattgttcttttgtacagcacaatgaagctaaagaacaacatcgagggatttcggtgctttgtcctgtacagaaataaattgcatagactactaatcttctttttttctttggggaggaacaatggtctctccgttgagtttagtattgatctgccaaagctcgtttcttacattggctttgtaccacactcagtaagaaatcagtgaatacatgctcatactctggcattttcccgtaccctgcgcaagttcttttgttcttaaaccacatgtttgtgatagtctattgcaaaaaatgtgtggaaatcaaacttgcctgggaaatagttgatgtcgatcacataaaaccgatctcttgtcccgagctctctaattatgtctaaattgaacagccttagaccctgcaaca

SEQ ID NO: 155400 - DNA, 233 bp, Arabidopsis thaliana landsberg
aattcaggttctgactacttttatggatattttttttgttaggcccataaacttaatgccaaggcccatgaaacctgtttgagatgtgcattcgagtacatttctccgagtaaagaaaacaagtagagaacagagttttatgattgattgatcttaagttcttaacattctacatgatatatacacaaagaggctgttgaaatgctctgttttcatcatcatcatcgtattga

SEQ ID NO: 155401 - DNA, 325 bp, Arabidopsis thaliana landsberg
tacttattgccgaggtccaaaaatgttttccgcctaactgaaggctactgttcatgtatttgtgtctcctttctagcctccttgttgcccttctggtcaagcgagctgtggcctaagtgaagtatgcaaagattgttccacggtaactcactcttatgatgtgattgaattagtcccagttgtatttttactccccgcaatgattttgcattaataaaaaatttctggttgtttagtgcttccggcatgcagatttaagtagtgaccgcccttccacaacacaattcaaagagaaacttccttggttcctcaacgcgctcccttc

SEQ ID NO: 155402 - DNA, 443 bp, Arabidopsis thaliana landsberg
agcatggaaatctgattttttttttctttttcttgggatgaatgaaacaggagatcatacaggagcaaataactagagtgctgttggaacggctaattgtgaacaggccacatccatggggacttctaatcacattcattgagctaataaagaacccaagatatagcttctggaaacaagccttcatcagatgtgcgcctgagattgagaagctgtttgaatcggtagccagatcctgtggtggcctgaagcctgtcgacgagggaatggtttcgggaggttgggtctcagacaattctcactagctctttagctttcaacttgtatatatgtatgcgtattttgatattatgttgtaacaattatacatacagtaggagagattttaggagtcttagtttatttatttaacttcaagattcacaaacatgttttctaattac

SEQ ID NO: 155403 - DNA, 361 bp, Arabidopsis thaliana landsberg
gaatgaactccaaacaatcatcaatctttctagtctcaaacttagcgaaacaaagccttcctttcacaacagagcaaccattacgagactcttcgctataatctccatttgcagagaaatacacaagcttgatcagagtccctacgaaaccagaaaaaaaaaaccccaattccggttaattcgagacaaacccagaaccgaaaaattctaaaactgaatgaaacaaagccaagtttggattttaaattacctccgatgtcgagagccaaatgagagatttgagtccgatccatggcgggttttttgttggggttttgcaaaatctctttttcaacgttaatagaaataattcacgatcact

SEQ ID NO: 155404 - DNA, 405 bp, Arabidopsis thaliana landsberg
aacgcagagctctttgcttctgaatattattattttcttaaattcttccgtttttttttaatccaaccacaaggaacaataacgaaatcatcagatcgccagaaaaaaaaaacaattgcgaaatggagaatctgagctgcgagagatctgcgtcaatctccatctagatgttgctacttcttcttctccacagaaccatattttcatcagatctcgcttgattaatcatccccatttggatctgattcaaaactcctagggaagaacatggcaggagcggcctcggctctgtttctgctcgatatcaagggtcgtgttctcgtctggcgtgattatcgtggcgatgtctccgctgctcaagccgagcgattcttcactaagctcatcgagaaagaggtttgttcg

SEQ ID NO: 155405 - DNA, 1322 bp, Arabidopsis thaliana landsberg
gtcgccacgtgtctcttcctctgtccatcactcggaacggtcaggtcactcacgcgtcctcccttccgtctccattcacttccactggcctcgagagagcgtgcgttccacgcagctacttcctttggttcgtcaggctcgaccaccgaccagacatcctcttccatgagctccagctcaaaggtagtttctccgtccacatgatggtcatcggactgctgatggctcccaagaaacctctcgcttcgactaatcggtaagctccgacctttgcccatatctctcttggttacctaagaaaattgtatacccgctttgatttaaatcgtaaattacgtttattcacctagttatcaaaattaatactttttcgttgggtttttcaaaatatatttggaagtgaaggtggggggtgaggatgagcatgtgtgtgtgtgaatatatatacactaaaggtgaataggtattgctttttgtgtgtggttttactcagttatgttcggtaagatcagaagaagatgtcatagtccacgtaaaagaaccatttagataacgacgcactgctattttgtatttctttcagcattttagacgagagctagtaacttcagacttattttttcccattctaaaagtaatttcaatcatatacaatgtgatgtcttacttgccgacgtaccatcatgcattctaacaacatttctacagtagcttcaatatagatttgtgagacacacgatgattaattttgataagtaaggaattttatatcaaatctatattaatccatatagtccgtgaaacttctgatattcttgtcatttaaaaccctcattcacagtattgaagtataactaaaatcatggtaccatttagagatttgtgcacgtcctagtatgtacaatagtcgttaagcttagccaagcatacgtgaaatatatgaatggcaaatgctttgagtttacatgaaaaaaagatttgaaatgagaaactatagtttattcccccgaatttagtttttggtatttttgtatgtatccgaaagagatggtgcagattcgacaaaattacataaacatataattggcttatttcattctctgtagctgaaggtggggtctatatatatctccgcatgggaaagcacacaagatatgtcgcagttcagctgttcgacacgtgttcactcattgcaagcaggtccaactaattttgtctattaacgttgacacgtggtctaatctgaacccatcaataggcagattgagaccggactcgacgagggtgttgttggattggagagtgaatggctaacgatggag

SEQ ID NO: 155406 - DNA, 537 bp, Arabidopsis thaliana landsberg
cttttttttttgcatgtctgctcaataatatgatattatgtattaatatcgataggttccaaaaggacaaacatcttcccggtgttgaaaatcacaatgaaggatataactatatttctacacttctaaagcagttcaacacttgatttactacccaaaaaattaccccctcaactagaaaattcgtaaaccaaacaatttccgttacctattaccccaaatttccacagataactgtcataataacatcattaaacctgaagcagaaccctccaaccgaaccgccaacttcaaaatcaagaaagaatagaggtgtcatcacctgacatgagagtgagggagagacagatgcgtgcgtctttgagaaaaatgcatcaacgtcatgatgctttgtcattatgagaatttaggcatgaataatccatatcagtcgacatctccgctgtttgtgtctctgtttcacttctcactcttcggtagaaaagaacatatgcagctgagtttctgatttcagattcatttacagatgacacatga

SEQ ID NO: 155407 - DNA, 628 bp, Arabidopsis thaliana landsberg
aaaagagttcttaagttatctaatcatgaccctgggtccttttagagtctaactacttattttaacttttgtatttgagtagttggtttggtttatacgtctaatgaacgtttacgttgccttaatctctctgccacaccaaaccctagtcattgcaaagaacaagagaggagcttaatctctctgccacaccaaaccctagtcattgcaaagaacaagagaggagcttattattcaattactatagcccaacgtagggaatcagtgaaaggattttagcttagtatggagtaaaaaatataacagattcatcatatgtatagtttgatatgtgagttgctgaatcttggttttcaggttgtgttcccgagcttcggggaacgttacctctcgacccagcttttccagtcgattcgagaagagtgcgagcaaatgcagcccgagctttgattttcttctgtaatttcgtgaccaacaaggaacctcttctttgatttattgctgattgtttttcttctaatagacgtttctgcagaaatctctacgtctactgtgtatatttacaattcgcaacgcaatttggtgtttgttattaataaaggcataagaggttttggtcaaacgaaga

SEQ ID NO: 155408 - DNA, 275 bp, Arabidopsis thaliana landsberg
gaactcaagatgatctccgatggctttacattcaagatacctattattcccctcaggagaagtcgcttccgtggcaccattgtcatagatatctggcagctcaggtggtatggcgcagcggatgagagcccaattcaatccttcaaagaaaggatgtcttttgatctctgcagctcctttttctgaccccagacgactctctggatccttcaccagcagccttctgatcaactcctttgcctggaagctcacgagcgggctatcaggaaacttga

SEQ ID NO: 155409 - DNA, 399 bp, Arabidopsis thaliana landsberg
cccatttcccattttctgctaattttctttcactttctcggctgattttcctgggaaaatactctttatctaaacgtcctaaaacactactcaaaaacgaatgtttttttatgttataacttatatttgtgtgactattttgatataactattattgcagatctgtggatcttaacacttctctaatgcttataatgacgagatctaagcatgagaaggaagagataagaagctcatgacaagaatctgaagaaaattaaatttgtttttcacttatcgccgccattgttgttctacactgagcttagacagttgacacctgtaatccaaagtgagttttctcttagcttgttggtgatttttgaggcaaaccctttatttatattttaaaatctctgc

SEQ ID NO: 155410 - DNA, 175 bp, Arabidopsis thaliana landsberg
  unsure (1)..(175): unsure at all n locations
tctttcattccaagtcataacttgtatccatgcgcttcatattcgcatggagttcgctcccagaaatatagctacccctcccccctcaggtcattcccccgagcctcttatccattnttttcggttcncagnnagggagcaagtcaaaatagaaaaactcacattcattgggttt

SEQ ID NO: 155411 - DNA, 135 bp, Arabidopsis thaliana landsberg
tctgcagtgtcctgaaaactgaaactttttgtaaatatagtgcttgaaccggcccgtgtttttgcttctgttattggtttcaggctttcgccagtttataagatatatttgtttgtagtttttacatgtagttag

SEQ ID NO: 155412 - DNA, 138 bp, Arabidopsis thaliana landsberg
atcaagcttttgaagcttctcaacaatggcggctattccttcccacaacaaccttcttaccatcaaccacaaaaactccataaccagttcttcttccctaaataccaatttctcagaaatcaattttcccgccaaatt

SEQ ID NO: 155413 - DNA, 243 bp, Arabidopsis thaliana landsberg
ctgtaccacaaacttatttttaagcaatatattggatatacaaactatttttagtcgagcccaccacatgttcaagcaaatcacatggagtgattccagcaaaacacaaggaatattaaatgaaacaaataagcaagaaactctcaaaactagaagatgaaaacactctgggttctttttttgttgtagtcaaattacaaatcaaacccccataaagattcttttattaataaaaacatcaaa

SEQ ID NO: 155414 - DNA, 106 bp, Arabidopsis thaliana landsberg
aacaaacatcaaaaccccaaaaaaaaaccaaagttctcttcttgaattcgagaaaatgggaatgtcgaaatcgaaaggcaacacacacaacatcttccttctctgc

SEQ ID NO: 155415 - DNA, 99 bp, Arabidopsis thaliana landsberg
  unsure (1)..(99): unsure at all n locations
nggatcatcatgaaaacccaactacattgctagaattcatgttatatattggaaagaggtttacctccttgcttctatggtacaatcctcttcccgcgg

SEQ ID NO: 155416 - DNA, 330 bp, Arabidopsis thaliana landsberg
ttgaattgaaaaataaaattgctcatagaaagtaattaaaaactaaatttacacgaaatccttgaaaagaaaaactcggagatctatcacatgacatgatcttacttgcacgaaactaaaactaaaagcccttaatctgctcctgaataacatacacatagagacacaattagacatatttgtgtaatgcatattatgtatgtacggacggttcgcaacgcaagtcgccgacatcaggggtcgagaggttcaacggcgaggctgggctcattagaaggagaaaaagcccagaaaatgaggagaatcatgaagagtagaggaaggaggagg

SEQ ID NO: 155417 - DNA, 197 bp, Arabidopsis thaliana landsberg
tgcaggtcgactctagaggatccgcatttggagagattatcgtctcagctgatattacaagcggatacacatcttcttctaagggtttagacagatcatcaagaacaaagaagctcaggtcagttcctgtccctgaaggctgcagaaacttctgtccaggacctttctgaaaatggaatcttgtgggtgaataaacc

SEQ ID NO: 155418 - DNA, 163 bp, Arabidopsis thaliana landsberg
gtgactttaaaaatctgtaaaaaagcaattcggaggaaagagagagagagaaggtgattttgaaatttcagataacgcataatttttttattctcgccggagttttctcctcccaccgtctctgcttctcgtcggcgccgtacacagttgttgttctctgccg

SEQ ID NO: 155419 - DNA, 211 bp, Arabidopsis thaliana landsberg
gtataagtagtcatttcactccttggagaaaatacaaagccaaaataactaaaatgaaacaaatttaagtcgtcagaaagaaggaccactcgatctctatgtatcttttctcgccatttctcgaccgaacaagtccataagcgtcaagctcaagcacacacatatcatcttaaaacctggacaagactcatggtacataccagaaagacac

SEQ ID NO: 155420 - DNA, 228 bp, Arabidopsis thaliana landsberg
attctttccttaaccgaaaataaacagagatacacacaataaccagttagttacaaagtgctaaaacttatttagctgagaatcgttattgcatacaccattggtgatggaaaattctttacaaagcaagattgtgaaaatatctcaatcgaagttggtagaccggtgatttggagcaatgtgataagagtctgcacaattaatgtgagattgcatcaacggatttca

SEQ ID NO: 155421 - DNA, 578 bp, Arabidopsis thaliana landsberg
tttgaagtatttctgcataggataagacaaattaaacagaaataaattaataaaaagtactgctttagcttttggagtatcctccttttaatctcaataaaaaaaactgttaaaacagaaaaaaaaatggcacgtcaatttgtcgtttcggtcctattggctttaactattgccaccgcttttgccgccgacgctccctcagcttctcccaaaaaatgtccatcacccactgccgcaccaaccaaggctccgactgccacatccaaggctccttcagctccaaccaaggctccagccgccgcacctaaatcatcttcggcctcttctccaaaagcatcttctccggctgccgaaggacccgtccccgaggatgactactctgcctctagtcccagcgactctgctgaggcacctaccgtctcctccccaccggctcccacccccgacagcacttccgccgctgatggaccaagcgatggacccactgcagagtcacccaagagtggtgccgtgacaactgctaagttctctgttgtcggcacaatcgccgccgtcggcttcttcttcttttctttcta

SEQ ID NO: 155422 - DNA, 93 bp, Arabidopsis thaliana landsberg
agtccatcctcaagaaccctaatcactactcaagcaacataactaagaacataaacccagaaattactaaaatcatatcaaaatgtagatcta

SEQ ID NO: 155423 - DNA, 356 bp, Arabidopsis thaliana landsberg
gaaagagaagaacttgaaactcaccaaaaacattgatcattatacacaatcgtgatggagagttcttcgaattccgaccaaaatgagggaactccgacgagctctgtttcttcgccgtaccggagaacatactcagatatctccggattatctcaccggttcgacgttcagagcttttataaccggccgtcaaacactaacgctgttgtcttgagtggccatgaagaagatgtctccgaagacgccgaggaaccaaaagatgatgtcgtcaacgacgttcacggagatggagacgaagatacagcgcattgattcttcagaaatgcaggtaaagtgttaaagaatgaactttcttc

SEQ ID NO: 155424 - DNA, 336 bp, Arabidopsis thaliana landsberg
gtaacactagattttaacccgcggtgtaccgcggagacaattcattttttaaaattaatatatataaaaatctgtaaattattttatagtttaccattgttactaagtaacgtcctgtcaaacccgtcctgccaaacccgtccacaaaaaaaaaatatttactttattaatattgatcttatttataatatgtttatgaatcatcgtcaaaatattttagtcgttgcgggacgttgaacccacatatttttcgccaattggttaatatatgttcattcttaaaatttcgaatcacaaaatatgacgaatttttttttgagatttttttaaactcta

SEQ ID NO: 155425 - DNA, 423 bp, Arabidopsis thaliana landsberg
gctccaccaaacccatttgctctcctcctcctccttcgtcttcttcttcgtctcctctgcaaacgacgacaacccatcgaagccaaaagcagaatctgcgtctacccacgtttgaagattcgtttcttctttaccaatttagctctcccaccgaagacccaggattctctaaccggatcccggaacaattcgacggagagccacgcgaattggtgttgccgagagtagaagacaacaacaaagggttggcaatttcgtcgaacatgtggtgggcagatctgaaagcggctcttgggcaacgaatcaatattgagggtatcgtttcttcggtctccgttgttgttaaagatcgtcaatttgttcttccgcatgtttctgtgaaagatttaagatacattgattgggaagtgctgaagagaaagg

SEQ ID NO: 155426 - DNA, 61 bp, Arabidopsis thaliana landsberg
ccactacttcctactacccaatccccaaaagcttccttctttctcctcctcgtcacaaacg

SEQ ID NO: 155427 - DNA, 340 bp, Arabidopsis thaliana landsberg
agagccaaactttaaaatgattgctgtaagcattattattgtgtataatctcatgcaatccaaacttaccctacttcttttcagtaaatgaatctcacagatttgacatctcacgtttctgtcaattttataatttttaaaaagtaattactgtcgaccttttgtaatcatagtgatttatcattatgtctctctttttaaaaccttttctggtacaaattataaaaggtcgatcatcattgattgatcaaggggtaaaaacaaatgttcatgatcaataaaaagaaacagaaaaaaggaagacgattgttttcaaccacaaaaattccatttgttttgt

SEQ ID NO: 155428 - DNA, 90 bp, Arabidopsis thaliana landsberg
tttttagtgtatacagtcgacagcaacattaaaagataaagattcttacagatgattaaccattctcagaatacagattgaacactcatc

SEQ ID NO: 155429 - DNA, 274 bp, Arabidopsis thaliana landsberg
gacccggataaagcagaaatacctgaaaaatctgaagaactggccagggtaacatttattttgattttgtttagtgatattgttctcatgtactcacatgggaccagtgtcatactgagacgggatacagaaatatctcaacttcgaggatccaatctacctgatgattcacctggaaatggagggttaatttaccatgtcattcatcgattgcttcctatatctctcgaaaagtttgttggacctgaagaatggaaggagaaactgtctgaaa

SEQ ID NO: 155430 - DNA, 77 bp, Arabidopsis thaliana landsberg
taggcataaaccctgtgagatcacaaagagcaacaactccaatcggtagcaccgaatgtggttcataaccaaagact

SEQ ID NO: 155431 - DNA, 490 bp, Arabidopsis thaliana landsberg; identical to SEQ ID NO: 64889

SEQ ID NO: 155432 - DNA, 282 bp, Arabidopsis thaliana landsberg
aatgcgtagcatatctctttatttgtctaaattaataaactaatgactagaagcattaatgcgctactatgttccgaactaactctgttcccatatagggatcaatacgataaatctgtggttcttcaaacaaggctccaatctgagaactcagctgctctgcagagtccaaatcctttccaaatggtttctcaacaacaatcctagtccatccaccaagatcagctggaaacaatatacatttccaatgaagttattaccaaatattctctatctgataat

SEQ ID NO: 155433 - DNA, 75 bp, Arabidopsis thaliana landsberg
tactcgtttgaaatttgtaatccattacctgtcatcgttgacttgtcaagaagaaacaaatcaactctaaaaaga

SEQ ID NO: 155434 - DNA, 439 bp, Arabidopsis thaliana landsberg
tcaaaacaaaagagaagaggagatacagtgagaagaaccagcaaaacaaaacagttgcaactactcatgaacacgacgtcttaactaatgatggaagaacagaagcccgcgattctgatttcggtgagggaagaagtgggcaaggatgtttccatgagaataaccagcaaacgaaagtgtcgtctactgaaagatgcgagcaggaaatccctaggaccaataaaagagtgtcactcggttctggattaggggaggggcgatatcgggagggaagacatattgaaaagaatcagcataccgaaactgttaaaactgaaactcatgggaaggaagtttctaaggataggaagagaaagcgggaaagaggagtggaaagagatggggatgagttctatttggcggagaatcaagacagacaatgccaagctgatatgagaaa

SEQ ID NO: 155435 - DNA, 188 bp, Arabidopsis thaliana landsberg
cgccagcccacaattctcacaacgtctgattttccttcattttctcttctttgtctgtcttgcttgtctctattggaagatgcttttgtttgacttattgtgaattgttgtaacttgtaatcttttgattgtctttagttttcttgggatgaattcccttctttatttgtgtattttcctatctcttt

SEQ ID NO: 155436 - DNA, 210 bp, Arabidopsis thaliana landsberg
gataactagattataacccgtgctatacaggatcggcattaatattttgtataaattaaattatatactttatttgaattatataaaaaatagtatagtataaaagtgatgccataatatttttcaatgtttttactatttggatataatgctgcattggattgactttgtttaaaaatgttatttttatattaaatacaacatatgtag

SEQ ID NO: 155437 - DNA, 91 bp, Arabidopsis thaliana landsberg
  unsure (1)..(91): unsure at all n locations
tttttgttgtanaactataatctcctaatttaatgatacaggtnttttgtctgttgccaagtatctatcatgcagttactggttangcttc

SEQ ID NO: 155438 - DNA, 175 bp, Arabidopsis thaliana landsberg
ttcgtagcaaacacaaaattttattcaatacaacaaccaaaacaaaacaaaaaccaaaatatcaactcaataaaaaaagacaaacacatgagacagaaaaaaacataaatagaaggaaaaaagtggaaaacaaaacaggcaacggtcaaacaaatagcctgtcaaaatgctgact

SEQ ID NO: 155439 - DNA, 150 bp, Arabidopsis thaliana landsberg
ttgataagagttcatcatctcatttctccctatttttggggttgaacatatgttattctatataatttacagaaagaaaaaagcgcggagatgagatctattcttcatccacccacacgcaaatagcacatcttctatttatcccatata

SEQ ID NO: 155440 - DNA, 135 bp, Arabidopsis thaliana landsberg
  unsure (1)..(135): unsure at all n locations
aaaagttaataaggtttcattatttaaagttaaagcaaaagtataaatagtttagacgttgtcgtatatagaaagcaccnaaacttgaaagctaaaagtaaaagctgagccaaaatgtaaaaagaatgtttaacg

SEQ ID NO: 155441 - DNA, 430 bp, Arabidopsis thaliana landsberg
cccattttgctcaaatcaaattgaaccaaaccgcataaaacagagattgttagtataattaaactctgtacctgttcatgaagtaaagaactttggaaacaaactaaacttaggctgcaaataagataatgagatctttaacttatgtgtccaaggtagttgcagcaatgaccaaacaattggtctcggaagctgttctaatgtaagatagatggtttacaaaatgaggaaaaaagaataaagattaatgacagagatatggggaataaacgagtcagatatgaatgatgagaatcaagcatcatcagaatcgctgtctccggcttcaacttcttgagccacccaataattgttcccatctggaccccagaccttgtacctgtcaagaatatgaacaaatgcatcatctcaagtatctctgtcaaagaag

SEQ ID NO: 155442 - DNA, 218 bp, Arabidopsis thaliana landsberg
cctcctcgacctggaaatcaatctttcgccgccgagttcttctctctgcggcggagaatcaattagcaatctccaggtttttcacttcaaaacctttccttttattatcaaattttgttcctttttagctttaggatttgatatttctagaacccagaagaaactcttgcccataacatctctatatttattggtatagaattagccgaggcaaaaga

SEQ ID NO: 155443 - DNA, 382 bp, Arabidopsis thaliana landsberg
actggaattggtaattgtattttataaaatggaggagcctccttcacggttgcaaacgtcaaaatagtgaaaacctaaacaaacttaagatattgccaaaccttgaatcgtttccagaccaaaacaaaaattctccgatgttcactacgaaaaacagacgacattaatttagctcaaaaaaaaaatacaatacagggtttgttaatgttgcatccctttctattcagcgctcttagacttcttcttcttcttcttggtgctgtgaccatcatcagtctcctcttctcctccagctttactcttctttgtcttcttcttctctgatttctcgttctcctctgcagtctccatcttcctcttctctttcttcttctttttctct

SEQ ID NO: 155444 - DNA, 524 bp, Arabidopsis thaliana landsberg
aggaagacatgattatgactttgcccctcctcacgatttaacatgtgagtaaaattacccaacttagtcatagttgaagaagatttaaggacattctcgaatctagatatctctctttgtatgtgtggcgcagcgctagcagcaaagagaaacagataccagaggcaaaagcacgcgacgccaccggaaagggagagccaacacgcgaaaggaatgcccacgcttccactgaattcgcaatagccgagaaagagaaataggaagagatttgacttggacagagcaaggagatgagatgaggattagaggtttgtcatgtgtaattagtatacgaagcattactcctcaagaagaccacagataacataaaagaagggcaatggatcaaaagagtgtgcaaatattccccaaagaagtaagagagcttccttcattgttatttcatttttttttttgggtctctcttagatatatgatatgttattattaattgataaaacattcttacttacgccctctcccat

SEQ ID NO: 155445 - DNA, 456 bp, Arabidopsis thaliana landsberg
  unsure (1)..(456): unsure at all n locations
cctctcattttgcttaactatagataaaagataggataaaatctcattaggaataagaaaaacacagaacataattaagattataaataaaagccaactaactcaaaattctacagttattgctacaccacataaagggtttnnnnnnnnnnnnnnnnnnnnnntgatcatcccaaacccgacccggaatcacaacgtatccatttgggtcaccacgatggggctccgaaccacgtgtttcccaccatcaaaccacgtgactgacccaaacacagcacctgtttctcccaacacaacattccttgtattaaccgtcactgtaaccgcatagctccgtctcttaacggccgaagtaaacacaagcctcggcggtttcactgtcaccgtcactcctctcggcgactctatcctcgcccgataaaccgtctcagcctgcccgacattcgtcgccgtcct

SEQ ID NO: 155446 - DNA, 153 bp, Arabidopsis thaliana landsberg
tcgccgttctcaccgccgtatcaccttcaccgtcgaaacttcgttttactagcgagtccccgccgtttacgccgccgggccggcgctggtggtcctccttctcctccaggccctgatccgcctccgcctgaggacaccactcagctagaaggt

SEQ ID NO: 155447 - DNA, 686 bp, Arabidopsis thaliana landsberg
tcgcgcaccgtctccaatggcgggtttcagttctctaattcctagatttcttttgaaacgcgccgttagtagcgcaagaggagatctaacggcgccgttagcttctatttcagcagcaagaaatctcttcattggaggaggatgtgacgaaaattatggttagtattgctcatgataaattcgtttgtatacttaaaagtttaatgcggaagaagatagcactctaatgtttggttactgacttggaatctctaagtttcgaatttggagctgatttctgtaaaaatggtcatttaattaagtagacaatttctgtaaaactttgaaaggtctctctttttcttctgataagttgattaaattgcatacaaatgtgaaatgctagattgtgtaacctggttgaggtcttcatatagtcggagtctcttatgatttgaaacttattgtaggtgagccaggagtgttttctcattccaatggaataaggtaaaagctcagattggatcaattagcttcatttctttctgctctccaagtctcgcttttgtactgccaaaaacaagctgcatcttgagtcttggtgtattgatttgaatctgatactttaccattcttctacagaaagtacaacaccgttggtaatgctggcgcactaactggtccatttcataatcatcttggggtaa

SEQ ID NO: 155448 - DNA, 273 bp, Arabidopsis thaliana landsberg
tatgtgatgagtgaccgcagctaggtgaggtgataaagaatggctccctaaaagcaggagaagtccgaaaggttctgtgtcaaactttgagtaaccactgccgacaatcaaggttagcacaatagtctttcttcctatacatttctgcctcaaaactatgataagaaatctgatatggtttttctgaattcagtgaaacagactcagaggatgaggaggacgacgatgcagatgaattataactcaatccagtgaaaagttcacgtcaaatta

SEQ ID NO: 155449 - DNA, 127 bp, Arabidopsis thaliana landsberg
ccccttttggttactagttaaagtagaaaatgcttttttttgagaaaagtgatcaaagtttcttatgaaaatctgaagttcgaggttcttaatatgattatgttgtagtcacaacccaattgaaaca

SEQ ID NO: 155450 - DNA, 359 bp, Arabidopsis thaliana landsberg
aaaaacttcaaatgatctcttcaggtaactttgttcaccagaggaatgctctgttcatcgcagaagaaatctgttggatcaaccctagtcttcactctcaccaatctctcgaaattgttcttgaaatacttcactccccaactctttccttcctcgtactttgtcttcttctttccaagatacatacccaaatccatatccttgaaattgacataagctcctcttggagatttcgaaacatatggagtcataaattcgtaaacgctatcgacccatttcagatatttatctgtctccgtcttgttcttgtcttcctcttctctccagtaagccacatactgaatctcatagagattccc

SEQ ID NO: 155451 - DNA, 117 bp, Arabidopsis thaliana landsberg
gggggggagaaaaaaaaaaacaaagaacaaaaaaaaaaaaaaaaaaaaaaaaggtaaagggagggggggaaaaaaaaaaaaaaaaaaaaataaaaaaaaaaaaaaaaaaaaaaaaaa

SEQ ID NO: 155452 - DNA, 543 bp, Arabidopsis thaliana landsberg
ttttgtatcgcaggtaaagtcttcaagtatgtggggaaagcttggaacaatgcttatctgttttcgtgccatcaagttttcttgctgaagaacaatacatcagagagtgatccagaggagttgatgggagaacgaagcggtgaaactatgtgactatgcattgttgaagctattggagaacgtatttgtgaagccatcaggtaatgcagcggagaaccaatgggagtatgaattggtgaagtgagaggtgatcgtagaggtgaattttgcgtttggtataacgcatgacgcaaacccacaatttcagaaggctccgttgtgctgtagatgtgatcatgttgttcaaaggttagacttaacttctcattctctttctgcaaatgttctaattgttcttccactatctcctcttcagtgtcactatctagttctgccattttacttggaaattcatggccttctgaaaatacgtctgaatctttttcagcatcaccttgtttaaaggtctgccttagactttcttgcttatcttgagacatcttt

SEQ ID NO: 155453 - DNA, 171 bp, Arabidopsis thaliana landsberg
gttaggattttgtttgattctagtcgttatccagatcagagaaatccgtgatccttttttctctctcactttcttctctgaaataggaaaaaaaaaaaccaaatctgataatcgaaactgatcactcactgctgattccgtaacctaaaaaatgtcggcagcttcttctag

SEQ ID NO: 155454 - DNA, 311 bp, Arabidopsis thaliana landsberg
gtgtttgaagaagtctacaatccactgtctgcttgttcccttcccagtggcagagatgtatgtcttccacatcaaccggttatatctaattcaaccatcatgtaaggatctctagattgacggtagctagatggttaactcgaatatacccaaatctagttccattatcagtttgagacatatgtctgcaacttcaacaagacatatcatactcctccatcatcaactaaggatcaaagctagctgggttgattcgagcaacaggaatgcatttaagtggatgagccatggtcagcgtcatttctccagtc

SEQ ID NO: 155455 - DNA, 496 bp, Arabidopsis thaliana landsberg; identical to SEQ ID NO: 70812
  unsure (1)..(496): unsure at all n locations

SEQ ID NO: 155456 - DNA, 348 bp, Arabidopsis thaliana landsberg
taaatttttttgactcaaatgagttgatgggtcaaatgagttattgggtcaattggtttgatgagtcaaatgagttgggttgtaatggttaatggtttcaatggtttactcaattaacccatcaaattttgtaaaattgaattaaacaccctaaaatctctaaaccaatgtcaatttaagcttaaccaacacatctaaaccaatttaataaaatcaatattttttcaaatttcttaaatatacaagcgatgaaattgagaaaaagtagactcgtaatttttccaccaaaaaacataaacccgtgattttctcgccaacaacgtaaacccgtgattttcccgccaaaaa

SEQ ID NO: 155457 - DNA, 220 bp, Arabidopsis thaliana landsberg
gctgcatgcgagagatctccttctactgccccgcattcctctgctaccacgatgtatttctcggacgaattgccttattgcatctcccaccgagccagggaaggggatcgagatgtattcacctgccttctacactgcttgtaccttgggtggaattctcagctgtggtcttactcacatgaccgtgactcctctcgatctcgtcaagtgcaatatgcag

SEQ ID NO: 155458 - DNA, 363 bp, Arabidopsis thaliana landsberg
ttacacgtgattttttttattagattagcgtgatttctcccttctcgatgatagtgatggaacaagtaaaagtcttacattgagaggagaagcgatgatttttataagattctatgataataccatattactatgtcttttgtcatttttcaaggattaacattggccgtagatcacgatcgagatgtactttggcaccaaaattgggatgaggaagtcagcgatagatcatgaattaactagctgatcaggatgaccatagattgcattgttacatagccggctcaaagtctttgaacaaagtcccaatcgacttattttatgttttctccaatcagttagtagagacttttacacaataaa

SEQ ID NO: 155459 - DNA, 290 bp, Arabidopsis thaliana landsberg
ccctccatcttgctaccttcagcatcggcatcatcttcaagtggaggcatgtcagcatcggcttcaacaacatcatcgtcatcaatgctcaatccaagcttcaacatcctgtgaatcctgctcccgaaagtgttgggctcatcgaggctgaaaccagaagtgagaagagcggtctcaaagagaagaagtacaaggtccttcacagacttgtcgttcttgtctgcatcagctctctttctcagctcatccatgatggagttctctgggttaatctccattgtcttcttgct

SEQ ID NO: 155460 - DNA, 383 bp, Arabidopsis thaliana landsberg
  unsure (1)..(383): unsure at all n locations
aatcgaattttatcacatcttgacaaaacaaaagcattctcactaaaatcaaacacgaccaacacacatacatatacaaagagtgaaagagtaatcttaacttggcgtataacaaattatgtatataaatacctccaagggacatttaatttagttcaacaaacaatcaaatcacatatctctaagtttgctgagattaactggagatataactttaacatcaccatataacaattgcttcgcgnnnnnnnnnnnnnnnnnnnnnctcggatgataaggatcccaaaacacatatttatccatctcttcccacaaactcgaagtcggtccgcacggaattatacaagcgtattgtcctccattaccgcaacaagcctttgtcg

SEQ ID NO: 155461 - DNA, 114 bp, Arabidopsis thaliana landsberg
aagcagcccggatccccagctaaggcccctaaatggccgctcagtattaaaggaggtaggggtgcagagacagccaggaggtttgcctagaagcggcctccttgaaagagtgcg

SEQ ID NO: 155462 - DNA, 361 bp, Arabidopsis thaliana landsberg
agatgagttaaagggtcagggttgattaaaaggaacatgcaaatagtcctcctcttcaacaactccaacacatacctcggattcattcagtcgacgccagtaatccctcgccgcatggagactttcatctctagaccccgaaatcatggtccaatccatattctgcggatgctctttctaatcgattttaggttatatttatattcttctttttcaccccctaaattcatttatgggcttctgttgggccttctcaccctaaatcctaatcttatattataaacacctgagattcacaaaattctctaaagattgtttgtttgtttggtttaattattgggatttttttttacaaaacggc

SEQ ID NO: 155463 - DNA, 481 bp, Arabidopsis thaliana landsberg
gagcccaaacaaaaacaaattgtgagagatggcgatggccaaacttcacggcggaggtatggcggcgatgcgtcttcttcttccttccccgatgacgcaccggcgaccatcaacgcttccgagcattgcctctttctctccacggagatacatcgttgcgttggcggccaagagaagccctaagcgtctcaaatactctactcctcgtttcaccaaggagggagaattggtgtacatcgaggtcgatccttgtggtgctgattcctggaaactccaacctgtcattgaccttctcaaacaaggagctgttggtgttattcccactgataccgtgtaaacaagctcttcctctcctctttacttcttcttcttcctcctcttttgcattttttttgaatttctgtttctccgtagatatgccattgcttgtgattgtaaaaaccattccgctgttgagcgtctccgaaggttagctacctac

SEQ ID NO: 155464 - DNA, 186 bp, Arabidopsis thaliana landsberg
tacaaaaactctactccccccccaagcttggttcgacctcctcctcctactactcctgaggataaacttgccctcattgcttgaactctcattatttaataatcatatccactttatctgccctaatgacggttaaataattgcacttgagctttaatgtattctctgtgctatgtgtttttgtat

SEQ ID NO: 155465 - DNA, 311 bp, Arabidopsis thaliana landsberg
ctttgatgattctggggagcagaggtaagaggccagcatccttgggaagctgaatgccttcttcaaagagattttgtatggccttgaagtgtggaaaaggttcttggggactcaatagaacagactcgatctgagggaagatggagggaagagctgccagtacggccttgcctgtgaatgaagtgcccttggctgtagagaactcctcgtctcttggtacatagaactctcccccgtagcgttgctctgaagaggggtcagtctcacaaggttttcgaccggtcttgcaacgccttggatatggatgtgtg

SEQ ID NO: 155466 - DNA, 1287 bp, Arabidopsis thaliana landsberg
  unsure (1)..(1287): unsure at all n locations
tggattttcttttctattgaaccaaaatatttcgatccaaatattggataaaattttggtttcaattaggttaatattttgttttcatttataaaattataaatcataaatcaaaaacttaaatgcccatctctacctaattacaataacaaggggaaatatctaatggccggttatccgacctattgataagctatttttatttaagctttcaatgcttgtttatttgtttgcacaaatgcgtttgtctccgttcgatgggtatatttcacaaaactagtttatctaacaagttacaatggtttctttttaaatgtgattttttttttattttacaatgttttcccatgtaaacttaaacacatagattgaaaactagtgaggtcttatgcaaaatattactcgccgtgcgctttattgtaatcggcctcaaaaataaaacatctttaagtactcagtgctcgcgctttttttgggggngcgctagtgtactcactttgtcaccacccatattcgaactcgcatgttgcgtgttgttgacaaaaaaaaaagaatctaggttgcattgtggtactttagggtaaatatgacttgtgtagaagtgttgaatcatcgatttacccaatccggtcaagattgaagacccatgtctctacaacaaagaaggatgggttgcaagtatactttttctatcaacgaaacatcagggctcaagatgcagaggggacctctctctgcactcgagacccttgtctttccactaaatgcagatcccggtgtaggttgcatctcgttcaattttccgggatagtttgtggttagaggccatatcgttcaattttccggatacttggtggttagtggcaatcatcttccgcgcatatggttctcaatgcatcctatgaatatctagctcttagtttccaaccaattcctcaaatcgtggcatccccaacgtggtgtgatcgtgttgtgatctcgttgaatccgggggatcatacgatcaatcttgtcggttaaaggatataacactacaatgtgatgtgtaagcgacgcagatttcttctcacgttctcaagttcaataaattgaacgtaacgatgcgtgctaatggagaaccttaaaatcgcggaaacaaaactcgttagtgtcttgatatatgttcacctacttttatctactttcctgtaatgtatttatatgtgcgctactttgtatgtgttgttcccgcattataatttgctttgggattttaataaattagggagatttctagaaaatgacaaa

SEQ ID NO: 155467 - DNA, 370 bp, Arabidopsis thaliana landsberg
tgtcctcccaaaatggtgacatgtcattaagtgggagggacatggtgaatatgcatgggttacagagtaaagatatgggtgcaaaacgaacatctaatgttgcttcaatgttctccaaaatggtgcagagcaatcatcaatcctttgatcgctctcttccttcaaacaacgttccaaaggatagcttacatcacgaggaacaaatggttggaagtggggagggcgatacatccaaggtgactgttgaaaatggtgattttgatcctcaagaggtagctcacaaaggggaacaacaatcaccttcaagatctgatggtttagttagaggtgggttaaataacaaggagtcagcgaatcacttgccgcattt

SEQ ID NO: 155468 - DNA, 523 bp, Arabidopsis thaliana landsberg
aatcatttataaaaaaaatctgatatttatttaacatgtaagtctcaataatccaatattttcaaacaacaaattcataattaaaaaataaataaacatacattttttatgagtgaataaacatacattatttcacacaaacgctttgtgaccacatgaaacacatcttgcgtctacatgcgtatcatcgtcttcatgtttctcatggatcgaaacctccttcgagccattatcattttttgatgtgtcatcattattaccatcatcttcaataattatgaccacatgatcatcatgacatttgatcgatcggacactaacaaagcttttggcttttggtttctcggaaaacaaaggatgttcaatcttgttcttaaattttgcagcggttgctagttcatgtagggattccaagattttctctgttaggtttataatatcgatgagcaaggagatcgcggtcagaagggagaccaattctagaggctcaacttcattcaacctgcctgcattaagtaagttg

SEQ ID NO: 155469 - DNA, 602 bp, Arabidopsis thaliana landsberg
tataaacattgaggctatatgaaacactactttccactatcagtcacccccaaaagaaaaccaaaatagagaacgagattcatattatacacacaataaaaccatataatatacatatgattaacaaatacttggaatgaataatttggattgttctgacaaatccatcaaagcctactgcactaactcctccagcaacttcaattctaattcctctcccatggaatccatttccaatctcaaactctcctgtgaaccaatctcagctacttcaatcctcaccactttattcaccgccaaactgctcaagtctccgtcttcatcccgccaccgatcttccactcttccgttacccggtaatccctcttgcattctgtttatcacatgaacccccactggcttaccagagaggatcatggggctactacgaggtccaagatagctcggtgttagctccaagagcagcgtgttgacgaggtcaaacactagattcttcacgtttgatccgagtcttttctgttccgttgagtctgcgtagctgtttctcagagatgggtctagtgggctctctgaggaatgccacctcgcccagagattgtccg

SEQ ID NO: 155470 - DNA, 299 bp, Arabidopsis thaliana landsberg
tgaacgaaatgagtgtgatatattacaaatgcagtagtatatgatacagaagtcttggggttaaaatcaaatacctaaacaatatacaaggtaaccaaaccaacccaacacatttaccaaagagttaatgaagaaagatgaggaacctaaaaaaccattttaaagagtccaaagaatttcactaccctcgtgagcctatttgcatttatcattctgcaactgtcatatatatgtacttttttgcaatggtattcccatgttacctccattcattctctgatgggcttgactgcggacat

SEQ ID NO: 155471 - DNA, 446 bp, Arabidopsis thaliana landsberg
aaatcacagaggaagcgaagtcagtgtagaggtacttcactcttcacgctcatttcactctcagctttgaatctcgttagctgttttgaaggttctttcttttctgattttgagtgttctctgttatttcttcgcttttcattttcatggatttaggttccgatctttgtgttacggtattgaattcactttttggttccttagtagttcatgtatttgcagagtacgagttaaaaaagctttgattgtcgtttttaagattcccttcttcttaagggggaaaaagtatgaaacttgctaatttcttgatagaaaatagggaatgatatcatcattactttgaaattgactatctggtggctgaagtatttgtctttttcatgctagatatctaattgcgatggcttttttgagtaaattcgggaacatattgaagctgaccacac

SEQ ID NO: 155472 - DNA, 389 bp, Arabidopsis thaliana landsberg
tatctgtctctagtatagtggtataataatagatcccaaatattgtcaacaagaaatatttcaatcagcaaaaaacaaatctacattaaaaacaggtcttcacaattaccttgataatctgatccatcaccactaatttttaaagagcctgggtaccccggacgcgcatttagagtattttcattcaccggtccatccgcaccagcagaaaagactcgattatggctgggggctgctgcaagagtattgacatcacctttgtgattagagtgtgcttccaaaagggttccatgctcactatcccaaaactggacagttcctgtaatatctccactcacaagaactgaacacctagagtaagcatgtagagtactcagcaagagaaaaac

SEQ ID NO: 155473 - DNA, 164 bp, Arabidopsis thaliana landsberg
ttggttgtgtactggtttaggcctctacacttcaggacaagagttcgactcgtatttggtaccaagtcgtgccatctctttatctctctctctttcgccttcacaatccaatatccatgtcgatgttgttgtattgaacttaaagagaggtaataaaaattacc

SEQ ID NO: 155474 - DNA, 189 bp, Arabidopsis thaliana landsberg
tgattttgggcaatggaagatatacttggagaagaaaatcaaatcacgaaaatatattgatcagtgccttgaaggaaaccaaagttgacaactccaaaaatccatttcgttattaatatctaactgagtgatcatagtccatcatgcataacaatgtaccatccaaacatgtttgagagccatcatatg

SEQ ID NO: 155475 - DNA, 164 bp, Arabidopsis thaliana landsberg
aaaccaatgcaaataggtttcaacttaagtgatggaaaaactacaaaaaatgtctctgcatcaaaataaaaccatattcaaaaaaaatcccaaattgtggttccttctcaaaactatcaactatctaaaaccattttggtaacattgaagcatcacaacctatt

SEQ ID NO: 155476 - DNA, 216 bp, Arabidopsis thaliana landsberg
taaagagacgcatttaaaagcaaatgaccaacaagcgacttcaccatccatctcttacaaccctccaagaacactggctgttttccttcactttctagacaaaacaaaaaccctcttcttgagaaaaataaccaacctgggagaagacagaacccagggcaccaaactacttaacccctagatatattatctatactaatattatcggcccatggg

SEQ ID NO: 155477 - DNA, 86 bp, Arabidopsis thaliana landsberg
atgatgttacctgttcgtggggagcaacaccaaaaagagaagaatgaaagatgttcgaaagacccaaacgagaaacaccaaataac

SEQ ID NO: 155478 - DNA, 345 bp, Arabidopsis thaliana landsberg
  unsure (1)..(345): unsure at all n locations
ccaaaaccctaaatatacaaagctttttcgaagttnnnnnnnnnnnnnnnnnnntgttcttctactcacacaaatccttcaccctacaatctctgaattcccttcttcttcctccataattcttacaccatcttcttcttctccatctttccattacacgcatcaacagaaatctccaagacccgacagtttcaagatctcacctcttcacgaagatccgcaagattcaagagttatgatcgatttgttctagacttaaactatctttctcccgctttgtgtaatttttgctcttttggccacaagttgtaaaatcacttatgaggatattaatgggaaccttca

SEQ ID NO: 155479 - DNA, 360 bp, Arabidopsis thaliana landsberg
ctctgcttcacgttcgcgacattactctcttttaaggcgcttccttaattttatcatcttctcaaatctcaccctgagtattcccattttcaaatttcgacgcggtttcaatactcaaaactcaaacgctccaaactaattccggtctttactttcgatttagaggtgggtattgaccaaaggttgtagtaatggagtcgatacagagccgagtggaatcgtggatcagagaccagagggcaaggttcttacgggtttcgtggggaccgattcaatggaggttccggtggccaccatggaaaaaaggagatgcggatcaaaggattaagatccgtcgggaataccacaagcgcgaaaagc

SEQ ID NO: 155480 - DNA, 408 bp, Arabidopsis thaliana landsberg
ttcttgagacctcaagaaaaggtccatacgtgtatgaagacatggtgaagatgggaaaagacgcggggcaagaattgctatctcgtgctggtcctggcttcttcggcaactgagccattcgaagaagaggaggaagagatgtgacacggacaaagtctagtgtttaggagtgattcaacatcttgaagtcccgtttcttcctccgaactgttgtaacttttttgattttgagagaaacatgaccttttgtttattgattgttttgttgtatttagattaaattcatcttgcaattgtacccctttttttctgtcccacgatgaaactagtacacaagaaattagagagacaaaataaaatccagagacttcagcttcatttcctccgatcttcttattcatcaagtgg

SEQ ID NO: 155481 - DNA, 483 bp, Arabidopsis thaliana landsberg
  unsure (1)..(483): unsure at all n locations
tggtgctcaatctgggaaagtataacccaagagtaaaaagtagtgttatgcgattatgatccacaaagagcnnnnnnnnnnnnnnnnnnnnnnnnnnnnnnnnnntaatgttgttgttttttagacacttgtagaggacatgattgaagaggatgatgaaccaccatatgtggagccgccaccctatagccctaagcttccatttccaggccgtgagagacagattcaaagtcagaaagagtatgcacgttttgctaagatcatgtaacaactttacgccagactttctttcttacagtttgttctccatgttccaagctatagaagttaccttaaagatatcttatccaacaagaggggcattaaggaaggggttatgttagtttccaaaggagaagagtatgctcagctggaggaatatcagagacaacagaagcaagctcaactcactaatgtagtaaaaatgttagcagggaaatagat

SEQ ID NO: 155482 - DNA, 65 bp, Arabidopsis thaliana landsberg
agttcgcacatggcctatcgaccgtagaaggatatagagggtatgggttggaacaaggaaataag

SEQ ID NO: 155483 - DNA, 180 bp, Arabidopsis thaliana landsberg
gaaactgaatttcaatctatttcaactaataatattgtcttctaggttcggtaaaattaggttatactaggcggtcattatgtagagatgtatacgctttaacatgatttctagctaggttagggaactcgaacggaataattatgctgatacttctcctaagatctttgttttttattt

SEQ ID NO: 155484 - DNA, 244 bp, Arabidopsis thaliana landsberg
  unsure (1)..(244): unsure at all n locations
cgacatggccttgagacacatggtacggtaacaaatgaaatgatattaaaggtcatcaaccatgaatttcaacgactttcaactttggagtacttttgtttatgtgttaataggatgttagaaaaggaagcatggcggtgaatttccgaccttcagtgacgaaagcaccggcgacttcngtgtacagtgtgagatcatgtctaaaccggtcgtgagcancagcgggagctcggaatcaagtgtc

SEQ ID NO: 155485 - DNA, 394 bp, Arabidopsis thaliana landsberg
tcattacctaaaaggcaaaaaatattaattttttaattattattatttatatatttaaaattcataaaacattattaatatttaaatttataaaaagtttaatatatcaaaaaaaaataacatcattatataatatatagagtttaaaacatctcaaaaaaaaattcgtcatattttgtgattcgaaattttaagaatgaacatatattaactaattggcgaaaaatgtgtgggttcaacgtcccgcaacgaataaaatattttgacaatgattcataaacatattataaataaaatcaacattaataaaataaatagaatttttttgtggatggatttggcgggacgggtttggcaggacgtgacggagataacaattgtaaactataaaata

SEQ ID NO: 155486 - DNA, 393 bp, Arabidopsis thaliana landsberg
ttgaaaaaatcggtttggtacctctacgactataaatgattttcccaaggttacaaatatgttttattttttgtaacaaggctacaaagtaccatcaatgatatttgcaaatatatgattccaaaaataagggaagtcagcaaaaaaaaagaattagtgaggcgaaaacagaacccaaacactagctgtctagctcttgagattcacacctccagtgtactgttttgttgtgtccataatttagcgtatctgccagatttctccaacaacacttggtgtgtccctttttccaccactttccctttctccattactattatctcatcacattgcatcgcagtggtcagcctatgtgcaatgaaaatgcatgttctgttactcgctagcgacctg

SEQ ID NO: 155487 - DNA, 274 bp, Arabidopsis thaliana landsberg
agagaacaataacaaccaaaaaaacatataactaaatgattaattttagtcttctcactatcaaaatattactcctgaccaaaacattaaaaccaacaggtaaccaaatcccaaaacccttttattcatcatcgtctaaatgccagtaggagtagatttctccgatagttggctcgtagtttctcctgatggcgcattcttctgagatacaacaggaatcttgactgatgaagctctctccatttccctctcaagctctttctcagacatgaga

SEQ ID NO: 155488 - DNA, 164 bp, Arabidopsis thaliana landsberg
tataataattaataaaaaatttaatatgataatttagatatcaaatctaatttgttgattttaattggttacttttttgggaattaataatgtattttgtttttctaattaaattaaattaattaaaatttagatatcaaatcttatatgttgattttgattgg

SEQ ID NO: 155489 - DNA, 114 bp, Arabidopsis thaliana landsberg; identical to SEQ ID NO: 75586

SEQ ID NO: 155490 - DNA, 361 bp, Arabidopsis thaliana landsberg
gtttacaaactagattttaatccgcgatataccggagacaatttattttcttaaagttactatatataaaagtttgcaaattgtatatatctataaaatatttttattttatagtttacaattgttatctccgtcacgtcctgccaaacccgtcccgccaaatccatccacaaaaaaattctatttattttattaatgttgattttatttataatatgtttatgaatcattgtcaaaatattttattcgttgcgggacgttgaacccacacatttttcgccaattagttaatatatgttcattcttaaaatttcgaatcacaaaatatgacgaatttttttttgagatgttttaaactcta

SEQ ID NO: 155491 - DNA, 188 bp, Arabidopsis thaliana landsberg
taaattaccatcgtccacattaatgcttatgccaaacccgtgaccaatttaacttcatcatagttaccatcattagtcccaataatctcactttttcctcatctcattaaccactttctccaccggcaacgtcaaatcccttttatgcacatccattttaagaccaaacttcatgaacaacgtcaatg

SEQ ID NO: 155492 - DNA, 550 bp, Arabidopsis thaliana landsberg
accgtcatctccgatctcctccctcttcctccctccgccgccgccgcatccgcttcttcatccaccgcggcggattcgtctcttactcctcccggtggttgggcttctctctacaaactcgctgtttgttgtcctggtctcttccacgctggaattctcctcgaaaactccgatttcggtttagaacgtgagctaggtcccgatcaaaacctcgatccgaaacctactacgacggatctagctcttaacgacgaagaagtttcgaaaccagttggatctggtttagaaacgacttcgttttggtctctatatgatgatctctacacagatactattcccgctcctcctcccgaagattcaatcgacgatcaagaagaagaaatcgaaacgagtgagatcagacctggacgagatcttccggtaaggaaacgaaggaagatttgtcgatctctaggatctcatttagcttccggtggctggaaccttagccgtgaacaaggcaacaagcttctcgcgagtagattccgaggtgattgtctctacatttgca

SEQ ID NO: 155493 - DNA, 72 bp, Arabidopsis thaliana landsberg
tttcttaccagccgtggcaccccaaggattaggaagtggatttgcattaggtgtacctgtttcagcattcgg

SEQ ID NO: 155494 - DNA, 231 bp, Arabidopsis thaliana landsberg
tcctccagtttcagctctaggatggtcagaagaatatatttgctcttctgattctaaagaggtatatttgatatcagaaagtatccttttgtagtctagtcttgtctcgactttataatctcatctcaaccacttttcttcttctgccaaagataaatgcaaggttggcagctgctgaggaggccatgggtctctcaatgtggacaacggcaacagtttgtcgtattctct

SEQ ID NO: 155495 - DNA, 74 bp, Arabidopsis thaliana landsberg
aattccaaccctcattttaatggatatctcaaaaaagcccaaaaatattgaaaactgaaaacgaaaccggagaa

SEQ ID NO: 155496 - DNA, 295 bp, Arabidopsis thaliana landsberg
cggttattgatctcagcattacaattggttctgatgagagcttcttgaagactggtgataatcctcttcttaccattttttcggctgggcatgctcttcatgtattcgttaatggcctgcttgcaggtaaaatcatataaacttgaagcccaaactctcccttttttttttttttttttttttttttttgtcaaacaagcccaaactctccttttggaacaaaaaaaaacgtaataaaaatccattttctttgttttaggaacttcctatggagcactgagcaactcaaagctca

SEQ ID NO: 155497 - DNA, 288 bp, Arabidopsis thaliana landsberg
caaatgcagctttcatgatccttcctttacctttgcagggtcagcaacaaatattctggagatcaaatggcgacattcaggagatatgtgaacataatccggaatagcatactgaacattcaggattctctgagcaaatattttcacaagagaacagattgtttagctagcaagtaataaaatccataattaccattttcaactattgaagcatgaagaaagtgaaaggctcacatgtatagttttcctggaaatctttggttcctcgggatcttcgaaggatatgct

SEQ ID NO: 155498 - DNA, 241 bp, Arabidopsis thaliana landsberg
atggggcgatttgccatctcaaaggatctgactttataccgttgcatcccccgcgactttcgttttccgatttcccccaaattcgatgcaaatctaagaagagagagaaatagaaaggtgtgtgcgcttcaaccgactcagtgtctctctctctctctctctgttgctatttgaggttttttcctttgcctcgggggctctcgctgtccgaattcttttggagggatttattgggtagggt

SEQ ID NO: 155499 - DNA, 212 bp, Arabidopsis thaliana landsberg
gttgttaagttacaagtctcttcaaaaacacacacacacgtctctctttacagccaatcatcgatcacagctcgatttttctttattgttccgttggttttcttgagaatttttctttcttggtatcatcaaactcgtcggtaaggaaacttcacgcacgtatcttcaatgttgagctgttctaatggtaccgtcgtgatcgcaaccgccat

SEQ ID NO: 155500 - DNA, 225 bp, Arabidopsis thaliana landsberg
gtaaggaaagagaaattcacctttctcttgtttcaagaacctaaaatgtcagtaaacgtactatgtgaggtattcttcacattaatgagtctccagagagaacccgtcatggctttaaaagagctggtaatttggctaaacgactaagagggttgacatgggatgtgcgatgctgccgaacatagagtttggaagaagcacccaagtgttactacttttgtagct

SEQ ID NO: 155501 - DNA, 408 bp, Arabidopsis thaliana landsberg
agacgatgcgtctcttgtcgtcgccgataaatcgaggcttcttcgactatgttgaactctatccatcgctcgtttcatcttacttcccgccaccagatcgtccttcggctgtgctctccgtcggcgagtaggacgataatgagttcttctcctcactctccgatcccaaagacgcatgtgagtgatcgttttcgcattctctagactattatctttcaacctagtttcgctgattttgaaccatttttactatgccgctgatcgcatgaatttgattggaaaaaaatgctctcatgctttcatagtttatattcaatttccagtggcataccatatcaagtactgttgtttagagattatgaactctccattggctcccagtgattttcctatgatcaaagcataatc

SEQ ID NO: 155502 - DNA, 558 bp, Arabidopsis thaliana landsberg
cctaataagcaattaacaaaaagtttgcttgaaagagaagctgatcaatgtcaaaggtttttacagcagaaagttggaaataaattggacaaacaaagaaagatccaaccgaagaaggaaataacaactctctctgggtgtgtagagcaaaaaacgagtctaacatgttttaaaatctttcataaaaacttataaaagatgagcaatcttcaaaagaagaagagacaggtttgggctaaagaagagtgctgtgatgttgaaaatccagagataacctttttcattcattcccatggagattgagaccaaaaaaattattattactcaacgctgtgttggcctgggcctggagcttccaaatgtggatcggcgatcatcactggctctaggaccagaaccccaacggtctcctccttcagctggaggtccagatctttccctattactagtccaccggtcagtattctgagcggctcctctgttgcttccccagtggtcatctccgggaggcggcccacggttggaccgacggtcactttctgatgatgttggtgctga

SEQ ID NO: 155503 - DNA, 460 bp, Arabidopsis thaliana landsberg
tatccttgagagaccttatttattacaatctggagaaacaaaaaaaatgttcggtaacacaacaaggagaaggaatttttcaagttggtattactaatcgtgaagcaggagagaattgtaggacgagaaaccgaagtatagagacgagcaagatcaattgtgtcaagatatagaaaccgagcttacatgtttttcctaagatgtttccacggtttgatacaggatcttctttcagagaatgtaacttcttagtttcttggagtacttgtagtgaactcagagatcttgtgagcatcaaatgttcgatttcagtttcaatctttctgtggaagatgcattcaagttcagattcaatctttgagttttcgagttcttggatcctagcttcctttgcctcgagagcagctctagcttcctcgagtttgtgttccaccccttttcccttctccttcaagatcag

SEQ ID NO: 155504 - DNA, 177 bp, Arabidopsis thaliana landsberg
aggaaacaacagttacaaatcaaaatgactagtaaggtcgtcttccttcttctcctctctctcgtcgacctcctcctccctctctacgcctctgcggctgcccgtgtcggtggctggagtcccatcagcaacgttacggaccctcaagtcgtatagatcggtgaattctcggtctcc

SEQ ID NO: 155505 - DNA, 327 bp, Arabidopsis thaliana landsberg
gataacagtatcaagatcaattttttatatattaaagaatcaacagtaaaacatgagattcttgacattatcacttaatttaggaagaggaatcgtctttggaggaccaactcttgacacagaagaaggattcatggatcctccattagattcagatgatctctcgatgtaaagccttcctctgtacgcagcaaggtgagcataataagccggtggcacaatcgaaataggtttcgtgcacctcacgaaagtgtaacacaagttatacacaagtctctgcaattcgtctgaagtaaactcgttctcgtcccacaggatatggtaatg

SEQ ID NO: 155506 - DNA, 148 bp, Arabidopsis thaliana landsberg
ggaaaataaaaaagatttttttcttgtaattataattttcatattttctccttaaaaaaaggagagttcgaaattgaaaaaaagaaagaaaagagtaaattggatagaaggaagataaagagtggggcttagctgtctaaaagagaga

SEQ ID NO: 155507 - DNA, 216 bp, Arabidopsis thaliana landsberg
ccatcatcgatgtacgtgaaaatatataaataaaaaatcaataaacgaaaatctttcctttttctctcacacatttttcttcatctccactcgaatccggaagaagaacaaaaaccaaaaaaaaaacccagaaaatcagagaaacataagcgaaccgacagagaaaaaaaatgtcttcgccaagggagggcagggaaatggatatgaagaagtcga

SEQ ID NO: 155508 - DNA, 138 bp, Arabidopsis thaliana landsberg
aacagagaccggcgacgaatcgtcggcgagaaagatgcgacgtaaagtacccacgtcgatagaatctctagacgccgatatactgtgcatcatcttctcttttcttgatttgttcgacctcgttcattgtaccgtcgt

SEQ ID NO: 155509 - DNA, 79 bp, Arabidopsis thaliana landsberg
ttggagatggaaaattcgaccaccgggttatattaatttgcaaattctacctgaactagttaaaagaatgaccttggct

SEQ ID NO: 155510 - DNA, 106 bp, Arabidopsis thaliana landsberg
atgggcgtttataaaatcagtagtatgcattgtttgatctcatcccagaaaattgaaaccattggactaatgaatgtgatcataatatatattggtttgcttctga

SEQ ID NO: 155511 - DNA, 329 bp, Arabidopsis thaliana landsberg
gctaattaaggttttgagttttgtagcatatctattgttttttataccactttagatcagaaccttacaagagttgaaatacaaagggtaaatacatatgttggcaaggaaaacaatccttccaagaactaagccggcgagcacaagacatctcccggggactaagacagatctaatggggaaaaaacccaaattaaagaacaacaatgatactaaacctaaactttcaagattcattactaaaaaaactcaaaactgaaaagcaaagtctaaatccaaattttttaaattaaaacagatctgaaactatagatctatccaaaggaaat

SEQ ID NO: 155512 - DNA, 223 bp, Arabidopsis thaliana landsberg
  unsure (1)..(223): unsure at all n locations
taatggaaaaaaaataaaatgagtagaaaaaaaaaaaaaaaaaaaaaaaaaatgaaaaaaaaaaagaaaaaatatattaaaaaaaaagaagtatcgtcagttatnacanaaaaaaaaataaaaagaaaaaagaaaaaaaaaaaaaataagaaaaaaaagaaaaaaaaatttaagtttaaaaaagaaaaaaaaaaaaaaaaaagaaaaataaaaaaaaaaaaaa

SEQ ID NO: 155513 - DNA, 103 bp, Arabidopsis thaliana landsberg
ctgaaatcattttgaagcagaaatcgatttccaaaatggctcttgttcaatccagaactcttccacacctccccaccccgttatcgccgattctatcctccaa

SEQ ID NO: 155514 - DNA, 454 bp, Arabidopsis thaliana landsberg
aaattgctctaaacaaggatggtggaaagacacattcaagttcccttggtaagatttcatcttctcatataatctatagttaaagcagagaggaaagattgtgtgtgttttaatgttttctttcacaggaaataaaaggggaagaagaaggagggagaaacaagaagagcgtgagatttgtggacaaaatccgattcagtgtttctcagtcatatgaacatggacaaactcacttgctatgtatattttttgtgtagaacaaaaaacagaagataatttcttctttttgtcattccacatctttatggggctgtatgcataagtttgtatagtttataaacgcgttactgtataacaaacacaagaactccggctcgttgcaattagaggatgaacaaacaacagatgaagaatcattttgaaaggttttattgaaatatccatcaagagatat

SEQ ID NO: 155515 - DNA, 345 bp, Arabidopsis thaliana landsberg
gaaaattttgactcaaatgagttgatgggtcaaatgagttattgggtcaattggtttgatgagtaaaatgagttagattgtaatgggtaatggtttcaatggtttacccaattaacctatcaagttttgtaaaattgaattaaaccaactaaaatctctaaaccaatgtcaatttaagtttaaccaacacatctaaaccaatctaataaaatcaatattttttcaaatttcttaaatatacaagcgatgaattgaaaaaaagtaaactcgtaatttttccaccaaaaaacataatcccgtgattttcccgccaaaaacaaaaatccgtgattttttcgcaaaaaa

SEQ ID NO: 155516 - DNA, 76 bp, Arabidopsis thaliana landsberg
cgaataaaagtcatcaaaaccatgtgatgagggatatattcgagttagagactacttgtagtagaaataatgaaag

SEQ ID NO: 155517 - DNA, 251 bp, Arabidopsis thaliana landsberg
ctgaatgaaagacgtacaaaacaagatattatagaaggacctttgctactgtatgtgagttacctatttgctctgaacccttgatacaaatgtatcaatgttagtatccgtagaacctccttcattgagtgacttgacagccaagtctctccatttcttcacgttcttcttcatctctttgctcctctctccttccatcacttccttaatgctaaactcaatctcctctctcttggcaatcccactctcct

SEQ ID NO: 155518 - DNA, 254 bp, Arabidopsis thaliana landsberg
  unsure (1)..(254): unsure at all n locations
gcaaaatgttagctcagtcgcacttcttctctaagtccttcgatctgattccgccacagtctccggcgttgcggtctgcaaatccttctcttcgtatctcttcttcttatagtaacagccgcttatcctttctttcttcttctgcaattgctgttcccgtctgccgccgtcggttttgcctgaaaatggactcaaactcaaaacggcctaacataagcancatgtctccttcggaacttagcgcccctgagctg

SEQ ID NO: 155519 - DNA, 408 bp, Arabidopsis thaliana landsberg
ctctggagcaacgacaacgacaacaacaacaacatgatctgaatctgaatcatcatcctctcaaagaaggacaacaatccaaaacaagggcaggctttttacaacgcattcactcaaaactcgctggtggacagattttagccatgtgcgtatgcgtttgcccttttgttaaataaaaaaactatttgttttgtttgtttgacttgatatctttttttgggattgaggattgagagagatagagagattttacaaactttctctctttctctctttctctctttctcatggataattcgtgtctctttgatttgtctaaggtttgtctttgtttgttaggaagtggtctatatgaacgaaaaatttgtgtatggtgcagttgcgtttggggacatttttgagattttt

SEQ ID NO: 155520 - DNA, 162 bp, Arabidopsis thaliana landsberg
ttaaaattcactctcaagatatcggaatgaaagctgaagagggtaaatcatctttaggtgtatgcacaaactgttgaatcagaaacggtgagagtttctctacctgctgtagattctgtagtgttgactcaaatgctgatatgagcagtgcagcgaacaaaa

SEQ ID NO: 155521 - DNA, 448 bp, Arabidopsis thaliana landsberg
gtcaccaaattgaactttcttgaaccagcagagaatgtaacctgttggttggaaaaagagcacccaacagaattttttatcttgtaaagttaaacttgagctagctccacaggtacaaaactagttttagacttaaccatggtaatatactcatgcatgccattcattattaacttcaaaaattgcaggtttttattacttaatatcatcatcagtatcacacacacacaaagaagcacaaaaatgagagaaacaatatctatgcagatcgtatccttacctcatcagacgaaaagacggtcttgaatgtctctgcttcctctgtttctttatcctctttcaggtccagacttggttgtgtgtcttcttttgtctcaacagcctcagattctatggtctcacactgttgtacgtctctctctaatacatgttcatgttcctctgtctc

SEQ ID NO: 155522 - DNA, 495 bp, Arabidopsis thaliana landsberg
tacagtatctcctccatctttttttactttcctcagagctctctcctctccgcaacttccaccaccaccaaatcggaactctcggcgttctactccgtctccggcgttacctccgtcgatttcatcttctcaggttacttagggttacctcttttttgctttttgatcgataaagtgtgatgatgtctagcgttaactcttttcgtcttcgtagtcgtagtcttagggttttggtggcgacgatactttgatttatcaaaccgaacttcttctttgtgatcttcgatgaatcaaaagttttctaagggatattaattaggttttgttaccggcgataattaatccatcttcgatgcttcttctttacacttctgactttgtttctgatgttttaacctctgtggagagcttgatagagtgacattgctctgactaagcgttttagttcaactgcgatggttgattctctttttactaagtaatgaattttgagat

SEQ ID NO: 155523 - DNA, 815 bp, Arabidopsis thaliana landsberg
tttaattcatatattaatatataattcgtctatatctatatataaataaaagaaaaagaacatgttgattatatcaaaattatagaacaataaggaattttaacttatcatggggaaagacaccattgctgatataataacctctatattacatgctgacacgaatagaaggggacccggggggattggatcgactaacataaccgacagtattgctaaaaaccttttacgagagggttttattgaaaacgtaaggatacatctttaaaacaaccaatatttattgatcttcaccctaagacatctactaccgttgaaagaatcctccaactcgatgttaaatttaaagagaataaaggcgaccggttctactaatacattttaactctcaacgaattccacgaattgtaggtggaatatgaaatggaatcctttcgacttctcaaggtataatgacagtccgagaagctcgactaaaaagaatcggcggagaaaatttgtgttatatatggtaatccttctaatataaaaactagatatctgtaactcacaatttgtgaaaaaagggggttgtgtaataccacccctgttcaaaaaagtttcggatgttttacttcgaatgaaattaaagaaaaaatgaattaataaaagttttctttcttaatcacttccgaacggcatggttcgattttgtttagatactaaagattttttttcgttcatgcttctgaaaggattcgcacatatttttgtataggtatacctatagaataaaaaggtaaaattttgagtaagttcttaagtataagttaata

SEQ ID NO: 155524 - DNA, 774 bp, Arabidopsis thaliana landsberg
  unsure (1)..(774): unsure at all n locations
caggttaacatgggtcaggctgcaccagacttcacactaaaggatcaaaatggaaagccggtgagcctcaaaaagtataaagggaagcctgttgttctctacttctaccnnnnnnnnnnnnnnnnnnnnnnnnncaagcaggttgttaaatctttactttctcctccttcccgcattcattgatcgcatattttgtgtttgtaaacgtaaatggttttacttgtgtacaacaggcttgtgctttcagagactcttatgagaaattcaagaaagctggtgcagaggtcattggcatcagtggagatgactctgcttctcacaaggtacacacatcaaaaatctctggtttcttgaataaacccatttcttttttacggattttaaagagagtggtgggactttaaacattgttgcaggcgtttgcaagcaaatacaaactaccgtatacattgttaagcgacgaagggaataaggtgagaaaagattggggagtgcctgtagacctgttcggagcattgccagggagacagacttacgttcttgacaaaaacggtgttgttcagctcatctacaacaaccagttccagcctgagaaacacgatcgacgagaccttgaagtttctcaaagctgctagaacattctctctttctcttctttcatgcatgtctcaatgttggctccatgagaccatgaccttcttatattggttctggagagtatgaattttcaatcataccctgttataccaatggggaggtagttgggtttgggct

SEQ ID NO: 155525 - DNA, 1495 bp, Arabidopsis thaliana landsberg
  unsure (1)..(1495): unsure at all n locations
aaaaggaggattgtcgacgccagcccaaggaagaggttaatgagggatttcaagaggttgcagcaagacccacctgcgggtattagtggtgctccacaggacaacaacattatgctctggaatgctgtcatatttgggtaatgggaacaagtacctttagatactggctaaatatttctgaaacttttgtcatttctgtacttacttagacctttttgtttctannnnnnnnnnnnnnnnnnnnnnncatgggatggaggtatggttatgatatgttattgcattttgacaagaagcataaatttttgggatcgttgtagtggtgttcttatgtctctttcttgatgctgttcaggtactttcaaactctcactgcagttctctgaagattatcccaataaaccaccaacagttcggtttgtgtcacggatgtttcatcctaatagtaagttatagagatacaacattggattttctatccacctggttgatgttcagcttttgcctccaattaacgttcttctgctctattcgttgtgtagtttatgcagatgggagtatctgcttggacattctacaaaaccagtggagtccaatctatgatgttgctgctatacttacctccatccaggtgaattcaaaatgccatatgaacatctcttgatgcccttaaaagcttgaattgctttcttcttctctaatccgtttttccctttgttattgcagtccttgctctgtgaccctaatccgaattctcctgcaaactcggaagctgctcggatgtacagcgaaagcaagcgcgagtacaacaggagagtgcgtgatgttgttgagcaaagctggactgctgactagtagtagtttgttgtaagcgttgtagctctctctactttctctcaatcacgattcagcaacagctttcttctcttttcattcatgtcttgtgtttccaaaactatttaagtgattccatgctttgatgtaacccaacatccttaaaaaaacaactttgtaccaaaccatctgaattattcacttttgtgtatatatgtattacgatttacttgctagctacaaaaaacaactttgtacccaaattccacaaagttgcgatattttatttaagggtttgtggccttatccttctgttacaccctttcattgccttaacaattgcattgctttctttgtgacgctaatccaatttctacaccaaaatctgaagcttcacatgagactcgtaagtaccttaagtattagtaggttcaactttatgtattctcatataggccttgaatttgacattgatcagtttctctatgttcttcaaggatggtgattttatatttctcttctatagttctgaaccaccaagcccgaggttctcactgcttgtccatccttgttgcacttgaattgtgtactgcagattccatacaacatcctctatcgatggccgcttcctctgatcttcacaaagacagttgatgcaaac

SEQ ID NO: 155526 - DNA, 534 bp, Arabidopsis thaliana landsberg
tgttttgtataattgacgttgctactattctgattgtgaattttaagcagcattcacaattgaattgagtcttcactttgttcagctctgaatctatcatctctgaatgttggcaagttatagtttcttattatatttcggtgttttggtttgttgtgctaggttttattttatacaatgggtcgtggaaacagctgtggtggaggtcaaagctcattggattatctctttggtggtgacgctcctgctcctaagccagttccagctcctcgtcccgctcctactgagtctaacaacggacctgcaccaccagtaacagctgtgactgcaaccgcactcacgactgctactacttctgttgagcctgcagagcttaacaagcagattcctgctggtatcaaaactcctgttaacaactatgccagagctgaaggacagaacaccggcaacttcctcactgtacgttttcgtgtccgttttactcgaatacccgtgaatcgaaatggtaatgatactcactcactctctcccttt

SEQ ID NO: 155527 - DNA, 1309 bp, Arabidopsis thaliana landsberg
atggagatactgtttgatcttgtggaaattgatgatttgtagaatgcggagttgttcactttgacgtatggtgctattgtgcgtcaattgcttactgacctggaagaagtagaggaagttaacaaacagcttgatcaaatgtattcttcttctacgatttatgtagactctcttccatggttttagttttgtatttttgtcatcttgcatttgtatatttcattcttgtgtttgaattttggttgcattatgtttctggttcttttgttcatatatctttctaataatatgtcatggatgggatgaataaagcattgtactctcaggttcatactgatgagtgttcgattgtttagacctttatcactaattttctgtttattttgcaggggatacaacattggaatccgacttatcgatgagtttctagccaaatctggtgtttccagatgcgttgactttaaggaaactgctgaaatgattgccaaggtttgtaatttccagtgacttgtttagtatcacgacgttacagtttgaagtgtctccgggagtaaaaacaacgaggaattaaactgcaagatatatgaatgtttattccacttgacactatagataaaaccttatatatcaaactagagcataagcttcttaatgtctagtagatatcactcctttggtttcatggtattgagaaagcagtaacagggctttgccttattgcacaggtgggtttcaagatgttcttaggagtcactgcatcagtgacaagctgggactcggacgggacttgctgcagtataatcttagaggacaatcccctagttgatttcgtcgagcttcccgatacttgccaaggtctttactactgcaatgtcttaagtggagtcattagaggagctttggaaatggtcagtctccttctccattatcaagtgcagaacttgtttgtgctcagtgttttatgttcttattttttgtctgcacaatgatcaggtctcaatgaagacagaagtgacatgaacgcgtgatgtcttcgaggagatgatgcttatgagtgcaaagtaaagctactgaaacaagtcgctgaggaatatccttacaaggatgatgaataaatatcaatctcttatcttccctcttcctcaaagagaaactaattactgttttgtagtctctttctctgcattcttagctttgttttttttctccgcaaacacaaaactataagctatgaaactaaatactgtttaaatccatttcttagcgttctgatgtgacaagagttaatcgtatcacaatgtctcaaatc

SEQ ID NO: 155528 - DNA, 649 bp, Arabidopsis thaliana landsberg
atggcaaaccaaatctacttattctccttgatctgcttgtctgttttactttgccaatcatatacggtttcatctttccaaaaatcactagacctagcgaaaccatgcaagcgtttcgtcctccacctccatgacattgcgtacgatggtgataacgcggctaatgcaacgtcagcagcaattgtgaaccctttaggactaggagacttcagttttgggaagtttgtgattatggacgaccctgtgacaatggaccagaactatctctcgaaacccgtggctagagcccaaagcttctacttttacaacatgaagacaaatgacaacgcttgggtcgcttggacattggtattcaaatcgacaaagcacgaagggacattttccataatggatgcaaatccttttggtttgcagccggccaaagatctaacgatcgaaggtgggactggtgacttcctcatgactcgtgggatcgctacattcaagaccaaactcactcaaggcagtaagtattattgtgtggaaatgaatattaaactttatgaatgttactaatatgtgtcttgggattgatcttcgtgtgttggcagtttatttgctttctttgtttttagttgatgttgttccaaatttcaataaatggtattga

SEQ ID NO: 155529 - DNA, 680 bp, Arabidopsis thaliana landsberg
cctctttctcttagattagtttgaatggcacttgagatggtgtgacctacattcattttgattgtttactttgcatgctattgcggtttagtctatgattatattgtgtttcaggcactaggtggcaatccttatccaagatgagcagtctaaaatcctaatgatcatgtaagccagctaaaacacctctttgccttgaaccaactaatttccagtctcgcgctcgatttatcaatcttttatcgttttcttaaacatagaagtacacagcggttgtgggatttgaagtacctgtatcgccggtttcaagttacaacaatgtgtattcctcaactaaagatgagacaagagatcctccagcagtaccgccacaccttcaacactctatattaggcaatcagggtagcatggaactggattatgcgccacagaatgttgtcctgaaccacctctatatcgaaaacagagacgccccaagatctgttgtagcactcggtttctcgcatcggttcaggactaagtttgtcactgtggtgatatacaagcctgtccaaagaagagggagcgccaatgtttgaataatgatacctctttttaagtagtgttgggaatttgcttctttatggattgaatttggtatacaaaaccatctggtccgtactgaattttattcttctctt

SEQ ID NO: 155530 - DNA, 1146 bp, Arabidopsis thaliana landsberg
atgtatgtatcaatccgaattttggtgattcgttgtctattattaaatacgtcaatctccatttgtaatccctggttgaaataatagctatcttgtcatggagatcatcaacattacatttactacactacacacataatgtcacatatgatcttagtatatgtactcttttgtaccagtgactagaacaactgtgagtgtgggttgaagtttttaatatcttgttaaaatcgaaagtttttgactcagatactacttggttttgtttttgtcactgtttcaggtacatctcaagtcttacaacaatgtctcctgtaagtacatatgcattatatgattgtatttcgtattctgttagaatgtgtgtatgttgccgcaatcatacagctttgtaggagttttactctttttttggactggaacttaattactgactttccaatgtacattgaataggattcttgtcctttggtaaagaacattcttcttctagactctgaaggaaagcgtgtggctgtcaagtattactcggatgactggccaactaatgccgccaagttaagttttgagaagtatgtattctcaaagacctctaagaccaatgctcgtacagaaggtaagactacataacatttttcatctacacaatttctatcatgtttcctgacttcgtgtatgcttatatacttatctctttcaaatagccttatcgatgttttatgtgcagctgagatcacactgttggacagcaatattattgtctataagtttgcccaggaccttcacttctttgttactggaggtgaaaatgaaaacgagctcatcttagcttctgttcttcaaggcttttttgatgctgttgcacttcttctgaggtatttgtttgacttgacaactgaatatgcctttatttattgatcaaccatctccacaactaaagtatgatgcatccctttttttttttaccaggagcaatgtggaaaagatggaagcccttgagaacttggatctcatctttttgtgccttgatgagatggttgatcaagggtatgctacatatgctttcaaatactattctacgatttttttactatgttaaattcggaaatctatcattttagccttgcacaagagttaaaagattac

SEQ ID NO: 155531 - DNA, 2265 bp, Arabidopsis thaliana landsberg
tttagggtttctttatataataactagttaatctgtcaactagaaacaattttgtttcttaaattcttcaattgcttcttgatatatgtgtattgaatctctagatgttatcttctcagtttatatcaatccagcaagtatctgtgagtgtgtacaagtgtgtgtgctcacgggtattagagtttacttcttaatgtttctggattagtaagctctgatttggtatctgtagagttgatctataatgttttgagtaatgagattcataataaccagatattttataggagagtcttgatcatatgtctctgctattttgctttgcttgtgtccttgtaccgaaactgacggtgcttattgatatgatattttgttgcagcttgtttgcttagcgtgatctcgagtttgattatatcaacccttacgactctgcgtcgagaataaactcagtggttttaccggagttcattgttcaaggagttctatgcgtattctacctcctaacaggacactggttcatgacactcttatgtctcccctatctctactacaatttccatctgtaagtccaactaatctcaatcttttgctccaatcaaatgttgtggtattgatatcctttcggtttctccgttgttcagttactcgaagcgacaacacttagtagatgtcaccgagatcttcaatttgctaaactgggagaagaagaaacggctgttcaagcttgcttacattgtccttaacctctttctcactatcttctggtaacgagaaaagatatttcgaatcccattattgcttaaccataagtagatcaagagagctaaaacactttctgtctgcaactttttttcgtaggatgatttattcggcgctggatgattacgaggactgactaatgaagaagacatggtccatcttcttcggtttattgacactacgcttaaagatacagcgacatgctcgtggacatgaaaaaaagcaaggaaaagtgtttgctttgtgatgtttgtaagattagtggcaggaagatttgtgtatttatttatttcttagaaacatgttcagattaactgtttttttttttatcttatgtcttgatcattatttgtacaagcaatcaagctcgtaaactactggttacagtaacaatgaaactgaatattttcaaatataagaagaaaaaaagttaattcatgtgaactttgacttttaaaagtgggaaaccctttagagtgatgtaataaacgagaacttaaaagatgattcgaaccttctgtttcagtttggtaattaggttatcttataaagctaatccttctctcacactgacaatcgtcgttatcaaggtgatttctttctctgcgtcaaacatcgctgaccctctggattgttcctccgatcttcttcgtgtggttacacaggtgtgtggttgatctctagacccaattgatgtggttccatcctatttttatttggtctgtaatcgtaaagtctttaagatttgggaatggagtctatgttgtggtgtttaggcagcgaagccccagttattaaatcgttgcatctagtaatttggggtcctttggttgacacacaggattaatctttcattcatctttgttctgagttatcgaggatgttctcgagtcatcttgtcgtggaatttgagctcaggctattcgtatttttttacaggttttacttatggttaatgcaatcaaaggagtgttcgtatcttggtacttcttaccgttcttacgattcctaagcaaatcttttgaggaacacaattgaatcattcaatgtttctttctgtcttttgtttgtttgcagcgatataccgatgacacagttcatagtgaacatgaacaattcgatgcctccgtctcagaaattcataattcatgtacttgatagtactcacttgtttgtgcaaccacatgttgagcagatgattcgcagcgccatttctgattttagagatcaaaactcttatgagaagcccacttcttagatcatcacatcacacttgcttcttttttcttcttccatttgattcaaatgaataaaaacttacattgagatcgagagtttgattggttatagtgaactttgttgacaaataatctctctgtaccggtttagtatcagtcggttttctctgcttgtgttgattactttgtcactcttttgttgaataaacacggtttgtttggtcattgttcagttaaaaggattcggaagttccaaatttcattttag

SEQ ID NO: 155532 - DNA, 538 bp, Arabidopsis thaliana landsberg
  unsure (1)..(538): unsure at all n locations
ttactacaacattgacaaatacagatgattttgttgcctactgatgatttttgtttcttaggtagaatcattgacaaatacagaagaggttgagctacgttctaagattgaagctcttggtttagaagtcactaaagtgccatcnnnnnnnnnnnnnnnnnncaatgaggtctgtatcctgtgttcactcatatatctggtacacattgtaatgtaaatctgaggctttgtgtgtgattgtttgtgttttcaggtggagatagctaaggaattggacaagttatcagcaaagttagatgatgtggatgagatgatatcatcagctatagcttctgatccacaggttcagacgcttcttagcggcacagctgatgtttggatgccggttatcactgccggcgccgaagagagactcaacttcacagcctctcttgctgatgatgatgacctttctaacaggagactactatccgacataccagcagctcttaatcccattttctttttgatanactcatgtcgaaggtttctattttgc

SEQ ID NO: 155533 - DNA, 2467 bp, Arabidopsis thaliana landsberg
  unsure (1)..(2467): unsure at all n locations
atggagggaaaagagaaggagaaaaagaaaagcttaaaaaatgtcaacggtaggtagtgacagcaacaacaaatcctttctgatctgccgtctgcgaatctcttattgtatttgaatgtctgtaatttatagattcaccgaagatctcagcttcttctgcaataatggcaatgggtttcgattnnaatgagatgaacaaaacaaagaagactttaattggacttggcttgggacagatcctctcacttctatgtacttctaatgccttcacatcctctgagctcgccagaaaaggttttactgtttctattttttttaatgcatgcatctcgtttatgctagctttaagattcgatcgatcatatagatttatgatctttatggtttatacattcatggtttaaaattttgaaatcttataggaataaatgctccaacgtcacaaacgttcctcagttatacattactggcagtcgtctatggaggtatcatgctctatcggagaccaacaattaaggtcagtattgaatttggtttcactttgtgttacttactgctaatttctctttttggtgtaatgagagtttttttcaagattacatgcactattgagtgcttataacgtaactagtatgtgctactaaaatcttcaatgcaaatactcttgtaggggaagtggtatcactatttcctccttgctttagttgacgtggaaggcaattttcttggtcagttttcttattgacacagtcttctttggcttgagcactgatctgaagttattttggagacaagttttcttagaaactgtatatacttccattacattttggttgctgttgtagtgagattttgaataaaacttcattattgctttggtttaacagtggtgaaggcgaatcagtacacatcgattacgagtatcatgctacttgattgctgggcgatcccttgtgtgttggtcttaacttggatgttcctgaaaacaaaatacagattaatgaagatcagtggtgtacttatctgtattgctggtgttgtcatggtactcttctctgacgttcacgcaggaagtcgagcaggtaaatggtagaaactaatcattcgttacttgtcacgcaagtaaaactcaatctacgcttatgataatggttgcgtttttttaggtggaagtaatcctgttaaaggagattttcttgttctagctggagcaactttatatgctgtcagtaataccaccgaggtaagcaagtgctacaacaagaaattgttatatcccgcaaaaatgtaaaatttattgctcatttgttataggagtttcttgtgaagaatgcagacacagttgagttgatgaccttcatgggactttttggagccattatagtgccattcaggtgtatcctttatgcaaaaagctatgacttcttatgtttcttagagttatatgcacattctccagaaaaaccatatttttcagctaaggccttgacttcacttgtccatagaagtatacttgaacgtgatgagcttaaagctattcactggtcaactggagctgtaggttttcttgctatggccatttccattttaacatctgcaaaccaaagacgacacattcttgtctatttattacatttttcgcggtttcaggtttttccgttccttagattcacactcacaatgtttctcttctacccattagtcccggtcttactcaaggtatgagataatacagaagtcatatgatcaaaacccttttccctcttttgtttttcatgccagtgtctacgaaactgtaacatcttttgaaatatgatcttctctcagaccaatggtgcaacaatgttcaacctctcgttgctcacatcagatatgtgggctgttttgatccgcacttttggttaccacgagaaggtctgctcactttgaatatcaaacatcaggaaacccttacattttctatctgtagaaatcagctaatgatgttaataccaggttgattggctctacttcttggcatttgctactacagctactggactgatcatatactccatgtacagtcttttctaatcatttttcaagtacaataaacaatccatcaatgaacttattattcttctccatttttcccatgttggatgcttctcaggaaggagaaagatcaagaggaacacagatttgaagaagtgggcgacgaggcggctatgcagaggaagttgttaggtgaggatgatgagccgggaacctaaccacataggtttttgtcaattccatcgactgtgtgatattatattattgcatccagcaaaaataaaggatcttttgagtggagaaaagtaaggacaccgttggtgactgtaaagagtgagaaaaagggccttatttgatcttgattgtaaagataaacgaagatttacattgtaagaacaacattggactattatagaagttacttcaattgtat

SEQ ID NO: 155534 - DNA, 708 bp, Arabidopsis thaliana landsberg
  unsure (1)..(708): unsure at all n locations
agagaaatttggatttctatggtgctaatctcggcggttgtgcgggctgttctagtggcggcgccgataccagaagtaacagccaagaaattnnnnnnnnnnnnnnnnnnnnnntggaaccccaacattaactataccatatgggctcaaggcaaacatttctacgtcggagactggctttgtacgttctctctatctcttctttctcaatctacactctcagatctgtcatatttagatctgatttgaaattggtttagctttaaatcttgtaatagtttttttaacttttctttaagtccagatctagttagaacataactctttctttgttctgtcttttttttttggttaagttaagtcttggttctgtctttagacttatgttttatttatcactttcttgtcagattttgtgttctatagagaccaacacaacattcttgaggtaaacaaggctgattatgaaaaatgtatctccaaccgcccaatacgtaattatacacgtggagctgggagagatattgttcctctctatgagactagacgttattatctacttgatggaagaggtggttgcgttcaaggcatgaagctagatgttttagttgagactccttcttctgcttctccttttactccttctcctgcagcacaataagaaatcaattttatggggtatctctataagttgttttggattttttt

SEQ ID NO: 155535 - DNA, 367 bp, Arabidopsis thaliana landsberg
aatgaacagggaaaaatcgaaagcaaagggctaaacccgggactgatcgtccttcttgtaataggagggttgctactgacattccttgtaggaaacttcatcctttacacatacgcacagaagaatttacctccgaggaagaagaaacccgtttctaagaagaagatgaagaaagagaagatgaagcaaggcgtccaagttcctggcgagtagcttttgttatatgttgtcgggattatcctttgatgataactcactctgctggactagaacttgtatgactccgttactctttagttttttgatgttttcgatgtagcatgcatgatattttcttgagttgacaatctataagctttactgagat

SEQ ID NO: 155536 - DNA, 2401 bp, Arabidopsis thaliana landsberg
gggatgtatattcatagatatgaagttctaagccttatatggcggtctttttatgaaggaatcgtaaaacagatatattttctactacacccattgaaaaaggaaatggaagagggaggtcttattgcgttaatgttcatggattttcatattccagcagaattgtttaactgtaagattctgtgaactttattgtctttagtttaaggcttagacatcgtcattcttttgtaaagagaggcgatcttttgtataatctagtatagtttctcatggaattgtcactaagtatgtttgttattatggcagggggcgtgttcaatgggatgaagctaatatagtggagattgaatcgaacaaacctgttaggcagaagattactgaaccaaagacaccataccacccgatgatggatgatgatggtttgtctatttttctttatttggtttctcttagtatatgcacagaactttcgatacacgtttatatgcttatgacgtttttgcattttattgttgatacatacttgtcatcatctaaacatatatgtaaaaatggaatgtatgtcagacagaaagcaagagcaaattgtatgtgaaaattatctgctttttaattcatctacaaagttggacgattacttatctttttgggggaaatcttgtacctgcaattggttggttgatttggaaatttgtcactctagatgtaaggttaacttgaatcagttctgatctgttctaatccgtgattgattgtgccaggttctttgtctcctagaggaagagcgtttgatgaatgtgttgatgatatgcaacgagctgaagaactgaggaatgttctgaatgatgcagcagcttcttccagtagaaatagtagccagggttctggtggtggtggctggagctcgtctgatgaagaagaagaagaagcagatccaatggatcaagatgaagaaggtcctcctctaaaaccaaacaaatctactgtcatatataggttcttttgttaggtcatcccgatatatctattttttttgtgtgcaaaaccacaggttctggaagtggtaaaaatgaacgtttcaacgcacacagaaaagcacattacgacgagtttcggaaggtgaaggaactgagatcctcagggtcattctatgaagaagaagaggaagaggatgatggtgcaaaaggtagtaaatcagagacaacaacaaactcacgacacactaaaggcggaaacaaagagttagatgcaaccaaaacggtatcagggacgtcgtcatcttcatcccctgagttaatataaaacctttctgttcaatcaaatgtgtactctgctccatgtttcacagagagctctcaatctcaactaatcttggtttttatcaatttgaatcttccagaaatttaagaaggaaacaaaaactcccatcaattatgtgattgtcttttatagcattttgaatgcaatttcttactgtcacctctgttcttccatgttctatgttcttacatcatattccaaatttgtcattgtatttttgtttgatatgacattaaaaccgaaccgaaccggaattcaattaaccaccgaatcaaacggtataaatttgtaaacgtggtccaaaatgcacgatataagatgatgatgatgatgataagctgaattattcaacatcaatggcgaacgagaaagctcaagaaatggcgaatctatcttctcaaatctgcaaccaaatctcatctgtcttgacaaaaccaacctcaccatatccaccaccgctcgatctcctagtaacagagcttaccgcaatctcccgcaaccgcaacaactctcgtatcttcctctacggtgttggacgcgaaggtctaatgctaaaagccttcgcgatgcgtctcttccaccttggtctccccactcacttagtcttcgacatgacaacacctccaatctcatcttctgatctcttaatcgcttcagctggtcctggaggattctcaaccgtcgatgcgctttgctctgtagctaaatcgaacggtgctaaggttatacttattactgcagagccagcgataggttcttgtgtgaaacatgcaacggatgtctgttatgtacctgctcagactatggcgagtgataacggtggtggtgattcggtggaaatgggagagagacgtttatcgccgatggggagtgtatatgaaggagctttgtttgtgttgtttgagacggttgtttacaagttgggtgaggatttgggtgagtcttcttagatcgacttgctcgatatgctaaaattgagagacgtagccaccccgattaacctgtgctgttggtgtggtatttagctcgagaacgggatgctgttctccgacaaattgcatatattggactagcttaa

SEQ ID NO: 155537 - DNA, 1731 bp, Arabidopsis thaliana landsberg
  unsure (1)..(1731): unsure at all n locations
atgaaacgttgggacgaagttaaccatttcttcaacgcaacggggtaagtataaaaccttagtatggttttatgcagagcataattcacattgacttaactctaattctacagagctattgtgactttcggtttgaacgcgctgcacgggagaaataaactcaacggaactgcgtggggaggtgatnnnnnnnnnnnnnnnnnnnnnnnnnnnnnnnnnnnnnnagtctcaaagggttatgctatagactcgtgggagtttggtatatagaactagatctctcttttcttatgttgtttcttattggcccatgttgtttcttatatattagtgttggtccttataacacgagctctgttcttgactaggtaatgagcttagtggaagcgggatttgggcaagcgtgagtgtagagctttatgggaaagacttgattgtactgaaaaatgtaatcaagaacgtttacaagaattctagaaccaagcctttggttgtagctccagaaaaattctttgaagaacaatggtactcggagcttcttcggctctctgggcctggtgttcttgatgtcctgactcatcatatatacaatcttggtccaggtgctgcatatgaaaaataaatcaataagagactctctttgtagcattcctaaacaatgttgaatttagtgttgcagggaatgatcctaagctagtgaataagatactagatccaaattacttgagcggaatttcggaattattcgcgaatgtgaaccaaacaattcaagaacatggaccttgggctgctgcttgggttggagaagctggtggagcctttaacagtggtggccgtcaggtttccgagacattcattaacagtttctggtaagacagaatcaaattccacattctatctttactcggtttctattattgacaaaatgaactcttctcttaaggtacttagatcagctcggtatttcgtcgaagcataacaccaaagtttactgcagacaagctttggtcggaggtttctacggtctgcttgaaaaggaaacgtttgttccaaatccagattactacaggcaagttcataaagtataatctgtaaatcctaaaccagcatgattactgtaggcgagtcataacataaacttattgatctcgaacaatctgaccagcgcacttctttggcatcgtttgatgggtaaaggcattctcggcgttcagacgactgcctcggagtatctacgagcttacgttcattgctccaaaagaagagtgagtgtatatatatctctatctttctgtcgctaaactatcctctagtttcggtttgtaactgcgaaatctatcatcttaggcgggtataacgattcttctgatcaatctgagtaagcacacgacgtttacagtcgcagtcagcaatggcgtgaaggtggttttgcaagcagaatcgatgaagaggaaatcgttcttggaaacaatcaagagcaaggtttcttgggttggaaacaaagcttcggacggatatttgaacagagaagagtatcacttgagtcccaaagacggtgacttgcgtagcaaaataatgctcttgaatggtaaacctttggtaccgacagccaccggagatatcccaaagcttgagccggtccgtcatggtgtgaaatctccggtttatatcaatccgctgtcgatctctttcattgtgttgcctacctttgatgctcctgcttgttcttga

SEQ ID NO: 155538 - DNA, 1207 bp, Arabidopsis thaliana landsberg
aattgcctgccaccatcagattcaacttgaccctgcagtattaagtccagaacggttgcttgggagatgttactgactatacaaacaatgttactcgagtgttacctaaagaggcgaaaaagacgggaaatttgaccaatgtctcataataataatttaggcctggacattcaggtacccgtacccgttcggttctttttttcgagtatctggtctattcggatagaaagtcgagaaccattagggtattctaaaaattcggtttggttcaagttcgggttcgggtcggttcgattattttagtaaaaatgcaaaagtaatcaaaactacccaaaatattttcagatttaggtcgggttcgggttttttacttatataataccaaatctaaccgaaatatccaattatccaaaaatatattggttactttttacccaaatataaccaaatgtaaccaaaatactaaaattacctaaaagaaaactatatcattggttacttttatcccaaatatattcaaatgtatatgaataactaaaaaatatattatattcggatttataattttaattttgggtgtttgaggtattacaaatatatatataacaaatatttttaggtttacatttgtattcgggtacccacgggtattagatttggttcgggttgggttcgggttttttcgggtaggagatttaggacccattcgggtaattcttaaaatcgggttccgggttcggatcgattcttttttgggtttttcgggtcgggtattcgattccgggtattatgcccaggcctatgggtttctatgtaaaagtgggcctagataatataaaaacagaacaatccatttaggatcgttcctaaaattgggtttttcgcgacccaatagaaacccacacgtggcatctttttattgggtaaaagttttgactcaaaaaaaacaaaaaaaacacgcgttttattttttttcttcttctctctcatttcttcgtgttccgacagagactccaattggaatcgaaaaacaaactcggttcttttgatttggagaagtttctgttcccgattcctccgccgatcacaatcacggcgagtcctcatccttctgattccggttctgatggttcgaactcgaagtcttcttccgacgacgagtttgttagcttggactcttccacttctggcttctgttcttcttccg

SEQ ID NO: 155539 - DNA, 663 bp, Arabidopsis thaliana landsberg
gtgaaattcattgttttatttcttagaataaaatcaaatctaggccactattgcttctttgaaatacgtgcccatcagttgataaatcatatggtgtcaacaaaatcaacaagcaaataagtcaaagattgttttttttgtttgattcaaacaaagcgttttactttccttattggtgaattacaagttgcatcttaattttttttaggaatcgattccattgcaatggacatgaaggagaagatattaacggttattggaaccgtggatccggtaaatgtagtaagtaagctaagaaagtattggccgatgacggatatcgtactagtgggacctgcgaaagagccggaaaaggagaagaaggaggagccgaagaaggaaggtggtggcgagccgccaaagaaagaaggagaagctccaaaagaagaagggaaaaaggaaggagaagcaccgaagaaggaagaagagaagaaagaaggtggcgataagaaggaaggagagaagaaagatcaaccacaagcgcagccgcaaccagttgtgccgccacctgatcatgtgttggaacttgtaaaggcgtataaagcatataatcctcacctaacaacgtattactacgcccaaagcatcgaagaaaaccctaatgcttgcgttatatgttgaaat

SEQ ID NO: 155540 - DNA, 633 bp, Arabidopsis thaliana landsberg; identical to SEQ ID NO: 14544

SEQ ID NO: 155541 - DNA, 863 bp, Arabidopsis thaliana landsberg
atgttgcatatttgcgttgatttcaggtgatttggagctgttgacgagctatctggaagaagcggacatgatcatgacaaaaccactcaacccagaggtcgagtaggagcttcaagatctcaagagaccactcgacccccaggtcgagtagaagacatcataacttcacctcaccactcgaccacgaggtcgagcgtcttcatctccatcacctgaccatcactcgatcacatcactcgaccccgaggtcgagtgtcttcaccttcattgccataccactactcgacttcgtcattcaacctggaagtcgagtatctcctgaccataacttgatcgcatcactcgaccccgaggtcgagtgtcttcaccttcattgccataccactactcgacctcgtcattcaacctggaagtcgagtatctcctgaccataacttgatcgctgctttaacttgttgattcgtaatgcctgttaggttagctctcgtcaatggtgattgagtctgggactagcttaacttgagagtctctgttgcggtggcacttagatttggttaatgaacttgttgtctagggttaatttattgagcatgtcaatcacctgtaaactgaggaaacgaaactactcaattaccccatcctcgggaattctttacctgattgatttctttgtttactctactgttttttactgcatcctgttatctgtcgcttaatttctgcaattctttcttgttactcgacctcgtactcgaccacccagttgtctggcaacagactgtgcagtcgagtatctgtgttttattttctgtctattactcgacctgtcactcaacctcacccagtgctctgcaaagagctgt

SEQ ID NO: 155542 - DNA, 1720 bp, Arabidopsis thaliana landsberg
  unsure (1)..(1720): unsure at all n locations
cgcagttgaagctcagaaagctgttcccagagatgaccaaaacatggtaaatagaagcaacagcagtagcatccaaggttctcccggtggtccaggtcgcacaaggaagatatttgttggaggattaccttcttcggttacagagagtgatttcaagacgtattttgagcagtttggtacaactacggatgtggttgtcatgtatgatcacaacacacaaaggcctagaggtttcgggtttataacctacgattccgaggaggcggttgaaaaggtattgctcaagacattccatgaactaaatggtaaaatggttgaggttaagcgagctgttccaaaggagctctcctcgactactcctaacagaagcccacttattgggtatggtaacaactatggagtagtccctaataggtcttctgctaatagctacttcaatagttttcctcctggttataataataataatataggctctgctggccggtttagtcctattggtagcggtagaaatgctttctctagcttcgggctcggattgaatcaagaactgaatttgaattcaaactttgatggnnncnctcttgggtatagccggatccctggccnccgntncttcgcgagtgcttcaccnnnccgtttcaactctccaattgggtacaacagaggagactctgcttacaacccgagcaacagagacttgtggggaaacagaagcgattcctctggtccaggttggaacttgggagtttcggttggtaacaacagaggaaactggggactttcttctgtggtgagcgataacaatggctatggaagaagctatggggctggttctggactttcggggttatcattcgcgggtaatacaaacggttttgatggctctataggggaattgtatagaggcagctcagtttatagcgactcaacatggcagcagtcaatgcctcatcatcagtcttctaatgagttagacggcttgtctcgctcttatggctttggtattgacaatgtaggctcagacccatcagccaatgcctcagaaggatactccggaaactacaatgtcggaaatagacaaacacatagaggtacactcatcgatgtcaaacttttttccttttgcatctcatctgctacatttatttttgcctgttgaaaagtaattagattgattaacgttttcaggtattgaagcatagaaagaaatcgacgaagagaagtgagaattgtagatcaagaagaacagccatttccgttgcagagtttgaagagttgttatttcgatatcaagtagagaaagaaaccaactttcttcatcacagtgagtttcttgttttgtttttttcgtcgttagcatcacaaacacaaaaaagagaagtttatttttactttaaaaattcttacataagataagatcagattggtagctgcaaagatacaacatggatgataaaaaaagatttggtttcgtctccatagcaataaccagagatcgttgattctcgatcactattctttaggtttctctccttcttcttccatgatttcttgatgttgtgtgctctgtttgtaactctaattgttaaaattttttatgttacagattttttttttcttttggtttttaaactttggattcgaattgttcatgggaacttttggatttttctattagcgtgagagaaaacacattgtgcaaaaggctccaaaatga

SEQ ID NO: 155543 - DNA, 2101 bp, Arabidopsis thaliana landsberg
agtcgtttacgattacaagccattcttctagccgacagcttcaccactcaattccgtcccataaccttagaacgaccaaaggtactattgccgatagtgaacatcccgatgattgattacactttagcatggctcgaatcagctgggatcgaagagatttttgtgttctgttgtgctcattcgtcgcagatcatcgattacctgaagaaatcggaatggtacacacgcccaaacccaaacttgttggtgagaacgatagtgtctcacaattccaccagtgttggagatgctctgcgttatatctatgaacaacagacagagacgtctcagattcaaggtgattttgttcttgttagtggtgatactgttagtaatatgccacttgctgatttgattcaacaacatagagataggaagaagaaagatgagaaagctattatgactatggttattaagcagtctaaatcttctccacttacgcatcagtcaagattaggaacagatcagcttttcattgctgttgatcctttgacaaagcagcttcttcattacgaggaagataagattgatcatccaagtgggtcagtttgcttagagaagtcattgttggatactaatccttctgttttagtatgcaatgatatgcaggattgctacattgacatatgttctcctgaagtgcttagtctctttgaggataactttgattatcaacatctgcgtcgtcattttgtcaaaggtgtgcttgtggatgatattatgggttataaaatcttcactcatgagattcactcgagctatgctggtaggattgataatttccgaagctatgacactgttagcaaggatataattcagaggtggacatatccttatgtaccagatattaatttcagtggaaatcggcctctaaagctcgggagacaagggatatacaaggcttctgatgtagttcaatcacgatctgctgatgttggagcttctactgtcattggatacggtacgaaaattggtcatggggataaaatcatgaactcggttattgggaatggatgctctattggatcagatgtggtgattgaaggctcatacatatggaacaatgttactattgaagatgggtgtgagataaggaacgctattgtgtgtgatggggtgaaaatcagagcaggagctgttctgcagcctggtgttgttttgtctttcaatgttgtagttggacgggactttgttgtgcctgcatactcaaaggtttccctacttcaacagccaacgacagaagacagtgatgaagagctggaatatgctgatagtagcagcgggactgcggatcatttgtcaggcctaaataatttgcaaatggagtccaaagcatctgagcttggtcctgatggagcaggttacatatgggaaatatgtgacagcgctcatgatgaggagtggaaacattctgttgtaccaatccccatggataaacttgccgatatcactggggccatggacgatgatgacatagaggatgacattgttgtcccaccttctggagagttgaaatctgatactgatattattaacactgatgcaaatgattcctatggcgactttgagagagaggttgaagaagaattcttaagtgccgttgaaaaggataacaaagcggacattgtaattcctttgattaactcacaccggttggcgtacaacatggactctgcagattgtgctggagcagtattctactctatgatgagactggcagtaaagagtccacataatttctgctactgaattgtacagaaacgcgatgggtgtcataactaaatggaagggagttcttgggttctatttaaagcaaactgatgcacagatagaagtgataatgaaattcgaagagatgtgtcaggaatctgaagagttgagccctttgtttgctaaacttctgccttttctgtatgacaaagacgtggtgcaagaagatgcgatcttgagatggggggaagagaaagcaggagcagacgattgtgacaaagtttatctgaataaatgtgagtcattcataaagtggctcaaggaagcatctgaggaggaagaagaagatagt

SEQ ID NO: 155544 - DNA, 2138 bp, Arabidopsis thaliana landsberg
atgggctgcatttgctcaaaaggagcagcagaagatgaagagggtgttgtttatcatcgtgagaaagcaaatgaatattggaacaaatcttcttctgttcaattgattgctcctctgccttcgaataaagacgatttttcgcataaagccgttgatggaagctctggtggtggaagaagagcgagtggtcttattgttcctattgatgatagtcatgatggtaagacggttattgtagagagaccttcaaggtctcaaagaggaagaagagtttcggataatggcaaaggaggaggattgattatttcgaatgttccgcgtagcgcagaagcagagcttattgcagctggttggccttattggttaacctctgttgctggtgaagctattaaaggttgggttccccgacgtgctgattcctttgagaagcttgacaaagttagtctctttcaatctcatttgtcttgaatcatacattggattggtttagtggactgtaatgttgtgaacattgtatttgcagattgggcaagggacttatagcattgtgtataaggcaagggatcttgagacaggcaaaatcgtggcaatgaagaaggtgaggtttgctaatatggatcctgaaagtgtaaggttcatggctagagaaatcaacattttacgaaaactcgaccatccaaatgttatgaagcttcaatgtcttgtcacttcaaagctatcaggtagcttgcatcttgtgtttgagtacatggagcatgatctttcaggcttggctcttaggcctggtgtcaaattcactgaaccagaggtactttcaaaaagcttaaataaccttgttgtgttctctggccaatcaataaactcactagttgttttgtgttcagatcaagtgttttatgaaacaactgctttgtggacttgagcattgtcatagccgtggaatccttcaccgtgacatcaagggttcgaatcttttggtaaacaatgatggagttctcaagatcggagatttcggtctggcgagtttttataaaccagatcaagatcaaccattgactagccgtgtagtcaccttgtggtatagagctcctgagcttctactgggatctacagagtatggacccgccattgatctctggagcgttggttgcattctcgctgaactctttgtatgtaaaccaatcatgccgggaagaacagaggtgagttttctaatcaatactgcttcagcctatagctccattgacttcaactgattttcttattcgaaatatcttcttcaaggtggagcaaatgcataagatctttaaactgtgtggttcaccatctgaagagttctggaatacgacaaagttcccacaggcgacaagttacaaaccgcaacatccttataagcgtgtccttctagagacgttcaagaatctatcatcttcttctctagatcttcttgacaagcttctatctgtagaaccagagaaaagatgctccgcttcttcgacactactgagtgaggtagtagccttgtttttctttattaacattcttaattgggcttctcgaaaaatattaataaatgattgtcttatttccctctccagttttttacaacgaagccactcccttgtcacatatcaagtttgcttaagtatccgccaagcaaggaactcgatgcaaaggttcgagacgaagaagttaaaaggtggcgtatgctaagaaagcgtatattcgtctgccaatgatgcatgcgagattcctaaacaaatttttccttttgaaaatttcaggaaaaaagctgaagctgtgaagtggcgtggacatgaatctgtgagaagagggttaagagactccaagataacaccggagttcattgcttcaggaaattcaaatgtctcactcactaccccgtcgttcaagaaagaaaagcgctttacggataccaattcagtgatccatccaagctctaggagcaatgtaggtgaggtgaaggctaaccggtccaacaatgtgcctgacacaatgggagcccacttagctagttcttcacaaaaagagaatatagtttatagagaacccgcaccggtaagtaactcattaactctcctttttcttcatttagataatggacacttgcatgttta

SEQ ID NO: 155545 - DNA, 5715 bp, Arabidopsis thaliana landsberg
atggatggcaaccaaaatcgacagaatgggcctgcaaacattggtgctggagatgcaccacggggccacagtcagaggaaagccattgcacctcctgcgatccagaacaacaacttggagattaagagtggtctcatcttgatgattcaggggaacaaattccatggtctgccaatggaggatccactcgaccaccttgatgaatttgataggctctgcaacctaacaaaaatcaatggtgttattgaagacggattcaatctccgtttgtttccattctccttgggcggcaaagcacacatttgggagaagaatctgccctatgactcaatcaccacctgggatgattgcaagaaggcgtttctatcaaagttcttctccaacgccagaactgcaagactcagaaatgagatctctggctttttacagaaggctggtgaaagcttctatgaagcatgggagcgtttcaagggttacaccaaccaatgccctcatcatggctttactaaagcctctctgctcagcactctttatagaggagttctaccacgcatcagaatgcttctagatattgccaacaatgggaatttccagaacaaagatgttgaagaaggctgggaattggttgagaacttagctcaatcagatagtaattacaacgaggactgcgacaagaccgtcagaggcacagctgactcagatgacaaacacatgaaggagatcaaagcgctgaatgacaagctggacatgattcttcttagccagcataagcatgtgcacttccttgttgatgacgagcagtttcaagtccaagatggggagggaaatcagttagaagaagttagctacatcaacaatcaaggtggctacaaagggtacaacaactttaagactaacaaccccaacctctcttaccgcagcaccaacgttgctaatcctcatgatcaagtgtatcctccacaacaagaacaaggtcggaacaaaccttttgttccctacaaaggttttgttcccaagcagcaattcctggggaactaccagcaaccaccaccacctgggtttgcacctccgcaaaaccaaggtcctggtgctcctgatgctgaaatgaaacagatggtccaacaactgctacatggacaagcatttagctccatggaaattgctaagaagttatccgaattgcaccacaagctggactgcaactacaatgacctgaatgcaaaagtggagacgttgaattccaaagtcagatacttagaaggataatccgcatctacctctgctcccaaagttacaggacttccaagaaagtcaattcagaatcccaaggagtatgctaatgttcatgctatcaacataaggagtggaagtgagttatccactagagagagacccaagtcagtcactgaggacagtgcataccaagatggggaggatttcagtctcaataaagatcaagctgacaaacaactcgagctgccactcgaccagtcactcgagcagccactcgactagtcactcgagcagccactcgacctgtcactcgagctgtcactcgaccgaccttcccaacaacatcactagctgctttgaaacctgttactgtaaaaaacaaagaaaaagtcttcattcctcctccttacaagcccccacttccattttctggtcggcacaagaaagagttagaagataagtacagagttatgtttgtcaagaacatcaaagacttgatcatggagagaattcaagaggttcaaaaaacaacagttctgagccatgagtgcagtgccatcatacaggagaacgacgtcccagaaaagctaggagaccctggttcattcactctaccatgttccctaggttcattgactttcaataaatgcctttgtgacctaggagcatcagtaaatctcatgccactctcagtagctaagaggttgggtttcaacaagtataaatactgcaatatctccttgatcttggctgataggtctgttagactacctcatgggttattagaagatttgcctatcaagattggaaatgtggaggtgcctacagacttcgtagtgctaaacatggatgaagaaccaaaagatcccttgatattaggaaggccttttttggctacagctggagcaatcatagatgttaagcaaggaaagattgatcttaatctggggaagaatttggaaatgaagtttgatatcaatgatgctatgaagaagccgacaatagaagaacaaaccttcttagttaaggaagtggaacagttagctggtgaactgctagtggaacttgaagaagcaaataattcaaaaactgttttgaccaagagtggtaaaggtgggtatctccctagtgaaactttgagttttgagaagtcattagactcacacaaggcatcagttggctcagaggtttacaagggcttgatggggtcagacacaaaggttatgaaagctaatgaagtaagttcaacacatgctcgaccaactaattccaccaacaactcgaagaagcctccaacttgtcctgaaagctcatgctcgaccaaacaactcaaggcaagcactcagatgtcagatgattggttagaactcaaggagagatctaaatggcaagacaaagccatacaagagctaacacatattgtgaaagagctaaaggatcaaatcaaggagctcaatggaaaagccaaccaagtaccactcaacatcaaggacgcccctgacgatggagccactatacttgtcagcaaagaaggatgtgaattcacgttggaatggtctagaggagaagactatcttgataaaaaagaagcttactgtgaggacatggccactgagtacccaattgcagacctgtcaagaaaccctaatgagtatgatgatcactctactaaagaaggagaggagacctcatttcctctctacaacccaccctaagcctaatgagtatgagaagtcaagcttagagacttaaaacaagctcacttgggagcaaatcccatgtctatctttgtacatatctttatttttccttgttgttttttatgcatttggttagtgttttcaggagataagtataaagagctgagtgaagtggattctggctctgagagtacaacactatactcgaccacagagcaatgaaggatactcgaccatgttttagcttatccacgccaggagatcactcgactgcggtgctgactgcagcagaagaatggaggtcgagtatactcatggcggtgctggccgccatagaggcactgaggtcgagtacccacatgctggagctgagacagaacagggcggttcgtgtatggcctgggagcaatcacaggcagccattgacgagcaactacgttcattcttcgattgaggtacgcgcctcacttcaccattgtattatatcatctgttgtgatttgtttcttcatttcgtttctgtgattggatttgtcatgagtactctcttccaagtttattcgcacagtggactgtgtgatttaagtttgggggtgggctcaggaagtgtgtgttgcattgtatatatttttgagtctgcattcatctaagacatagaaaaaccaaaaaaattgaaaaatttcagaaaatgatttcacaaaaaaaaaaaaagagtgttcatgtagttgcattacatttaggatcgagtctagagtgtttcatttaggattgttgcatatgcataggggataatgatgagatagccttgtaagcattttgattcaccggataaactcagtgccctcgttgctagttgtctgttgcgtagtcaatgaatttgaaataaaactgaaccatgcctagattgctctactcgaccacactgtcatgatctgataccattccctatcaatttgaacctgaatctgatctttaattatcatgtctgcatcaaatttgaactcatggataccctaaaatacttggattttcttattcattttgatcactcttgttaatccaagtagctgactctccttattagagcagttaacccaaacccaaacctagactttctttcaagccctatatcacttgtgagtgtttgtgaggtcttattccgattaagcttggtagaaagtgttaggttcgtaacgacagagatagtgtctcatgtagttctagttcgcatttttcggactagataggactaggtgggtgcttatactttgggttgggatgtgtttaaaagaaaaaaaaaagggattgattcattgatgagaaaaggtaaaggactctaggtgaagtaagctaaagaagcagaaaaagtctagtaaaggttttgggatttgtaaagaaaagaaagagttcttgttagctattggagatgggcaaaagcccttggttttaaaatgttaaaaacaggaaccttagttgttaaagaaatcctaatccgctagatgtatcaaagtgttgagaaagcttctcctagagttaagagaaaagaaaagaatgattagaaaaagggcttaaaagattcatgaatgcaaagggtagagtttagttcttgtattgggattggagatgggattaccattagagcttcatttgatgtactctgggtagatgggatcttatctctctatgcatagcttgggacttacctttagcattctactaaagcttaatcattttttgagagattccctgttactgaagcctattctgtaagggaccatctttgtctcttgaccttttaccttagccaaatgagttcattgatgatgcattgcttgattcacgttccagaactaatgaatgttaaagggattggtagatttgaaaacttgtgtggtcgagcatatgagtcagattgattgattgatgaggcatggctaacgtttttaagtagaattcgatcttccagcttagaactttcaacttggacattgatttcatctagtctatctggtgttttggctctgagtccccgctttcaaacctcacttccagcttgttcttgattgtttgcttgagggcaagcaaagactaagtttgggggagttgataagtgtgtattttgcatgttttgagcatccatttgtcatcattttagcatcatatcatcactgttttataccatttcacatcatttgtcatcactttgcatgtttaggatagttttgcatgcatgttgcatatttgcgttgatttcaggtgatttggagctgttgacgagctatctagaagaagcggacctgatcatgacaaaccactcgaccaagaggtcgagtaggagcttcaagatctcaagagaccactcgaccccaaggtcgagtataagacaccaccactctttcacatcactcgacccccaggtcgagtgtcttcatctccatctcttgacaaccactcgatttcatcactcgacccccaggtcgagtgacttcatctccatcttctaaccaccactcgactgcatactcgatccccaagtcgagtgactttatcccattgccagacctctactcgacctcatcactctacctggaagtcgagtatcaccatcaccaccactctactgcatactcgatgacaagcttcagagccttcttcattccgcactcaaccagacactcgagcacaaggaagaaaagaagactccagctattcactcgacctctcactcgaccacatggggtcgagtacagttcttaacccgtcccaatacttcgtcgttttga

SEQ ID NO: 155546 - DNA, 1701 bp, Arabidopsis thaliana landsberg
  unsure (1)..(1701): unsure at all n locations
gtgggcaaaaatatccaaaaacacaacacaagtgttgtcttctcgcgtctctcatcaacgagaaccagtttttttgttgatcctatcaacaatgacgaaaatagagcttcgagctttggggaacacagggcttaaggttagcgccgttggttttggtgcctctccgctcggaagtgtcttcggtccagtcgccgaagatgatgccgtcgccaccgtgcgcgaggctttccgtctnnnnnnnnnnnnnnnnnnnnnntccccgtaagcacttcttcttcttttatcttttctaaagattactgattcttcaatactaattgctgattctctgaatgttgagactaatttaatcgttaaagtcaaaaattttattggaaggtttcatatttacttttttatttggcatttattgtgtgtgtgaaggtattatggaggaacactgtctgagaaaatgcttggtaagggactaaaggctttgcaagtccctagaagtgactacattgtggctactaagtgtggtagatataaagaaggttttgatttcagtgctgagagagtaagaaagagtattgacgagagcttggagaggcttcagcttgattatgttgacatacttcattgccatgacattgagttcgggtctcttgatcaggtttaccactttatttctcttgggtttatcactttcgttgtttgtgtctcaaacctttactaagtgttcattcattgctgccagattgtgagtgaaacaattcctgctcttcagaaactgaaacaagaggggaagacccggttcattggtatcactggtcttccgttagatattttcacttatgttcttgatcgagtgcctccagggactgtcgatgtgatattgtcatactgtcattacggcgttaatgattcgacgttgctggatttactaccttacttgaagagcaaaggtgtgggtgtgataagtgcttctccattagcaatgggcctccttacagaacaaggtcctcctgaatggcaccctgcttcccctgagctcaaggtttggcattttacaaaagaatgtgattcttgttaacatttctgtagcacttgtattgatacaccgtataagagactagtgttaaaacgccattcgtgcagcattctctcgagcataggcaggttaaattctatagatgctatacttctgagactgacaatctttgtttcttaactcgtacaatcattgtgattagtcttcataggcaagattagagacacttcagatagttcccaatgggtattaacatgttagttggtctttgatgagtattcagtagaaaattaaacagattcacatggacgctggtatttagttgaattgatgtttggaagagtaggggatgctcttgagttagttttggtttgttctctgtttgatattttgatttagtgagaagtaaacgaagatactgacttcttaacaaattgttctcaaatatgaaagtcataacccgttgctgcttttattgtcttatgtagtctgcaagcaaagccgcagttgctcactgcaaatcaaagggcaagaagatcacaaagttagctctgcaatacagtttagcaaacaaggagatttcgtcggtgttggttgggatgagctctgtctcacaggatattcaagcttggtatttccttgtcaagtcccaaattatgtggaagtggagt

SEQ ID NO: 155547 - DNA, 882 bp, Arabidopsis thaliana landsberg
agaaaaaaaagctagagaagtatctcgatctcttcttctgttagattctgctttcctttgagatttgctagtgtaatcgtaacctccgaagacccaagatggctcgtaatgaagagaaagcacagtcgatgctcaacagattcatcacccagagagaatctgagaagaagaagcccaaagagcgtcgtccttacctcgcatcagaatgtagagatctagctgaagcagacaaatggagacagcaaattttaagagagatcggtagcaaagtagctgagattcagaacgaaggattaggagagcacagacttcgagatctaaacgatgagattaacaagcttctcagggagagatatcattgggagcggcgaatcgttgagctaggtggtcacaattactcgaaacattcggcgaagatgacggatctagaaggtaacataatcgatgtacctaaccctagtggtcgtggtcctggttatcgttacttcggagctgctaagaaacttcctggtgttagagagctttttgagaagcctcctgagctgaggaagcgtaaaactaggtatgatatatataaaaggattgatgctagctattatgggtatagagatgatgaagatggtattttggagaagttggagaggaaatctgaaggagggatgaggaaaagatcggtggaggagtggcggagattagatgaggttaggaaggaagctaggaaaggtgctagtgaggttgtgagtgttggagctgcagctgctgcggcgagggaagtgttgtttaagtagcaggaggatgttgttgaggaggggaggatggacgggaaaaagaggaggagaaagagagggaatttgtggttcatgttcggttgcctgatgaaaa

SEQ ID NO: 155548 - DNA, 1664 bp, Arabidopsis thaliana landsberg
  unsure (1)..(1664): unsure at all n locations
gcgtggccttggtaacaaagctccttggccgcattctctatttcaatccggagtcagcgaagtccggggtcaggggcccctcatgttgcggacgctgtcaactgtgtggccctttgtggaaccctttctggtcaactctttttcggttggctcggtgacaaactcggacggaaaaaagtgtacggtcttactttggtcatgatgatcttgtgctctgtcgcttctggcctctcttttggccgccaagccaagggtgtcatgaccaccctttgcttcttcaggtaaaattttcatcgaattacaatattatatatacacatgataaaccaataatctcataacgaatgcaaattttaaaagttagtcacgcttcgaactgataggtattttttcttgaagaatttttttttaatatataaacaattatgtaggttttggctgggatttggtattggaggtgactacccactttctgccaccatcatgtcagaatacgcaaacaagaagacccgtggggctttcatcgcagctgtcttcgccatgcaaggtgtcggtatcttggctggaggtttcgtggcactcgcagtatcttctatattcgacaaaaagttcccagctccaacatatgcagtaaacagggccctctcaacgcctcctcaagttgattacatttggcgaatcatcgtcatgtttggtgctttacccgcagctttgacttactactggcgtatgaagatgcctgaaactgcccgttacaccgctttggttgccaagaacatcaaacaagccacagccgacatgtccaaggtcttacaaacagatctcgagcttgaggaaagggtggaggatgacgtcaaagaccccagacaaaactatggcttgttctccaaggaattccttagacgtcatggacttcatctccttggaactacctccacttggtttttgcttgacattgccttctacagccaaaacttnnnnnnnnnnnnnnnnnnnnnnnnnatcggatggatcccaaaggcagccaccatgaacgccacccatgaagttttcaggattgctagggctcaaactcttatcgccctttgcagtactgtcccaggctactggttcacagttgcgtttattgatatcattggaagatttgtgatccagctaatgggatttttcatgatgaccgtgtttatgtttgccattgcattcccttacaaccactggatccaaccagacaaccgcattggattcgtgattatgtactctctcactttcttctttgccaattttggtccaaatgcaaccacttttattgtccctgctgagatttttccggccaggctaaggtcaacatgtcatggaatatcagctgcggctggtaaggctggagccatcattggagccttcgggttcctatatgcggctcaatctcaagacaaggctaaggtggatgcaggatacccaccaggtatcggagttaagaactcattgatcgtgcttggtgttcttaacttcatcggtatgctcttcaccttccttgtcccacgagcccaagggcaagtccctcgaagaactctctggtgaagctgaagttagccatgacgagaaataatttactttgtgatcaaatgtggagttgtttgtggtttgtttgatttttttgtttcttt

SEQ ID NO: 155549 - DNA, 3515 bp, Arabidopsis thaliana landsberg
cacagatatgatcgaggatatcatggaggttttcatggatgatttttcagtttatggatcatcatttgagaattgtttagagaatctctacaaagtgttagcaagatttgaggagaaacatctagttttgaattgggagaaatgtcaattcattgtaccggatggaatagttctaggacacatgatttctgagcatggtatagaagttgatagagttaagattgaggtcatgacgagtcttcaagcgctagataatgtcaaagcagtgaggagtttccttggacatgctggtttttataggagattcatcaaagacttcagcagaatcgtaagaccattgactgctttactctgtaaaggagtcaaattcgagtttacacaggagtgtcatgatgcatttcagaagataaaacaggccttgatcagtgcaccaattgttcagccaccaaattgggatttaccttttgaggtaatgtgtgatgcaagtgattttgcagttggagctattctaggacagaggaaagataagaagcttcatgcaatctactatacaagtagaactcttgatgatgttcaaaggaattatgcaactacagagaaagagttgttagctgtggtgttcgcgtccgagaaattcagatcttatcttgttggattcaaggttattgttcaaacagatcatcatgctgccttgaagtaattgatgcaaaagaaggatgctaagccaagacttttgagatggattttgcttcttcagaaatttgacatcgaggttagagataagaaaggagttgagaatggtgtagcagatcatttatcacgcattatgatcgatgatgatgtccctataaacgatttcttgcctgaaaagaacatatacatgattgatacagctgaagaagatgactacaaacgtgataggttgcagaatcgagcttcagtgtcgattgacactcccattatgtcgatcgacactcacatttcagaggaagtagacattcgaagttgtgcgatggtgtcgatcgacaccactgcacctgtcgatcgacacccttctagatcgacaagaaattggtcaccaattgagaattgcactgtcacaacggtcgagaaggactatccatggtatgctaacagtgttaactacctagttatagatgtggaacctgataatttcacagattacaacaagaagagattcctaagagagattaggcgatattattgggatgaaccttatctctataagcattgttctgatggagtttataggagatgcattgaagcaacccacgtacctgatactatcacattgtcacagctctaactatgatggtcattttgcaaccttcaagacagtatccaaagttcttcaagcaggcttttggtggcttacaatgtttcgggatgctcagaagttcatatcgcaatgtgacccgtgtcagagaaggggaaagatcagcaagcgtaatgagatgcctcagaaatttatcctcgaagtcgaagtcttcgattgttggggtatagatttcatgggacccttcccaccttccaacaagaatctctacatcctagtagctgtggattatgtccccaaatgggtagaagttatagctagtctgaagaacaattcagcggttgtcatgaaactctccaactctatcatcttcccccattttggagtgccatgcatagtcattagtgacggaggtaagcatttcattaacaagattcttgcaaaattgcttcttcagtatggagttcagcatccagtggctactccctaccatccacaaacaagcggtcaagttgaagtttccaacagacagatcaaagagattgttgagaaaacagtgggtaaagcgaaaaaggagtggtcttacaagttcgatgatgtactgtgggcttataggacaactttcaaaactccgcttgggaccacaccttatcatcttctatatggtaaagcttgtcatcttccagtggaattagagcacaaagcagcttggacagtcaagatgatgaattttgacatcaaatcagctggagaaaggagacttattcagttgaatgagctcgatgagatacgaattcatgcctatgataactcgaagctctacaaggaacatattaaagcttaccccgacaaaaagatcctcactcggacctttgagcctaatgactaggtacttctttatgattctaggttgacaatatttcctggaaaattgtcttctcgttggtcaggtccctacacagtccactcggttaggccatatggaacagttattttcaaaaacaacaatggaaaaccatttgccgtgaatggacagagagtcaaactttactggcatgaagccaagattccagtagaaaagcctttggatctttaggacccacctgttgattaagcaactgcagagtcaagctattgaatataaacaagcgcttagtgggaggcaacccactggtaagtatttgttctttttattcatttcattcatttgattcttaacttaagatttttattcagattttttttttttaaaaaaaaaaaaaaaagaagaagagagtgtcgaccaaaaacgacagagaggttcagcttcaggatctgcgcctacaaagaccgaggacaagttcctcgttcgctcttccatatcagctgccttctcctccacccatcccgatggagccacaagtctttcagcagtacgtcgtcgacagtttcaagagcgtctggaacgtcatagctacactttctcgctgcggttttgttgctcgcactcgtcgtcgtcgtcgctctcccgcacccaactccggctcagagcatgaggactagccatcctccctatcttgctttgttttctgactttgtttttgctttatttcagactattggttatttggtttgaaacttgttgcacttattttcctatgctttgttggacctgctgataggtgttttagtgattcaacagttgtaactggaggatccatgtgaaaacactaaccaaggctctacaacaatgagctgcaattcgaaagctaggcaaaacgaccagagtgtcgatcgacacacccatggtatcgatcgacaccactctcaggtggcaactcacgtttctctaacttttaacttttgattatttttctttcgattcctctagcttaataactctggggacagtgttatctaagtctgggggagtcagttactaactttatcttttcttttcgtatgagtcagttgtgtcattctaacttagatagtcgtttattgagtcaaaacttttgtctgaaattatgatctatctctcgagtttattgcctgaattgtttaagtattgcagattcaaatcaatccgactaatgaaaaatccagaaggccaatcaacaaacttaaggacatccattcctaacataatccacaaaggctggagctaatctcattgctcttccttttacctcatcaaaatggttagtgctcataggacttgactccttattcatacctg

SEQ ID NO: 155550 - DNA, 5454 bp, Arabidopsis thaliana landsberg
ctctatcatggtatcagagcattttttgcgtttttccagttgatttcatcttcaatcttcaattcttactcagtttcttcgattattcacttctctttacatcgattgttcttccgcgcgatcgattttgtgaaaatagtgaacaaaggtgggaaaatgaagaatctcagtgatactcctgacgatggtggttatgttgctcgatctactcgtaacttgatgattgctgaagatcctgaagttgcaagagcgcaacaacaactcaatcgaagattcgaaacttctgaggtccgtggatcgatgttgaagaacactgactctttcgacaatcaattggttctccattcataagatcatccaggtttaacgattgtatctcatattcttgatggaactaattacaacagttggtcgattgtgatgaaaattagcttagatgcaaagaacaagctaggcttagttgatggatcgttgttgagaccttttgaggatgatttgagtttccgcatatggagtagatgcaatagtatggtgaaatcatggattcttaatgtcgtgaacaaggagatctatgatagcatattgtattatcaggatgctatggaaatgtgggatgatctattcactaggttcaaggttactaatctgccaaggaagtatcaacttgaacaggctgttatgaccctcaagcagggagatctagatctgtcagcatacttcattaagaagaaaacattgtgggaacaattgtcaaacacaaggattcgtactgtgaagaaatgtgattatgatcaggttaaagaacttcttgaggaagcagagacaagtcgtgtgattcagtttttgatgggattgaatgataatttcaataacattcgtggttagatattgaatatgaaaccaagacctggattgaatgagatctataatatgctagatcaagatgagagtcaaagaattgttggatattcaagaccggtggtgtctactccttcaccctttcaagctcaggcaattctcactgaacaaaacaatattctgatggcacaagggaattcacagaaacctaagtgtctcattgctttcgtgttggtcataatatggacaaatgttataaagtacatggttatcctcctggtcatccaagggctaagaagaataattatgtgggcagtacaaacatgaccagctcagattcagtgttgcctcagactgattctttggtatatcagaaagagaatttgtctgaagagaagaatgcagacatgtcaccagatcaacttcaacaaatgatttcttatctaagttccaagctccggtcaaatactgtttttccatctcctgataaggctatagcctcgttttcaactcctgtgccatctatctcacagataactggtacattcctttctctttatgacttctcttattatgacatgttgacttcatctatacctccagaaactgagttgtctcatagagcttgggtaatagattcaggggctagtcatcacgtcacacatgatagggagatttatgttgattacaaagccttagatagaacatatgtccggttacctaatggccaaacagtgaaaattgagggtgctggttatattcaacttactgatgctttgtctttacataatgtgttgcatatccctgattttaaatttaatttgttaagtgtgagtgttgtgactaaaaatttgaaatctaaagtcagtttcacttctgatgcttgtaatattcaggcgcgttactcaggagttaatgattgggcaaggtagttaagttgcaaatctttatgtcctgaatattgataagtctcttagtcatatttctgagtcttctttaaaaggtatgtctgtttgtgctagtgttcatgttgagccttctgtctggcataatcgtttaggacatccatctttgaataaaattgatacactttttgaaatcctattgttgtctaaatagaagcttactaaaacacctcatcattgtcatgtttgtcatcttgctaaacagaaacatttaccctttaaattgtcatttcatatgcgaactaaaccgttgaattggttcatattgatacatggggtcctttttctgtgcctactgtcgatggttttagatatttcttgacaattgttgatgattttagtagagctacatggatttatatgcttaaacagaaatcttatgtcttacatgtttttcctggctttattaaacttgttgaaactcaatacaatactaaagtttgttcggttaggtcagataatgctaatgaattgaaatttgcatctttatatctggaaaaaggaattaaaagttttcattcttgtcatgaaacacctgaacaaaactctattgtagaaagaaagcatcagcatttgttgaatgtagctagggcactcatgtttcaatctattcttcctttagcatattggagtgattgcatattaacatctgtcttcctgataaatagaattccatcaaaagttttgaacaatttaactccttatgagatgttaacaaagaaagcacctgattactcttttctaaaatcgtttggttgcttgtgttatgtgtctactttacagaaagataggcataagttcagtcctagagcagataaatgtgtctttttaggctactcatctggatataaaggttacaaagttttacatttagactcgaacattgtatctgtctctaggaatgtcattttccatgaaaaagattttccattcaaaactgcaacacattccatccctgcatctgatatatttgataaatgtgttcttcctgcttctactcctgttgacattgattcgccatctcacattcatcatgatgcatctgacattcatacacctgcattacacacaacaccacactctagtgtcacagatcattcacaggaagctgtaacttcagacacgaccacagtttcattgcctacagtcagaccaaagcgaacttctaaagctccaggctacttatgtgactatcactgtgctctcatacaaacatcatcaccaccagacaaggtcacaactactccttatcatatttcctcttttctttcatatgaccaattttcaccagactatcaatccttcatatgcaatatttcgatagagacagccccgaatttttttaagcaagctattctctttaagaaaggctctcttccatgggtgtggaacttgggtctatggaacttaacaaaacatggagtgttgtttctttacctcagggtaagaatgtagtaggctgcaaatgagtttttactattaagtatgctgatggctctatagaaagatataaggccagattagtagcaaaggggtttacacaacaagaagggattgactattttgatactttctctcctgtggcaaaacttgcttgacattgactcaaatggatgtaactaatgcgttcttacatggtgttttagatgaagaagtatgcatgagttaaactcggggatatacaccagccaaccaaggaatgttacctcctaatgcagtctatcgcctacataagtccttatatggattgaagcaagcttcacgccaattgtaccattgtttctctatggtggtctttaaagctggtttccaacaatctccagctaacaatactttgtttgtcaaagtaactggtacatcattcattgcattacttgtgtatgttgatgatatcatgattgcttcaaattgtgatgtggagttgcagaagttaaagacagcattacatcaagttttcaagataaaggatatgggtgcaccaaagttttttcttggattggagatagcaaggaataccacaagtatctctatttgccaaagaaagtatgctttagatatacttgttactactagaatgctttcttgcaaatcatcttctgtactaatggatccattggttcatcttactaaagagagtggtgttcgactgactgatgtgaggccttatagggaaattattggtcgtcttctctagttaactatcacaagacctgatattacgtttgcagtcaataacttgagccagtttctttcgtgtcctactaatttacacatggaggcagcatatggagttcttagatatctcaagaacaattcgggacaaggtttgtcttatgttgcgattcaaaaccatgccttaatgcttttgttgatgcggattggggaacttgtacagactctaggcgatctgttactggtttatgtgaaacttgtatagactctagactctaggcatgctgatatattgactaaggcgctccaaccaggaccattttattcaatcaaaaatggcatgtctatttcaagcctcaatcctgcgcattaagagtcttgaagggcaggggggggggggcagggtgtattagatatgtgtatatagtataattgagtgtatatagtatagttggcatttacatgtgcatattcatacttgtatatatagttggttgtacacatactttacaattaatgagaatcacaagttatttaggtgaatcttaataggtttattccaaaaacgggccatgttgactcgttaaggcttcttcgtctctgttcatggctcttgacttgtacgagctcgattcttctccgtcggatcatctgagaatgacattttcgttaacttggaccgcaaaaaagaagattctttagttaacttcttcctcgagtagaagctctttggatcagtagtattactagtatagtttattttcttgtggattgtttgtttgtgtttatgtttgcacatcttaattgttgtttgactaagttgtgtaatttgttaacaattttaggtatgtgacatgcatgttatatacatgtaaacaacatgtgaataccaaatgctgatttggtttgattcgagcattttttacttcaattagtctggtgatggttgacttgatgattcagtcgaagatgcaacctctgaagttgttcttgtactaagtcaaagtacctcacgaagtagtttaggagaacagagcaacgtgaagcaaacatatggaaattagcaagtcggtctaagacggttagctatggatactagaagcttggagaagactctagaagactgaagagtttcctttacgtgagaggaaaaggaaacatgcagacaaaggataatttcgtattccataaagaaaaagaaaattgtctattcctattagtgttagaataaatagggtgcttaggcttgagagaagcctcaacacaaacaaaagagcataatgcttaagggtgctaaggggtttgtcttgagaggttcttggattgtgtaggaatccatgaacgtgagagattagataattgtttaactgaaacttgtaacctcactaaacatattttttattaaagaataaattagttttgaaaaagcccttgtccgagtttgtgactcagttcttga

SEQ ID NO: 155551 - DNA, 716 bp, Arabidopsis thaliana landsberg
  unsure (1)..(716): unsure at all n locations
ttccacacctctgatagacggccgcctcaatctcacagcgatttgagaagccggtcgccaattttccgcattaatacaactcctcaacacaactcaagtcgggtttcaggtaagtgtacaactcaatagctctgaccaagggatgactatatttgccccaacagataacgcattcaacaagcttaaacccggaaccctaaacagtctgacatatcaacaacaaatccagctcatgctctaccatatcattccaaaatactactctctaagcgatcttctcttagcaagtaatcccgttagaactcaggctacgggacaagacggaggtgtttttgggttaaatttaacaggacaagcacaaagcaaccaagtgaatgtttccaccggtgttgttgagactcggatcaataatgcattaaggcaacagtttcctctagcagtttacgtggtggacagtgtgnnnnnnnnnnnnnnnnnnnnnnnnnnnaagaccactcccaccggagctcctgccccgaaatcctcaacttcatcgtctgatgccgattctccagctgctgatgatgagcacaaatctgccggatcaagcgtgaagaggacaagtctagggattgttgttagctttgcattgttttgttgctcggttatatatattgcttgaacctttaactaaaagcgagggaaacgttcccgaaaaacaaacatttatttgcatg

SEQ ID NO: 155552 - DNA, 1402 bp, Arabidopsis thaliana landsberg
attgaaggtttaaaccagagtatttgggttgatttgcctccagagttacttcttgatataatccaaaggattgagtctgaacagagtttatggccggggaggagagatgttgttgcttgtgcttcggtttgtaagtcatggagggagatgactaaagaagttgttaaagttcctgagctctctggtttgatcacgtttccgatttctttaagacaggtttgttactcttgaccagtttgtcttataatcgattatcattgtgtctaaaacattggttttgtttggcttagcctggacctagagatgctccaattcaatgctttattaaacgtgaaagagctacggggatataccgtctctatctcggtttaagccctggttagtttactatctatcagcttcttgtgaatagagtttggagtgtatttcatatccctttcatctgtataaattgcagctctttccggtgacaagagtaagttgttgttatctgcaaagagagtcaggagagcgacgggtgcggagtttgttgtatcgttatcggggaatgacttctcgagaagtagtagtaattacataggaaaactgaggtaaagtctccttctttgttctatatgatcaccatgatgcccatctattataagtcttgttgtgtgttgtgtacagatcaaatttcttgggaacgaagttcacagtctacgaaaaccagacctcctctgtttaaccggaaactcccaccaacgatgcaagtgtctccatgggtatcgtcgtcatctagtagttacaacatagcttccatcttgtatgagctgaatgttctgagaaccagaggtccaagaagaatgcaatgtataatgcatagtatcccgatttcggctattcaagaaggcggtaaaatccagtcgccaatggagttcacaaaccaaggaaagaagaagaagaagccgttgatggatttctgctcagggaacctgggaggagaatccgttataaaagaaccattagtcctgaaaaacaagtcaccgagatggcacgaacagcttcaatgctggtgtctaaacttcaaaggtcgagtcacagtcgcctcggtgaaaaacttccagctagtggcagctgctgcagaagcagggaagaacatgaacataccagaagaggaacaagatagagtgatattacagtttgggaagataggcaaagacattttcacaatggattatcgttatccgatctctgcattccaagcttttgccatttgtttaagcagcttcgacacgaagccagtctgcgaatgaagcaaaacatatcatatcaaattatattcttctatttgcatgcagtttgtgtggtttaatgtacatacttttccctcttggagcaatcaaacaatcagatcttttttttc

SEQ ID NO: 155553 - DNA, 5638 bp, Arabidopsis thaliana landsberg
  unsure (1)..(5638): unsure at all n locations
aatggtcacttcaatacacgttacccagctgatgctaccgctctaatagagaatctcgcttgtagcaacagtactaagaacgctgacttcgagaggaagaagattgtaggagctatttcaggcaatcagatggcagaggtgaatgctaagctggattcggttcacaacttgcttacagggaagaagcatgtccactttgcagctgaggatgagactattgagcctgagactgaatctaaagagggagtctactggaagtttgggcaaccacatggcaacaagtttacagggaaccagatttcctccaactacactccaatgcctgctttccagaagacctttcctaagtgtaacttccagaggacctatggtaattcagcttaccaagcccccctctcccccccctccacccctcatcagagacaataatggaatctatgcttgagtagattttagagagccaaacaaagctcgttatggagtttaatggcaagtttgatgttgtctacacagatctcaatgggaagatcgacaatctgagctctcacttgaagaagctggaagagacaagagggctttcttcctggtaatcatgatgctaacccaaggaagagctgtaatgccatcttgattagagaaggagatgatgtatgggaagaattagacactgaagacgagttggagctcgcagtttcaaagatggtgtcaacccgacaccttccagtgtcgatcaacaccctatgggacgctcttctcggagacgattccttacgatggtgtcgatcgatacccctctactgtcgatcgatactggatccggactgcaccttgcgaggtgcaaatacctatgcatcccgagtttgtctacactcctcctatcccttatccgaggaggcgttgttctaagcagaagcttcatgctgccaagtgcacagccataatggagaagatcctccatactcttcctaaggatgtttcagagacatcttccgcctcactctacaggtatgtcaagcgacttgttgacattggaattagttcagatgaagctaagctgcttaccagagatatcagtgcaatcatgctgcctaaggccaagaaggagaaggcatagagagtagacatagctgagtacatccgcaccattactcctggttagacaattgagaagattccagatccaggtagctttgttcttgattgctctatctccacaagcagattcagctgctctttgtgtgatctaggatcaagcatcaacctcatgcccaagtctgttgctgagagactaggcatgactcactacaggcctactagcatcactcatcttttcgcggatcgttccaagcgaagccctgaaggaatccttgaagatgttcatgttaaggttggtaactccataatccctgctgatttcgtggtcctggactatgagaaggaacccaaggatccccttatccttggaagagcatccttagttacagctggtgctaggtttgatgtgaagagagggagcatctctctcaaggtttgtaattcagagatggagtttggcatggatggttcagagcttactaagcctatcagttgcattgcctccagcacagacacacctccctagattgatcagaatcccaccacagagccacacacaacgctccaaacccgttcagctcgccaatgagagttgcagaggaacggtgtcgatcgacaccactgcacctgtcgatcgacactcttctgaatcaatgagaaatgggtcaccaactgagaattgcgccgtcacagcggtcgagaaagattacccatggtatgctgatattgttaattacctagctgcagatgtggaacctgataagttcacagattacaacaaaaagagattccttagagagattaggcgatattattgggatgaaccttatttctataagcattgttctgatggagtttaaaagagatgcattgctgcaacagaggttcctgatatactatcacattgtcacagctctagctatggtggtcattttgcaactttcaagacagtatccaaagttcttcaagcaggcttttggtggtctacaatgtttcgggatgctcagaagttcatatcacaatgtgacccttgtcagagaaggggaaagatcagcaagcgtaatgagaagcctcataaatttatactcgaagtcgaagtcttcgattgttggggtatagatttcatgggaccgttcccgtcttccaacaaaaatctctacatcctagtagctgtggattatgtctccaaatgggtagaagctatagctagtccgaagaacgattcagcggttgtcatgaaactcttcaagtctatcatcttcccttgttttggagtgccacgcatagttattagtgacggaggtaagcatttcattaacaagattcttgcgaaattgcttctacattatggagttaagcatcgggttgctactccctaccatccacaaacgagcggccaagttgaagtttccaacatgcaaatcaaagaaattcttgagaaaacagtgggtaaggcgaaaaaggagtggtcctacaagttagatgatgcgctgtgggcttacatgacagctttcaaaactccgcttggtaccacaccttttcattttatatatggtaaagcttgtcatcttccagtgtaataagagcacaaagcagcttggnnnnnnnnnnnnnnnnnnnnnnncatcaaatcggctggagaaaggagacttattcagttgaatgagcttgttgtaatacgaattcacgcctatgacaactcgaagctctacaaagaacgcacaaaagcttaccacgacaagaagatcctcactcggacctttgagcctaatgaccaggtacttctttatgactctagattgacaatatttcctggaaaattgtcttctcgttggacaggtccctacacagtccactcggttaggccatatgaaacagtcattctcaaaaacaacaatggaaaaccatttgccgtgaatggacaaagagtcaaacactactaggctgaagccgagattccagtagaaaagcctttggatcttcaagacccacctgttgactgagcaattgtagagtcaagctattgactgtaaacaagcgcttagtgggaggcaacccactggtaagtatttctcttttttattatttcattcatttgattttaaacttaggatttttgattgtataggatttttgattgtataggatttttgatttagatttagaaaaaaaaggacgcgtcgaccaaacgctatggtgtcgatcgacaccctcattttccaggtaagtcgacttaacctaaaaatttcatcttcttcatttcactttcttccaaaccaccgaaatcactcttttctctctagattcttcgattcttcaccgtttcttgtgattttagctctaatctcattagaatttcatcctctttcttccccaagtatctatttcatcgatctgcaacatgactgggcagaaaaagaaggcaaggaagagcgttcctccaccttcctcctccgccgctgctccaccgccgccggtctccgcccttcccaaccgcaactacctgctgcagcgcctcaacctcttatctattgatttccatggccaaagctactaacagaaagaattccttctcaaagagtttgggagaaggatgtcaacaaagaattcactaaaggtgactatatcaatcgccctttttctccagattgggattattatgatacttttttctataatgcctagatgagtgtagaaattttgcctactcggtttgcggattttggtttaatgcagcgtttgcagatagagaaatctgttttaggactgctagatgatataggtttgggaaccatctgttgtaggcagtacgatttgtatcctgagctagttagacaattcatggtttttgttagggtctactatgtgaatgacaggaaacgcaatgctcaggaaggagctcttatctacttcattcgcggtgtcagatagagtctaccaccgagagatttgtgtgacatctatggttttgattttgatctcactagagtttccctgcctggacagtttaaggatgctcaggttatctggtgcaggtttggtaatggaatttttgattccaaggacgcagttcactcagagattcgtcacccggtttttgcgatatttggttaggctgattagaagcacactgttgtgcaagatgaagcctggcaagatgagactttctgtgctgttgttgctctatcatgctgttcgtgacttctttctagacagccttggatttgagcaggttgaccgtaatgtcaactttggggctgtgttcgctcatcacttggtttctctcaagaccaagccctttataggtagaggacagaaatatgagagagttggcagtcttctcactcccatatttcatcactttcacatcaactttgagggagaggaggtcaacaccacgatattcactatggatgaggcttaccggaagaactctcactggctgaaaggcaacttaatgtggtgcttcagagatgatacatggcaccatatgattcagttaccttgccctgcacttacagaattacaggcgagcatgaggagcttggttttcatcccgatccttcccttctgcattccgcgccacgcaccaggagacatagaggttcagcttcaggatccgcacctacacagactaaggatgagttcattgaactgctgggggtactcgaggtggctcttcctcttcagctctcccatatcagctgccttctcctcctcctatcccgatggagccacatgtctttcagaagtacgtcgtcgacagcttcaagagcgtctggaacgccatagctacactatctcgctgcggttgtgttgctcccactcgtcgccgtcgtcactctcccgcactcggagcatgaagattagccatcctccctatcttgctttgttttctaactttgtttttgttttatttcaacctatttgttatttgttttggaacttgttgcacttattttcttatgctttgttgaaactattgatgtgtgatttagtgatttaacagtctaactggaggatccatttgaaaacactaacccaagctctacaacattgagctgaattcgcaaagctgtgcaaacgaccagagtgtcgatcgacaccaccgtggtatcgatcgacaacactctcaggtggcaactcacgtttctctaacttttaacttttgactatttttctttcgattccctagcttaataactttggggaaaatgttattttagtttgggggagtcagttactaacttcatcttttcttttcttatgagtcagttgtgttattcttacttagatagttgttttattaagtcaaaacttttgtctgaaattatgatctatctctcgagtttattgtctggattgcttaagtactgtagattcaaatcaatccgactaatggaaaatccagaaagccaaccaacaaacttaaggacgtccattcccaacataatccacaaaggttggagggaatctcactgctcttccttttacctcatcaaaacggttagtgttcataggacttgactgtttgtttatacct

SEQ ID NO: 155554 - DNA, 1164 bp, Arabidopsis thaliana landsberg
  unsure (1)..(1164): unsure at all n locations
atggctgcatctaacggcgagaaaagcttgatcgtgagcttcggtgaaatgctcatcgatttcgtcccaaccgtctccggtgtatccctcgccgatgctcctggcttcatcaaagcccctggtggtgcacctgccaacgttgccatcgccatttcccgtcttggcggtcgtgccgctttcgttggaaaactcggtgacgacgagttcggtcacatgctcgccggaatcttgaaacagaacggtgtctctgctgaaggtatcaatttcgacaccggagccaggactgcacttgcgttcgtgacactaagatctgatggagaacgtgagttcatgttctaccggaaccctagtgccgatatgctcctccgtcccgacgagctcaatcttgatgtcatcagatctgtacgttatttttatttttaattaatatatgacacgtaggcaaattcttttttgggtccgtgtctcacatttaattagcgaggnaaaaannnaaaacccccnggtgggtngnctaccactccattaacgtannacggnttgttggtatacgtaacgtagatgtcaagttaggttaatgagtgctctgttttatttttgttttacataggcgaaagtgtttcactatggatcaataagtttgatagtggagccgtgtaggtcagctcatttgaaggccatggaagtggcgaaagaagcaggagctcttctttcctatgacccaaacctcagggagcctctgtggccatcaaaagaagaagccaaaacacagatcatgagcatttgggacaaagctgaagtgatcaaagtcagcgatgaagagcttatgttcttgactggatctgataaggttgatgatgagactgctttgtctctgtggcactctaatctgaaacttctcttggtcactctaggtgaaaagggttgtagttactacaccaaggtaatggttttcgaagagtttttctttcttgtggatttgactttaccattaatgttacttaagttgtgttcttgtatgtatatgattacagagcttccgtggatctgttgatcccttccatgtggatgcagtagatacaactggtgatggtccttcattccttggtgcattgctttgcaagaaaattgaaaaccgtgctgtgcttcaggtatataccaaat

SEQ ID NO: 155555 - DNA, 1351 bp, Arabidopsis thaliana landsberg
  unsure (1)..(1351): unsure at all n locations
ctctttcttccggtaccacctgccctaactattccttnncatcgaaccatccatggctcggcaatgcttaggtgactcaacaactatctccgctccgtccaccaccgtctcggtcccatcatcacccttcgcatcacttcccgccccgctatattcgtcgccgaccgttctcttgctcaccaggctctcgttttgaacggtgccgttttcgccgatcgtccaccggcggctccgatcagtaagattatttcaagtaaccaacataacatcagctcttgtttatatggagccacgtggcgtcttcttcgccggaatctcacttctgagattcttcacccctcgcgcgtgagaatcttactctcacgcgcggcgttgggttcttgagattctttttggtcgatttggtaaaaacagaggtgaagaaccgattgttgttgttgatcatcttcactatgcgatgtttgcgcttcttgttctcatgtgttttggagataagcttgatgagaagcaaatcaaacaagttgaatatgttcagagacgacagcttcttggcttctcgagattcaatattctcaatctctggcctaagtttactaaattgattttgcgaaagagatgggaagagtttttccagatgcggagagagcagcatgacgttttgcttccgttgattcgtgctcggagaaagattgttgaagagagaaagaagagatcatcagaggaagaagaagacaacaaagagtatgtacaatcatacgttgatactctgcttgagctggagcttccagatgagaagaggaagctgaacgaggatgagattgtgagtttgtgttcggagtttctcaacggtgggactgatacaacggccaccgcgttgcaatggatcatggcgaacttggtgaaaaccccggatattcagaagaggttatacgaggagatcaaaagcgtagttggggaagaagcaaaggaagtggaggaagaagacgcgcaaaagatgccgtatctaaaggcagtggtgatggagggtctccggagacatcctccgggacattttgtgctcccgcacagtgtcactgaggacactgtgttaggaggatacaaagtcccgaagaaggggacaattaattttatggtggcagagatagggagggatccaaaggtgtgggaggaaccaatggcgtttaagccagagaggtttatgggagaagaagaagcggatggacataaccggaagcagaggaataaagatgatgccgtttggagcgggaagaaggatatgtcccgggattgggctagcgatgctgcatcttgagtactatgtggcgaatatggtgagggagttttgagtgga

SEQ ID NO: 155556 - DNA, 1431 bp, Arabidopsis thaliana landsberg
caaaaaaaaaaaaaagattgaatggaagaagaaactaccgagaagattggaaggcaaagtcgcgattgtgacggcttcgacgcaagggattggtttcggaatcattgagcgtttcggtctcgaaggcgcttccgtagtcgtctcttcccgcaaacaggtttcaccatctctcactttcatcttccgaatttgaactaaaaggatcaaactgaagaatcgttttctagtgatgggatctttgtatttgtgcttcattaggtttcttttcgtaccgcgaattgttgataattctggatttgatttgttacagatgcaattatacaacaatcactgtgaagtgtatgatcgcaattttcaaagtttttaaaggaactttgctctttctgtttttttgtcgaccgatattaattagattaagctcaaaagagtcattcctaaggaattgaactttactcttattttcgtagatttgtgcctctttgttcttgaattgtagctttgcaatttttcttagactaaaagggttgaatttgattatatatgtgcaggcaaatgttgatgaggcagtagcaaaactcaaatccaaagggattgatgcatatggaatcgtctgtcatgtttccaatgctcaacatcgccgcaatcttgtcgaaaagacggttcaggtaacacatcctacgagcttttggttcaaagctcattgcaaagttgatcatgaacagctttacataaccaagaagttgttttttttttttaattgttgttgatttgttgtgtgctttaagctcttagtatctcacatttgcgcatctttgatttttacctaagagatgtctattggattcagaaatatgggaagatagatattgttgtctgtaacgctgctgccaatccatctacagacccaattttgtctagcaaagaagctgttcttgacaagctttgggaaatcaatgtcaaatcctctatacttctccttcaggtaaagcttccgtaagtgttagctttttgtttccatgacccgatagatcaatttttttttagatttgatttgactcctctatgtttattttatcaggatatggctcctcaccttgagaagggttcttctgttatcttcataacttctattgctggattttcaccacaaggagctatggctatgtatggtgtcactaaaactgctcttctcggactaactaaggtatgtgtatcattgtccccatctcatgattgaatagttatgatgatgatggttatgagattattcatcatgtgtttcaggcgcttgctgctgagatggcccccgatacacgtgtgaacgcagttgcacccggttttgtgcccacacactgtgcttctttcatcaccggtagctccgaagtggtaatgttataagattgaaactgttaaaactgaggttatgattgt
